United States Patent Application Publication US 2011/0183924 A1 - sequence listing, part 22

SEQ ID NO: 54146 - DNA, 2184 bp, Homo sapiens
ctgcatttggcgggatctgtgtctctcgctggtgctggcacaggaacttgggatccgtctcctctttcgcctcctgcaccttgggagccccgggctactctttcacagcccctgttgccctgtgatctgtaggtccttggggacgcatagttaaggtgccaggacatcctggaagctgggaaatgatatgtattcatttcctaccaccgtagtggaagagatactatccctatctttacaactgatagcatttccaacagtaagctgtgagattctgcttgaaatcacctctcaaacaaataaaaaacagacctgggagacatgctacactcattctgctgaggaaataggcatcatagctgggaaacggattcacaagacccaggctgttccctacatatgtttcctcctccgacatcagttcatcagtcaatcaagccatgtgagagtggaggccttgtattccctattattcttgggcactctactccaagtaggaaaaggccaggaggtcctgttaaaggatgcactcagagcccgggctccctaacatatgagagtgctaaccagcaggtgtagacttttcaggagtgaagaatgaggcaggcattccaaacctggaccttcatcaccttttgtttcatctcaagacaattctgagggactgttttggagcgtatctggaaggtgaaccttgaagaagagtgtgggctttgatgtgactcagttgagatctttcatggggaggcaggaattcaatgcccagaatctgggctggtgtctttgaggtcagtaggttgcgtctttgtatccaagtccattgttactaggttggaggctggagattctaaatggcttccagaccatctctctgattctctttgggagatggggcctgaaagacaatatcagtagttttgggaaattctagaaagtgtgcttggaaacgtgggaagagctcttgcctagtgcctaaatgctccatttgcagctctagccaagtagatacttggtaggtatagagccgggtttgcgtttatatcagcaaaacctatgtcagagttgaagaagtagtcaggaaaaagcgtcttggtcgcaggccggggaacatcttaaaagcaaacttctagcctgttgactcttggcaatgagtgttggatcctggctaaagtgccttgaatgcagcatgaggccaatccatgaatccaacttctcatggagaaatgttaatattttttcagtttgaatcaatcagggtgaaactaccatgctattggtttgcttactttttattatttcatgtaaaatctaagacaaaatacattaaatgcctattgacatatgtatttattcttcaccaggctgataatatctgcctaattttaaactttcttccattttgtaggtttcaacttattctattgtaagatactgttaaatctaatagaggcattgtcacttttacgtataattttattttatttcatatatttcctattggctttttacatttaaattatggagcacttcatcatataaaaaacttcaattatatttaaacagtaagtctttggattttttttgccttgtaatttccatattacataataatgagataaacattaatgttttcagggtactttaaattttagataattactcattgtattcatggtgaaatttgtttttactgcatgtgtggtttggaggactgttttcacttctgattcatctttactcttatctcatcagagctcatacctcttgtagttgggggattcgtttataattccataaatggggcaattcataataacataatacaatgagtttgaacgcaggacaggtcttcaagcatacacacatgggcctacatatgtacaacaataataatttataagttactgtttggatggaaagtaaaagtacagaaaatttgttaaaggaaattaaaatggagatcatgtctcataatctctgagcagacaaattagttaggtctcataagtgatctcaacctcgcttgatttgcaatacaacaaacttaaattatttcttgtagctgcatattgaaaaaagagaaatgaagctcaaccgtcagaagtagccacaaccttatataaatagaaactgttcaacaaggtaaacagacaacaaaaacaataaaaaaagttgtgctacccg

SEQ ID NO: 54147 - DNA, 2242 bp, Homo sapiens
ctgcatttggcgggatctgtgtctctcgctggtgctggcacaggaacttgggatccgtctcctctttcgcctcctgcaccttgggagccccgggctactctttcacagcccctgttgccctgtgatctgtaggtccttggggacgcatagttaaggtgccaggacatcctggaagctgggaaatgctgaatgctatccagtgaatatacgtgccctgtttgttgaatctactcatccttaaagatatgtattcatttcctaccaccgtagtggaagagatactatccctatctttacaactgatagcatttccaacagtaagctgtgagattctgcttgaaatcacctctcaaacaaataaaaaacagacctgggagacatgctacactcattctgctgaggaaataggcatcatagctgggaaacggattcacaagacccaggctgttccctacatatgtttcctcctccgacatcagttcatcagtcaatcaagccatgtgagagtggaggccttgtattccctattattcttgggcactctactccaagtaggaaaaggccaggaggtcctgttaaaggatgcactcagagcccgggctccctaacatatgagagtgctaaccagcaggtgtagacttttcaggagtgaagaatgaggcaggcattccaaacctggaccttcatcaccttttgtttcatctcaagacaattctgagggactgttttggagcgtatctggaaggtgaaccttgaagaagagtgtgggctttgatgtgactcagttgagatctttcatggggaggcaggaattcaatgcccagaatctgggctggtgtctttgaggtcagtaggttgcgtctttgtatccaagtccattgttactaggttggaggctggagattctaaatggcttccagaccatctctctgattctctttgggagatggggcctgaaagacaatatcagtagttttgggaaattctagaaagtgtgcttggaaacgtgggaagagctcttgcctagtgcctaaatgctccatttgcagctctagccaagtagatacttggtaggtatagagccgggtttgcgtttatatcagcaaaacctatgtcagagttgaagaagtagtcaggaaaaagcgtcttggtcgcaggccggggaacatcttaaaagcaaacttctagcctgttgactcttggcaatgagtgttggatcctggctaaagtgccttgaatgcagcatgaggccaatccatgaatccaacttctcatggagaaatgttaatattttttcagtttgaatcaatcagggtgaaactaccatgctattggtttgcttactttttattatttcatgtaaaatctaagacaaaatacattaaatgcctattgacatatgtatttattcttcaccaggctgataatatctgcctaattttaaactttcttccattttgtaggtttcaacttattctattgtaagatactgttaaatctaatagaggcattgtcacttttacgtataattttattttatttcatatatttcctattggctttttacatttaaattatggagcacttcatcatataaaaaacttcaattatatttaaacagtaagtctttggattttttttgccttgtaatttccatattacataataatgagataaacattaatgttttcagggtactttaaattttagataattactcattgtattcatggtgaaatttgtttttactgcatgtgtggtttggaggactgttttcacttctgattcatctttactcttatctcatcagagctcatacctcttgtagttgggggattcgtttataattccataaatggggcaattcataataacataatacaatgagtttgaacgcaggacaggtcttcaagcatacacacatgggcctacatatgtacaacaataataatttataagttactgtttggatggaaagtaaaagtacagaaaatttgttaaaggaaattaaaatggagatcatgtctcataatctctgagcagacaaattagttaggtctcataagtgatctcaacctcgcttgatttgcaatacaacaaacttaaattatttcttgtagctgcatattgaaaaaagagaaatgaagctcaaccgtcagaagtagccacaaccttatataaatagaaactgttcaacaaggtaaacagacaacaaaaacaataaaaaaagttgtgctacccg

SEQ ID NO: 54148 - DNA, 6049 bp, Homo sapiens
  misc_feature (811)..(811): n is a, c, g, or t
ggagcagcctacaacttcacaaccagaaaccactacccctcaggggttgctttcagataaagatgacatgggaaggagaaatgctggcatagatttcggatccagaaaagcatcagcagcacagcccatacctgaaaacatggacaattccatggttagtgatccacaaccataccatgaagatgcagcttctggagctgagaagacagaagccagagcttctctctcactgatggtggaaagcctttctacaacccaagaggaggccattctctcagtagcagcagaggctcaggtgtttatgaatccttctcatatccagttagaagatcaagaagctttcagctttgatttacaaaaggcccaatccaaaatggagtcagcccaggatgttcaaactatctgcaaagaaaagccttctggaaatgttcaccagacctttacagcaagtgttttgggtatgacaagtactacagccaaaggagatgtttatgccaagactctgcctcccagaagcctttttcagtcctcaaggaagcctgatgctgaagaagtctcctcagattcagagaatattcctgaggagggggatggttctgaagaactggctcatggtcactcttcccagtccttggggaagtttgaagatgaacaagaagtcttctcagaatcaaaaagttttgttgaggacttgagcagctctgaggaggagctggacctcagatgcctctcccaggctttagaggagcctgaagatgcagaagtcttcacagaatcaagcagttatgttgaaaagtacaacacttctgangattgcagcagctcagaggaagacctgcctctcagacaccctgctcaggccttgggaaagcccaaaaaccaacaagaagtctcctctgcttcaaataatactcctgaagagcagaatgattttatgcagcagctgccttccagatgcccttctcagcccattatgaatcctactgttcagcaacaagtccccaccagttcagtgggcacttctataaaacagagcgattccgtggagccaatccctccaagacaccctttccagccatgggtgaaccctaaagtggagcaagaagtttcctcatctccaaagagcatggctgttgaagagagcatttctatgaagcctctgcctcctaaacttctttgccagcccttgatgaatcctaaagttcaacaaaacatgttctcaggttcagaggacattgctgttgagagagtcatttctgtggagccactactccccagatattctcctcagtccttgacagatcctcaaatccggcaaatctcagaaagcacagctgttgaggaaggcacttatgtggaaccgctgcctcccagatgcctttcccagccctcggagaggcctaagttcctggactcaatgagtacttctgcagaatggagcagtcctgtggcaccaacaccttccaaatacacttccccgccatgggtgacccctaaatttgaggaactgtatcaactctctgcacatccagaaagcactactgttgaagaggacatttctaaggagcagctgcttcccagacatctttcccagttgactgtgggaaataaagtccagcaactgtcctcaaatttcgagcgggctgctattgaggcagacatttctgggagtccattgcctccccaatatgctacccagttcttaaagaggtctaaagttcaggaaatgacctcacgactagagaaaatggctgttgaaggcacttctaacaaatcaccgattcccaggcgtccgacccagtcattcgtgaaatttatggcacagcaaatcttttcagagagctctgctcttaagaggggcagtgatgtggcacctctgcctcccaatcttccttccaaatctttatcaaagcctgaagtcaagcaccaagttttctcagattcagggagtgctaatcctaagggaggcatttcttcaaagatgctacctatgaagcaccctttacagtccttggggaggcctgaagacccacagaaagttttctcttattcagagagagctcctgggaagtgcagcagttttaaagagcagctgtctcccaggcagctttcccaggccttgaggaaacctgagtatgagcaaaaagtctcccctgtttctgccagttctcctaaagagtggaggaattctaaaaagcagctgcctcccaaacattcttcccaagcctcagataggtctaaattccagccacagatgtcatcaaagggcccagtgaatgtacctgtaaagcagagcagcggtgagaagcacctgccttcaagtagtcctttccagcaacaggttcattcaagttctgtgaatgctgctgctaggcgatctgtttttgagagcaattctgacaattggttcctaggaagagatgaagcttttgcaatcaaaaccaagaaattcagccaaggttccaaaaaccccataaagagcattccagcccctgctaccaaacctgggaagttcaccattgctcctgtcaggcaaacatccacttctgggggcatttactctaagaaagaagatcttgagagtggtgatggtaataataaccagcatgcaaacctatccaatcaggatgatgttgaaaagctttttggagttcgactgaaaagagcccctccctcgcagaagtataagagtgagaaacaagataacttcacccagcttgcttcagtgccctcgggcccaatttcatcctctgtaggcaggggacataaaatcagaagcacttcccaggggctcctggatgctgcagggaacctcaccaaaatatcttacgttgcagataagcaacagagcaggcccaaatctgaaagcatggccaagaagcaacctgcttgcaagaccccaggaaagcctgctggtcaacagtcagattatgctgtctcagagccggtttggataactatggcaaagcagaagcagaagagtttcaaggcccacatttctgtgaaagagctgaaaactaagagcaatgctggagccgatgctgagactaaggagcctaaatatgagggagctggctctgcaaatgaaaaccaacctaaaaagatgttcacttccagtgtccataaacaggagaagacagcacagatgaagccacctaagcctacaaaatcagttggatttgaagctcagaagatactgcaagttcctgccatggaaaaagaaaccaaacgatcttcaactctcccagccaagttccagaacccagttgagccaattgagcctgtctggttctcactggccaggaagaaagccaaagcatggagccacatggcagaaatcacgcaataaagagctcttgtgtggagcatcagcatttattttatttagttttttttttttttttttttttgagacagagtctcgctctgttacccagattggagtgcagtggcgcgatctccgctcactgcaagctccgcctcccgggttcacgccactctcccgcctcagtctcccgactagctgggactacaggcgcccgccatcacgcccggctaattttgttttcgtatttttagtagagacggggtttcaccatgttggccaggatggtcttgatctcctgacctcgtgatccgcccgcctcagcctcccaaaagctgggattacaggcgtgagccaccgcgcccggccaagcatcagcgttttaaatgataattgctaatagctgtattaattctatgtagtgatctttttactgtgaccacttgtattaagcaaaataagtattaagcaaactaagaatttattaagcaaaataagaatttattaagcaaaatagccttagaaatgcaaattaaaacataattatttgaatgaaataaatgccatgaatgcttaaccttccacgtagtcactgccagcacccagaaacccagcatttcctctattaaaactatcgaaaacatttgcactgctgtaaaattgcaaaatctttaactttggacaatgtgctttagaagggagaaagcaaaaacattttgttggagcaactagaaaattgtcatttccctcaaccaaataaagtaattctaatggaaacattcagatgatttgacctaaagattggcctttaggttttatgagcctagatagatgccgcaattatttggttgttgctctaagctttgcaagggatcctaaaagaggcggtggaagtgaaaattctgggtctccaagaaaatttctgcacagccagttctccaatcagcctatcaccccttgaaacatcttccctgtgtccctgggggcccctgatgctttctccttgggtgatagtaacatgcagagcacttacacaaagctccctctttggacataccccacgtcgacctgtcacaggcctggctgtagcgagcacctccctatgacgcagaatgcttcttgggaattatcttactcctctggagggttagtccatcaatgttttgcttcttgtcccaatactactgtgaccctctctgatcgcacagaaatcactgcctatcacatatatcctgttaagcactgaagaccctattgaaattagagttctacagatgccaaaagctgtactttccatcaggcagatggcaagcttactgccttgatgcacatctggagccactggagctccttcctctctggttccagcattaaggtggagaactccatgtagcttcttgtcctttcccctcagctgtctttgcttcacaaggttttagcccaaagcaagagtgcaatcccaaagccacagagaaatgaactttccgctacctggaagctttaagtgagtaaatcagcttttcccctctcattcctagaggcacacacctcaaaagttactaggctggagagaccctaccttccagtgacccactcatcccccagccacggagaagagggaagaccaaaaagggagagtgagaaagaggatgagagggatggtcagctgtgaggggagggggcaagtggcccagcaaatgttgatgcctcccttcccatcttgccacacggtctttttcttttgtagcacagcctccattaataactcctcggctgaggatgaagatgtaggcacctttacccccagagccagttccttaattggctggctttctgagatgcagaccaccctagaatctcatctaggttcactagaagttagttaaatcttcctttctctgtctttctcttcattccatcccccaaacccaccaaacactaagggagagctccctttggatgtctgggcagtaaacctagctcatttttctaggagacccagaagtgacttctgagtagttatcactgtgtctgcctctgttacactgtgctgctttgcttaaacagaaatgcaggcctggacatctgactgtgcctttatattctgagtggggtgctgccccatgcaaaaaaatccagagaggtagtgaggtgtcagagctaaacacttggtgctgggttttgttgatgctggtataatgtgacacagtacaattacatgctaaattttgcattttctctatataacatctatttttcctgatactgtgcctttgccattttgataatgctattttgattgagtgaattttatttcctttgtattcccatagtgaacaatatattaaggtagatgccctttatctgggtactcctggtagattagctgttacacctcccttcccttttttacagtgaacctgtattcagttattgtcactctgagaactctccaataacaatttcttttccacagttaacaacacagctgttacacctcccttcctttttttcacagtgaacctgtattcagctattctcactctgagaactctccaataacaatttcttttccacagttaacaacaaagttctgtttttaaatgaagagattaagttctttttaaatgcctaaaggcatattctgacaacttttctacttctttaacttttttgatttaagatatatgcaaagcaaataaattcaataaagcctaaaaaaaa

SEQ ID NO: 54149 - DNA, 646 bp, Homo sapiens
  misc_feature (42)..(42): n is a, c, g, or t
tcatatatacatagttaatagaatggtatgtagggtgtacgnagaactgctatattcatcctatgtgggtaatgaggagtatgctaagatttggtgctgggttttgttgatgctggtataatgtgacacagtacaattacatgctaaattttgcattttctctatataacatctatttttcctgatactgtgcctttgccattttgataatgctattttgattgagtgaattttatttcctttgtattcccatagtgaacaatatattaaggtagatgccctttatctgggtactcctggtagattagctgttacacctcccttcccttttttacagtgaacctgtattcagttattgtcactctgagaactctccaataacaatttcttttccacagttaacaacacagctgttacacctcccttcctttttttcacagtgaacctgtattcagctattctcactctgagaactctccaataacaatttcttttccacagttaacaacaaagttctgtttttaaatgaagagattaagttctttttaaatgcctaaaggcatattctgacaacttttctacttctttaacttttttgatttaagatatatgcaaagcaaataaattcaataaagcctaaaaaaaa

SEQ ID NO: 54150 - DNA, 698 bp, Homo sapiens
tttagaagtctggcaccaaagggagaagagtttagaaagcactagagcagggggatcagaggaaacctgaaaggaggaaacattatatggcattccataaacaacataccccaatatctctggggttccttattgcttgtgtgttatttgctgtggttccagttggatttgaagctcagaagatactgcaagttcctgccatggaaaaagaaaccaaacgatcttcaactctcccagccaagttccagaacccagttgagccaattgagcctgtctggttctcactggccaggaagaaagccaaagcatggagccacatggcagaaatcacgcaataaagagctcttgtgtggagcatcagcatttattttatttagttttttttttttttttttttttgagacagagtctcgctctgttacccagattggagtgcagtggcgcgatctccgctcactgcaagctccgcctcccgggttcacgccactctcccgcctcagtctcccgactagctgggactacaggcgcccgccatcacgcccggctaattttgttttcgtatttttagtagagacggggtttcaccatgttggccaggatggtcttgatctcctgacctcgtgatccgcccgcctcagcctcccaaaagctgggattacaggcgtgagccaccgcgcccggccaagcatcagcgtttt

SEQ ID NO: 54151 - DNA, 393 bp, Homo sapiens
aggctgcagtggggtgcagggcagtcagactggaaccatggagctcagcgtcctcctcttccttgcactcctcacaggcctcttgctactcctggttcagcgtcaccctaactcccatggcaccctcccaccagggccccgccctctgccccttttggggaaccttctgcagatggacagaagaggcctactcaaatcctttctgagggagtggatctgattgccgtcaatcaataatacctttgaccaagggactccaatcaattcagcatgctttgcctaatgccttttgtttgtaatactgttgcgggacaatcaaagactggagagaccaaaaaaggttcaggagagtttattaaattaaggtgaccactggctcagccagaaatatgt

SEQ ID NO: 54152 - DNA, 1472 bp, Homo sapiens
aggctgcagtggggtgcagggcagtcagactggaaccatggagctcagcgtcctcctcttccttgcactcctcacaggcctcttgctactcctggttcagcgtcaccctaactcccatggcaccctcccaccagggccccgccctctgccccttttggggaaccttctgcagatggacagaagaggcctactcaaatcctttctgaggttccgagagaaatatggggacgtcttcacggtacacctgggaccgaggcccgtggtcatgctgtgtggagtagaggccatacgggaggccctggtggacaacgctgaggccttctctggccggggaaaaatcgtcatcatggacccagtctaccagggatatggcatgctctttgccaatggaaaccgctggaaggtgcttcggcgattctctgtgaccaccatgagggacttcgggatgggaaagcggagtgtggaggagcggattcaggacgaggctcagtgtctgatagaggaacttcggaaatccaagggagccctcgtggaccccaccttcctcttccattccattaccgccaacatcatctgctccatcatctttggaaaacgcttccactaccaagatcaagagttcctgaagacgctgaacttgttctgccagagtttcttactcatcagctctatatccagccagctgtttgagctcttctctggcttcttgaaatactttcctggggcacacaggcaagtttacaaaaacctacaggaaatcaatgcttacattggccacagtgtggagaagcaccgtgaaaccctggaccccagcgcccccagggacctcatcgacacctacctgctccacatggaaaaagtgagaaatccaacccacacagtgaattcagccaccagaacctcatcatcaacacgctctcgctcttctttgctggcactgagaccaccagcaccactctccgctacggcttcctgctcatgctcaaataccctcatgtcgcagagagagtctacaaggagattgaacaggtggttggcccacatcgccctccagcgcttgatgaccgagccaaaatgccatacacagaggcagtcatccgtgagattcagagatttgctgaccttctccccatgggtgtgccccacattgtcacccaacacaccagcttctgagggtacaccatccccaaggacacggaagtatttctcatcctgagcactgctctccgtgacccacactactttgaaaaaccagacgccttcaatcctgaccactttctggatgccaatggggcactgaaaaagaatgaagcttttatccccttctccttagggaagcgctggacccacagtttctttcccagacaccagagggcaggtcctatcctcaacttgagaaaaaaaatgacaggtccttattaattgagcacttaatatattccaattgcttcacctgccttatccccttccat

SEQ ID NO: 54153 - DNA, 608 bp, Homo sapiens
tcccctccctactttcgatcgcggagaaatccaacccacacagtgaattcagccaccagaacctcatcatcaacacgctctcgctcttctttgctggcactgagaccaccagcaccactctccgctacggcttcctgctcatgctcaaataccctcatgtcgcagagagagtctacaaggagattgaacaggtggttggcccacatcgccctccagcgcttgatgaccgagccaaaatgccatacacagaggcagtcatccgtgagattcagagatttgctgaccttctccccatgggtgtgccccacattgtcacccaacacaccagcttctgagggtacaccatccccaaggacacggaagtatttctcatcctgagcactgctctccgtgacccacactactttgaaaaaccagacgccttcaatcctgaccactttctggatgccaatggggcactgaaaaagaatgaagcttttatccccttctccttagggaagcgaatgcggatttgtgcttggatgaaggcagttgcccgtgacggaattgatcctgttctaccaccctatcctccagacttctcacgtatcgaagtgtggggatcgtct

SEQ ID NO: 54154 - DNA, 2450 bp, Homo sapiens
caagcagtgagaattcttgttgcttccttcctgctctcctcaccccacgctgattgctttgaggagtatcaaagatctaagcctttactgtaggtttttaattggtcaatagaaagtagtgtccctgctgaaaggtctctttttaaaaaattttctttccttcttttttcttttttttaattttgagacagagtcttgctccgtcacccaggctggagtgcagtggcatgatctcagctcactgcaacctccacctcctgggttcaagcgattctcctgcctcagcctcctgagtagctaggactacaggcttgcaccaccacacccagctaattttttgtatttttagtagagatgggattttgccatgttggccaggctcatcttgaactcctgaactcaagcaacctgcccacctcagtctcccaaaatgctgggattacaggtgtgagccaccatgcctggcctcaaatgcctctttaaaatgagattcattcatcttcttctctgtgcagagagagtctacaaggagattgaacaggtggttggcccacatcgccctccagcgcttgatgaccgagccaaaatgccatacacagaggcagtcatccgtgagattcagagatttgctgaccttctccccatgggtgtgccccacattgtcacccaacacaccagcttctgagggtacaccatccccaaggacacggaagtatttctcatcctgagcactgctctccgtgacccacactactttgaaaaaccagacgccttcaatcctgaccactttctggatgccaatggggcactgaaaaagaatgaagcttttatccccttctccttagggaagcggatttgtcttggtgaaggcattgcccgtgcggaattgttcctcttctcaccaccatccgccagacttctccgcgatcagccccgtggctcctgaagacatcgatctgacaccccaggagtgtggtgtgggcaaaatacccccaacataccagatctgcttcctgccccgctgaaggggctgagggaagggggtcaaaggattccagggtcattcagtgtccccacctctgtagataatggctctgactccctgcaacttcctgcctctgagagacctgctgcaagccagcttccttcccttccatggcaccagttgtctgaggtcgcagtgcaaatgagtggaggagtgagattattgaaaattataatatacaaaattatatatatatattttgagacagagtctcactcagttgcccaggctggagtgcagtggcgtgatctcggctcactgcaacctccacccccggggttcaagaaattctcctgcctcagcctccctagtagctgggattacaggtgtgtgctaccatgcctggctaatttttgtatttttagtagagatggggtttcaccgtgttggccaggctgatctcaaactcctgaactcaagtgattcacccaccttagcctcccaaagtgctgggattacaggtgtgagtcaccatgcccggccatgtatatatataattttaaaaattaagatgaaattcacataaaataaaattagccattttaaagtgtacaatttagtggtgtgtggttcattcacaaagctgtacaaccaccaccatctagttccaaacattttctttttttctgagacggagtctcactctgtcacccaggttcgagttcagtggtcttgaactcctgatgtcaggtgattctcctagttccaaatgttttcattatctctcccccaacaaaacccatacctatcaagctgtcactccccataccccattctctttttcatctcagcccctgtcaatctggtttttgtccttatggacttaccaattctgaatatttcctataaacagaatcacacaatatttgattttttttttaaaactaagccttgctctgtctcccaggctggagtgctgtggcgtgattttggttcactgcaacctccgccttccaagttcaagagattctcctgcctcagcttccaagtagctgggattacaggcatgtggtaccacgcctggctaattttcttgtatttttagtagggacatgttggccaggctggttgtgagctcctggcctcaggtgatccacacgcctcagtgtcccagagtgctgatattacaggcgtaatatgtgatcttttgtgtctggttcctttcacgttgaacgctatttttgaggttcgtgcctgttgtagaccacagtcacacactgctgtagtcttcccccatcctcattcccagctgcctcctcctactgtttccctctatcaaaaagcctccttggcgcaggttccctgagctgtgggattctgcactggtgctttggattccctgatatgttccttcaaatccactgagaattaaataaacatcgctaaagcctgacctccccacgtc

SEQ ID NO: 54155 - DNA, 792 bp, Homo sapiens
aggctgcagtggggtgcagggcagtcagactggaaccatggagctcagcgtcctcctcttccttgcactcctcacaggcctcttgctactcctggttcagcgtcaccctaactcccatggcaccctcccaccagggccccgccctctgccccttttggggaaccttctgcagatggacagaagaggcctactcaaatcctttctgaggttccgagagaaatatggggacgtcttcacggtacacctgggaccgaggcccgtggtcatgctgtgtggagtagaggccatacgggaggccctggtggacaacgctgaggccttctctggccggggaaaaatcgtcatcatggacccagtctaccagggatatggcatgctctttgccaatggaaaccgctggaaggtgcttcggcgattctctgtgaccaccatgagggacttcgggatgggaaagcggagtgtggaggagcggattcaggacgaggctcagtgtctgatagaggaacttcggaaatccaagggagccctcgtggaccccaccttcctcttccattccattaccgccaacatcatctgctccatcatctttggaaaacgcttccactaccaagatcaagagttcctgaagacgctgaacttgttctgccagagtttcttactcatcagctctatatccagccaggtccaggagagggagaaggagagggagggtgggggtgaggtgaacatccaggacacacgagaaaaggatgacctgacttgggggctcagaaatgcagcttatccctggaa

SEQ ID NO: 54156 - DNA, 2938 bp, Homo sapiens
aggctgcagtggggtgcagggcagtcagactggaaccatggagctcagcgtcctcctcttccttgcactcctcacaggcctcttgctactcctggttcagcgtcaccctaactcccatggcaccctcccaccagggccccgccctctgccccttttggggaaccttctgcagatggacagaagaggcctactcaaatcctttctgaggttccgagagaaatatggggacgtcttcacggtacacctgggaccgaggcccgtggtcatgctgtgtggagtagaggccatacgggaggccctggtggacaacgctgaggccttctctggccggggaaaaatcgtcatcatggacccagtctaccagggatatggcatgctctttgccaatggaaaccgctggaaggtgcttcggcgattctctgtgaccaccatgagggacttcgggatgggaaagcggagtgtggaggagcggattcaggacgaggctcagtgtctgatagaggaacttcggaaatccaagggagccctcgtggaccccaccttcctcttccattccattaccgccaacatcatctgctccatcatctttggaaaacgcttccactaccaagatcaagagttcctgaagacgctgaacttgttctgccagagtttcttactcatcagctctatatccagccagctgtttgagctcttctctggcttcttgaaatactttcctggggcacacaggcaagtttacaaaaacctacaggaaatcaatgcttacattggccacagtgtggagaagcaccgtgaaaccctggaccccagcgcccccagggacctcatcgacacctacctgctccacatggaaaaagtgagaaatccaacccacacagtgaattcagccaccagaacctcatcatcaacacgctctcgctcttctttgctggcactgagaccaccagcaccactctccgctacggcttcctgctcatgctcaaataccctcatgtcgcagagagagtctacaaggagattgaacaggtggttggcccacatcgccctccagcgcttgatgaccgagccaaaatgccatacacagaggcagtcatccgtgagattcagagatttgctgaccttctccccatgggtgtgccccacattgtcacccaacacaccagcttctgagggtacaccatccccaaggacacggaagtatttctcatcctgagcactgctctccgtgacccacactactttgaaaaaccagacgccttcaatcctgaccactttctggatgccaatggggcactgaaaaagaatgaagcttttatccccttctccttagggaagcggatttgtcttggtgaaggcattgcccgtgcggaattgttcctcttctcaccaccatccgccagacttctccgcgatcagccccgtggctcctgaagacatcgatctgacaccccaggagtgtggtgtgggcaaaatacccccaacataccagatctgcttcctgccccgctgaaggggctgagggaagggggtcaaaggattccagggtcattcagtgtccccacctctgtagataatggctctgactccctgcaacttcctgcctctgagagacctgctgcaagccagcttccttcccttccatggcaccagttgtctgaggtcgcagtgcaaatgagtggaggagtgagattattgaaaattataatatacaaaattatatatatatattttgagacagagtctcactcagttgcccaggctggagtgcagtggcgtgatctcggctcactgcaacctccacccccggggttcaagaaattctcctgcctcagcctccctagtagctgggattacaggtgtgtgctaccatgcctggctaatttttgtatttttagtagagatggggtttcaccgtgttggccaggctgatctcaaactcctgaactcaagtgattcacccaccttagcctcccaaagtgctgggattacaggtgtgagtcaccatgcccggccatgtatatatataattttaaaaattaagatgaaattcacataaaataaaattagccattttaaagtgtacaatttagtggtgtgtggttcattcacaaagctgtacaaccaccaccatctagttccaaacattttctttttttctgagacggagtctcactctgtcacccaggttcgagttcagtggtcttgaactcctgatgtcaggtgattctcctagttccaaatgttttcattatctctcccccaacaaaacccatacctatcaagctgtcactccccataccccattctctttttcatctcagcccctgtcaatctggtttttgtccttatggacttaccaattctgaatatttcctataaacagaatcacacaatatttgattttttttttaaaactaagccttgctctgtctcccaggctggagtgctgtggcgtgattttggttcactgcaacctccgccttccaagttcaagagattctcctgcctcagcttccaagtagctgggattacaggcatgtggtaccacgcctggctaattttcttgtatttttagtagggacatgttggccaggctggttgtgagctcctggcctcaggtgatccacacgcctcagtgtcccagagtgctgatattacaggcgtaatatgtgatcttttgtgtctggttcctttcacgttgaacgctatttttgaggttcgtgcctgttgtagaccacagtcacacactgctgtagtcttcccccatcctcattcccagctgcctcctcctactgtttccctctatcaaaaagcctccttggcgcaggttccctgagctgtgggattctgcactggtgctttggattccctgatatgttccttcaaatccactgagaattaaataaacatcgctaaagcctgacctccccacgtc

SEQ ID NO: 54157 - DNA, 2100 bp, Homo sapiens
tcccctccctactttcgatcgcggagaaatccaacccacacagtgaattcagccaccagaacctcatcatcaacacgctctcgctcttctttgctggcactgagaccaccagcaccactctccgctacggcttcctgctcatgctcaaataccctcatgtcgcagagagagtctacaaggagattgaacaggtggttggcccacatcgccctccagcgcttgatgaccgagccaaaatgccatacacagaggcagtcatccgtgagattcagagatttgctgaccttctccccatgggtgtgccccacattgtcacccaacacaccagcttctgagggtacaccatccccaaggacacggaagtatttctcatcctgagcactgctctccgtgacccacactactttgaaaaaccagacgccttcaatcctgaccactttctggatgccaatggggcactgaaaaagaatgaagcttttatccccttctccttagggaagcggatttgtcttggtgaaggcattgcccgtgcggaattgttcctcttctcaccaccatccgccagacttctccgcgatcagccccgtggctcctgaagacatcgatctgacaccccaggagtgtggtgtgggcaaaatacccccaacataccagatctgcttcctgccccgctgaaggggctgagggaagggggtcaaaggattccagggtcattcagtgtccccacctctgtagataatggctctgactccctgcaacttcctgcctctgagagacctgctgcaagccagcttccttcccttccatggcaccagttgtctgaggtcgcagtgcaaatgagtggaggagtgagattattgaaaattataatatacaaaattatatatatatattttgagacagagtctcactcagttgcccaggctggagtgcagtggcgtgatctcggctcactgcaacctccacccccggggttcaagaaattctcctgcctcagcctccctagtagctgggattacaggtgtgtgctaccatgcctggctaatttttgtatttttagtagagatggggtttcaccgtgttggccaggctgatctcaaactcctgaactcaagtgattcacccaccttagcctcccaaagtgctgggattacaggtgtgagtcaccatgcccggccatgtatatatataattttaaaaattaagatgaaattcacataaaataaaattagccattttaaagtgtacaatttagtggtgtgtggttcattcacaaagctgtacaaccaccaccatctagttccaaacattttctttttttctgagacggagtctcactctgtcacccaggttcgagttcagtggtcttgaactcctgatgtcaggtgattctcctagttccaaatgttttcattatctctcccccaacaaaacccatacctatcaagctgtcactccccataccccattctctttttcatctcagcccctgtcaatctggtttttgtccttatggacttaccaattctgaatatttcctataaacagaatcacacaatatttgattttttttttaaaactaagccttgctctgtctcccaggctggagtgctgtggcgtgattttggttcactgcaacctccgccttccaagttcaagagattctcctgcctcagcttccaagtagctgggattacaggcatgtggtaccacgcctggctaattttcttgtatttttagtagggacatgttggccaggctggttgtgagctcctggcctcaggtgatccacacgcctcagtgtcccagagtgctgatattacaggcgtaatatgtgatcttttgtgtctggttcctttcacgttgaacgctatttttgaggttcgtgcctgttgtagaccacagtcacacactgctgtagtcttcccccatcctcattcccagctgcctcctcctactgtttccctctatcaaaaagcctccttggcgcaggttccctgagctgtgggattctgcactggtgctttggattccctgatatgttccttcaaatccactgagaattaaataaacatcgctaaagcctgacctccccacgtc

SEQ ID NO: 54158 - DNA, 906 bp, Homo sapiens
aggctgcagtggggtgcagggcagtcagactggaaccatggagctcagcgtcctcctcttccttgcactcctcacaggcctcttgctactcctggttcagcgtcaccctaactcccatggcaccctcccaccagggccccgccctctgccccttttggggaaccttctgcagatggacagaagaggcctactcaaatcctttctgaggttccgagagaaatatggggacgtcttcacggtacacctgggaccgaggcccgtggtcatgctgtgtggagtagaggccatacgggaggccctggtggacaacgctgaggccttctctggccggggaaaaatcgtcatcatggacccagtctaccagggatatggcatgctctttgccaatggaaaccgctggaaggtgcttcggcgattctctgtgaccaccatgagggacttcgggatgggaaagcggagtgtggaggagcggattcaggacgaggctcagtgtctgatagaggaacttcggaaatccaagggagccctcgtggaccccaccttcctcttccattccattaccgccaacatcatctgctccatcatctttggaaaacgcttccactaccaagatcaagagttcctgaagacgctgaacttgttctgccagagtttcttactcatcagctctatatccagccagctgtttgagctcttctctggcttcttgaaatactttcctggggcacacaggcaagtttacaaaaacctacaggaaatcaatgcttacattggccacagtgtggagaagcaccgtgaaaccctggaccccagcgcccccagggacctcatcgacacctacctgctccacatggaaaaagtgaaggaaagaaagatgaggtgaaaggaaggagaaaataggaggaa

SEQ ID NO: 54159 - DNA, 1959 bp, Homo sapiens
  misc_feature (1)..(1): n is a, c, g, or t
naccagatcgaataaactcctccacccatcattatgatcttcgggctggcatgttaaaacttgggagagacagagtcactctctcacacaggttgagtcagtggcacgatctcagctcagtgcaacctctgcctcgtgggtcaaagccatcctcctgcctcagcctcctgagttgtgaggactatggaagtgtgccaccatgcctggctaattttttaagtttttggagagatggggtcttgctctgttgcctatgctggtcttgaactcctaacctcaagcaatcttcctgcctcagcctccccaggtgttgtaataataggtgcgagccaccatgcccagccttgtgttgcctcttggtaagaaataataaaaagaaattagtagcttgtttacctggtaccagatttggagggggctgagtataatttttactgagtggtatgtggttggaaaataggccacatttagccttgaattgtttagaaatcaaatgcgattcagaattgaagaggacattgctgggctatgaaatagggtactaacaaggctatttttgtagcaaaatggccaaaagctgaaataaatcttcttagtctgtgatgcttgtagcatcctttgttaagtaaagcacaacaccctggacaagcgactagttatgacttccaaatagattgataatagccttgcatgttgtagttagagacactgtagctgtatctgtatacctgtaatatagcctgggaagttctgttgctgcagagttatcattaaagtcacttggaattgaaaaagatacagagtgttgagacaaaggaactaggctggcacagtcattgctgatgcgatgggttctccactttggctccaggcgaaggctcctggtggtgatgcatgattgatttcaggtctttgtttcattttggcttcattactgtgattctgagccacacaggtttttccccctggggagaagactatgtaaaaatctcagcgttagaagctgtgttcagtgccctatatgtcttgtgaacctatctgagctgggctgagagcagagtggcttactgtagcagctgtggatgcagtctagttggaggcatggcttggaggacgtcatggttcatgcgatggttggagggatggtaaaagcagttagctcttgtcagctgcttccctctgctagtgcttgagctgccaattttatttgtcagtatttcctgatctcccactcctgttgtgaaaggtcacagagttactgtcactggcaacaatttcgccccttagaagaaaactggtacagagggaaagggtgaggaaaatggtgagttccatcactcagaactaaatgcaagtggcagagagatgctttctcctgtgttaacgtctccaaaagatgaacatcaaatgcccggaaacagcaacatcaaaaagaaggaagatgagaagtattgttgaagagtatggacctacagggtttttaacaagtccagcaaaacaaactatggccaaaagaagaaatttttctgtcactgcgagtagacatcataaatgcttggtaaaattgccagatttagggaataaaaaatttttaaagtacagtgttgaagaatggggcatgtcatgaagacattcagcaaagaagcaatcttggcaaggtggagaagtgggaagcaatggggagagaaagggagatgcccagagcaggaattctcaatgtgtggtccctaggccaacagcatcagcacatcttgccctcaccagacctactgaatccgaaactcccagcgcaaggcccagcagtcttcaacaagccctccaggggtctttggtgcatgctcaagtttgagaaccataggctttgccacggttaaaaagatgttttaatggactggtctcctcctaagctctgaggtgctctcatattccctccataagtaaagagattttttttgtata

SEQ ID NO: 54160 - DNA, 2164 bp, Homo sapiens
  misc_feature (1)..(1): n is a, c, g, or t
naccagatcgaataaactcctccacccatcattatgatcttcgggctggcatgttaaaacttgggagagacagagtcactctctcacacaggttgagtcagtggcacgatctcagctcagtgcaacctctgcctcgtgggtcaaagccatcctcctgcctcagcctcctgagttgtgaggactatggaagtgtgccaccatgcctggctaattttttaagtttttggagagatggggtcttgctctgttgcctatgctggtcttgaactcctaacctcaagcaatcttcctgcctcagcctccccaggtgttgtaataataggtgcgagccaccatgcccagccttgtgttgcctcttggtaagaaataataaaaagaaattagtagcttgtttacctggtaccagatttggagggggctgagtataatttttactgagtggtatgtggttggaaaataggccacatttagccttgaattgtttagaaatcaaatgcgattcagaattgaagaggacattgctgggctatgaaatagggtactaacaaggctatttttgtagcaaaatggccaaaagctgaaataaatcttcttagtctgtgatgcttgtagcatcctttgttaagtaaagcacaacaccctggacaagcgactagttatgacttccaaatagattgataatagccttgcatgttgtagttagagacactgtagctgtatctgtatacctgtaatatagcctgggaagttctgttgctgcagagttatcattaaagtcacttggaattgaaaaagatacagagtgttgagacaaaggaactaggctggcacagtcattgctgatgcgatgggttctccactttggctccaggcgaaggctcctggtggtgatgcatgattgatttcaggtctttgtttcattttggcttcattactgtgattctgagccacacaggtttttccccctggggagaagactatgtaaaaatctcagcgttagaagctgtgttcagtgccctatatgtcttgtgaacctatctgagctgggctgagagcagagtggcttactgtagcagctgtggatgcagtctagttggaggcatggcttggaggacgtcatggttcatgcgatggttggagggatggtaaaagcagttagctcttgtcagctgcttccctctgctagtgcttgagctgccaattttatttgtcagtatttcctgatctcccactcctgttgtgaaaggtcacagagttactgtcactggcaacaatttcgccccttagaagaaaactggtacagagggaaagggtgaggaaaatggtgagttccatcactcagaactaaatgcaagtggcagagagatgctttctcctgtgttaacgtctccaaaagatgaacatcaaatgcccggaaacagcaacatcaaaaagaaggaagatgagaagtattgttgaagagtatggacctacagggtttttaacaagtccagcaaaacaaactatggccaaaagaagaaatttttctgtcactgcgagtagacatcataaatgcttggtaaaattgccagatttagggaataaaaaatttttaaagtacagtgttgaagaatggggcatgtcatgaagacattcagcaaagaagcaatcttggcaaggtggagaagtgggaagcaatggggagagaaagggagatgcccagagcaggaattctcaatgtgtggtccctaggccaacagcatcagcacatcttgccctcaccagacctactgaatccgaaactcccagcgcaaggcccagcagtcttcaacaagccctccaggggtctttggtgcatgctcaagtttgagaaccataggctttgccacggttaaaaagatgttttaatggactggtctcctcctaagctctgaggtgctctcatattccctccataagtaaagagattttttttgtataattctttgcagaaactgttaatgtctttatttctcatattttttttcccccctacaagctcctgaaagatctttttgaagaattgacaaaggatgctatcaagggctatgtttaggtggatggaaataacctcttgaactcctaacctcaagcaatcttcctgcctcagcctccccaggtgttgtaataataggtgcgagccacc

SEQ ID NO: 54161 - DNA, 726 bp, Homo sapiens
ctagttggaaaaggggacttgaagctaagtttacatggcactttaagactgagaacatgtcaattgttcataatcaggaatatggtagagggagagcaggtgtagatgatgggacgggaaagtgctgaaaccagcccagcagacctgtgagtcgcctctggttctcacgcagcagtgtgtgtgtgctcacagggatgttccacccctggttctcatgcagtagtgtgggagagtgctgaagccggcccagcatgcctcttagttgcctctggttctcaatgtgtggtccctaggccaacagcatcagcacatcttgccctcaccagacctactgaatccgaaactcccagcgcaaggcccagcagtcttcaacaagccctccaggggtctttggtgcatgctcaagtttgagaaccataggctttgccacggttaaaaagatgttttaatggactggtctcctcctaagctctgaggtgctctcatattccctccataagtaaagagattttttttgtataattctttgcagaaactgttaatgtctttatttctcatattttttttcccccctacaagctcctgaaagatctttttgaagaattgacaaaggatgctatcaagggctatgtttaggtggatggaaataacctcttgaactcctaacctcaagcaatcttcctgcctcagcctccccaggtgttgtaataataggtgcgagccacc

SEQ ID NO: 54162 - DNA, 519 bp, Homo sapiens
tttatcaaagggaggtgggtgggcatgaatctagttggaaaaggggacttgaagctaagtttacatggcactttaagactgagaacatgtcaattgttcataatcaggaatatggtagagggagagcaggtgtagatgatgggacgggaaagtgctgaaaccagcccagcagacctgtgagtcgcctctggttctcacgcagcagtgtgtgtgtgctcacagggatgttccacccctggttctcatgcagtagtgtgggagagtgctgaagccggcccagcatgcctcttagttgcctctggttctcatgcagcagtgtgtgtgcttacaggagtggagatgatgggatgggagagtgctgaagctggcccagcatgcctctgagtcacccctggctctcatgcagcagtgtgtgtgcttacagggacttcccaggctgcacttcccttccctgtgggctgcacccgtagaagtatagaaaatgtaatgtctgttgaatataaaatcgtaccactgaat

SEQ ID NO: 54163 - DNA, 445 bp, Homo sapiens
gaagcatgtaagagagggaacatttccttagatgttacccagatggttctgggggagacagcctgggcaacagagccagactccgtctctaaacaaacaaacaaacaaacaaacaaataaagaaagaacattggacatggagaggtggggcctggcatgggtaaccatcagaggaaaaagccatgctcagccttccagttgagtgggtaacgactgagtctccagggaattcccagtgacctcccctccacacctgctgtgatcctgccaacatttagctttggttctcttggcagctgcaccattcatgggtgcatatacgtagagtctgaacaggtgctctgctgctagaaacagcaaaccatctagattaaactcctaaagccagtgccacgaggcattcctgttccaactgggtgtttgagcagattggcaaaaaaaaaaa

SEQ ID NO: 54164 - DNA, 852 bp, Homo sapiens
ccgggctctagctgtttccctcaggcggcctgttccacgccaggattagttttgcttcgcagatgggccgtggtggtgagaggaagcaatcagtatggaaatggagaaatggcttaccatgcatgtccttctccccaggagggaggtcgtggtgcaggcgagcagacgccagactcctggacacttgccgcctgcgttatggaggcttagctaataaccttgcaggggtcttcaggcttttccactggctcacctttaggcttctgacacttttacctacgattgaaaaaagacgagattccatgagactagaaatgtaggagcatctcagaccttcacagaacgctctgttagaagatgagaaacataacgttgcttgtgagaggtgaagccagctggacttcctgggtcgagtggggacttggagaacttttctgtctagctaaaggattataagtgcaccaatcagcactctgtaaaaacacaccagtcagcgctctgtgtctagctaaaggattgtaaatgcaccaatcagcactctgtaaaatggaccaatcagtaccctgtaaaatggaccaatcagcaggacgtgggcagggacaaataagggaataacagctggcgcccctagccagcagtggcaacccactcggatcaccttccatgctgtggaagctttgttatttcacttttcacaataaatcttagggttgcttactttttgggtccatgccaccttgaagagctgtaacactcaccacgaaggtctgaggcttcattcttgaagtcagactaagaaccaccggaaggaaccaattccagacacacgtgtagtagcaaattatcaaaaat

SEQ ID NO: 54165 - DNA, 614 bp, Homo sapiens
  misc_feature (81)..(81): n is a, c, g, or t
  misc_feature (252)..(252): n is a, c, g, or t
  misc_feature (370)..(370): n is a, c, g, or t
  misc_feature (404)..(404): n is a, c, g, or t
  misc_feature (465)..(465): n is a, c, g, or t
  misc_feature (492)..(492): n is a, c, g, or t
  misc_feature (522)..(522): n is a, c, g, or t
gactctgtctcaaaaaaaaaaaaaaaaaaaaaaaaaaaaagtcctctcaggggcaccccattgaatccaggctgttattcngttattccgactctcactgtcctactaaaccttaagccagctggcccctttgtgtatctcctgtctcatttcagctaactgtccctcactaaccctttctccgctcccacacccacttgctcccagcttgctttcaccttcaggggctttgtgctagctgatccacttgcnaggtactctttccccaaagttatctcctatttgcatttacctcagtttaaatgttacacttctaaaatatcttttctggccgggaacggtggctcacacctgtaatcccagcactttnggaggccgaggtaggtggatctcatttgaggtcnggagttcgtgaccagcctggccaacatggtgaaactccatctttactaaaacaaaaaattngctgggcatggtggcacacacctgtantcccagctactcaggcggctgaggcagganaattgcttcaatccaaggggcagaggttgcagtgcgccgagatcgtgccattgcactcagcctgagcgacagagcaagacttcattcatctc

SEQ ID NO: 54166 - DNA, 299 bp, Homo sapiens
gactggctttttaaaggattttataataaaatttaaaataatctgaatactctttatattctaatgaagaaaagtattttgtgtgtacatagtacttgtgtgatttcccccacacttgaaaaaagaatcaaatctatttgtgtgaaaactattcttgagacaggctataatgcagtaatttaaatatattaagtatgtcagggtattctgagctgaattctaactagtattcattaatacaatggtatataattacctcagccagtagaaacttaattataaaggctatttggctgtta

SEQ ID NO: 54167 - DNA, 468 bp, Homo sapiens
caggggaaggaagatgggttggtgggtggatgggtgggtgacagatgaataaacagaaggaaaggaggaaggaggaaagaaagaaaagagggaggaaaggaggtaaggaaggaaacaaggaaggaagggagagagggagagatggagggaggaaagaaaggaggaaaggagagtatgcacatacatacagctggaggaacccctggttccactttctctgaggtcccccaaggtctcagccttccctgaggcttctctgccctaactccccctccctttctctttcctccatcacaaagccagcccctgacatgccctcaccccgcacagtgattactccttgagcagcctcccgtatcctgttcctgctcttcctacaagcagagaagcagaaaaatccatcctgatgaggaggcagccgcccgcctgccctcgcgcctcctccccccgcccctgcagcctgtaact

SEQ ID NO: 54168 - DNA, 725 bp, Homo sapiens
acaactttttgccaataaatttgcccataaatagaataaaatggaaaaattacttgaaagatacacattaccaaaactaaaaacgcaataggaaatctgaacagactttcctgaattcaaataaattcacaatttaaaatctttcaacaaagaaaatatccagtttcagatgacgtctctgatgaattctatcaactatataggtagaaataattaaatggagaaaagtattttcaataaatggtgctggaacaactgtatatatatgaaaaaatctaattcataatgatccatagacacacatcaaagctgaaactataaaaattatcgaagagaacacaggctgggcatgatggctcacacctgtaatcccagcaccttgggaggctgaggtgggaggattgcttgaggccaggagtttgagactaggctggggaacaatagtgagatctgttctctacacagtaaaatgtttaactagtgtggtggtgcatgcctgtagtcctagctattcaggaggctgaggcgggaggatcacttgagcccaggaggggctgtttctcttggatttttaaagtagacaatcatgtcatttaccaataatgacagttctctttccctttcaaccttcatatgttccaatcacttgtctttctgtatggtctggaagaatctcatggagaactggtggacgagcgtgctttctcttgttcctagcttaaaaa

SEQ ID NO: 54169 - DNA, 279 bp, Homo sapiens
ctctagtcccagctactgggaggctgaggctggagaattgcttgaacccgggatgtggaggttgcagttacccaagatcacgccactgcacaccagcctgggtgacaggatgagactccatcttataagaataaataaataaacaaacaaataaataaatcttccttaaggatatcagggaaacctccaaactgtgaatgtgtattacacttgggaaaaagtgtaaataagtcactactggaaccacataaactggccagtgaccctacttgtgtgact

SEQ ID NO: 54170 - DNA, 696 bp, Homo sapiens
tgcgtctacaccacctgcctgagtcacttaggagccattttggttatcagatcagctgttgagggatcatgatgcttgtgttccagttgccttattttactttacaatggccccaaagcgcaagagtagtgatgctggcaatttggagaaacagaaaccagagaagccattaagtacttcccttaagcgagaaggtggaagttcctgactaaagggaaagaaataacttttattatagtatcttgttgtgattgttttactatgagttgttgttgttaatctcttactgtgcctagtttatgcattaacttatcacaggtgtgcatgcctaggaaaacacatggtatatacagggttcagtatacacatggtatatacagggttcagggttcaggcacctactgggctcttggaacatacttttccggctaagtaggagctactgtgtcaaaaagggaatcaagagaccaccacaatcacggctgaaaggagccttgagaatggacttctcttcaggtggggaaactaaagcagagagagacgtggtctgcccacagcacaaggctggctgtgacaaccctcattcagttcatgctggaaggagtccttaggaagtgcacggacgggcctctgcttagtgcacccgacctctccatttcagccccttcatctgtgtatccccccatccccccagca

SEQ ID NO: 54171 - DNA, 752 bp, Homo sapiens
ccagccaagaaacacctttggacaattgttctgtggctcattagatctttttggaatcctgtgtgttggcttataccgaataattgatgaagaggagctcaacccagaaaacaaaaggtttgtgatcacccggccagccaatgagttcaagctgctgccttcagatcttgtgttttgtgccatacccttcagcactgcttgttataaaaggaatgaagagttctcattgcaaaagtcatatgaaattgtaaataaagcatcacagacaacagagacacattcagacacaaattgtcctcccaccattgattcagttactgagacattgtattcaccagtctattcttaccagccgagaactaactccctctcttttcctaagcaaatagcatggaatcagagtagaacaaacagtattatatcatctcagatacctttaggtgacaatgcaaaagaaaatgaaaggaaaacttcagatgaggtttatgatgaggatccctttgcatattcagagccactatagacctgcccatattcttcacgtgctcttaacttgctgcttacaaatcatctcctgagatgctaactttgaacaaagaaaataagaatggaagcatgccatttttctgcccattgcttagtggttcatgaaggccacactgttttgggtgagacaaaagtctaatgccactggatcttgtgtgataaataaagaaatatatgatcaaagcttctgtaaggaaagttcattg

SEQ ID NO: 54172 - DNA, 928 bp, Homo sapiens
tgcttaagtctggactgcggaggccggggcggtggcgtgcagggtgaggtctcccgggctggcgcgcgtgcaagccccctgctgctacctcgcgctaggccagctccaggagggcaacagacgacaggacatttcaaaagggccacttaaattttccttcgagtaaacagaacacctgccaagaccctcgagcctgggcgtgccccaagacaggtggttggggtctaggagtcggctgcagctggcgatgctctgaggggacgtcagggcctcaggatcgcccctatgaagacgaagtgcatctgtgaactgtgctcctgcgggcggcatcactgtccacatctccctaccaagatttatgatgaaacagagaaaccatgtcttctctccgaatataccgagaactaccctttctatcactcctacctgcccagagagtccttcaagccaaggcgggagtaccagaaagggtctataccaatggaaggcctgactacatcaaggagagattttgggcctcacaaagtggcaccagtgaaggtccaccagtatgaccagttcgtcccgagtgaagagaatatggatttgctcacgacgtataagaaagattacaatccctaccctgtctgtcgagtggaccccatcaaacctcgggacagtaaatatccatgtagcgacaagatggagtgtttgcctacttataaagctgattatttgccttggaaccaaccaaggcgagagccacttcgtctggaacacaaataccagccggcatcagtcaggtttgataacagaaccacacaccaggacgattaccccataaaaggccttgtgaagaccataagctgtaaacctctggccatgccaaagctctgtaacatccccttggaggatgtgactaactacaagatgagctatgtggcccacc

SEQ ID NO: 54173 - DNA, 372 bp, Homo sapiens
gcctgcaccatccaaatagttatttactacatagcctgaaaaacccatccaatgtccctgtgaaggattcattcttacatctcatatatgccacaaatatgtcccagagtggaataatacaggcatggccatatttgccagtcggtgtcctcccttcaacaaccaagagtcaagcccagtgatctttcaccctatgcctgcccttcacatcagcccctaccgacagtcccattcttcagaactcaagtgtagttgactctctcacacattacactcacttgtataaatacccaggggatgtcagttttccttagatctgtatgatcttaatagattattaaataggtccaggagccacaccggtaaggatct

SEQ ID NO: 54174 - DNA, 333 bp, Homo sapiens
gaatctctgttcctttcaaaggggtaagatgactgcactcataagttcagctcacaatgttaatggaagataggatttcatagtttgcaagagttaaaaatatgtaggaactttacttataatccccagcacctatttagattctctggtgggcatcagctacaaagacgttgtcctgcctggaggaactcacaggctggcagtggagatggcagatggcagagctctcgttgacagtcttctttcactttttgagtcattttggaatgcagtcagtttcatgtgcgtccgtgtgaagagaccaccaaacaggctttgtgtgagcaataaagc

SEQ ID NO: 54175 - DNA, 279 bp, Homo sapiens
taaaaaggaactcttctgaatagtcttttaaacaaaaacaaaacaagcaaacaaaacaaataaaatagacttctacgatggtagaaggactttaaatcagaaaaaaataaaataatgagaattctgaacattaaatatggtagaaaattcaaatagatttgataatattcttttcaaaacatatttatgtattgtaacagataacaaatgagggttaaatatataatggatcacactgattttgcatttgcctcctatacctactatactattatttga

SEQ ID NO: 54176 - DNA, 523 bp, Homo sapiens
ggagcctgcagcaaactagttggaatgtgcctcttgtaaaagtagcctcactgggttgtgggcatggtaaagaggatgaagagacaccttctgagcagaatgtttctgtgggagtgtcacagtttaaggcaggttcatccacactgaagactcaaccccgggagatatatgttccattcctgaaagatatcttgcctctggctaatctccctgggcgggaaccttacttggttggagcacgtgcaaaccagtaccagcaccagaaacatcacagtgcaaagaaatccttgaagagggacatggacagagcctcagaccattaagcttcagatgatcatgcaacaaagcttccagccagttccaggtgaagacaccacccctggtcatcaagaagctgccctgcctcaactagatacagcaggatgccaagaacctggacacccaccaccgttaacaccagggatgcaaggttggttcaacatatgcaaatcaataaatgtgattcatcacataaacagaaaaa

SEQ ID NO: 54177 - DNA, 1258 bp, Homo sapiens
aacaaattctgcagttgagcttcaaatgagtcagatatgcacatgtgcccattcgcctatgatttcctgtagcaaagttaataactatggtgtaaggatggaagagtcatagtcatttttctccctcctacctttagtacttagtcttccctcacatttgttctctgttttcagttattttgaaattatattaccattaagaaattgtgagtattatatggggttttttaaatacttaagaagactcttacaatttaatagtagttgaatatttctgtttataaattgggaaaaacacaatgtaaaagaagcaagatggctggctgggtgaggtggctcacacctgtaatcccagcgctttgggaggccaaggcaggtggatcacttgaggtcaggagttcgagaccagtctggccaacatggtgacaccccatctctactaaaagtacaaaaaaattagctgggcgtggtgatacatgcctgtaatttaaaaaggaaaaaaaaaaaaaaaaggaagcaagagccttagaacttacaattccagatataaaatcaagtatactgtccagtggattcagctgctggatgtttcaagtaattaattgatgaaaattatggaatatactagtccagcatacttgacctacccttgtatcatgaaatagtctataaaatgaagcggcagtaggagggcccatttaataacataattatctgttcctttattatttctgttacagaaattcatctgttgccatgggagcctcactttcttgctcagaatattccctaaaggtaacagatgtgaccaaagtaaggactttgaatgctatcgcaaagaacatcctggtgtagccagacctctctgagagacatggatatcacaggatgaaggtagaactataatctgcaattctctatgacacagctttaaccttcttctctggccaggacagtcgcaatctttgttttaagtttcacatggccatggagaatgtgcccaagaagaaaaagaatttgaaacagagatacagtcacttcctttgcttagtcttaccagtgattgtcatcatggttaaagctggtctgtgcttcttccatagacagaagcttagtctgttttcagtggaattaattgatgaactgggaaaattttaactgcatggtatgaattcagagtgtgacttaagggtcaattcaaagcagtattttgacttttcatttgtaaaataaaaatttccactattaaaaaaaaatc

SEQ ID NO: 54178 - DNA, 1340 bp, Homo sapiens
gtcggggacgcgcgcacgggcgcgcgcagctgttgacgcgcttcttagctggtgcgcgccggagcccaaattccaagtggaaactgcaggcgcacgagggaggaacgcgtggagcatgaaaaggcagggggcctcctctgagcgaaaacgagcgcggataccgtccgggaaggccggagcagcaaatggatttctcatggaagtttgtgttgattcagtggaatcagctgtgaatgcagaaagaggaggtgctgatcggattgaattatgttctggtttatcagaggggggaactacacccagcatgggtgtccttcaagtagtgaagcagagtgttcagatcccagtttttgtgatgattcggccacggggaggtgattttttgtattcagatcgtgaaattgaggtgatgaaggctgacattcgtcttgccaagctttatggtgctgatggtttggtttttggggcattgactgaagatggacacattgacaaagagctgtgtatgtcccttatggctatttgccgccctctgccagtcactttccaccgagcctttgacatggttcatgatccaatggcagctctggagaccctcttaaccttgggatttgaacgcgtgttgaccagtggatgtgacagttcagcattagaagggctacccctaataaagcgactcattgagcaggcaaaaggcaggattgtggtaatgccaggaggtggtataacagacagaaatctacaaaggatccttgagggttcaggtgctacagaattccactgttctgctcggtctactagagactcgggaatgaagtttcgaaattcatctgttgccatgggagcctcactttcttgctcagaatattccctaaaggtaacagatgtgaccaaagtaaggactttgaatgctatcgcaaagaacatcctggtgtagccagacctctctgagagacatggatatcacaggatgaaggtagaactataatctgcaattctctatgacacagctttaaccttcttctctggccaggacagtcgcaatctttgttttaagtttcacatggccatggagaatgtgcccaagaagaaaaagaatttgaaacagagatacagtcacttcctttgcttagtcttaccagtgattgtcatcatggttaaagctggtctgtgcttcttccatagacagaagcttagtctgttttcagtggaattaattgatgaactgggaaaattttaactgcatggtatgaattcagagtgtgacttaagggtcaattcaaagcagtattttgacttttcatttgtaaaataaaaatttccactattaaaaaaaaatc

SEQ ID NO: 54179 - DNA, 1312 bp, Homo sapiens
gtcggggacgcgcgcacgggcgcgcgcagctgttgacgcgcttcttagctggtgcgcgccggagcccaaattccaagtggaaactgcaggcgcacgagggaggaacgcgtggagcatgaaaaggcagggggcctcctctgagcgaaaacgagcgcggataccgtccgggaaggccggagcagcaaatggatttctcatggaagtttgtgttgattcagtggaatcagctgtgaatgcagaaagaggaggtgctgatcggattgaattatgttctggtttatcagaggggggaactacacccagcatgggtgtccttcaagtagtgaagcagagtgttcagatcccagtttttgtgatgattcggccacggggaggtgattttttgtattcagatcgtgaaattgaggtgatgaaggctgacattcgtcttgccaagctttatggtgctgatggtttggtttttggggcattgactgaagatggacacattgacaaagagctgtgtatgtcccttatggctatttgccgccctctgccagtcactttccaccgagcctttgacatggttcatgatccaatggcagctctggagaccctcttaaccttgggatttgaacgcgtgttgaccagtggatgtgacagttcagcattagaagggctacccctaataaagcgactcattgagcaggaggtggtataacagacagaaatctacaaaggatccttgagggttcaggtgctacagaattccactgttctgctcggtctactagagactcgggaatgaagtttcgaaattcatctgttgccatgggagcctcactttcttgctcagaatattccctaaaggtaacagatgtgaccaaagtaaggactttgaatgctatcgcaaagaacatcctggtgtagccagacctctctgagagacatggatatcacaggatgaaggtagaactataatctgcaattctctatgacacagctttaaccttcttctctggccaggacagtcgcaatctttgttttaagtttcacatggccatggagaatgtgcccaagaagaaaaagaatttgaaacagagatacagtcacttcctttgcttagtcttaccagtgattgtcatcatggttaaagctggtctgtgcttcttccatagacagaagcttagtctgttttcagtggaattaattgatgaactgggaaaattttaactgcatggtatgaattcagagtgtgacttaagggtcaattcaaagcagtattttgacttttcatttgtaaaataaaaatttccactattaaaaaaaaatc

SEQ ID NO: 54180 - DNA, 1491 bp, Homo sapiens
gtcggggacgcgcgcacgggcgcgcgcagctgttgacgcgcttcttagctggtgcgcgccggagcccaaattccaagtggaaactgcaggcgcacgagggaggaacgcgtggagcatgaaaaggcagggggcctcctctgagcgaaaacgagcgcggataccgtccgggaaggccggtgcggaaggtggcgggggaggggacggtcggccgaaggctccccggggcgggccggcgggagtcgtagtcagtggtgatttcttctggagtcgtttcctcagctccttccagccccttgggcggcaccttctatctttgaggcgttaaaggagcagcaaatggatttctcatggaagtttgtgttgattcagtggaatcagctgtgaatgcagaaagaggaggtgctgatcggattgaattatgttctggtttatcagaggggggaactacacccagcatgggtgtccttcaagtagtgaagcagagtgttcagatcccagtttttgtgatgattcggccacggggaggtgattttttgtattcagatcgtgaaattgaggtgatgaaggctgacattcgtcttgccaagctttatggtgctgatggtttggtttttggggcattgactgaagatggacacattgacaaagagctgtgtatgtcccttatggctatttgccgccctctgccagtcactttccaccgagcctttgacatggttcatgatccaatggcagctctggagaccctcttaaccttgggatttgaacgcgtgttgaccagtggatgtgacagttcagcattagaagggctacccctaataaagcgactcattgagcaggcaaaaggcaggattgtggtaatgccaggaggtggtataacagacagaaatctacaaaggatccttgagggttcaggtgctacagaattccactgttctgctcggtctactagagactcgggaatgaagtttcgaaattcatctgttgccatgggagcctcactttcttgctcagaatattccctaaaggtaacagatgtgaccaaagtaaggactttgaatgctatcgcaaagaacatcctggtgtagccagacctctctgagagacatggatatcacaggatgaaggtagaactataatctgcaattctctatgacacagctttaaccttcttctctggccaggacagtcgcaatctttgttttaagtttcacatggccatggagaatgtgcccaagaagaaaaagaatttgaaacagagatacagtcacttcctttgcttagtcttaccagtgattgtcatcatggttaaagctggtctgtgcttcttccatagacagaagcttagtctgttttcagtggaattaattgatgaactgggaaaattttaactgcatggtatgaattcagagtgtgacttaagggtcaattcaaagcagtattttgacttttcatttgtaaaataaaaatttccactattaaaaaaaaatc

SEQ ID NO: 54181 - DNA, 1234 bp, Homo sapiens
tggtgcggcgattctagagtgatccctgcactgtagatcgctcgagcgcgtataccgtccgggaaggccggagcagcaaatggatttctcatggaagtttgtgttgattcagtggaatcagctgtgaatgcagaaagaggaggtgctgatcggattgaattatgttctggtttatcagaggggggaactacacccagcatgggtgtccttcaagtagtgaagcagagtgttcagatcccagtttttgtgatgattcggccacggggaggtgattttttgtattcagatcgtgaaattgaggtgatgaaggctgacattcgtcttgccaagctttatggtgctgatggtttggtttttggggcattgactgaagatggacacattgacaaagagctgtgtatgtcccttatggctatttgccgccctctgccagtcactttccaccgagcctttgacatggttcatgatccaatggcagctctggagaccctcttaaccttgggatttgaacgcgtgttgaccagtggatgtgacagttcagcattagaagggctacccctaataaagcgactcattgagcaggcaaaaggcaggattgtggtaatgccaggaggtggtataacagacagaaatctacaaaggatccttgagggttcaggtgctacagaattccactgttctgctcggtctactagagactcgggaatgaagtttcgaaattcatctgttgccatgggagcctcactttcttgctcagaatattccctaaaggtaacagatgtgaccaaagtaaggactttgaatgctatcgcaaagaacatcctggtgtagccagacctctctgagagacatggatatcacaggatgaaggtagaactataatctgcaattctctatgacacagctttaaccttcttctctggccaggacagtcgcaatctttgttttaagtttcacatggccatggagaatgtgcccaagaagaaaaagaatttgaaacagagatacagtcacttcctttgcttagtcttaccagtgattgtcatcatggttaaagctggtctgtgcttcttccatagacagaagcttagtctgttttcagtggaattaattgatgaactgggaaaattttaactgcatggtatgaattcagagtgtgacttaagggtcaattcaaagcagtattttgacttttcatttgtaaaataaaaatttccactattaaaaaaaaatc

SEQ ID NO: 54182 - DNA, 1287 bp, Homo sapiens
gtcggggacgcgcgcacgggcgcgcgcagctgttgacgcgcttcttagctggtgcgcgccggagcccaaattccaagtggaaactgcaggcgcacgagggaggaacgcgtggagcatgaaaaggagcagcaaatggatttctcatggaagtttgtgttgattcagtggaatcagctgtgaatgcagaaagaggaggtgctgatcggattgaattatgttctggtttatcagaggggggaactacacccagcatgggtgtccttcaagtagtgaagcagagtgttcagatcccagtttttgtgatgattcggccacggggaggtgattttttgtattcagatcgtgaaattgaggtgatgaaggctgacattcgtcttgccaagctttatggtgctgatggtttggtttttggggcattgactgaagatggacacattgacaaagagctgtgtatgtcccttatggctatttgccgccctctgccagtcactttccaccgagcctttgacatggttcatgatccaatggcagctctggagaccctcttaaccttgggatttgaacgcgtgttgaccagtggatgtgacagttcagcattagaagggctacccctaataaagcgactcattgagcaggcaaaaggcaggattgtggtaatgccaggaggtggtataacagacagaaatctacaaaggatccttgagggttcaggtgctacagaattccactgttctgctcggtctactagagactcgggaatgaagtttcgaaattcatctgttgccatgggagcctcactttcttgctcagaatattccctaaaggtaacagatgtgaccaaagtaaggactttgaatgctatcgcaaagaacatcctggtgtagccagacctctctgagagacatggatatcacaggatgaaggtagaactataatctgcaattctctatgacacagctttaaccttcttctctggccaggacagtcgcaatctttgttttaagtttcacatggccatggagaatgtgcccaagaagaaaaagaatttgaaacagagatacagtcacttcctttgcttagtcttaccagtgattgtcatcatggttaaagctggtctgtgcttcttccatagacagaagcttagtctgttttcagtggaattaattgatgaactgggaaaattttaactgcatggtatgaattcagagtgtgacttaagggtcaattcaaagcagtattttgacttttcatttgtaaaataaaaatttccactattaaaaaaaaatc

SEQ ID NO: 54183 - DNA, 1265 bp, Homo sapiens
gtcggggacgcgcgcacgggcgcgcgcagctgttgacgcgcttcttagctggtgcgcgccggagcccaaattccaagtggaaactgcaggcgcacgagggaggaacgcgtggagcatgaaaaggcagggggcctcctctgagcgaaaacgagcgcggataccgtccgggaaggccggagcagcaaatggatttctcatggaagtttgtgttgattcagtggaatcagctgtgaatgcagaaagaggaggtgctgatcggattgaattatgttctggtttatcagaggggggaactacacccagcatgggtgtccttcaagtagtgaagcagagtgttcagatcccagtttttgtgatgattcggccacggggaggtgattttttgtattcagatcgtgaaattgaggtgatgaaggctgacattcgtcttgccaagctttatgctatttgccgccctctgccagtcactttccaccgagcctttgacatggttcatgatccaatggcagctctggagaccctcttaaccttgggatttgaacgcgtgttgaccagtggatgtgacagttcagcattagaagggctacccctaataaagcgactcattgagcaggcaaaaggcaggattgtggtaatgccaggaggtggtataacagacagaaatctacaaaggatccttgagggttcaggtgctacagaattccactgttctgctcggtctactagagactcgggaatgaagtttcgaaattcatctgttgccatgggagcctcactttcttgctcagaatattccctaaaggtaacagatgtgaccaaagtaaggactttgaatgctatcgcaaagaacatcctggtgtagccagacctctctgagagacatggatatcacaggatgaaggtagaactataatctgcaattctctatgacacagctttaaccttcttctctggccaggacagtcgcaatctttgttttaagtttcacatggccatggagaatgtgcccaagaagaaaaagaatttgaaacagagatacagtcacttcctttgcttagtcttaccagtgattgtcatcatggttaaagctggtctgtgcttcttccatagacagaagcttagtctgttttcagtggaattaattgatgaactgggaaaattttaactgcatggtatgaattcagagtgtgacttaagggtcaattcaaagcagtattttgacttttcatttgtaaaataaaaatttccactattaaaaaaaaatc

SEQ ID NO: 54184 - DNA, 1206 bp, Homo sapiens
gtcggggacgcgcgcacgggcgcgcgcagctgttgacgcgcttcttagctggtgcgcgccggagcccaaattccaagtggaaactgcaggcgcacgagggaggaacgcgtggagcatgaaaaggcagggggcctcctctgagcgaaaacgagcgcggataccgtccgggaaggccggagcagcaaatggatttctcatggaagtttgtgttgattcagtggaatcagctgtgaatgcagaaagaggaggtgctgatcggattgaattatgttctggtttatcagaggggggaactacacccagcatgggtgtccttcaagtagtgaagcagagtgttcagatcccagtttttgtgatgattcggccacggggaggtgattttttgtattcagatcgtgaaattgaggtgatgaaggctgacattcgtcttgccaagctttatggtgctgatggtttggtttttggggcattgactgaagatggacacattgacaaagagctgtgtatgtcccttatggctatttgccgccctctgccagtcactttccaccgagcctttgacatggttcatgatccaatggcagctctggagaccctcttaaccttgggatttgaacgcgtgttgaccagtggatgtgacagttcagcattagaagggctacccctaataaagcgactcattgagcagaaattcatctgttgccatgggagcctcactttcttgctcagaatattccctaaaggtaacagatgtgaccaaagtaaggactttgaatgctatcgcaaagaacatcctggtgtagccagacctctctgagagacatggatatcacaggatgaaggtagaactataatctgcaattctctatgacacagctttaaccttcttctctggccaggacagtcgcaatctttgttttaagtttcacatggccatggagaatgtgcccaagaagaaaaagaatttgaaacagagatacagtcacttcctttgcttagtcttaccagtgattgtcatcatggttaaagctggtctgtgcttcttccatagacagaagcttagtctgttttcagtggaattaattgatgaactgggaaaattttaactgcatggtatgaattcagagtgtgacttaagggtcaattcaaagcagtattttgacttttcatttgtaaaataaaaatttccactattaaaaaaaaatc

SEQ ID NO: 54185 - DNA, 428 bp, Homo sapiens
ggcttcccaaccgtcacctctcctttgagtttttcagtatatatcttcctgaaattggctttaaaaagcttcaaggaggaaaaaattttgaagtgtatcctgcttgcctaagccttacccatgacctaatgttaactctttttgtgtggtccccggttgtgagcagacaggctggaactaaagcacacatggcagtgcaccaacttgactcctgtcataaaactgataaaaggtgatctgttcatcttcttaagtactcttagcactattattcatgacatggtacttagacacaaatgtacacaattctaaagcagatcattcaagtatttcatttttcctcatctttcttcttcttccagtacatataattgacatacacatatgttgagagctttcctatatttctttaatcactgtcaggatca

SEQ ID NO: 54186 - DNA, 86 bp, Homo sapiens
aatgattatttcggactctgagtcttggatggtcgtctctacaagctcccaaaggaaaacacccatgtggtttttgcctgcttgag

SEQ ID NO: 54187 - DNA, 354 bp, Homo sapiens
agctaaggtggcaggagtgtaggagacagggagaaacaatagtaaacgatgaggtcagaaatataggcaggcgtcaaggccaggggcagtggctcaggccggtaatcccagcactttgggaggcctaggtgggagtatcacttgagcccaagagtttgtacaccaggctaggcaacatagtgtgaccccatctctacagaaaaaatggaaaaattagccaggcatggttgtgcatgcctgtagtaccagctactatctggggctgaggtgggtgcattgcttgagcccaggaaggagattgaggctccagtgagtcatgatcatgccactgccctccagcttgtgagacagagg

SEQ ID NO: 54188 - DNA, 628 bp, Homo sapiens
caaagctgtcatccgacagcacataaagaccagattatctcatttgtgtcccattttgatcataaaatagttcaatgtatgtaacattttccttaaagcagtccaaatgtaaaaaaagaagttggaacctgcaacacattccggaataatttggaaaccttgatgcaatccagactcacctggcaccctttctcttccctaaaacgtgccttttttccatttctttttgactttgagaaaaaaactctgttcttactggtaaaatagcctcctgtttccttttctttcctgtaaattatgagataagtttgcatttcatacctttccagaaatctctgttgattgtggtctgacctcagattcatgatttctgggaaagaaagaattagaatcactgctgtgaacattagaagtgcggtgagtagttcgtgttgtggatttgagatggaaaacaggtgaccagtacctgtttgttgttccggaacttatttcctggtgctgctagatggtatgccggcaaccacgtccaactcatgccaatgacttttaaaaatgtcatctcaaatgccacatgttatgtcttggatgtagttagggctagttgtggcctttttgtatggtagaaacc

SEQ ID NO: 54189 - DNA, 667 bp, Homo sapiens
gaacttgagagcctgtcaacccaggtgtgtaggctgaagcaggtcctgactgttccacagaactctctggccctcagctcccagaagcaggggcacaaggggcctgggccccatcgttctcaagcttgccccatgtttttttatccaaagaatttgttaattatttatgaagagaaactacttattagcccatatattcatgaatagttcagatcagtgacaaacttctaagtaattcaacccaaagaaattcttcatattccaaaatcactttgcattctgagagatagcagccttcctcatctcctcgaagtatttcaatggcatcataacttctgtagacatctgtgccccatagaaatctgaaaatgccttctttcttggtccagcccctgcaaactgagagagccgcagcccccagggatacagtgaatgctcccacaatatgaaattgcagaatggtggccagaaggccacatgtctgaggtttcatgaaagcactggaaaccatggtagttactgttcttgataagtatgtcggcctcaacaccagtgcccttcctggctgatgaagaaatggattgccacttgccctgaaaggatgtcagctgcccagctcagtggctggctgagcatctggttcccctagcccaatcccacactccac

SEQ ID NO: 54190 - DNA, 309 bp, Homo sapiens
tacataccttgcatttcattactgggtctcgatctaatatttttccaaatcctatcaaggtatggtagtgtattcacttcagctaacaaattatccttcacaatagaattttaaatgaaactttaaatgcattaataataactttctgtttatggacattagctcaagttgagtcttaggagtatatcacattataccattatctgtgtggatatgaaggaatgtatgtatttaacattttacatgtactgtttactatggtctgcatgaagatttatgcatgtgggttcatagaaagataatgggggc

SEQ ID NO: 54191 - DNA, 564 bp, Homo sapiens
gttttgtggtccttgttgcatgccccagaaagggactgaagtaagggtgcctcagggacacaccctgtaggatgaagcacttagcgagaaagtggggggacagaatgtgacttttcagtgtggcaggatgagaaaatttagtcaccttccttaagactaaaggaagagtgattttctagaaaactcaggttcatgaggaaagtagttgattcaggggttggtagggaagaaggaaaaatagattgagaaagagcagccgcagtttaggttagaacactttgcctgtggtaacatagggtgctcacggatgggaatatactctctgagataacttatgcggaggcatgtaactgatcactagctccagcatatctgaaaacatgacctaatagaatctctgtaccttatgccatttcatattataaaacctaaaatctaataggagcccttgttccaaaacagtttatatgtaggcagataatatctaaagaatatagtattttatcctaggtactttttacctagggtacagtataatatcctaggatatttgaataccaatgg

SEQ ID NO: 54192 - DNA, 393 bp, Homo sapiens
gtaaatttcagaggcagaacactccctgtgagcccgaacctcttcctgctttgttgcagtcttcataacgattgctttaaaagactgcattgatataacatcatctctcttctctgcatctttgacttgctagcttaactggtctagaggagggcttagcactgattttcagtattcattttcctcaaaacttcaattcagcctgggtttcttcagcaggagggctcgggggaaccagagccagggaccagagtcatttcagtgcaccagctcaagaaatgaatattccaggccaagaatccccaagtgttctttctgaagtccttcctggtggagctcaaagagatgaaaaacgcaagcccgcttttcagttcttatcaggaaactgcatag

SEQ ID NO: 54193 - DNA, 226 bp, Homo sapiens
cacagagtacaagagctgaggcttggaagcctctgcttagatttcaaaggatgaatggaaaagcctggatatccaggcatccaggcagaagcccactacaggggtggaaccttcatgaataactctattggggcagtatggaaggcaaatgtggggtcagagccgccacacagagtccccactggggcattacttagtggagttgtgagaagagggccccagaatg

SEQ ID NO: 54194 - DNA, 814 bp, Homo sapiens
tcttgagctaggaaaggattactcgcgcctcgttagaatcagacatggcttcaggggatgcaggacgctcccctgagctgcctgtcaccgactaggtggagcagtgtttcttccgcagactcaactgagaagtcagcctctggggcaggcaccaggaatctgccttttcagttctgtctccggcaggctttgaggatgaaggctgcgggcattctgaccctcattggctgcctggtcacaggcgccgagtccaaaatctacactcgttgcaaactggcaaaaatattctcgagggctggcctggacaattactggggcttcagccttggaaactggatctgcatggcatattatgagagcggctacaacaccacagcccagacggtcctggatgacggcagcatcgactatggcatcttccagatcaacagcttcgcgtggtgcagacgcggaaagctgaaggagaacaaccactgccatgtcgcctgctcagccttgatcactgatgacctcacagatgcaattatctgtgccaggaaaattgttaaagagacacaaggaatgaactattggcaaggctggaagaaacattgtgagggcagagacctgtccgagtggaaaaaaggctgtgaggtttcctaaactggaactggacccaggatgctttgcagcaacgccctaggatttgcagtgaatgtccaaatgcctgtgtcatcttgtcccgtttcctcccaatattccttctcaaacttggagagggaaaattaagctatacttttaagaaaataaatatttccatttaaatgtcaaaaaa

SEQ ID NO: 54195 - DNA, 891 bp, Homo sapiens
tcttgagctaggaaaggattactcgcgcctcgttagaatcagacatggcttcaggggatgcaggacgctcccctgagctgcctgtcaccgactaggtggagcagtgtttcttccgcagactcaactgagaagtcagcctctggggcaggcaccaggaatctgccttttcagttctgtctccggcaggctttgaggatgaaggctgcgggcattctgaccctcattggctgcctggtcacaggcgccgagtccaaaatctacactcgttgcaaactggcaaaaatattctcgagggctggcctggacaattactggggcttcagccttggaaactggatctgcatggcatattatgagagcggctacaacaccacagcccagacggtcctggatgacggcagcatcgactatggcatcttccagatcaacagcttcgcgtggtgcagacgcggaaagctgaaggagaacaaccactgccatgtcgcctgctcagccttgatcactgatgacctcacagatgcaattatctgtgccaggaaaattgttaaagagacacaaggaatgaactattgaagtcctcagcacatgttcttcatggaggtcatctttccctggactgcttggctactttagaagtcaaatcaagactagaagtatgaaagccaatcacaatttcccaacaattaggatccatcattcaccatttggttggtccctgctgctaagaattccaaactacaagggaaaaagttaaactcagctagatttccctgcctgctcaagaccacaaccccagtggcaacataattcttggtgaggatgaaaaaacgaaatctatacttgccttgagaaagcattcatgcaaaataaagcccagattcataagtaatc

SEQ ID NO: 54196 - DNA, 762 bp, Homo sapiens
tcttgagctaggaaaggattactcgcgcctcgttagaatcagacatggcttcaggggatgcaggacgctcccctgagctgcctgtcaccgactaggtggagcagtgtttcttccgcagactcaactgagaagtcagcctctggggcaggcaccaggaatctgccttttcagttctgtctccggcaggctttgaggatgaaggctgcgggcattctgaccctcattggctgcctggtcacaggcgccgagtccaaaatctacactcgttgcaaactggcaaaaatattctcgagggctggcctggacaattactggggcttcagccttggaaactggatctgcatggcatattatgagagcggctacaacaccacagcccagacggtcctggatgacggcagcatcgactatggcatcttccagatcaacagcttcgcgtggtgcagacgcggaaagctgaaggagaacaaccactgccatgtcgcctgctcagccttgatcactgatgacctcacagatgcaattatctgtgccaggaaaattgttaaagagacctgtccgagtggaaaaaaggctgtgaggtttcctaaactggaactggacccaggatgctttgcagcaacgccctaggatttgcagtgaatgtccaaatgcctgtgtcatcttgtcccgtttcctcccaatattccttctcaaacttggagagggaaaattaagctatacttttaagaaaataaatatttccatttaaatgtcaaaaaa

SEQ ID NO: 54197 - DNA, 269 bp, Homo sapiens
aggcgcccgccaccacacccggctagtatttgtacttttagtagagacggggtttcaccacgttggccgggctggtctcgaactcctgacctcggctgatccgcccgcctcggcctcccaaagtgctgagatcacaggcgtgagccaccgcgcctggccaaaaattatttattttttagttgacaaacaaaaaccagagtctgaatgttacctgctctacagtggcacctgctaaagtttgagaaccactgccctgggtggccacatcg

SEQ ID NO: 54198 - DNA, 198 bp, Homo sapiens
ctccccaaaaaccccctaggctttactgttcattgttccttcccaccaacccctggaaaccactgatatttttcatttagaagggatttacaatcactggtatcttttacttctctgtaattttgcctttttcagaatattatacagtttgcaattatacagcatgtagccttttcagaccggcttcttcacttaaca

SEQ ID NO: 54199 - DNA, 4255 bp, Homo sapiens
acttgtaggaaagcctctttgcatttagacgtaattgaactggaaggaaggagactggccagggaatagggggaaagaaattctcccgttgctcctcctactgtttatcacttgcctccggactgtcttccaaaccaagctcagctgcatcaaggtggcagcagaataccctgtgcaagtgccagcgtcttcttagccgctctgtgcatcccaggctgccctgttatctggccaccgtccctggccattgggactgcttctgatggctctggcctctgctgccccagggagcatcttctgtaagcagctccttttctctctcctggttttaacattactttgcgatgcttgtcagaaagtttatcttcgagttccttctcatcttcaggctgaaacacttgtaggcaaagtgaatctggaggagtgtctcaagtcggccagcctaatccggtccagtgaccctgccttcagaattctagaagatggctcaatttacacaacacatgacctcattttgtcttctgaaaggaaaagtttttccattttcctttcagatggtcagagacgggaacaacaagagataaaagttgtactgtcagcaagagaaaacaagtctcctaagaagagacataccaaagacacagccctcaagcgcagcaagagacgatgggctcctattccagcttcattgatggagaactcgttgggtccatttccacaacacgttcagcagatccaatctgatgctgcacagaattacaccatcttttattccataagtgggccaggcgtggacaaagaacccttcaatttgttttacatagagaaagacactggggatatcttttgtacaaggagcattgaccgtgagaaatacgaacagtttgcgttatatggctatgcaacaactgcagatggctatgcaccagaatatccactccctttgatcatcaaaattgaagatgataatgataacgccccatattttgaacacagagtgactatctttactgtgcctgaaaattgccgatccggaacttcagtgggaaaagtgaccgccacagaccttgacgaacctgacactctccatactcgtctgaaatataaaatcttacaacaaatcccagatcatccaaagcatttctccatacacccagataccggtgtcatcaccacaactacaccttttctggatagagaaaaatgtgatacttaccagttaataatggaagtgcgagacatgggtggtcagcctttcggtttatttaatacaggaacaattactatttcacttgaggatgaaaatgacaatccaccatctttcacagaaacttcttatgttacagaagtagaagaaaacagaattgacgtggagattttgcgaatgaaggtacaggatcaggatttgccaaacactcctcactcaaaggctgtatacaaaatcttacaaggaaatgaaaatggaaacttcataattagcacagatccaaatacaaatgaaggagtgctgtgtgttgtcaagccattgaactatgaagtcaatcgccaagttattttgcaagttggtgtcattaacgaggcacaattctctaaagcagcgagctcacaaactcctacaatgtgcactacaactgtcaccgttaaaattatagacagtgatgagggccctgaatgccaccctccagtgaaagttattcagagtcaagatggcttcccagctggccaagaactccttggatacaaagcactggacccggaaatatccagtggtgaaggcttaaggtatcagaagttaggggatgaagataactggtttgaaattaatcaacacactggcgacttgagaactctaaaagtactagatagagaatccaaatttgtaaaaaacaaccaatacaatatttcagttgttgcagtggatgcagttggccgatcttgcactggaacattagtagttcatttggatgattacaacgatcacgcacctcaaattgacaaagaagtgaccatttgtcagaataatgaggattttgctgttctgaaacctgtagatccagatggacctgaaaatggaccaccttttcaattctttctggataattctgccagtaaaaactggaacatagaagaaaaggatggtaaaactgccattcttcgtcaacggcaaaatcttgattataactattattctgtgcctattcaaataaaagacaggcatggtttagttgcaacacatatgttaacagtgagagtatgtgactgttcaactccatctgagtgtagaatgaaggataaaagtacaagagacgttagaccaaatgtaatacttggaagatgggctattcttgctatggtgttgggttctgtattgttattatgtattctgtttacatgtttctgtgtcactgctaagagaacagtcaagaaatgttttccagaagacatagcccagcaaaatttaattgtatcaaatactgaaggacctggagaagaagtaacggaagcaaatattagactccccatgcagacatccaacatttgtgacacaagcatgtctgttggtactgttggtggccagggaatcaaaacacagcaaagttttgagatggtcaaaggaggctacactttggattccaacaaaggaggtggacatcagaccttggagtccgtcaagggagtggggcagggagatactggcagatatgcgtacacggactggcagagtttcacccaacctcggcttggcgaagaatccattagaggacacactctgattaaaaattaaacagtaaaagaaggtgtatttgtgtggacaagatgaggagcataaacattgtgaagactacgtttgttcgtataactatgaaggcaaaggttctctggccggctcagtaggttgctgcagcgatcggcaggaagaagagggactggagtttctagatcacctggaacccaaatttaggacattagcaaagacatgcatcaagaaataaatgtgccttttaatagtgtaatatccacagatgcataagtaggaatttattacttgcagaatgttagcagcatctgctaatgtttttgtttatggaggtaaactttgtcatgtataggtaagggtactataaatatgagattcccctacattctccttgtctggtataacttccatgttctctagaaatcaaggttttgtttgttaattctcttttatatgcatgtatatattgcccttttcacgactgtactgtacaccttcttgcaccttttatttgcaaactgatgttactttttgtgctgtggaagagcatttgggaaagctgggtattatagaggccaatgaaagatgaatttgcattgtagatgtacgaattaaatatgttcttcaaaatcttggggagaattatgttcttagaacatagttggtgccagataattgcattctctccacctgagtggtttaaaaaggacttttaagtattcttcagtgcaatcttcagttttgtgattaagttcatttctcttttacacttttgtactcctcagagcagtgctcccagcattgttttctttcaggatccttcagagctcagtccctggacctctgcccatgtggatttgttgttaggtcactccaacttctaaggttcttggaaagataaggaccagaacaagctcatagcaaattgaggggcagagattttatgaagattacatgagaagatttccatgaaagaattgcagccctgaggtccatgggttgacttatgctcacaaatatgtttcgtttgctcaacatggtttactactaacattttaaaaatataaatactttagcaaaaacattcactcttgagtttgacataggcctgccttatctgtggttgccacctgccatctccaagcatttggacaactagccctgatgcattaggctgcaactctgatatacagagactagcaccttgaatatgccagaaattgaattaccatctgtattagaacttaagactcagcctaaatttacagttactttaagaaaatgggcagtcagaattagggactagaatgtatatgagaaacccccactctactaaaaatataagaaattagccggacatggtggcgaatgactgtaatcccagctactcaggaggctgaggcaggagaatcgcttgaatccaggaggcggaggttgcagtgagccgagattgccactgcactccagcctgggcaacaagagcgaaactccgtctca

SEQ ID NO: 54200 - DNA, 3617 bp, Homo sapiens
acttgtaggaaagcctctttgcatttagacgtaattgaactggaaggaaggagactggccagggaatagggggaaagaaattctcccgttgctcctcctactgtttatcacttgcctccggactgtcttccaaaccaagctcagctgcatcaaggtggcagcagaataccctgtgcaagtgccagcgtcttcttagccgctctgtgcatcccaggctgccctgttatctggccaccgtccctggccattgggactgcttctgatggctctggcctctgctgccccagggagcatcttctgtaagcagctccttttctctctcctggttttaacattactttgcgatgcttgtcagaaagtttatcttcgagttccttctcatcttcaggctgaaacacttgtaggcaaagtgaatctggaggagtgtctcaagtcggccagcctaatccggtccagtgaccctgccttcagaattctagaagatggctcaatttacacaacacatgacctcattttgtcttctgaaaggaaaagtttttccattttcctttcagatggtcagagacgggaacaacaagagataaaagttgtactgtcagcaagagaaaacaagtctcctaagaagagacataccaaagacacagccctcaagcgcagcaagagacgatgggctcctattccagcttcattgatggagaactcgttgggtccatttccacaacacgttcagcagatccaatctgatgctgcacagaattacaccatcttttattccataagtgggccaggcgtggacaaagaacccttcaatttgttttacatagagaaagacactggggatatcttttgtacaaggagcattgaccgtgagaaatacgaacagtttgcgttatatggctatgcaacaactgcagatggctatgcaccagaatatccactccctttgatcatcaaaattgaagatgataatgataacgccccatattttgaacacagagtgactatctttactgtgcctgaaaattgccgatccggaacttcagtgggaaaagtgaccgccacagaccttgacgaacctgacactctccatactcgtctgaaatataaaatcttacaacaaatcccagatcatccaaagcatttctccatacacccagataccggtgtcatcaccacaactacaccttttctggatagagaaaaatgtgatacttaccagttaataatggaagtgcgagacatgggtggtcagcctttcggtttatttaatacaggaacaattactatttcacttgaggatgaaaatgacaatccaccatctttcacagaaacttcttatgttacagaagtagaagaaaacagaattgacgtggagattttgcgaatgaaggtacaggatcaggatttgccaaacactcctcactcaaaggctgtatacaaaatcttacaaggaaatgaaaatggaaacttcataattagcacagatccaaatacaaatgaaggagtgctgtgtgttgtcaagccattgaactatgaagtcaatcgccaagttattttgcaagttggtgtcattaacgaggcacaattctctaaagcagcgagctcacaaactcctacaatgtgcactacaactgtcaccgttaaaattatagacagtgatgagggccctgaatgccaccctccagtgaaagttattcagagtcaagatggcttcccagctggccaagaactccttggatacaaagcactggacccggaaatatccagtggtgaaggcttaaggtatcagaagttaggggatgaagataactggtttgaaattaatcaacacactggcgacttgagaactctaaaagtactagatagagaatccaaatttgtaaaaaacaaccaatacaatatttcagttgttgcagtggatgcagttggccgatcttgcactggaacattagtagttcatttggatgattacaacgatcacgcacctcaaattgacaaagaagtgaccatttgtcagaataatgaggattttgctgttctgaaacctgtagatccagatggacctgaaaatggaccaccttttcaattctttctggataattctgccagtaaaaactggaacatagaagaaaaggatggtaaaactgccattcttcgtcaacggcaaaatcttgattataactattattctgtgcctattcaaataaaagacaggcatggtttagttgcaacacatatgttaacagtgagagtatgtgactgttcaactccatctgagtgtagaatgaaggataaaagtacaagagacgttagaccaaatgtaatacttggaagatgggctattcttgctatggtgttgggttctgtattgttattatgtattctgtttacatgtttctgtgtcactgctaagagaacagtcaagaaatgttttccagaagacatagcccagcaaaatttaattgtatcaaatactgaaggacctggagaagaagtaacggtaaatcagatttcacatccctttgaattgtacggtgaacaaatgatgacagattattactcaacaatgtcaatgataatatcactaatgtttattgagcacttactatgctaagcagagtttcaagtgccctcagtgttttaaatcatttaaacctcccaattctacagggctagggctgtcacaacaaactgagtgacttaaacaacagacaagtattgtttcacagatctggagactagaaatcagagatcaaggtgttggcaggtccgtgctccctctgaaggaactggggagggatctgttccaggactctctcctagcttctgccaattccctggcttatggcagtggaaatcaaatcttcatatggcgattctccatgtgtgcatgtctgtgtccaaatttccccgttttataaggatactgattatattcgcttagggacccactctaatcccatataacctcatcttagctaattacatctacaatgaccctatttccaaataagttcacattctgagttactgagggttagggcatatgaatttttaggggactcaattcaacccatcacacctatgatactattattctgattttatgtatgaggaacagagaggcacagcaggcaagtgatttgcctatggtgaaaaaaaatgaaaatgaattgttagtttccatttttcaaattcactttatcactctcactttacttttaggaagcaaatattagactccccatgcagacatccaacatttgtgacacaagcatgtctgttggtactgttggtggccagggaatcaaaacacagcaaagttttgagatggtcaaaggaggctacactttggattccaacaaaggaggtggacatcagaccttggagtccgtcaagggagtggggcagggagatactggcagatatgcgtacacggactggcagagtttcacccaacctcggcttggcgaagtaagttccactgtctttgaggtcatattacatggaagttaaatgctagttataaatcagaatttcccaaaagttttactcctcatatacctggaattcaacatcttttacctgttggattatcatagatgtggatgtccgct

SEQ ID NO: 54201 - DNA, 4209 bp, Homo sapiens
acttgtaggaaagcctctttgcatttagacgtaattgaactggaaggaaggagactggccagggaatagggggaaagaaattctcccgttgctcctcctactgtttatcacttgcctccggactgtcttccaaaccaagctcagctgcatcaaggtggcagcagaataccctgtgcaagtgccagcgtcttcttagccgctctgtgcatcccaggctgccctgttatctggccaccgtccctggccattgggactgcttctgatggctctggcctctgctgccccagggagcatcttctgtaagcagctccttttctctctcctggttttaacattactttgcgatgcttgtcagaaagtttatcttcgagttccttctcatcttcaggctgaaacacttgtaggcaaagtgaatctggaggagtgtctcaagtcggccagcctaatccggtccagtgaccctgccttcagaattctagaagatggctcaatttacacaacacatgacctcattttgtcttctgaaaggaaaagtttttccattttcctttcagatggtcagagacgggaacaacaagagataaaagttgtactgtcagcaagagaaaacaagtctcctaagaagagacataccaaagacacagccctcaagcgcagcaagagacgatgggctcctattccagcttcattgatggagaactcgttgggtccatttccacaacacgttcagcagatccaatctgatgctgcacagaattacaccatcttttattccataagtgggccaggcgtggacaaagaacccttcaatttgttttacatagagaaagacactggggatatcttttgtacaaggagcattgaccgtgagaaatacgaacagtttgcgttatatggctatgcaacaactgcagatggctatgcaccagaatatccactccctttgatcatcaaaattgaagatgataatgataacgccccatattttgaacacagagtgactatctttactgtgcctgaaaattgccgatccggaacttcagtgggaaaagtgaccgccacagaccttgacgaacctgacactctccatactcgtctgaaatataaaatcttacaacaaatcccagatcatccaaagcatttctccatacacccagataccggtgtcatcaccacaactacaccttttctggatagagaaaaatgtgatacttaccagttaataatggaagtgcgagacatgggtggtcagcctttcggtttatttaatacaggaacaattactatttcacttgaggatgaaaatgacaatccaccatctttcacagaaacttcttatgttacagaagtagaagaaaacagaattgacgtggagattttgcgaatgaaggtacaggatcaggatttgccaaacactcctcactcaaaggctgtatacaaaatcttacaaggaaatgaaaatggaaacttcataattagcacagatccaaatacaaatgaaggagtgctgtgtgttgtcaagccattgaactatgaagtcaatcgccaagttattttgcaagttggtgtcattaacgaggcacaattctctaaagcagcgagctcacaaactcctacaatgtgcactacaactgtcaccgttaaaattatagacagtgatgagggccctgaatgccaccctccagtgaaagttattcagagtcaagatggcttcccagctggccaagaactccttggatacaaagcactggacccggaaatatccagtggtgaaggcttaaggtatcagaagttaggggatgaagataactggtttgaaattaatcaacacactggcgacttgagaactctaaaagtactagatagagaatccaaatttgtaaaaaacaaccaatacaatatttcagttgttgcagtggatgcagttggccgatcttgcactggaacattagtagttcatttggatgattacaacgatcacgcacctcaaattgacaaagaagtgaccatttgtcagaataatgaggattttgctgttctgaaacctgtagatccagatggacctgaaaatggaccaccttttcaattctttctggataattctgccagtaaaaactggaacatagaagaaaaggatggtaaaactgccattcttcgtcaacggcaaaatcttgattataactattattctgtgcctattcaaataaaagacaggcatggtttagttgcaacacatatgttaacagtgagagtatgtgactgttcaactccatctgagtgtagaatgaaggataaaagtacaagagacgttagaccaaatgtaatacttggaagatgggctattcttgctatggtgttgggttctgtattgttattatgtattctgtttacatgtttctgtgtcactgctaagagaacagtcaagaaatgttttccagaagacatagcccagcaaaatttaattgtatcaaatactgaaggacctggagaagaagtaacggaagcaaatattagactccccatgcagacatccaacatttgtgacacaagcatgtctgttggtactgttggtggccagggaatcaaaacacagcaaagttttgagatggtcaaaggaggctacactttggattccaacaaaggaggtggacatcagaccttggagtccgtcaagggagtggggcagggagatactggcagatatgcgtacacggactggcagagtttcacccaacctcggcttggcgaaaaggtgtatttgtgtggacaagatgaggagcataaacattgtgaagactacgtttgttcgtataactatgaaggcaaaggttctctggccggctcagtaggttgctgcagcgatcggcaggaagaagagggactggagtttctagatcacctggaacccaaatttaggacattagcaaagacatgcatcaagaaataaatgtgccttttaatagtgtaatatccacagatgcataagtaggaatttattacttgcagaatgttagcagcatctgctaatgtttttgtttatggaggtaaactttgtcatgtataggtaagggtactataaatatgagattcccctacattctccttgtctggtataacttccatgttctctagaaatcaaggttttgtttgttaattctcttttatatgcatgtatatattgcccttttcacgactgtactgtacaccttcttgcaccttttatttgcaaactgatgttactttttgtgctgtggaagagcatttgggaaagctgggtattatagaggccaatgaaagatgaatttgcattgtagatgtacgaattaaatatgttcttcaaaatcttggggagaattatgttcttagaacatagttggtgccagataattgcattctctccacctgagtggtttaaaaaggacttttaagtattcttcagtgcaatcttcagttttgtgattaagttcatttctcttttacacttttgtactcctcagagcagtgctcccagcattgttttctttcaggatccttcagagctcagtccctggacctctgcccatgtggatttgttgttaggtcactccaacttctaaggttcttggaaagataaggaccagaacaagctcatagcaaattgaggggcagagattttatgaagattacatgagaagatttccatgaaagaattgcagccctgaggtccatgggttgacttatgctcacaaatatgtttcgtttgctcaacatggtttactactaacattttaaaaatataaatactttagcaaaaacattcactcttgagtttgacataggcctgccttatctgtggttgccacctgccatctccaagcatttggacaactagccctgatgcattaggctgcaactctgatatacagagactagcaccttgaatatgccagaaattgaattaccatctgtattagaacttaagactcagcctaaatttacagttactttaagaaaatgggcagtcagaattagggactagaatgtatatgagaaacccccactctactaaaaatataagaaattagccggacatggtggcgaatgactgtaatcccagctactcaggaggctgaggcaggagaatcgcttgaatccaggaggcggaggttgcagtgagccgagattgccactgcactccagcctgggcaacaagagcgaaactccgtctca

SEQ ID NO: 54202 - DNA, 2087 bp, Homo sapiens
  misc_feature (2057)..(2057): n is a, c, g, or t
ccttcccctcaggtcctgagtgaggcagtggctctctggcggtgctcgcatttaaataggagtgtgtaggcttacagcaatgaaacatctaggagcttttaactttggatctatacctgggtgtgacatttccttggtgttctctggctgcctttctggctctgcagccctgagggcacttgtgtgtgtgtgtgttctctggagaagggaagtgattatggcagagaggctcctttagattctcctcttaaacctctttggaacatgtttgaattccagaagtgaatgaacttcattcattctctcgtccagatttcagaagggactaaagtgaacggaggctttttcactccctggcatgctaagagccacattccctagctctgtgcctgcacagtgagtcttcagaatttggcccatcacaccctctgctagtatcgtttccaccaccctcctcatcctctgtcatctttatttcattctcatcgtttatctctacctccagttcagatgccatgctggctgtggctcttttcttcatcaccatcagagtgaggcaaagatgtatcctggcctagttataaagacgaataatacatgataagaaatcattaatttttttccacgtggggggcggtgctgtcctagtgattcatatatatataatttttgactccttacaataattctgggatgtgggtattacccccatttaagaatgtggaaaccaaggctctgatggctctgtaatttgcccagggtcacacagctaggaagcaagttgctgatctgcttggttccaaagtcacctctctttttcctctgagcacatttctaagccactacttagaagctcttgagataaagttggcctagctcaggtccaccgaggttttgagattgccctttgcccaaggaggagttgtgtccttggctcacctgtcatctgcctgtgactggacttgaaccctcgcacgtctcagctgacatccttgatgctgctggctgccttcctcgccctgtttcctctccatgactccaggggtttgaagcacacaggagctggacatgtcaattctgtagctcttctcccaataccactgaaggccgtgagcctctctcctgtttccagcctgcaggtgccctgttgctgctcttcattccagcttctcctcacttttctctcagtctcttgagcttggaagccttactgtagcttgtgtctcctccctgggcacttgaggtcaggcttttgcctttttgtcacattgagccacatgcctttgatacacagttgtagcaaagaagggaggtgatgaacttgctcactttcttttctgatttccctccctactcatcctgcactccccaccgaaacccagatatcttatagtctaaggcttgtagaggattaaggaaaggaattggagatgggttttacttagttcacagaaaagctttctttgggatttttcctcccccttagggcttttaagtctaggtgaagtgaaagttcacacatgtgtttgtttggttgctctgtaattagctactagtttttatccctagaccttctctgctccagtgtcttgttcatgtgtcctgaccccgtgtccttgaattcccactttgctttgggatttaagttattgtatgttgtcaacaatatttaaagatgaaaaagtcctgaaggaaacttaccaggttctttcctttggcttttttttttttttctttcgaggtactgtaaattgttaactagggatgccaagcaggcttggttcaatggctaaacctcttattgtattacagtgtaatgctgatctcagcctggtctcaatgccagagcacacagagacttgaataaaactgttataacgattaaaaaaaagcgcggttacagcgtaggcaacccgcggtcccacataccagggaaacacccacaagggagtgaaaaacgagacgaaccgagcagggagggacgcaccttaagcaagaccacacacaggcccaaataggggcgtcccaactatacgcacacacacgcgatagcacancgcgcgagagaagcgaagcacaggcacggg

SEQ ID NO: 54203 - DNA, 669 bp, Homo sapiens
  misc_feature (639)..(639): n is a, c, g, or t
atagacgtctgggcattctgaacccagaggtcagagtagtcacaagcggagccctggggagcgagggccccagggccgtggtgttccttgccctgcgctcactgaagtccaaggccaggtttcagaaatagtgtgctgcctgttcctgagatccttcacacctggacaccaacccagacaaagcctgacttaaaattttgatactgtattcatcgtggaatttttcaataactctgatttttaaaaaatactgcattgcaatatgatttaccttgattactgaggctcttttttttttggcttttttttttttttctttcgaggtactgtaaattgttaactagggatgccaagcaggcttggttcaatggctaaacctcttattgtattacagtgtaatgctgatctcagcctggtctcaatgccagagcacacagagacttgaataaaactgttataacgattaaaaaaaagcgcggttacagcgtaggcaacccgcggtcccacataccagggaaacacccacaagggagtgaaaaacgagacgaaccgagcagggagggacgcaccttaagcaagaccacacacaggcccaaataggggcgtcccaactatacgcacacacacgcgatagcacancgcgcgagagaagcgaagcacaggcacggg

SEQ ID NO: 54204 - DNA, 272 bp, Homo sapiens
aaagtagagattatgctgtccagtatttgacataaatccagtcataaaatttggggacaaaatgatacagttagatttttctttcaaattattcagtggaagaactgcttagaattagcttcatgtttagaatgaaacttttatccatgaagtgcacattcatttgtagcctgatcagcaatttgcatttctgccattcttatttctctgttcccctgatgatcctttacttgtgcaaaaattcttagaaattgacaaggtgtgggggctca

SEQ ID NO: 54205 - DNA, 545 bp, Homo sapiens
atgtatagcacaacaatacagttctcatcatgactgtgcagctctaaaacatcatctgctaacaggtgatgacttatgtccttaatattatcttcattttataagtgagaaatttaaggtatagagaggctaaataacatctctaaaatcgcatagtaagtgataagagacagggtctctaggtttgcctcattcagcctcgtcccagagcacagctccagggagcacgccatttatatggaatgcctgtgaagagcgccccctggaggcatgcgatgcaggggctttttttccttctctttttgccaccaaccaaggccatacttgtagtccccctggtgtcccatgggtttatgaaaagagttctccatcattttacaatataatatgcttctctttgagtactagttgagtttttcttttctacgggaacatttttaaagctgttgaggactgttgtttcttttctacggaaacatttttaaagctgttgaggactgttgtttctttctcgaaacatttttaagctatcaattgaagctata

SEQ ID NO: 54206 - DNA, 344 bp, Homo sapiens
taagaactcacaaaccaactatctgctgacttcaagagactcacttaacacataaggactcgcacaaacttaaagtaaagcgggggaaaaaggcatttcatgcaaataggcaccaaaagtgagcaggggtagctattcttatgttagacaaaatgaactttaaagcaacagcagttaaaaaagacaaagagggacattatatagtgataaaaggccttgtcctacaggaaaagatcacagtcctaaatatatatgcacctaacactggagctcccagttttataaaacaattactaacagacctaataaatgagatagaaagcaacacaataatagtgggagac

SEQ ID NO: 54207 - DNA, 709 bp, Homo sapiens
tatttgcaaatcaaacataaagcctgaaaggaaacattacttttcattaaatagacggccagccgaatgaacagagaagaagtccggacagcttttcaatgtgatggattctgtggcaaggattacatcattggggggttttatatttctataattttagattagttattttagttcccttacccccatttttaaatattcctgtcagctaaaacaaggattttcttaggaaatgatgaagccaggtttaatttctacttagtgagaagactgcattaccaccccactgttaaggtgcaggtattgtcagtagggcaaggatgggttttcttttgtaaggaatgcatttgaagggatagattacagactcagggtaatgtgaacctgtttccatgcttgggaatgtcctcccaggtgatggacatcccttaggggaagcctcaggtaggataagcaaagcctaggttcttatttgcttgtttcttaaagaaacacaataataaagacaaaaatggtgtatggatcaaacagatgaaaccagaagagtgttaatatccagaaatgtattctctaagctctgcctaattatattaaaagtaatttgcaaatctggccctgagttttctgtaaccatatgaaaacaagaaacactatcagtcacaagattctgttatagcctgggcaacatagtgagaccccatctctgcaa

SEQ ID NO: 54208 - DNA, 854 bp, Homo sapiens
ttcagtccaccaagtttgtctcagaggaatctggacccagatgtgagatacaaaacttatttgatgctctcctggtgctaatatggttggactacctaaaattatgcagagatgattgtatatttagacattatttgatatggctgtttattgcctaataaaatcttgaagagaaactgggatgaaaaggctttacaatctacctctgtctccctttattgcagaagtccggacagcttttcaatgtgatggattctgtggcaaggattacatcattggggggttttatatttctataattttagattagttattttagttcccttacccccatttttaaatattcctgtcagctaaaacaaggattttcttaggaaatgatgaagccaggtttaatttctacttagtgagaagactgcattaccaccccactgttaaggtgcaggtattgtcagtagggcaaggatgggttttcttttgtaaggaatgcatttgaagggatagattacagactcagggtaatgtgaacctgtttccatgcttgggaatgtcctcccaggtgatggacatcccttaggggaagcctcaggtaggataagcaaagcctaggttcttatttgcttgtttcttaaagaaacacaataataaagacaaaaatggtgtatggatcaaacagatgaaaccagaagagtgttaatatccagaaatgtattctctaagctctgcctaattatattaaaagtaatttgcaaatctggccctgagttttctgtaaccatatgaaaacaagaaacactatcagtcacaagattctgttatagcctgggcaacatagtgagaccccatctctgcaa

SEQ ID NO: 54209 - DNA, 432 bp, Homo sapiens
tgctaactttacttcctaatatcccattcatgcatcaacccaatgtagagtagcttctattctaactactctaccaaagctgttcttctataccgttccactcctttcactcaaagtaccccatatttttgaagaatggtatcattcatgatacaatgttctctagtaagcagacttggacatggagatatatactagggagtgcccttgaatccaaggcactgtgaaaaggagaagaaggaagctggattgagggaaagggaaaaagctgggctgaaaagaagtcctgggaccacagctttggctcatctcacaggggacttttgaaggataaaatgggcccactggcattccttttcacattgcaatggacatggactgagtctttatagggccccaagtcccctccccacctctttcacctgcctcctt

SEQ ID NO: 54210 - DNA, 394 bp, Homo sapiens
aaatagtgagggcaccttggaccccagtgcccatgactttcggggcaaggatgggaggaaggtgtaggatgtctcttgccccactgtgggcccggaactgccaccccatcccaagaccacagcctccctcctacccaggcccccctgcggatccaggccaagacggagccctgcaggaggtcagaggaggggacttctttgcaccctgcgcctctttccaatcgccagagggcagggccctacccacattggggatgggaagacagcccctacccagaggcagggctcggggctctgtccagagtgctgacagtgacctgtgtgctcgggactcaacaccaccactccactcctgccccagcagatgggataaaaaatgaggggccacatcctc

SEQ ID NO: 54211 - DNA, 106 bp, Homo sapiens
ccggcagattatcagagaagcttcacccaaaagccacatctctcctccactcagccacaccgaccaaaaatgaatgaatcacatggtaataatcagtagcatggac

SEQ ID NO: 54212 - DNA, 514 bp, Homo sapiens
tacctttatgaatatactaatttaaatctggttttagttgtccttagtaaactatcatgttcttttagcttcatgtaacagtgatcttttaaaataatctaaagattaggtagtctaaaagttattttaatctttaatgttcaattagcttaattagtacgtagataatttgccttattttgactaaggacttttaagaaattataaattacttgtatatcaaaagttcccctaacaaagtaatttaagtctcagttgttatttcaatggcacaaaaaagtgactagtttagcaataaatgtcctaaaattacttttattgcgcttcgttaataacacttttgccaactaagtaatgaagaggataccattgtgcctgataaaaaaatcataggtccaagagtgtttcaatgatggaaaacatttcaggggaaaaaatcatgaatagaattgtcaagggaataaaatatactagttatggcatagtccaaaagtattaaatattatatattaca

SEQ ID NO: 54213 - DNA, 337 bp, Homo sapiens
tttaagttctgggatacatgtgcagaatgtgcaggtttgttacataggtatacgtgccatggtggtttgctgcacctatcaacccatcatctaggttttaagccccgcatgcattagatatttgtcctaatgctctccctccccttggcccccatctccgacaggccccagtgtgtgatgttcccttccccaaagtattttcttattcagactagttgcttctaatttatttaagatttttatagttaagtgaggcatttgttgattacacaaaacatgttattgatatttgtatcacatatgcacatttttttccttttaagtatggtataccgtg

SEQ ID NO: 54214 - DNA, 528 bp, Homo sapiens
  misc_feature (31)..(31): n is a, c, g, or t
ggaacccccgggcttcagaaatcggcacganagagagccaggaaagatccagagggaattattgaaatggctggtgaatacggaatgaattgccaaataaagtgcttaccatatcatttgtgattcctggaacaaaaggcttgctatgcagccgacgaggatgggattcgaacccacgcgtgcagagcacaatggattagcagtccatcgccttaaccactcggccacctcgtcacacaaagaatcaacaacttgaatttcttcgtctgtgtagtgctcccagtgagtcttgtagaaacatgatctaatcgtttttcctggtttaatccccataaccacagtctgagtcaggtgtcttaattaagacacatttcacaaccaccataaaaatgacgactgtcacttagagtagtgaagttacttggcaaatatctaataataggttgaaccagtgccggcattcattggtagacaaaaatcacctgcttttttgttgacccggctccagctggccgccctgtatgcccc

SEQ ID NO: 54215 - DNA, 161 bp, Homo sapiens
caaaagaaaaatcaatcactcaatcagccaatcagtctgttcagactgagagagagttaaggcccattaacttgagtagcctctcagtcctattcccaatctccactctgggaggtcactgactctattaaaaacacacatacagaaggctctgggggtgg

SEQ ID NO: 54216 - DNA, 260 bp, Homo sapiens
acaaaaagcaactttatgccccatcactagcacactggtagctacatcatatgtgtccaaaattctgagtgaagaaacgaatgaattaccaaagtatcaatttcaccttctctgtattgcccaaatgatcacttagctctactttgcaaccattaagagcctagattaccatcattcatttcctaaccccgctaataatgccttatcttgtctctactcagtcatgcccgtccttcttacagtccatccccaccatctag

SEQ ID NO: 54217 - DNA, 436 bp, Homo sapiens
aatgacaaagggaggggtgtccagtcagagtgtgagggctgtacccgtgggcagctgagggagtgcgagccacaggccaggcactctccttctcccattagctcagccgtggcatcggacttgcagcttcattttgggctgccttagccatgaagctccttttgctgactttgactgtgctgctgctcttatcccagctgactccaggtggcacccaaagatgctggaatctttatggcaaatgccgttacagatgctccaagaaggaaagagtctatgtttactgcataaataataaaatgtgctgcgtgaagcccaagtaccagccaaaagaaaggtggtggccattttaactgctttgaagcctgaagccatgaaaatgcagatgaagctcccagtggattcccacactctatcaataaacacctctggctga

SEQ ID NO: 54218 - DNA, 578 bp, Homo sapiens
  misc_feature (506)..(506): n is a, c, g, or t
  misc_feature (548)..(549): n is a, c, g, or t
aatgacaaagggaggggtgtccagtcagagtgtgagggctgtacccgtgggcagctgagggagtgcgagccacaggccaggcactctccttctcccattagctcagccgtggcatcggacttgcagcttcattttgggctgccttagccatgaagctccttttgctgactttgactgtgctgctgctcttatcccagctgactccaggtggcacccaaagatgctggaatctttatggcaaatgccgttacagatgctccaagaaggaaagagtctatgtttactgcataaataataaaatgtgctgcgtgaagcccaagtaccagccaaaagaaaggtggtggccattttaactgctttgaagcctgaagccatgaaaatgcagatgaagctcccagtggattcccacactctatcaataaacacctctggctgaaaaaaaaaaaaaaaaaaaaaaaaaaaaaaaaaaaaaaaaaaattttaggggggggcagggaccaaaaaangcctcaaggggggccccgggcgcgcccccacaagaacaaaanncctctggggggggggccgggacccaattg

SEQ ID NO: 54219 - DNA, 502 bp, Homo sapiens
aatgacaaagggaggggtgtccagtcagagtgtgagggctgtacccgtgggcagctgagggagtgcgagccacaggccaggcactctccttctcccattagctcagccgtggcatcggacttgcagcttcattttgggctgccttagccatgaagctccttttgctgactttgactgtgctgctgctcttatcccagctgactccagacctttcaaatccggagcctacttgttaggactgatactgtctcccttctttctgctttgtgtcaggtggcacccaaagatgctggaatctttatggcaaatgccgttacagatgctccaagaaggaaagagtctatgtttactgcataaataataaaatgtgctgcgtgaagcccaagtaccagccaaaagaaaggtggtggccattttaactgctttgaagcctgaagccatgaaaatgcagatgaagctcccagtggattcccacactctatcaataaacacctctggctga

SEQ ID NO: 54220 - DNA, 357 bp, Homo sapiens
ctttcctcttatgatttcacactgccataagccagcaagggcatgtcaggtccttcagtttaaagagcactttgtattgtaagtttctgggcttgtggaaatgaatattccaatgatcacttactgtgtgtctggcgacatgtccctgagagggccttattgttgcacaagtcctgggtccctgggcaggaggcagggtctgttagacacatggtgttcctgtccctgaggcagcctctttgggcacaagaggagggtcttagtccattcatactgctataacaaaccactctgaatgggtgactgaaacatcagacatttcgcacagttctggaggctgcaaagtccaacctccag

SEQ ID NO: 54221 - DNA, 182 bp, Homo sapiens
gggttccaaggccctgccgtggaaggagatgaggctgggctgatacagtcagtgaagagtggaaatcttgcaggcgtgtgtgtgtgtgtgtgtgtgtgtgtgtgtgtgtgtgtgtgtgtgtgtaggataaacacgaggcctcagcaggcagctttcctcccaaactgcagaccctgagcctg

SEQ ID NO: 54222 - DNA, 231 bp, Homo sapiens
gtgttaccattgttgcccaggctggtcttgattgaactcctgggctcaagtgatccgcctgcctcagcctcccaaagtgctgggattacagctgtgagccactgtgctcagacaaaaaatattttttgtagttagccactgagtgcaggtcaacagaaggtcactcgagtaccttcactttatttttcatcgtgtaaattgtccacatagcccagcacctgtccctgctct

SEQ ID NO: 54223 - DNA, 410 bp, Homo sapiens
tgtgcccaagtcagcatgctctggatggtggattcagaggataaatacatccactttagtgacttgactgctagcaaaacaagtattcaatctaagtgacgtggtagccttcaaagttcctacatgtaacatgattaaaaattggtgagtcgactcttcatttgtccccagggctagccagtaaaatggcaagcagtttgattagtttataggatgatgaattaatgtgaagacttctatttactttgtgcagtaaaattaaatttcaaaatgagtataatacatacaatggaatactcttcagccttcaaaaggaaggaaattctaatgcaccttacagtgtggatgaaccttgagaacgttatgctaagcaaaataagccagaaaaataagcccccccaaaagtcaga

SEQ ID NO: 54224 - DNA, 770 bp, Homo sapiens
tcttgcttgttaataaccactgactgacagacttgcttttccataagtttaagcttttatcactgagagcccatctgttgccatccctcagaaagtcaagtacttgtgtagatggagtgcatgcacagagtatgttcctgaaagtatctcatgttttcaacatgaaattttctgtttctaagaccaagtaaagaaaataatttgcttttacacccgttagggagcaaaattatgtgtggttaaaacccagcggaaggcaaaacaagctgagactctaactcaggactacatcatcacccctcatgccttgcctatgttccgtgagccccgccaacggagtacaaggaaacagctggagaaggacagactggatcccctgaagtcgcataaacctgaacctcctgtagcaggcccaggtcgtggtggccgagttggaacccacgggggcactctctcttcctatattgtgaagaacattgctttggacaagaccgatgacagtaatcctcgggaagccattttgcgtcatgccaaagcagcagaagacagcccatattgggtttctccagcatattccaagactcagcccaaaaccatgtttgcccaagttgaatctgatgatgaggaagcaaagaatgagccagaatggaaaaaacgtaaaatttgaagaatctcatttgagagctgtttgcatgagtgggaggggtatgggacaggtttgggttttttttttatgctcatgaaattaaaaattcatttttatgaacaag

SEQ ID NO: 54225 - DNA, 2224 bp, Homo sapiens
cgcggtccctctgcggaaggcgccgctcttggcttcggcggcgccgctgtagcttgaaggcggtacttcctccagcatttgccgcaagttattggcaagttcccctgcagttgtttgggctgtccctgtggctggttctggggtgtgcggccagccatggagcgctctgggcccagcgaagtgacaggctcagacgcgtcgggaccggacccgcagcttgcggtcaccatgggcttcacggggttcggtaaaaaagctcgcacatttgacttggaagcaatgtttgaacaaactcgaaggacagctgtggaaagaagtcgcaaaacactggaagcaagagaaaaagaggaagaaatgaacagagagaaagaattaagaagacaaaatgaagatattgagccaacatcctcaagatcaaatgtggtcagagattgctccaaatcatcttccagggatacgagcagcagtgaaagtgaacagagttctgactcttctgatgatgagttaattggccctcctttaccccctaaaatggtaggaaaaccagttaattttatggaggaagatatcctcggtcctttacctccacctcttaatgaagaagaagaagaagcagaggaagaagaagaggaagaggaggaagaggaaaatcctgttcacaagattcctgactcgcatgagataacgctgaagcatggcactaaaacagtgtctgctttgggtctggatccctcaggtgcccgtttggtgacaggaggatatgactatgatgttaagttttgggattttgctggaatggatgcttcttttaaggcatttcgatcccttcagccctgtgagtgccatcagatcaagtcattacagtatagtaacacaggagacatgattcttgttgtatctggaagctctcaggccaaggtgattgacagagatggttttgaagtaatggaatgtataaaaggagaccagtatattgtggacatggccaacaccaagggtcatacagcaatgcttcatactggctcatggcatcccaaaataaagggagaatttatgacttgctcaaatgatgcgactgtgaggacgtgggaagttgaaaatccaaagaagcaaaaaagtgtgtttaaaccacggacgatgcaaggcaaaaaagtcattcccactacgtgcacatatagtagagatggaaacctcatagcagctgcctgccagaatggaagcatacagatctgggaccgaaatttgactgttcatcctaagttccactataaacaggctcatgactcgggcacagacacttcttgcgtgactttttcctatgatggtaatgtccttgcctctcgtggaggtgacgattcattaaaattatgggacatccgacaatttaataaaccacttttttcagcctcgggtcttcccaccatgttcccaatgactgactgctgtttcagtccagatgataagctcatagtcactggtacatctattcaaagaggatgtggcagcggcaaacttgttttctttgagcgtaggactttccaaagggtgtatgaaatagacatcacagatgcgagtgttgttcgctgcctgtggcatccaaagctgaaccagatcatggttggaactggaaatggattggctaaagtctattacgaccccaacaagagtcagaggggagcaaaattatgtgtggttaaaacccagcggaaggcaaaacaagctgagactctaactcaggactacatcatcacccctcatgccttgcctatgttccgtgagccccgccaacggagtacaaggaaacagctggagaaggacagactggatcccctgaagtcgcataaacctgaacctcctgtagcaggcccaggtcgtggtggccgagttggaacccacgggggcactctctcttcctatattgtgaagaacattgctttggacaagaccgatgacagtaatcctcgggaagccattttgcgtcatgccaaagcagcagaagacagcccatattgggtttctccagcatattccaagactcagcccaaaaccatgtttgcccaagttgaatctgatgatgaggaagcaaagaatgagccagaatggaaaaaacgtaaaatttgaagaatctcatttgagagctgtttgcatgagtgggaggggtatgggacaggtttgggttttttttttatgctcatgaaattaaaaattcatttttatgaacaag

SEQ ID NO: 54226 - DNA, 245 bp, Homo sapiens
  misc_feature (1)..(1): n is a, c, g, or t
nctagatttgacagaactcacctgttaaatgtgaaagcttttgtggagtggagggactcagcccaaaaccatgtttgcccaagttgaatctgatgatgaggaagcaaagaatgagccagaatggaaaaaacgtaaaatttgaagaatctcatttgagagctgtttgcatgagtgggaggggtatgggacaggtttgggttttttttttatgctcatgaaattaaaaattcatttttatgaacaag

SEQ ID NO: 54227 - DNA, 1472 bp, Homo sapiens
tgcaatggcatgatctcggctcactgtaacctctgcctcctgggttcaagcgattctcctgcctcagcctcctgagtagctggattacagccatcagatcaagtcattacagtatagtaacacaggagacatgattcttgttgtatctggaagctctcaggccaaggtgattgacagagatggttttgaagtaatggaatgtataaaaggagaccagtatattgtggacatggccaacaccaagggtcatacagcaatgcttcatactggctcatggcatcccaaaataaagggagaatttatgacttgctcaaatgatgcgactgtgaggacgtgggaagttgaaaatccaaagaagcaaaaaagtgtgtttaaaccacggacgatgcaaggcaaaaaagtcattcccactacgtgcacatatagtagagatggaaacctcatagcagctgcctgccagaatggaagcatacagatctgggaccgaaatttgactgttcatcctaagttccactataaacaggctcatgactcgggcacagacacttcttgcgtgactttttcctatgatggtaatgtccttgcctctcgtggaggtgacgattcattaaaattatgggacatccgacaatttaataaaccacttttttcagcctcgggtcttcccaccatgttcccaatgactgactgctgtttcagtccagatgataagctcatagtcactggtacatctattcaaagaggatgtggcagcggcaaacttgttttctttgagcgtaggactttccaaagggtgtatgaaatagacatcacagatgcgagtgttgttcgctgcctgtggcatccaaagctgaaccagatcatggttggaactggaaatggattggctaaagtctattacgaccccaacaagagtcagaggggagcaaaattatgtgtggttaaaacccagcggaaggcaaaacaagctgagactctaactcaggactacatcatcacccctcatgccttgcctatgttccgtgagccccgccaacggagtacaaggaaacagctggagaaggacagactggatcccctgaagtcgcataaacctgaacctcctgtagcaggcccaggtcgtggtggccgagttggaacccacgggggcactctctcttcctatattgtgaagaacattgctttggacaagaccgatgacagtaatcctcgggaagccattttgcgtcatgccaaagcagcagaagacagcccatattgggtttctccagcatattccaagactcagcccaaaaccatgtttgcccaagttgaatctgatgatgaggaagcaaagaatgagccagaatggaaaaaacgtaaaatttgaagaatctcatttgagagctgtttgcatgagtgggaggggtatgggacaggtttgggttttttttttatgctcatgaaattaaaaattcatttttatgaacaag

SEQ ID NO: 54228 - DNA, 1037 bp, Homo sapiens
aatgagagaaattgcattgtggaatcaaaataacccaaactccactcagaaaagtcacaaatatatagtatactatctgatctcaaaagggaaaaacgagatgataagaccttaagtttagactttattttcttctcaagagtggacattaaatctattaacttgcaactttctgctgggaagagcatcaaaggtgggcctcctaaatcatttttgaaaaacctctgtcaagtccaagtggttccaggagaattatagccagtatcttttaaaatatttcattttagtgataatgtttttctctgcttcatttgcaatcaaccaggatctctaaaagactgcataagatatatgcacttttataggtggctgtcagctacacatagattcagcaaattttttttatatagtacctgtttttaagttaggctacataacttaaagtgcactttactaacaagacttgacattagcgtctacaatatgtatatgtaaacaaaagcacacaagaactaggcaccctttctctctccaagagtttaagtggtttccttaggttaaagaaggggacagaccagctaaaaatggttgtaccactcactgtacaacctcatggaaattctcactataagatttagaggcaatgttccctagctataagccagggcaagaaatggcgcctctggagttggggaacattaggggaacattacaaccgggtagatgctggttccctgaagtgtggggccatgaacatgcagggacccacggtttgaatgaaacagctactgaaagctaagttcaaaccacccttgcgtaacaaaggagtacagggtacacatcaacaccaatcacccagcaccccacagcgatggtcatgtcaccgtgcagcaggtcccttaccccagggctgccacatccacaagccttgcagtggcaaatacgctgctccttggatttaatgagatattttggttgcttaatgatgtactgatcagggaactgtctaaagctagtagggccaaggagttaatcaa

SEQ ID NO: 54229 - DNA, 302 bp, Homo sapiens
tgacactaattttggcctttggacaatttggcttaggacttagaagggcaggacctggtccaagaccgttgtgctgggtgaggtgctgcagtaggggatgtgtgcacccgggagggcagcctcctgaccacacagacaggatgcaggaagcatgctgttctccgaggcacggagcctcactcgtgtccgcctgccacagtgtaccgcaagcctgacagtcacggatggcactctcaccgtgtgcctcgccgtggcgtgggtttctgtgcatcgcgtcaccggccagcctagggtcaggtcct

SEQ ID NO: 54230 - DNA, 271 bp, Homo sapiens
cacataatataatctacaacattctacaacaaaatttctgatttaccacaaaaaatcagattttctaatgaacactttagaaagtatctacattttagaaacaatatctacagaaaaaccatcttttgttacttaatagctagttgagaaattcattcctttgagtttaattttatcattttattatgaaattgtacgtgatcacttactgtattctacagtgtttaattgtggagatacttgaaaacttttctcagtacctatgagctga

SEQ ID NO: 54231 - DNA, 639 bp, Homo sapiens
cagtggaacaaatactagaagtatgtggctaggggatgttaaaactttgtcccagccacaattgagagacctcccaggcatctggatgaaatgcaagaaagaccatgtggtaaagctggggtaagcaatactgttaaatcatagccatacttattcatgtatatgttgtttatggatgcttttatactacaatggcaaatgtcagcagttgccacagagactgtgtggcccaccagtctacaatatttactattttgcccctccccttaagaaaaagtttgctgactcctgcactagagtaagtcctactctaggaccctcttaacaacaaactgtgcgctagctaaggtctgtaagcaaatcctgatgaaatctgcggagaaagcagaacttggaggctgagttctgccaggttacaggacttgggaaacatcctgggctttccatagatctgtcctaacaaaagtattactggagttaaaattagaatgttttggggcagtattaccttctttggtgctttttgtaaccttcgttatagtgacagtgactttagccagcaccctcgaatactttgaatgtcttgtttactcccctagataattctatgttggaatatgtctcattccacttaaaaaa

SEQ ID NO: 54232 - DNA, 1131 bp, Homo sapiens
gaattatcatgtaactgagtacatcacttcttagtcctcactacaggaccaaattcagttaagcagaggcctgtattctgctgataagccaggtattcccgggcagagcaaggcagtcaggaaaatgtagcaggatctcctgaaccacggatgctaggatcacacagtaaaatgcttcagaaagaggggtgcagagagcaacaggaatgctctccaatggcctgcagcaggttttgagaagaaaacatgacagggaacaggggtgtccgccctgctctgggcaacacccgctctcctactcatctgcagcccctggtggctaggtccatccaaggcactggcaggtgagctcagcttggggagatagttacgaaactgacatgtgcgtggaactaggcgaggcgccttactatttatttacagacttcataagcatctattctaaaattactcactaccaattttacaaggcaaaactctatactgtcctcacagctttagtgaaaacaactttaaaaggggaaaaatgaaaactagaccacaaagggttggaaaaatcttgcagaaccagctctaccacttaaggttgtttgccgctctgtaatccacatcgagctaattgtaagatttccctgtaaattcagactcttgaggttttcacaagaaataatctgagaagagtccctagcttccctcatccattaatttctagacaagagttttacaaaaggcagaaaagaaacagccttgactggagtatcgcagatcctaaggaaagaatgccctgctttgagcctggagataaatagcaccaccccctctttaaaactaaacattagggaatgtctcatgcctgtaatcccggcacttaagaggccaaggcgggtgaattgcctgagtgacagagctcgaaaccagactgagcaacatggtgaaacaccgtctccacaaaacaacaacaacaacaaaatacaaaaattagcccggtgtggtgggtgcaagagcctgtagtcctagatactcaggagtctgaggcgggaggattgcttatgcccagaaggttgaggctgcagtgagccaggatggtgccactgtacaacggtctgggtgacaaagggagatgctgtcttt

SEQ ID NO: 54233 - DNA, 448 bp, Homo sapiens
ctgtcttcaaacagcgttccttaatgctagtttgcacctgtccatgaatgcagtggcagtgccaagataactttcttgaaggaatgcttttgcaattagacctcgtgtgcctgtcttcatgcaggaacccccagttaaaagatatgagaggattaataattggggtgccggcacagagactcaggcctgtgatcccaccactttgggaggcctaggcgggcagatcacttgaggtcaggaattcaagaccagcctggccaacatggtgaaactctatctctaccaaaaaatacaaaaattagccggacatggtggtgtatgcctgtaatcccagctactcgggaggctgaggttaaggaatcacttgaacccaagaggcagaggttgcagtgagatgagattgtgccattgcacttcagcctgggcaatagcatgagtctcagaagag

SEQ ID NO: 54234 - DNA, 479 bp, Homo sapiens
gcactattcaagcatctctcagataagagttcctggcatgatacattatcctattttaccttctgaacagggttgtgttgaggataaaatagcaagatgacatgtaaaagcacatagaaggttttcatgagtaaaaattaatatgactgctaagtacttgactttatattactagtcccttttaaaatgtattttttaaacatggacaaaattgccacataatatgtaatataaattatctgggaaaaatttgctaaccctcttattttggccaaatgtctcccccagatggatgtggaactaagactcagatccaatattggctgtgccaaatgaagaaatggaaatagatttgaaaggtgggaactttgaatggaaaactttttttccttgctttccaacctagaatctgttcaaaagtgttagacagctctcagaatgcacagtgggagaataaaatttcaaatggaaaattttaa

SEQ ID NO: 54235 - DNA, 389 bp, Homo sapiens
gcactattcaagcatctctcagataagagttcctggcatgatacattatcctattttaccttctgaacagggttgtgttgaggataaaatagcaagatgacatgtaaaagcacatagaaggttttcatgagtaaaaattaatatgactgctaagtacttgactttatattactagtcccttttaaaatgtattttttaaacatggacaaaattgccacataatatgtaatataaattatctgggaaataagactcagatccaatattggctgtgccaaatgaagaaatggaaatagatttgaaagggtttccctctgtcacccaggctggagtgcagcagcactattgtggctcactgcagcgtcaaccttctgggctccagcgatcct

SEQ ID NO: 54236 - DNA, 338 bp, Homo sapiens
cactgccagatgtgtgaatgtatgtcttcaagtttcattttctggaatatgcttactgtagtttatttcttatccacttttgaagtgattctcattccatgggtaatagatttagtggcattaaatgttcagaacatccaaaaattaataaaatatatatttggactccgtctcacaatccaaaacagaaatcagaaactgatctaaagtgtatgttaggtaacaatgttctgtagcccgagttgcagaggagctgtgtggggcacttcactgtgcatctcataccacacttgcccagagcaccggcaatgtgaaggaaagagagagaataaaggaaa

SEQ ID NO: 54237 - DNA, 336 bp, Homo sapiens
gagagagatggaacagctggttggtggagcaatcagaacaaacatacatttattgattcaatttacagtcttatgtggggtggttcagtcatcccaaagcaattaccatagtaacatcaaagatcacgatcaccaaaacagatataatgaaaaagtttaaaatattgcaagaattaccaaaatgtgacacagacatgaagtgagcacatgctattgggaaaatggtactgacagacttgcttgactcagtgttgccacaaaccttcaatttgtagagtgcagtatctgcaaaggcaataaagtgatacacaataaaacaagctgtgtatgtatttt

SEQ ID NO: 54238 - DNA, 2831 bp, Homo sapiens
  misc_feature (1)..(1): n is a, c, g, or t
ngcccccggttgactaggagctggcggtccgagctgtggcttgaaagaccgacgcgatgaagcccagacctgcagggttcgtggataataaactcaagcagcgagtcatccagtatagactatggtcgaagaaaaagaaatgcttttaggattcaggtagaaaaagtatttagcataattagtagtgagaaggaacttaagaatttaacagaattagaagatgaacatttggcaaaaagggcaagacaaggtgaagaggataatgagtatactgaaagctattctgatgatgattcaagtatggaagactacccagatccacagtcagcaaatcacatgaacagttccctgctgtctttatatcggaaaggaaatcctgattctgtttcaaatactcctgagatggagcaaagagaaaccacctcttcaacaccacgaataagttccaaaacaggctccattcccttgaagacccctgccaaagattctgaaggaggatggtttattgacaaaaccccaagtgtaaagaaagacagttttttcttggacctgtcatgtgagaaaagtaatcctaagaagccaataactgagatacaggattcaaaagattcttctcttttggagagtgatatgaaacggaaaggcaagctaaagaataaaggaagcaaaaggaagaaagaagatcttcaggaagtagatggagaaattgaagctgtcctacaaaagaaagctaaagccagggggttagaattccagatctccaacgtgaagtttgaagatgtgggaggcaatgatatgacattaaaagaggtctgcaagatgctcatacacatgcgtcacccggaggtgtaccaccacctgggcgtcgtgccccctcgtggagttctccttcatggaccaccaggctgtgggaagacattacttgcacatgcaattgctggggaacttgacctgccaattttgaaagtggctgctccagagattgtgtctggagtatccggagagtctgagcagaagctgagagaactatttgagcaagctgtgtcaaatgcaccatgtatcattttcattgatgaaattgatgctattacccccaaaagagaagtggcttcaaaagatatggaacgaagaattgtagcccaactcctaacctgcatggatgatctgaataatgtggctgctacagcccgggtcctagttattggagctactaatcgaccagactcgttagaccctgctttgagacgtgcgggaaggttcgaccgagaaatatgcctaggtatcccagatgaagcatccagggaaagaatacttcaaacattgtgcagaaaactgaggcttcctcaagcttttgatttctgtcacttagcacacctaactccaggctttgttggtgctgatctcatggcactgtgccgagaggcagcaatgtgtgcagtcaatagagtcttaatgaagctacaggaacagcagaagaaaaatcctgaaatggaagatttgccatctaaaggagtccaggaggaaaggctgggaactgagcccacttctgaaacacaggatgaattacaaaggctgctggggttgctaagagaccaagatcccctctcagaggagcagatgcaaggactgtgcattgaactgaatgatttcattgttgctctatcctcagtccaaccctctgccaaaagggaaggctttgtcactgtccctaatgtgacatgggcagatattggtgccctggaagacattagagaggagctcaccatggcaatattggcaccagtacgcaacccagaccagttcaaagctcttggattggtgactccagctggggtcctccttgctggtcctcctggctgtgggaagactctgctggcgaaggctgttgcaaatgagtccggactaaattttatatctgtcaagggccccgaattactaaacatgtatgttggtgagagtgaacgtgctgtgcgacaagtttttcaacgagccaagaactcagcaccctgtgtgatattctttgatgaagtggatgctttatgtcctcgaagatcagaccgagagacaggggcaagtgtccgagtggtgaatcagctacttacagagatggatggtctggaagcacgccagcaggtttttattatggcagccactaacaggccagatataattgaccctgcaatcctgcgcccgggccgcctggacaaaacactgtttgtgggtttaccgccccctgcagatcgccttgccatcttaaaaactatcacaaaaaatggtaccaaaccaccactggatgcagatgtaaatttggaagcaattgctggtgaccttcgctgtgattgctatacgggcgcagatctctctgctttggtacgagaagcttctatctgtgccctgagacaggaaatggcaagacagaagagtggaaatgaaaaaggtgaactcaaggttagtcataagcattttgaagaagctttcaagaaagtaagatcatctatatcaaaaaaggatcaaatcatgtatgaacgtttgcaggagtccctcagccggtgatgtctccagcagccggcttagaggagctagcccatcaagccggcagagaatcccccacacgctctgaaggacccactttcagctggacacaggcgcggcctcatgtaaacattttattttcaaatgaatgaggccaagctgaagctgaagctgaagattcttcccatctggccagccttgtgtgaaaatgccttcttcctctttaagaaaaaggacaatttttaaactgctgaaataaaatgactgttacatttttcaaataaaacttttactttgaa

SEQ ID NO: 54239 - DNA, 2905 bp, Homo sapiens
  misc_feature (1)..(1): n is a, c, g, or t
ngcccccggttgactaggagctggcggtccgagctgtggcttgaaagaccgacgcgatgaagcccagacctgcagggttcgtggataataaactcaagcagcgagtcatccagtaccttaccagtaacaaatgtggcaaatatgtggacattggagtcttagcgtctgatttacaaagagtgtacagtatagactatggtcgaagaaaaagaaatgcttttaggattcaggtagaaaaagtatttagcataattagtagtgagaaggaacttaagaatttaacagaattagaagatgaacatttggcaaaaagggcaagacaaggtgaagaggataatgagtatactgaaagctattctgatgatgattcaagtatggaagactacccagatccacagtcagcaaatcacatgaacagttccctgctgtctttatatcggaaaggaaatcctgattctgtttcaaatactcctgagatggagcaaagagaaaccacctcttcaacaccacgaataagttccaaaacaggctccattcccttgaagacccctgccaaagattctgaaggaggatggtttattgacaaaaccccaagtgtaaagaaagacagttttttcttggacctgtcatgtgagaaaagtaatcctaagaagccaataactgagatacaggattcaaaagattcttctcttttggagagtgatatgaaacggaaaggcaagctaaagaataaaggaagcaaaaggaagaaagaagatcttcaggaagtagatggagaaattgaagctgtcctacaaaagaaagctaaagccagggggttagaattccagatctccaacgtgaagtttgaagatgtgggaggcaatgatatgacattaaaagaggtctgcaagatgctcatacacatgcgtcacccggaggtgtaccaccacctgggcgtcgtgccccctcgtggagttctccttcatggaccaccaggctgtgggaagacattacttgcacatgcaattgctggggaacttgacctgccaattttgaaagtggctgctccagagattgtgtctggagtatccggagagtctgagcagaagctgagagaactatttgagcaagctgtgtcaaatgcaccatgtatcattttcattgatgaaattgatgctattacccccaaaagagaagtggcttcaaaagatatggaacgaagaattgtagcccaactcctaacctgcatggatgatctgaataatgtggctgctacagcccgggtcctagttattggagctactaatcgaccagactcgttagaccctgctttgagacgtgcgggaaggttcgaccgagaaatatgcctaggtatcccagatgaagcatccagggaaagaatacttcaaacattgtgcagaaaactgaggcttcctcaagcttttgatttctgtcacttagcacacctaactccaggctttgttggtgctgatctcatggcactgtgccgagaggcagcaatgtgtgcagtcaatagagtcttaatgaagctacaggaacagcagaagaaaaatcctgaaatggaagatttgccatctaaaggagtccaggaggaaaggctgggaactgagcccacttctgaaacacaggatgaattacaaaggctgctggggttgctaagagaccaagatcccctctcagaggagcagatgcaaggactgtgcattgaactgaatgatttcattgttgctctatcctcagtccaaccctctgccaaaagggaaggctttgtcactgtccctaatgtgacatgggcagatattggtgccctggaagacattagagaggagctcaccatggcaatattggcaccagtacgcaacccagaccagttcaaagctcttggattggtgactccagctggggtcctccttgctggtcctcctggctgtgggaagactctgctggcgaaggctgttgcaaatgagtccggactaaattttatatctgtcaagggccccgaattactaaacatgtatgttggtgagagtgaacgtgctgtgcgacaagtttttcaacgagccaagaactcagcaccctgtgtgatattctttgatgaagtggatgctttatgtcctcgaagatcagaccgagagacaggggcaagtgtccgagtggtgaatcagctacttacagagatggatggtctggaagcacgccagcaggtttttattatggcagccactaacaggccagatataattgaccctgcaatcctgcgcccgggccgcctggacaaaacactgtttgtgggtttaccgccccctgcagatcgccttgccatcttaaaaactatcacaaaaaatggtaccaaaccaccactggatgcagatgtaaatttggaagcaattgctggtgaccttcgctgtgattgctatacgggcgcagatctctctgctttggtacgagaagcttctatctgtgccctgagacaggaaatggcaagacagaagagtggaaatgaaaaaggtgaactcaaggttagtcataagcattttgaagaagctttcaagaaagtaagatcatctatatcaaaaaaggatcaaatcatgtatgaacgtttgcaggagtccctcagccggtgatgtctccagcagccggcttagaggagctagcccatcaagccggcagagaatcccccacacgctctgaaggacccactttcagctggacacaggcgcggcctcatgtaaacattttattttcaaatgaatgaggccaagctgaagctgaagctgaagattcttcccatctggccagccttgtgtgaaaatgccttcttcctctttaagaaaaaggacaatttttaaactgctgaaataaaatgactgttacatttttcaaataaaacttttactttgaa

SEQ ID NO: 54240 - DNA, 235 bp, Homo sapiens
gcggccgcctactactactactactgctcgaattcaagcttctaacgatgtacggggacatgtaaacattttattttcaaatgaatgaggccaagctgaagctgaagctgaagattcttcccatctggccagccttgtgtgaaaatgccttcttcctctttaagaaaaaggacaatttttaaactgctgaaataaaatgactgttacatttttcaaataaaacttttactttgaa

SEQ ID NO: 54241 - DNA, 2773 bp, Homo sapiens
  misc_feature (1)..(1): n is a, c, g, or t
ngcccccggttgactaggagctggcggtccgagctgtggcttgaaagaccgacgcgatgaagcccagacctgcagggttcgtggataataaactcaagcagcgagtcatccagtatagactatggtcgaagaaaaagaaatgcttttaggattcaggtagaaaaagtatttagcataattagtagtgagaaggaacttaagaatttaacagaattagaagatgaacatttggcaaaaagggcaagacaaggtgaagaggataatgatcagcaaatcacatgaacagttccctgctgtctttatatcggaaaggaaatcctgattctgtttcaaatactcctgagatggagcaaagagaaaccacctcttcaacaccacgaataagttccaaaacaggctccattcccttgaagacccctgccaaagattctgaaggaggatggtttattgacaaaaccccaagtgtaaagaaagacagttttttcttggacctgtcatgtgagaaaagtaatcctaagaagccaataactgagatacaggattcaaaagattcttctcttttggagagtgatatgaaacggaaaggcaagctaaagaataaaggaagcaaaaggaagaaagaagatcttcaggaagtagatggagaaattgaagctgtcctacaaaagaaagctaaagccagggggttagaattccagatctccaacgtgaagtttgaagatgtgggaggcaatgatatgacattaaaagaggtctgcaagatgctcatacacatgcgtcacccggaggtgtaccaccacctgggcgtcgtgccccctcgtggagttctccttcatggaccaccaggctgtgggaagacattacttgcacatgcaattgctggggaacttgacctgccaattttgaaagtggctgctccagagattgtgtctggagtatccggagagtctgagcagaagctgagagaactatttgagcaagctgtgtcaaatgcaccatgtatcattttcattgatgaaattgatgctattacccccaaaagagaagtggcttcaaaagatatggaacgaagaattgtagcccaactcctaacctgcatggatgatctgaataatgtggctgctacagcccgggtcctagttattggagctactaatcgaccagactcgttagaccctgctttgagacgtgcgggaaggttcgaccgagaaatatgcctaggtatcccagatgaagcatccagggaaagaatacttcaaacattgtgcagaaaactgaggcttcctcaagcttttgatttctgtcacttagcacacctaactccaggctttgttggtgctgatctcatggcactgtgccgagaggcagcaatgtgtgcagtcaatagagtcttaatgaagctacaggaacagcagaagaaaaatcctgaaatggaagatttgccatctaaaggagtccaggaggaaaggctgggaactgagcccacttctgaaacacaggatgaattacaaaggctgctggggttgctaagagaccaagatcccctctcagaggagcagatgcaaggactgtgcattgaactgaatgatttcattgttgctctatcctcagtccaaccctctgccaaaagggaaggctttgtcactgtccctaatgtgacatgggcagatattggtgccctggaagacattagagaggagctcaccatggcaatattggcaccagtacgcaacccagaccagttcaaagctcttggattggtgactccagctggggtcctccttgctggtcctcctggctgtgggaagactctgctggcgaaggctgttgcaaatgagtccggactaaattttatatctgtcaagggccccgaattactaaacatgtatgttggtgagagtgaacgtgctgtgcgacaagtttttcaacgagccaagaactcagcaccctgtgtgatattctttgatgaagtggatgctttatgtcctcgaagatcagaccgagagacaggggcaagtgtccgagtggtgaatcagctacttacagagatggatggtctggaagcacgccagcaggtttttattatggcagccactaacaggccagatataattgaccctgcaatcctgcgcccgggccgcctggacaaaacactgtttgtgggtttaccgccccctgcagatcgccttgccatcttaaaaactatcacaaaaaatggtaccaaaccaccactggatgcagatgtaaatttggaagcaattgctggtgaccttcgctgtgattgctatacgggcgcagatctctctgctttggtacgagaagcttctatctgtgccctgagacaggaaatggcaagacagaagagtggaaatgaaaaaggtgaactcaaggttagtcataagcattttgaagaagctttcaagaaagtaagatcatctatatcaaaaaaggatcaaatcatgtatgaacgtttgcaggagtccctcagccggtgatgtctccagcagccggcttagaggagctagcccatcaagccggcagagaatcccccacacgctctgaaggacccactttcagctggacacaggcgcggcctcatgtaaacattttattttcaaatgaatgaggccaagctgaagctgaagctgaagattcttcccatctggccagccttgtgtgaaaatgccttcttcctctttaagaaaaaggacaatttttaaactgctgaaataaaatgactgttacatttttcaaataaaacttttactttgaa

SEQ ID NO: 54242 - DNA, 2999 bp, Homo sapiens
  misc_feature (1)..(1): n is a, c, g, or t
ngcccccggttgactaggagctggcggtccgagctgtggcttgaaagaccgacgcgatgaagcccagacctgcagggttcgtggataataaactcaagcagcgagtcatccagtaccttaccagtaacaaatgtggcaaatatgtggacattggagtcttagcgtctgatttacaaagagtgtacagtatagactatggtcgaagaaaaagaaatgcttttaggattcaggtagaaaaagtatttagcataattagtagtgagaaggaacttaagaatttaacagaattagaagatgaacatttggcaaaaagggcaagacaaggtgaagaggataatgagtatactgaaagctattctgatgatgattcaagtatggaagactacccagatccacagtcagcaaatcacatgaacagttccctgctgtctttatatcggaaaggaaatcctgattctgtttcaaatactcctgagatggagcaaagagaaaccacctcttcaacaccacgaataagttccaaaacaggctccattcccttgaagacccctgccaaagattctgaaggaggatggtttattgacaaaaccccaagtgtaaagaaagacagttttttcttggacctgtcatgtgagaaaagtaatcctaagaagccaataactgagatacaggattcaaaagattcttctcttttggagagtgatatgaaacggaaaggcaagctaaagaataaaggaagcaaaaggaagaaagaagatcttcaggaagtagatggagaaattgaagctgtcctacaaaagaaagctaaagccagggggttagaattccagatctccaacgtgaagtttgaagatgtgggaggcaatgatatgacattaaaagaggtctgcaagatgctcatacacatgcgtcacccggaggtgtaccaccacctgggcgtcgtgccccctcgtggagttctccttcatggaccaccaggctgtgggaagacattacttgcacatgcaattgctggggaacttgacctgccaattttgaaagtggctgctccagagattgtgtctggagtatccggagagtctgagcagaagctgagagaactatttgagcaagctgtgtcaaatgcaccatgtatcattttcattgatgaaattgatgctattacccccaaaagagaagtggcttcaaaagatatggaacgaagaattgtagcccaactcctaacctgcatggatgatctgaataatgtggctgctacagcccgggtcctagttattggagctactaatcgaccagactcgttagaccctgctttgagacgtgcgggaaggttcgaccgagaaatatgcctaggtatcccagatgaagcatccagggaaagaatacttcaaacattgtgcagaaaactgaggcttcctcaagcttttgatttctgtcacttagcacacctaactccaggctttgttggtgctgatctcatggcactgtgccgagaggcagcaatgtgtgcagtcaatagagtcttaatgaagctacaggaacagcagaagaaaaatcctgaaatggaagatttgccatctaaaggagtccaggaggaaaggctgggaactgagcccacttctgaaacacaggatgaattacaaaggctgctggggttgctaagagaccaagatcccctctcagaggagcagatgcaaggactgtgcattgaactgaatgatttcattgttgctctatcctcagtccaaccctctgccaaaagggaaggctttgtcactgtccctaatgtgacatgggcagatattggtgccctggaagacattagagaggagctcaccatggcaatattggcaccagtacgcaacccagaccagttcaaagctcttggattggtgactccagctggggtcctccttgctggtcctcctggctgtgggaagactctgctggcgaaggctgttgcaaatgagtccggactaaattttatatctgtcaagggccccgaattactaaacatgtatgttggtgagagtgaacgtgctgtgcgacaagtttttcaacgagccaagaactcagcaccctgtgtgatattctttgatgaagtggatgctttatgtcctcgaagatcagaccgagagacaggggcaagtgtccgagtggtgaatcagctacttacagagatggatggtctggaagcacgccagcaggtttttattatggcagccactaacaggccagatataattgaccctgcaatcctgcgcccgggccgcctggacaaaacactgtttgtgggtttaccgccccctgcagatcgccttgccatcttaaaaactatcacaaaaaatggtaccaaaccaccactggatgcagatgtaaatttggaagcaattgctggtgaccttcgctgtgattgctatacgggcgcagatctctctgctttggtacgagaagcttctatctgtgccctgagacaggaaatggcaagacagaagagtggaaatgaaaaagtagagacggggtttcaccatgttagccaggatggtctcgatctcctgacttcgtgatccgcctgcctcggcctcccaaagtgctgggattacaggtgaactcaaggttagtcataagcattttgaagaagctttcaagaaagtaagatcatctatatcaaaaaaggatcaaatcatgtatgaacgtttgcaggagtccctcagccggtgatgtctccagcagccggcttagaggagctagcccatcaagccggcagagaatcccccacacgctctgaaggacccactttcagctggacacaggcgcggcctcatgtaaacattttattttcaaatgaatgaggccaagctgaagctgaagctgaagattcttcccatctggccagccttgtgtgaaaatgccttcttcctctttaagaaaaaggacaatttttaaactgctgaaataaaatgactgttacatttttcaaataaaacttttactttgaa

SEQ ID NO: 54243 - DNA, 2983 bp, Homo sapiens
  misc_feature (1)..(1): n is a, c, g, or t
ngcccccggttgactaggagctggcggtccgagctgtggcttgaaagaccgacgcgatgaagcccagacctgcagggttcgtggataataaactcaagcagcgagtcatccagtaccttaccagtaacaaatgtggcaaatatgtggacattggagtcttagcgtctgatttacaaagagtgtacagtatagactatggtcgaagaaaaagaaatgcttttaggattcaggtagaaaaagtatttagcataattagtagtgagaaggaacttaagaatttaacagaattagaagatgaacatttggcaaaaagggcaagacaaggtgaagaggataatgagtatactgaaagctattctgatgatgattcaagtatggaagactacccagatccacagtcagcaaatcacatgaacagttccctgctgtctttatatcggaaaggaaatcctgattctgtttcaaatactcctgagatggagcaaagagaaaccacctcttcaacaccacgaataagttccaaaacaggctccattcccttgaagacccctgccaaagattctgaaggaggatggtttattgacaaaaccccaagtgtaaagaaagacagttttttcttggacctgtcatgtgagaaaagtaatcctaagaagccaataactgagatacaggattcaaaagattcttctcttttggagagtgatatgaaacggaaaggcaagctaaagaataaaggaagcaaaaggaagaaagaagatcttcaggaagtagatggagaaattgaagctgtcctacaaaagaaagctaaagccagggggttagaattccagatctccaacgtgaagtttgaagatgtgggaggcaatgatatgacattaaaagaggtctgcaagatgctcatacacatgcgtcacccggaggtgtaccaccacctgggcgtcgtgccccctcgtggagttctccttcatggaccaccaggctgtgggaagacattacttgcacatgcaattgctggggaacttgacctgccaattttgaaagtggctgctccagagattgtgtctggagtatccggagagtctgagcagaagctgagagaactatttgagcaagctgtgtcaaatgcaccatgtatcattttcattgatgaaattgatgctattacccccaaaagagaagtggcttcaaaagatatggaacgaagaattgtagcccaactcctaacctgcatggatgatctgaataatgtggctgctacagcccgggtcctagttattggagctactaatcgaccagactcgttagaccctgctttgagacgtgcgggaaggttcgaccgagaaatatgcctaggtatcccagatgaagcatccagggaaagaatacttcaaacattgtgcagaaaactgaggcttcctcaagcttttgatttctgtcacttagcacacctaactccaggctttgttggtgctgatctcatggcactgtgccgagaggcagcaatgtgtgcagtcaatagagtcttaatgaagctacaggaacagcagaagaaaaatcctgaaatggaagatttgccatctaaaggagtccaggaggaaaggctgggaactgagcccacttctgaaacacaggatgaattacaaaggctgctggggttgctaagagaccaagatcccctctcagaggagcagatgcaaggactgtgcattgaactgaatgatttcattgttgctctatcctcagtccaaccctctgccaaaagggaaggctttgtcactgtccctaatgtgacatgggcagatattggtgccctggaagacattagagaggagctcaccatggcaatattggcaccagtacgcaacccagaccagttcaaagctcttggattggtgactccagctggggtcctccttgctggtcctcctggctgtgggaagactctgctggcgaaggctgttgcaaatgagtccggactaaattttatatctgtcaagggccccgaattactaaacatgtatgttggtgagagtgaacgtgctgtgcgacaagtttttcaacgagccaagaactcagcaccctgtgtgatattctttgatgaagtggatgctttatgtcctcgaagatcagaccgagagacaggggcaagtgtccgagtggtgaatcagctacttacagagatggatggtctggaagcacgccagcaggtttttattatggcagccactaacaggccagatataattgaccctgcaatcctgcgcccgggccgcctggacaaaacactgtttgtgggtttaccgccccctgcagatcgccttgccatcttaaaaactatcacaaaaaatggtaccaaaccaccactggatgcagatgtaaatttggaagcaattgctggtgaccttcgctgtgattgctatacgggcgcagatctctctgctttggtacgagaagcttctatctgtgccctgagacaggaaatggcaagacagaagagtggaaatgaaaaaggcaaatggatccattcgctgtcttcatcatgagtctgggctgcttatcaattctggaaaaacgtattcttttgctaaggtgaactcaaggttagtcataagcattttgaagaagctttcaagaaagtaagatcatctatatcaaaaaaggatcaaatcatgtatgaacgtttgcaggagtccctcagccggtgatgtctccagcagccggcttagaggagctagcccatcaagccggcagagaatcccccacacgctctgaaggacccactttcagctggacacaggcgcggcctcatgtaaacattttattttcaaatgaatgaggccaagctgaagctgaagctgaagattcttcccatctggccagccttgtgtgaaaatgccttcttcctctttaagaaaaaggacaatttttaaactgctgaaataaaatgactgttacatttttcaaataaaacttttactttgaa

SEQ ID NO: 54244 - DNA, 1997 bp, Homo sapiens
gaagttcctcaggaaactagctatttaaaaaatttgaggggactggataagaaaaagtagggaaattaaaatttgaatatttggttattcttttatgtgtctgcataggaacttgacctgccaattttgaaagtggctgctccagagattgtgtctggagtatccggagagtctgagcagaagctgagagaactatttgagcaagctgtgtcaaatgcaccatgtatcattttcattgatgaaattgatgctattacccccaaaagagaagtggcttcaaaagatatggaacgaagaattgtagcccaactcctaacctgcatggatgatctgaataatgtggctgctacagcccgggtcctagttattggagctactaatcgaccagactcgttagaccctgctttgagacgtgcgggaaggttcgaccgagaaatatgcctaggtatcccagatgaagcatccagggaaagaatacttcaaacattgtgcagaaaactgaggcttcctcaagcttttgatttctgtcacttagcacacctaactccaggctttgttggtgctgatctcatggcactgtgccgagaggcagcaatgtgtgcagtcaatagagtcttaatgaagctacaggaacagcagaagaaaaatcctgaaatggaagatttgccatctaaaggagtccaggaggaaaggctgggaactgagcccacttctgaaacacaggatgaattacaaaggctgctggggttgctaagagaccaagatcccctctcagaggagcagatgcaaggactgtgcattgaactgaatgatttcattgttgctctatcctcagtccaaccctctgccaaaagggaaggctttgtcactgtccctaatgtgacatgggcagatattggtgccctggaagacattagagaggagctcaccatggcaatattggcaccagtacgcaacccagaccagttcaaagctcttggattggtgactccagctggggtcctccttgctggtcctcctggctgtgggaagactctgctggcgaaggctgttgcaaatgagtccggactaaattttatatctgtcaagggccccgaattactaaacatgtatgttggtgagagtgaacgtgctgtgcgacaagtttttcaacgagccaagaactcagcaccctgtgtgatattctttgatgaagtggatgctttatgtcctcgaagatcagaccgagagacaggggcaagtgtccgagtggtgaatcagctacttacagagatggatggtctggaagcacgccagcaggtttttattatggcagccactaacaggccagatataattgaccctgcaatcctgcgcccgggccgcctggacaaaacactgtttgtgggtttaccgccccctgcagatcgccttgccatcttaaaaactatcacaaaaaatggtaccaaaccaccactggatgcagatgtaaatttggaagcaattgctggtgaccttcgctgtgattgctatacgggcgcagatctctctgctttggtacgagaagcttctatctgtgccctgagacaggaaatggcaagacagaagagtggaaatgaaaaaggtgaactcaaggttagtcataagcattttgaagaagctttcaagaaagtaagatcatctatatcaaaaaaggatcaaatcatgtatgaacgtttgcaggagtccctcagccggtgatgtctccagcagccggcttagaggagctagcccatcaagccggcagagaatcccccacacgctctgaaggacccactttcagctggacacaggcgcggcctcatgtaaacattttattttcaaatgaatgaggccaagctgaagctgaagctgaagattcttcccatctggccagccttgtgtgaaaatgccttcttcctctttaagaaaaaggacaatttttaaactgctgaaataaaatgactgttacatttttcaaataaaacttttactttgaa

SEQ ID NO: 54245 - DNA, 620 bp, Homo sapiens
  misc_feature (27)..(27): n is a, c, g, or t
agtagtaatttattctgattgcatatnatttaataattcccatgctagttttgcttttagaatggtaccaaaccaccactggatgcagatgtaaatttggaagcaattgctggtgaccttcgctgtgattgctatacgggcgcagatctctctgctttggtacgagaagcttctatctgtgccctgagacaggaaatggcaagacagaagagtggaaatgaaaaaggtgaactcaaggttagtcataagcattttgaagaagctttcaagaaagtaagatcatctatatcaaaaaaggatcaaatcatgtatgaacgtttgcaggagtccctcagccggtgatgtctccagcagccggcttagaggagctagcccatcaagccggcagagaatcccccacacgctctgaaggacccactttcagctggacacaggcgcggcctcatgtaaacattttattttcaaatgaatgaggccaagctgaagctgaagctgaagattcttcccatctggccagccttgtgtgaaaatgccttcttcctctttaagaaaaaggacaatttttaaactgctgaaataaaatgactgttacatttttcaaataaaacttttactttgaa

SEQ ID NO: 54246 - DNA, 1072 bp, Homo sapiens
  misc_feature (1)..(1): n is a, c, g, or t
ngcccccggttgactaggagctggcggtccgagctgtggcttgaaagaccgacgcgatgaagcccagacctgcagggttcgtggataataaactcaagcagcgagtcatccagtaccttaccagtaacaaatgtggcaaatatgtggacattggagtcttagcgtctgatttacaaagagtgtacagtatagactatggtcgaagaaaaagaaatgcttttaggattcaggtagaaaaagtatttagcataattagtagtgagaaggaacttaagaatttaacagaattagaagatgaacatttggcaaaaagggcaagacaaggtgaagaggataatgagtatactgaaagctattctgatgatgattcaagtatggaagactacccagatccacagtcagcaaatcacatgaacagttccctgctgtctttatatcggaaaggaaatcctgattctgtttcaaatactcctgagatggagcaaagagaaaccacctcttcaacaccacgaataagttccaaaacaggctccattcccttgaagacccctgccaaagattctgaaggaggatggtttattgacaaaaccccaagtgtaaagaaagacagttttttcttggacctgtcatgtgagaaaagtaatcctaagaagccaataactgagatacaggattcaaaagattcttctcttttggagagtgatatgaaacggaaaggcaagctaaagaataaaggaagcaaaaggaagaaagaagatcttcaggaagtagatggagaaattgaagctgtcctacaaaagaaagctaaagccagggggttagaattccagatctccaacgtgaagtttgaagatgtgggaggcaatgatatgacattaaaagaggtctgcaagatgctcatacacatgcgtcacccggaggtgtaccaccacctgggcgtcgtgccccctcgtggagttctccttcatggaccaccaggctgtgggaagacattacttgcacatgcaattgctgggagattttctctctgttgcccaggctgagtgcagtggcatgatcacagctcactgca

SEQ ID NO: 54247 - DNA, 274 bp, Homo sapiens
gagaactatttgagcaagctgtggtgagtcagttaatgactaatgccaggtggtcagacgctaccagcttatattaaagatcctgctttttctgatgctagtatttgttaacccactcactggccattcttttattaatataaacatggtaatttgctatgcatgatggctaaatatttaaagtagatttagtgataccagctgttggataaataacccttttcatttgaaatcaaacataaatgtaattggtgagaaattctgggccgtcata

SEQ ID NO: 54248 - DNA, 484 bp, Homo sapiens
taaaactagtttatgtcacataaaactgtttagtatcatttgacccaaaccacaaagttgaactgttggtattttatttcctttctgtgtatgtttagtatgttggtgagagtgaacgtgctgtgcgacaagtttttcaacgagccaagaactcagcaccctgtgtgatattctttgatgaagtggatgctttatgtcctcgaagatcagaccgagaggtaagtatcatggactagtggttttcagattcttttagcacaataaaccttttctatgttccaagccaggtatttcttatgaagtcatcccttgggagcattgagactcttaatgaagacacttagtaatttgaaatcaaatcctagagatagcagttgtattctgtatccgcctctgcatccagtttttttcctgtacattattttggttgcacaatctttaggtcatcctaattcacacaaatgagtaggtaagtatggaaatg

SEQ ID NO: 54249 - DNA, 2558 bp, Homo sapiens
  misc_feature (1)..(1): n is a, c, g, or t
ngcccccggttgactaggagctggcggtccgagctgtggcttgaaagaccgacgcgatgaagcccagacctgcagggttcgtggataataaactcaagcagcgagtcatccagtatagactatggtcgaagaaaaagaaatgcttttaggattcaggtagaaaaagtatttagcataattagtagtgagaaggaacttaagaatttaacagaattagaagatgaacatttggcaaaaagggcaagacaaggtgaagaggataatgagtatactgaaagctattctgatgatgattcaagtatggaagactacccagatccacaggattcaaaagattcttctcttttggagagtgatatgaaacggaaaggcaagctaaagaataaaggaagcaaaaggaagaaagaagatcttcaggaagtagatggagaaattgaagctgtcctacaaaagaaagctaaagccagggggttagaattccagatctccaacgtgaagtttgaagatgtgggaggcaatgatatgacattaaaagaggtctgcaagatgctcatacacatgcgtcacccggaggtgtaccaccacctgggcgtcgtgccccctcgtggagttctccttcatggaccaccaggctgtgggaagacattacttgcacatgcaattgctggggaacttgacctgccaattttgaaagtggctgctccagagattgtgtctggagtatccggagagtctgagcagaagctgagagaactatttgagcaagctgtgtcaaatgcaccatgtatcattttcattgatgaaattgatgctattacccccaaaagagaagtggcttcaaaagatatggaacgaagaattgtagcccaactcctaacctgcatggatgatctgaataatgtggctgctacagcccgggtcctagttattggagctactaatcgaccagactcgttagaccctgctttgagacgtgcgggaaggttcgaccgagaaatatgcctaggtatcccagatgaagcatccagggaaagaatacttcaaacattgtgcagaaaactgaggcttcctcaagcttttgatttctgtcacttagcacacctaactccaggctttgttggtgctgatctcatggcactgtgccgagaggcagcaatgtgtgcagtcaatagagtcttaatgaagctacaggaacagcagaagaaaaatcctgaaatggaagatttgccatctaaaggagtccaggaggaaaggctgggaactgagcccacttctgaaacacaggatgaattacaaaggctgctggggttgctaagagaccaagatcccctctcagaggagcagatgcaaggactgtgcattgaactgaatgatttcattgttgctctatcctcagtccaaccctctgccaaaagggaaggctttgtcactgtccctaatgtgacatgggcagatattggtgccctggaagacattagagaggagctcaccatggcaatattggcaccagtacgcaacccagaccagttcaaagctcttggattggtgactccagctggggtcctccttgctggtcctcctggctgtgggaagactctgctggcgaaggctgttgcaaatgagtccggactaaattttatatctgtcaagggccccgaattactaaacatgtatgttggtgagagtgaacgtgctgtgcgacaagtttttcaacgagccaagaactcagcaccctgtgtgatattctttgatgaagtggatgctttatgtcctcgaagatcagaccgagagacaggggcaagtgtccgagtggtgaatcagctacttacagagatggatggtctggaagcacgccagcaggtttttattatggcagccactaacaggccagatataattgaccctgcaatcctgcgcccgggccgcctggacaaaacactgtttgtgggtttaccgccccctgcagatcgccttgccatcttaaaaactatcacaaaaaatggtaccaaaccaccactggatgcagatgtaaatttggaagcaattgctggtgaccttcgctgtgattgctatacgggcgcagatctctctgctttggtacgagaagcttctatctgtgccctgagacaggaaatggcaagacagaagagtggaaatgaaaaaggtgaactcaaggttagtcataagcattttgaagaagctttcaagaaagtaagatcatctatatcaaaaaaggatcaaatcatgtatgaacgtttgcaggagtccctcagccggtgatgtctccagcagccggcttagaggagctagcccatcaagccggcagagaatcccccacacgctctgaaggacccactttcagctggacacaggcgcggcctcatgtaaacattttattttcaaatgaatgaggccaagctgaagctgaagctgaagattcttcccatctggccagccttgtgtgaaaatgccttcttcctctttaagaaaaaggacaatttttaaactgctgaaataaaatgactgttacatttttcaaataaaacttttactttgaa

SEQ ID NO: 54250 - DNA, 3178 bp, Homo sapiens
  misc_feature (1)..(1): n is a, c, g, or t
  misc_feature (2907)..(2907): n is a, c, g, or t
ngcccccggttgactaggagctggcggtccgagctgtggcttgaaagaccgacgcgatgaagcccagacctgcagggttcgtggataataaactcaagcagcgagtcatccagtaccttaccagtaacaaatgtggcaaatatgtggacattggagtcttagcgtctgatttacaaagagtgtacagtatagactatggtcgaagaaaaagaaatgcttttaggattcaggtagaaaaagtatttagcataattagtagtgagaaggaacttaagaatttaacagaattagaagatgaacatttggcaaaaagggcaagacaaggtgaagaggataatgagtatactgaaagctattctgatgatgattcaagtatggaagactacccagatccacagtcagcaaatcacatgaacagttccctgctgtctttatatcggaaaggaaatcctgattctgtttcaaatactcctgagatggagcaaagagaaaccacctcttcaacaccacgaataagttccaaaacaggctccattcccttgaagacccctgccaaagattctgaaggaggatggtttattgacaaaaccccaagtgtaaagaaagacagttttttcttggacctgtcatgtgagaaaagtaatcctaagaagccaataactgagatacaggattcaaaagattcttctcttttggagagtgatatgaaacggaaaggcaagctaaagaataaaggaagcaaaaggaagaaagaagatcttcaggaagtagatggagaaattgaagctgtcctacaaaagaaagctaaagccagggggttagaattccagatctccaacgtgaagtttgaagatgtgggaggcaatgatatgacattaaaagaggtctgcaagatgctcatacacatgcgtcacccggaggtgtaccaccacctgggcgtcgtgccccctcgtggagttctccttcatggaccaccaggctgtgggaagacattacttgcacatgcaattgctggggaacttgacctgccaattttgaaagtggctgctccagagattgtgtctggagtatccggagagtctgagcagaagctgagagaactatttgagcaagctgtgtcaaatgcaccatgtatcattttcattgatgaaattgatgctattacccccaaaagagaagtggcttcaaaagatatggaacgaagaattgtagcccaactcctaacctgcatggatgatctgaataatgtggctgctacagcccgggtcctagttattggagctactaatcgaccagactcgttagaccctgctttgagacgtgcgggaaggttcgaccgagaaatatgcctaggtatcccagatgaagcatccagggaaagaatacttcaaacattgtgcagaaaactgaggcttcctcaagcttttgatttctgtcacttagcacacctaactccaggctttgttggtgctgatctcatggcactgtgccgagaggcagcaatgtgtgcagtcaatagagtcttaatgaagctacaggaacagcagaagaaaaatcctgaaatggaagatttgccatctaaaggagtccaggaggaaaggctgggaactgagcccacttctgaaacacaggatgaattacaaaggctgctggggttgctaagagaccaagatcccctctcagaggagcagatgcaaggactgtgcattgaactgaatgatttcattgttgctctatcctcagtccaaccctctgccaaaagggaaggctttgtcactgtccctaatgtgacatgggcagatattggtgccctggaagacattagagaggagctcaccatggcaatattggcaccagtacgcaacccagaccagttcaaagctcttggattggtgactccagctggggtcctccttgctggtcctcctggctgtgggaagactctgctggcgaaggctgttgcaaatgagtccggactaaattttatatctgtcaagggccccgaattactaaacatgtatgttggtgagagtgaacgtgctgtgcgacaagtttttcaacgagccaagaactcagcaccctgtgtgatattctttgatgaagtggatgctttatgtcctcgaagatcagaccgagagacaggggcaagtgtccgagtggtgaatcagctacttacagagatggatggtctggaagcacgccagcaggtttttattatggcagccactaacaggccagatataattgaccctgcaatcctgcgcccgggccgcctggacaaaacactgtttgtgggtttaccgccccctgcagatcgccttgccatcttaaaaactatcacaaaaaatggtaccaaaccaccactggatgcagatgtaaatttggaagcaattgctggtgaccttcgctgtgattgctatacgggcgcagatctctctgctttggtacgagaagcttctatctgtgccctgagacaggaaatggcaagacagaagagtggaaatgaaaaaggtgaactcaaggttagtcataagcattttgaagaagctttcaagaaagtaagatcatctatatcaaaaaaggatcaaatcatgtatgaacgtttgcaggagtccctcagccggtgatgtctccagcagccggcttagaggagctagcccatcaagccggcagagaatcccccacacgctctgaaggacccactttcagctggacacaggcgcggcctcatgtaaacattttattttcaaatgaatgaggccaagctgaagctgaagctgaagattcttcccatctggccagccttgtgtgaaaatgccttcttcctctttaagaaaaaggacaatttttaaactgctgaaataaaatgactgttacatttttcaaataaaacttttactttgaaanaaaaaaaaaaagaaaaaataattgtgggggcgcgcgaccaaggaaagtttaaaccaatccgtgggcggcgccagtggtgcatgaaattggcaaacgttgcccaggaacggggcatgtcatgggggttccaccataaaacgcgggccgggtcggacaacagagggtcgcgcccgtccacgggcagcgatcccccgcgccgggaaaacaacacagcggagcaatcaaacagcaaacacagccgcgaaacggagcaaacacgagaagcgtgatg

SEQ ID NO: 54251 - DNA, 1134 bp, Homo sapiens
atacgctaggtacgaggctgggtgtgcggatattggtgccctggaagacattagagaggagctcaccatggcaatattggcaccagtacgcaacccagaccagttcaaagctcttggattggtgactccagctggggtcctccttgctggtcctcctggctgtgggaagactctgctggcgaaggctgttgcaaatgagtccggactaaattttatatctgtcaagggccccgaattactaaacatgtatgttggtgagagtgaacgtgctgtgcgacaagtttttcaacgagccaagaactcagcaccctgtgtgatattctttgatgaagtggatgctttatgtcctcgaagatcagaccgagagacaggggcaagtgtccgagtggtgaatcagctacttacagagatggatggtctggaagcacgccagcaggtttttattatggcagccactaacaggccagatataattgaccctgcaatcctgcgcccgggccgcctggacaaaacactgtttgtgggtttaccgccccctgcagatcgccttgccatcttaaaaactatcacaaaaaatggtaccaaaccaccactggatgcagatgtaaatttggaagcaattgctggtgaccttcgctgtgattgctatacgggcgcagatctctctgctttggtacgagaagcttctatctgtgccctgagacaggaaatggcaagacagaagagtggaaatgaaaaaggtgaactcaaggttagtcataagcattttgaagaagctttcaagaaagtaagatcatctatatcaaaaaaggatcaaatcatgtatgaacgtttgcaggagtccctcagccggtgatgtctccagcagccggcttagaggagctagcccatcaagccggcagagaatcccccacacgctctgaaggacccactttcagctggacacaggcgcggcctcatgtaaacattttattttcaaatgaatgaggccaagctgaagctgaagctgaagattcttcccatctggccagccttgtgtgaaaatgccttcttcctctttaagaaaaaggacaatttttaaactgctgaaataaaatgactgttacatttttcaaataaaacttttactttgaa

SEQ ID NO: 54252 - DNA, 390 bp, Homo sapiens
gcaaactcaaatctcaaagagccatgtgtttgaaggactctgtgaaagaacagttggactgtccagagaaaatataagtgcaagctgcaaagcccagactgggaaaggtccagctaatcaagagcagcattctggggactcagagataaaactgaccactgagggtaccctatgcttccccagcccacggctgcgcaagccaaggagagccaggtagactgcgagaggagtaagaggcaacatcccacacagagaggaagaagcaccagccagtggctgttgtgaggcggcttctgcagctgctggaaaaggctctgctgagagggctcagcttgactggccttgccttggaaacaaagagcgaagggtgaaagagaagcttaaagtcca

SEQ ID NO: 54253 - DNA, 2181 bp, Homo sapiens
tactgcgcgcgtcgtgcgtaatgacgtcagcgccggcggagaatttcaaattcgaacggctttggcgggccgaggaaggacctggtgttttgatgaccgctgtcctgtctagcagatacttgcacggtttacagaaattcggtccctgggtcgtgtcaggaaactggaaaaaaggtcataagcatgaagcgcagttcagtttccagcggtggtgctggccgcctctccatgcaggagttaagatcccaggatgtaaataaacaaggcctctatacccctcaaaccaaagagaaaccaacctttggaaagttgagtataaacaaaccgacatctgaaagaaaagtctcgctatttggcaaaagaactagtggacatggatcccggaatagtcaacttggtatattttccagttctgagaaaatcaaggacccgagaccacttaatgacaaagcattcattcagcagtgtattcgacaactctgtgagtttcttacagaaaatggttatgcacataatgtgtccatgaaatctctacaagctccctctgttaaagacttcctgaagatcttcacatttctttatggcttcctgtgcccctcatacgaacttcctgacacaaagtttgaagaagaggttccaagaatctttaaagaccttgggtatccttttgcactatccaaaagctccatgtacacagtgggggctcctcatacatggcctcacattgtggcagccttagtttggctaatagactgcatcaagatacatactgccatgaaagaaagctcacctttatttgatgatgggcagccttggggagaagaaactgaagatggaattatgcataataagttgtttttggactacaccataaaatgctatgagagttttatgagtggtgccgacagctttgatgagatgaatgcagagctgcagtcaaaactgaaggatttatttaatgtggatgcttttaagctggaatcattagaagcaaaaaacagagcattgaatgaacagattgcaagattggaacaagaaagagaaaaagaaccgaatcgtctagagtcgttgagaaaactgaaggcttccttacaaggagatgttcaaaagtatcaggcatacatgagcaatttggagtctcattcagccattcttgaccagaaattaaatggtctcaatgaggaaattgctagagtagaactagaatgtgaaacaataaaacaggagaacactcgactacagaatatcattgacaaccagaagtactcagttgcagacattgagcgaataaatcatgaaagaaatgaattgcagcagactattaataaattaaccaaggacctggaagctgaacaacagaagttgtggaatgaggagttaaaatatgccagaggcaaagaagcgattgaaacacaattagcagagtatcacaaattggctagaaaattaaaacttattcctaaaggtgctgagaattccaaaggttatgactttgaaattaagtttaatcccgaggctggtgccaactgccttgtcaaatacagggctcaagtttatgtacctcttaaggaactcctgaatgaaactgaagaagaaattaataaagccctaaataaaaaaatgggtttggaggatactttagaacaattgaatgcaatgataacagaaagcaagagaagtgtgagaactctgaaagaagaagttcaaaagctggatgatctttaccaacaaaaaattaaggaagcagaggaagaggatgaaaaatgtgccagtgagcttgagtccttggagaaacacaagcacctgctagaaagtactgttaaccaggggctcagtgaagctatgaatgaattagatgctgttcagcgggaataccaactagttgtgcaaaccacgactgaagaaagacgaaaagtgggaaataacttgcaacgtctgttagagatggttgctacacatgttgggtctgtagagaaacatcttgaggagcagattgctaaagttgatagagaatatgaagaatgcatgtcagaagatctctcggaaaatattaaagagattagagataagtatgagaagaaagctactctaattaagtcttctgaagaatgaagataaaatgttgatcatgtatatatatccatagtgaataaaattgtctcagtaaagtgtaaaaaaatc

SEQ ID NO: 54254 - DNA, 2136 bp, Homo sapiens
tgagctcgtacctgtgaccatgtgttaaggaaggacctggtgttttgatgaccgctgtcctgtctagcagatacttgcacggtttacagaaattcggtccctgggtcgtgtcaggaaactggaaaaaaggtcataagcatgaagcgcagttcagtttccagcggtggtgctggccgcctctccatgcaggagttaagatcccaggatgtaaataaacaaggcctctatacccctcaaaccaaagagaaaccaacctttggaaagttgagtataaacaaaccgacatctgaaagaaaagtctcgctatttggcaaaagaactagtggacatggatcccggaatagtcaacttggtatattttccagttctgagaaaatcaaggacccgagaccacttaatgacaaagcattcattcagcagtgtattcgacaactctgtgagtttcttacagaaaatggttatgcacataatgtgtccatgaaatctctacaagctccctctgttaaagacttcctgaagatcttcacatttctttatggcttcctgtgcccctcatacgaacttcctgacacaaagtttgaagaagaggttccaagaatctttaaagaccttgggtatccttttgcactatccaaaagctccatgtacacagtgggggctcctcatacatggcctcacattgtggcagccttagtttggctaatagactgcatcaagatacatactgccatgaaagaaagctcacctttatttgatgatgggcagccttggggagaagaaactgaagatggaattatgcataataagttgtttttggactacaccataaaatgctatgagagttttatgagtggtgccgacagctttgatgagatgaatgcagagctgcagtcaaaactgaaggatttatttaatgtggatgcttttaagctggaatcattagaagcaaaaaacagagcattgaatgaacagattgcaagattggaacaagaaagagaaaaagaaccgaatcgtctagagtcgttgagaaaactgaaggcttccttacaaggagatgttcaaaagtatcaggcatacatgagcaatttggagtctcattcagccattcttgaccagaaattaaatggtctcaatgaggaaattgctagagtagaactagaatgtgaaacaataaaacaggagaacactcgactacagaatatcattgacaaccagaagtactcagttgcagacattgagcgaataaatcatgaaagaaatgaattgcagcagactattaataaattaaccaaggacctggaagctgaacaacagaagttgtggaatgaggagttaaaatatgccagaggcaaagaagcgattgaaacacaattagcagagtatcacaaattggctagaaaattaaaacttattcctaaaggtgctgagaattccaaaggttatgactttgaaattaagtttaatcccgaggctggtgccaactgccttgtcaaatacagggctcaagtttatgtacctcttaaggaactcctgaatgaaactgaagaagaaattaataaagccctaaataaaaaaatgggtttggaggatactttagaacaattgaatgcaatgataacagaaagcaagagaagtgtgagaactctgaaagaagaagttcaaaagctggatgatctttaccaacaaaaaattaaggaagcagaggaagaggatgaaaaatgtgccagtgagcttgagtccttggagaaacacaagcacctgctagaaagtactgttaaccaggggctcagtgaagctatgaatgaattagatgctgttcagcgggaataccaactagttgtgcaaaccacgactgaagaaagacgaaaagtgggaaataacttgcaacgtctgttagagatggttgctacacatgttgggtctgtagagaaacatcttgaggagcagattgctaaagttgatagagaatatgaagaatgcatgtcagaagatctctcggaaaatattaaagagattagagataagtatgagaagaaagctactctaattaagtcttctgaagaatgaagataaaatgttgatcatgtatatatatccatagtgaataaaattgtctcagtaaagtgtaaaaaaatc

SEQ ID NO: 54255 - DNA, 2542 bp, Homo sapiens
tactgcgcgcgtcgtgcgtaatgacgtcagcgccggcggagaatttcaaattcgaacggctttggcgggccgaggaaggacctggtgttttgatgaccgctgtcctgtctagcagatacttgcacggtttacagaaattcggtccctgggtcgtgtcaggaaactggaaaaaaggtcataagcatgaagcgcagttcagtttccagcggtggtgctggccgcctctccatgcaggagttaagatcccaggatgtaaataaacaaggcctctatacccctcaaaccaaagagaaaccaacctttggaaagttgagtataaacaaaccgacatctgaaagaaaagtctcgctatttggcaaaagaactagtggacatggatcccggaatagtcaacttggtatattttccagttctgagaaaatcaaggacccgagaccacttaatgacaaagcattcattcagcagtgtattcgacaactctgtgagtttcttacagaaaatggttatgcacataatgtgtccatgaaatctctacaagctccctctgttaaagacttcctgaagatcttcacatttctttatggcttcctgtgcccctcatacgaacttcctgacacaaagtttgaagaagaggttccaagaatctttaaagaccttgggtatccttttgcactatccaaaagctccatgtacacagtgggggctcctcatacatggcctcacattgtggcagccttagtttggctaatagactgcatcaagatacatactgccatgaaagaaagctcacctttatttgatgatgggcagccttggggagaagaaactgaagatggaattatgcataataagttgtttttggactacaccataaaatgctatgagagttttatgagtggtgccgacagctttgatgagatgaatgcagagctgcagtcaaaactgaaggatttatttaatgtggatgcttttaagctggaatcattagaagcaaaaaacagagcattgaatgaacagattgcaagattggaacaagaaagagaaaaagaaccgaatcgtctagagtcgttgagaaaactgaaggcttccttacaaggagatgttcaaaagtatcaggcatacatgagcaatttggagtctcattcagccattcttgaccagaaattaaatggtctcaatgaggaaattgctagagtagaactagaatgtgaaacaataaaacaggagaacactcgactacagaatatcattgacaaccagaagtactcagttgcagacattgagcgaataaatcatgaaagaaatgaattgcagcagactattaataaattaaccaaggacctggaagctgaacaacagaagttgtggaatgaggagttaaaatatgccagaggcaaagaagcgattgaaacacaattagcagagtatcacaaattggctagaaaattaaaacttattcctaaaggtgctgagaattccaaaggttatgactttgaaattaagtttaatcccgaggctggtgccaactgccttgtcaaatacagggctcaagtttatgtacctcttaaggaactcctgaatgaaactgaagaagaaattaataaagccctaaataaaaaaatgggtttggaggatactttagaacaattgaatgcaatgataacagaaagcaagagaagtgtgagaactctgaaagaagaagttcaaaagctggatgatctttaccaacaaaaaattaaggaagcagaggaagaggatgaaaaatgtgccagtgagcttgagtccttggagaaacacaagcacctgctagaaagtactgttaaccaggggctcagtgaagctatgaatgaattagatgctgttcagcgggaataccaactagttgtgcaaaccacgactgaagaaagacgaaaagtgggaaataacttgcaacgtctgttagagatggttgctacacatgttgggtctgtagagaggcggatgctggggtgaagcagccgcatgctaaggaacaccaaggactgccaggagccgccagcaactggggagagacgaagaaggattcttccctagagccttcagagagaccatggccctgctgacgtcttgatttcaaacttccggcctccagagctgaaagagtacatttctgttgttttaagccacctagtttgtggcaatttgttacagtatcagtatttgaaatcgcaaaaaaatcaacaaaaacaacaagaaaaaataatgtggcatgttagtttcccattgctaatgtaacaaattaccaccaacctaatggcttaaaacaacacaaatttgtcatcttagagttattaagaaacatcttgaggagcagattgctaaagttgatagagaatatgaagaatgcatgtcagaagatctctcggaaaatattaaagagattagagataagtatgagaagaaagctactctaattaagtcttctgaagaatgaagataaaatgttgatcatgtatatatatccatagtgaataaaattgtctcagtaaagtgtaaaaaaatc

SEQ ID NO: 54256 - DNA, 1821 bp, Homo sapiens
  misc_feature (1660)..(1660): n is a, c, g, or t
  misc_feature (1666)..(1666): n is a, c, g, or t
  misc_feature (1668)..(1668): n is a, c, g, or t
  misc_feature (1670)..(1670): n is a, c, g, or t
  misc_feature (1678)..(1678): n is a, c, g, or t
  misc_feature (1682)..(1682): n is a, c, g, or t
  misc_feature (1685)..(1685): n is a, c, g, or t
tactgcgcgcgtcgtgcgtaatgacgtcagcgccggcggagaatttcaaattcgaacggctttggcgggccgaggaaggacctggtgttttgatgaccgctgtcctgtctagcagatacttgcacggtttacagaaattcggtccctgggtcgtgtcaggaaactggaaaaaaggtcataagcatgaagcgcagttcagtttccagcggtggtgctggccgcctctccatgcaggagttaagatcccaggatgtaaataaacaaggcctctatacccctcaaaccaaagagaaaccaacctttggaaagttgagtataaacaaaccgacatctgaaagaaaagtctcgctatttggcaaaagaactagtggacatggatcccggaatagtcaacttggtatattttccagttctgagaaaatcaaggacccgagaccacttaatgacaaagcattcattcagcagtgtattcgacaactctgtgagtttcttacagaaaatggttatgcacataatgtgtccatgaaatctctacaagctccctctgttaaagacttcctgaagatcttcacatttctttatggcttcctgtgcccctcatacgaacttcctgacacaaagtttgaagaagaggttccaagaatctttaaagaccttgggtatccttttgcactatccaaaagctccatgtacacagtgggggctcctcatacatggcctcacattgtggcagccttagtttggctaatagactgcatcaagatacatactgccatgaaagaaagctcacctttatttgatgatgggcagccttggggagaagaaactgaagatggaattatgcataataagttgtttttggactacaccataaaatgctatgagagttttatgagtggtgccgacagctttgatgagatgaatgcagagctgcagtcaaaactgaaggatttatttaatgtggatgcttttaagctggaatcattagaagcaaaaaacagagcattgaatgaacagattgcaagattggaacaagaaagagaaaaagaaccgaatcgtctagagtcgttgagaaaactgaaggcttccttacaaggagatgttcaaaagtatcaggcatacatgagcaatttggagtctcattcagccattcttgaccagaaattaaatggtctcaatgaggaaattgctagagtagaactagaatgtgaaacaataaaacaggagaacactcgactacagaatatcattgacaaccagaagtactcagttgcagacattgagcgaataaatcatgaaagaaatgaattgcagcagactattaataaattaaccaaggacctggaagctgaacaacagaagttgtggaatgaggagttaaaatatgccagaggcaaagaagcgattgaaacacaattagcagagtatcacaaattggctagaaaattaaaacttattcctaaaggtgctgagaattccaaaggttatgactttgaaattaagtttaatcccgaggctggtgccaactgccttgtcaaatacagggctcaagtttatgtacctcttaaggaactcctgaatgaaactgaagaagaaattaataaagccctaaataaaaaaatgggtttggaggatactttagaacaatgatgcatgtacngaagananantgtgaacntganaanagtcaacgtgggtttttcacaaaattgagggggagaggagaaggtgcgggtggtttggaaaacaacgtaaatgttcagggcgggaaaaaatgttgggcaatttgcggaagaagaaacttttggtgtgaaaagaata

SEQ ID NO: 54257 - DNA, 2122 bp, Homo sapiens
tactgcgcgcgtcgtgcgtaatgacgtcagcgccggcggagaatttcaaattcgaacggctttggcgggccgaggaaggacctggtgttttgatgaccgctgtcctgtctagcagatacttgcacggtttacagaaattcggtccctgggtcgtgtcaggaaactggaaaaaaggtcataagcatgaagcgcagttcagtttccagcggtggtgctggccgcctctccatgcaggagttaagatcccaggatgtaaataaacaaggcctctatacccctcaaaccaaagagaaaccaacctttggaaagttgagtataaacaaaccgacatctgaaagaaaagtctcgctatttggcaaaagaactagtggacatggatcccggaatagtcaacttggtatattttccagttctgagaaaatcaaggacccgagaccacttaatgacaaagcattcattcagcagtgtattcgacaactctgtgagtttcttacagaaaatggttatgcacataatgtgtccatgaaatctctacaagctccctctgttaaagacttcctgaagatcttcacatttctttatggcttcctgtgcccctcatacgaacttcctgacacaaagtttgaagaagaggttccaagaatctttaaagaccttggctcacattgtggcagccttagtttggctaatagactgcatcaagatacatactgccatgaaagaaagctcacctttatttgatgatgggcagccttggggagaagaaactgaagatggaattatgcataataagttgtttttggactacaccataaaatgctatgagagttttatgagtggtgccgacagctttgatgagatgaatgcagagctgcagtcaaaactgaaggatttatttaatgtggatgcttttaagctggaatcattagaagcaaaaaacagagcattgaatgaacagattgcaagattggaacaagaaagagaaaaagaaccgaatcgtctagagtcgttgagaaaactgaaggcttccttacaaggagatgttcaaaagtatcaggcatacatgagcaatttggagtctcattcagccattcttgaccagaaattaaatggtctcaatgaggaaattgctagagtagaactagaatgtgaaacaataaaacaggagaacactcgactacagaatatcattgacaaccagaagtactcagttgcagacattgagcgaataaatcatgaaagaaatgaattgcagcagactattaataaattaaccaaggacctggaagctgaacaacagaagttgtggaatgaggagttaaaatatgccagaggcaaagaagcgattgaaacacaattagcagagtatcacaaattggctagaaaattaaaacttattcctaaaggtgctgagaattccaaaggttatgactttgaaattaagtttaatcccgaggctggtgccaactgccttgtcaaatacagggctcaagtttatgtacctcttaaggaactcctgaatgaaactgaagaagaaattaataaagccctaaataaaaaaatgggtttggaggatactttagaacaattgaatgcaatgataacagaaagcaagagaagtgtgagaactctgaaagaagaagttcaaaagctggatgatctttaccaacaaaaaattaaggaagcagaggaagaggatgaaaaatgtgccagtgagcttgagtccttggagaaacacaagcacctgctagaaagtactgttaaccaggggctcagtgaagctatgaatgaattagatgctgttcagcgggaataccaactagttgtgcaaaccacgactgaagaaagacgaaaagtgggaaataacttgcaacgtctgttagagatggttgctacacatgttgggtctgtagagaaacatcttgaggagcagattgctaaagttgatagagaatatgaagaatgcatgtcagaagatctctcggaaaatattaaagagattagagataagtatgagaagaaagctactctaattaagtcttctgaagaatgaagataaaatgttgatcatgtatatatatccatagtgaataaaattgtctcagtaaagtgtaaaaaaatc

SEQ ID NO: 54258 - DNA, 1131 bp, Homo sapiens
gcggatttgaggtcttaaaaagctttggattttgtctccagaggatttatttaatgtggatgcttttaagctggaatcattagaagcaaaaaacagagcattgaatgaacagattgcaagattggaacaagaaagagaaaaagaaccgaactagaatgtgaaacaataaaacaggagaacactcgactacagaatatcattgacaaccagaagtactcagttgcagacattgagcgaataaatcatgaaagaaatgaattgcagcagactattaataaattaaccaaggacctggaagctgaacaacagaagttgtggaatgaggagttaaaatatgccagaggcaaagaagcgattgaaacacaattagcagagtatcacaaattggctagaaaattaaaacttattcctaaaggtgctgagaattccaaaggttatgactttgaaattaagtttaatcccgaggctggtgccaactgccttgtcaaatacagggctcaagtttatgtacctcttaaggaactcctgaatgaaactgaagaagaaattaataaagccctaaataaaaaaatgggtttggaggatactttagaacaattgaatgcaatgataacagaaagcaagagaagtgtgagaactctgaaagaagaagttcaaaagctggatgatctttaccaacaaaaaattaaggaagcagaggaagaggatgaaaaatgtgccagtgagcttgagtccttggagaaacacaagcacctgctagaaagtactgttaaccaggggctcagtgaagctatgaatgaattagatgctgttcagcgggaataccaactagttgtgcaaaccacgactgaagaaagacgaaaagtgggaaataacttgcaacgtctgttagagatggttgctacacatgttgggtctgtagagaaacatcttgaggagcagattgctaaagttgatagagaatatgaagaatgcatgtcagaagatctctcggaaaatattaaagagattagagataagtatgagaagaaagctactctaattaagtcttctgaagaatgaagataaaatgttgatcatgtatatatatccatagtgaataaaattgtctcagtaaagtgtaaaaaaatc

SEQ ID NO: 54259 - DNA, 1007 bp, Homo sapiens
tactgcgcgcgtcgtgcgtaatgacgtcagcgccggcggagaatttcaaattcgaacggctttggcgggccgaggaaggacctggtgttttgatgaccgctgtcctgtctagcagatacttgcacggtttacagaaattcggtccctgggtcgtgtcaggaaactggaaaaaaggtcataagcatgaagcgcagttcagtttccagcggtggtgctggccgcctctccatgcaggagttaagatcccaggatgtaaataaacaaggcctctatacccctcaaaccaaagagaaaccaacctttggaaagttgagtataaacaaaccgacatctgaaagaaaagtctcgctatttggcaaaagaactagtggacatggatcccggaatagtcaacttggtatattttccagttctgagaaaatcaaggacccgagaccacttaatgacaaagcattcattcagcagtgtattcgacaactctgtgagtttcttacagaaaatggttatgcacataatgtgtccatgaaatctctacaagctccctctgttaaagacttcctgaagatgaagcagaggaagaggatgaaaaatgtgccagtgagcttgagtccttggagaaacacaagcacctgctagaaagtactgttaaccaggggctcagtgaagctatgaatgaattagatgctgttcagcgggaataccaactagttgtgcaaaccacgactgaagaaagacgaaaagtgggaaataacttgcaacgtctgttagagatggttgctacacatgttgggtctgtagagaaacatcttgaggagcagattgctaaagttgatagagaatatgaagaatgcatgtcagaagatctctcggaaaatattaaagagattagagataagtatgagaagaaagctactctaattaagtcttctgaagaatgaagataaaatgttgatcatgtatatatatccatagtgaataaaattgtctcagtaaagtgtaaaaaaatc

SEQ ID NO: 54260 - DNA, 930 bp, Homo sapiens
tactgcgcgcgtcgtgcgtaatgacgtcagcgccggcggagaatttcaaattcgaacggctttggcgggccgaggaaggacctggtgttttgatgaccgctgtcctgtctagcagatacttgcacggtttacagaaattcggtccctgggtcgtgtcaggaaactggaaaaaaggtcataagcatgaagcgcagttcagtttccagcggtggtgctggccgcctctccatgcaggagttaagatcccaggatgtaaataaacaaggcctctatacccctcaaaccaaagagaaaccaacctttggaaagttgagtataaacaaaccgacatctgaaagaaaagtctcgctatttggcaaaagaactagtggacatggatcccggaatagtcaacttggtatattttccagttctgagaaaatcaaggacccgagaccacttaatgacaaagcattcattcagcagtgtattcgacaactctgtgagtttcttacagaaaatggttatgcacataatgtgtccatgaaatctctacaagctccctctgttaaagacttcctgaagatcttcacatttctttatggcttcctgtgcccctcatacgaacttcctgacacaaagtttgaagaagaggttccaagaatctttaaagaccttgggtatccttttgcactatccaaaagctccatgtacacagtgggggctcctcatacatggcctcacattgtggcagccttagtttggctaatagactgcatcaaggtatttgatttgttcttttgaaatgtatacatgggaaagggtttttttcctcaaaaaaaatattttctctcccagtcttttgacagtattctcaaagtctgcttcagagttttcatttttcaaagcacatttgattttaagtttttcaaactattatcacaaggtaaa

SEQ ID NO: 54261 - DNA, 812 bp, Homo sapiens
tactgcgcgcgtcgtgcgtaatgacgtcagcgccggcggagaatttcaaattcgaacggctttggcgggccgaggaaggacctggtgttttgatgaccgctgtcctgtctagcagatacttgcacggtttacagaaattcggtccctgggtcgtgtcaggaaactggaaaaaaggtcataagcatgaagcgcagttcagtttccagcggtggtgctggccgcctctccatgcaggagttaagatcccaggatgtaaataaacaaggcctctatacccctcaaaccaaagagaaaccaacctttggaaagttgagtataaacaaaccgacatctgaaagaaaagtctcgctatttggcaaaagaactagtggacatggatcccggaatagtcaacttggtatattttccagttctgagaaaatcaaggacccgagaccacttaatgacaaagcattcattcagcagttgaagctatgaatgaattagatgctgttcagcgggaataccaactagttgtgcaaaccacgactgaagaaagacgaaaagtgggaaataacttgcaacgtctgttagagatggttgctacacatgttgggtctgtagagaaacatcttgaggagcagattgctaaagttgatagagaatatgaagaatgcatgtcagaagatctctcggaaaatattaaagagattagagataagtatgagaagaaagctactctaattaagtcttctgaagaatgaagataaaatgttgatcatgtatatatatccatagtgaataaaattgtctcagtaaagtgtaaaaaaatc

SEQ ID NO: 54262 - DNA, 519 bp, Homo sapiens
ggtatgtatatttcttattagtttagagacatgactggcacacagagatgaaacaaattaaatcaatttgtaaaaagtttgagttacagaaataatatgttttaagatgaccactgtgggcaatatatgtaggataaattgaagagaaaaaaagcaactgcttacaaaaaaacaaataaaaattgctagtggtagaagcaagaaggattaacaaattgttagtaactgatcaagtttgatgatgggtacagacggataaaatccacttttctttgtttaaaaaaaaactactcgtagattattacagagcaacagaagacagaatataaagccctgaactgctgaagtgacagagaatagaaaagacagactggataccacagattttacagaagccaaaaacaaaaaaaaacaggattcacgcctggtgaaaacagagtgtgatgaaattgaaagtgggaagaatggatttggaggtgtacatacctgtcatttattgggggtatattgaatttgagg

SEQ ID NO: 54263 - DNA, 916 bp, Homo sapiens
  misc_feature (755)..(755): n is a, c, g, or t
  misc_feature (761)..(761): n is a, c, g, or t
  misc_feature (763)..(763): n is a, c, g, or t
  misc_feature (765)..(765): n is a, c, g, or t
  misc_feature (773)..(773): n is a, c, g, or t
  misc_feature (777)..(777): n is a, c, g, or t
  misc_feature (780)..(780): n is a, c, g, or t
gcggatttgaggtcttaaaaagctttggattttgtctccagaggatttatttaatgtggatgcttttaagctggaatcattagaagcaaaaaacagagcattgaatgaacagattgcaagattggaacaagaaagagaaaaagaaccgaatcgtctagagtcgttgagaaaactgaaggcttccttacaaggagatgttcaaaagtatcaggcatacatgagcaatttggagtctcattcagccattcttgaccagaaattaaatggtctcaatgaggaaattgctagagtagaactagaatgtgaaacaataaaacaggagaacactcgactacagaatatcattgacaaccagaagtactcagttgcagacattgagcgaataaatcatgaaagaaatgaattgcagcagactattaataaattaaccaaggacctggaagctgaacaacagaagttgtggaatgaggagttaaaatatgccagaggcaaagaagcgattgaaacacaattagcagagtatcacaaattggctagaaaattaaaacttattcctaaaggtgctgagaattccaaaggttatgactttgaaattaagtttaatcccgaggctggtgccaactgccttgtcaaatacagggctcaagtttatgtacctcttaaggaactcctgaatgaaactgaagaagaaattaataaagccctaaataaaaaaatgggtttggaggatactttagaacaatgatgcatgtacngaagananantgtgaacntganaanagtcaacgtgggtttttcacaaaattgagggggagaggagaaggtgcgggtggtttggaaaacaacgtaaatgttcagggcgggaaaaaatgttgggcaatttgcggaagaagaaacttttggtgtgaaaagaata

SEQ ID NO: 54264 - DNA, 2170 bp, Homo sapiens
ctagtacgagctgggtttaaatcggcaccgaatttcaaattcgaacggctttggcgggccgaggaaggacctggtgttttgatgaccgctgtcctgtctagcagatacttgcacggtttacagaaattcggtccctgggtcgtgtcaggaaactggaaaaaaggtcataagcatgaagcgcagttcagtttccagcggtggtgctggccgcctctccatgcaggagttaagatcccaggatgtaaataaacaaggcctctatacccctcaaaccaaagagaaaccaacctttggaaagttgagtataaacaaaccgacatctgaaagaaaagtctcgctatttggcaaaagaactagtggacatggatcccggaatagtcaacttggtatattttccagttctgagaaaatcaaggacccgagaccacttaatgacaaagcattcattcagcagtgtattcgacaactctgtgagtttcttacagaaaatggttatgcacataatgtgtccatgaaatctctacaagctccctctgttaaagacttcctgaagatcttcacatttctttatggcttcctgtgcccctcatacgaacttcctgacacaaagtttgaagaagaggttccaagaatctttaaagaccttgggtatccttttgcactatccaaaagctccatgtacacagtgggggctcctcatacatggcctcacattgtggcagccttagtttggctaatagactgcatcaagatacatactgccatgaaagaaagctcacctttatttgatgatgggcagccttggggagaagaaactgaagatggaattatgcataataagttgtttttggactacaccataaaatgctatgagagttttatgagtggtgccgacagctttgatgagatgaatgcagagctgcagtcaaaactgaaggatttatttaatgtggatgcttttaagctggaatcattagaagcaaaaaacagagcattgaatgaacagattgcaagattggaacaagaaagagaaaaagaaccgaatcgtctagagtcgttgagaaaactgaaggcttccttacaaggagatgttcaaaagtatcaggcatacatgagcaatttggagtctcattcagccattcttgaccagaaattaaatggtctcaatgaggaaattgctagagtagaactagaatgtgaaacaataaaacaggagaacactcgactacagaatatcattgacaaccagaagtactcagttgcagacattgagcgaataaatcatgaaagaaatgaattgcagcagactattaataaattaaccaaggacctggaagctgaacaacagaagttgtggaatgaggagttaaaatatgccagaggcaaagaagcgattgaaacacaattagcagagtatcacaaattggctagaaaattaaaacttattcctaaaggtgctgagaattccaaaggttatgactttgaaattaagtttaatcccgaggctggtgccaactgccttgtcaaatacagggctcaagtttatgtacctcttaaggaactcctgaatgaaactgaagaagaaattaataaagccctaaataaaaaaatgggtttggaggatactttagaacaattgaatgcaatgataacagaaagcaagagaagtgtgagaactctgaaagaagaagttcaaaagctggatgatctttaccaacaaaaaattaaggaagcagaggaagaggatgaaaaatgtgccagtgagcttgagtccttggagaaacacaagcacctgctagaaagtactgttaaccaggggctcagtgaagctatgaatgaattagatgctgttcagcgggaataccaactagttgtgcaaaccacgactgaagaaagacgaaaagtgggaaataacttgcaacgtctgttagagatggttgctacacatgttgggtctgtagagaaacatcttgaggagcagattgctaaagttgatagagaatatgaagaatgcatgtcagaagatctctcggaaaatattaaagagattagagataagtatgagaagaaagctactctaattaagtcttctgaagaatgaagataaaatgttgatcatgtatatatatccatagtgaataaaattgtctcagtaaagtgtaaaaaaatc

SEQ ID NO: 54265 - DNA, 1767 bp, Homo sapiens
tactgcgcgcgtcgtgcgtaatgacgtcagcgccggcggagaatttcaaattcgaacggctttggcgggccgaggaaggacctggtgttttgatgaccgctgtcctgtctagcagatacttgcacggtttacagaaattcggtccctgggtcgtgtcaggaaactggaaaaaaggtcataagcatgaagcgcagttcagtttccagcggtggtgctggccgcctctccatgcaggagttaagatcccaggatgtaaataaacaaggcctctatacccctcaaaccaaagagaaaccaacctttggaaagttgagtataaacaaaccgacatctgaaagaaaagtctcgctatttggcaaaagaactagtggacatggatcccggaatagtcaacttggtatattttccagttctgagaaaatcaaggacccgagaccacttaatgacaaagcattcattcagcagtgtattcgacaactctgtgagtttcttacagaaaatggttatgcacataatgtgtccatgaaatctctacaagctccctctgttaaagacttcctgaagatcttcacatttctttatggcttcctgtgcccctcatacgaacttcctgacacaaagtttgaagaagaggttccaagaatctttaaagaccttgggtatccttttgcactatccaaaagctccatgtacacagtgggggctcctcatacatggcctcacattgtggcagccttagtttggctaatagactgcatcaagatacatactgccatgaaagaaagctcacctttatttgatgatgggcagccttggggagaagaaactgaagatggaattatgcataataagttgtttttggactacaccataaaatgctatgagagttttatgagtggtgccgacagctttgatgagatgaatgcagagctgcagtcaaaactgaaggatttatttaatgtggatgcttttaagctggaatcattagaagcaaaaaacagagcattgaatgaacagattgcaagattggaacaagaaagagaaaaagaaccgaatcgtctagagtcgttgagaaaactgaaggcttccttacaaggagatgttcaaaagtatcaggcatacatgagcaatttggagtctcattcagccattcttgaccagaaattaaatggtctcaatgaggaaattgctagagtagaactagaatgtgaaacaataaaacaggagaacactcgactacagaatatcattgacaaccagaagtactcagttgcagacattgagcgaataaatcatgaaagaaatgaattgcagcagactattaataaattaaccaaggacctggaagctgaacaacagaagttgtggaatgaggagttaaaatatgccagaggcaaagaagcgattgaaacacaattagcagagtatcacaaattggctagaaaattaaaacttattcctaaaggtgctgagaattccaaaggttatgactttgaaattaagtttaatcccgaggctggtgccaactgccttgtcaaatacagggctcaagtttatgtacctcttaaggaactcctgaatgaaactgaagaagaaattaataaagccctaaataaaaaaatgggtttggaggatactttagaacaattgaatgcaatgataacagaaagcaagagaagtgtgagaactctgaaagaagaagttcaaaagctggatgatctttaccaacaaaaaattaaggtaagaactttgccacagtttgcgtag

SEQ ID NO: 54266 - DNA, 1053 bp, Homo sapiens
tactgcgcgcgtcgtgcgtaatgacgtcagcgccggcggagaatttcaaattcgaacggctttggcgggccgaggaaggacctggtgttttgatgaccgctgtcctgtctagcagatacttgcacggtttacagaaattcggtccctgggtcgtgtcaggaaactggaaaaaaggtcataagcatgaagcgcagttcagtttccagcggtggtgctggccgcctctccatgcaggagttaagatcccaggatgtaaataaacaaggcctctatacccctcaaaccaaagagaaaccaacctttggaaagttgagtataaacaaaccgacatctgaaagaaaagtctcgctatttggcaaaagaactagtggacatggatcccggaatagtcaacttggtatattttccagttctgagaaaatcaaggacccgagaccacttaatgacaaagcattcattcagcagtgtattcgacaactctgtgagtttcttacagaaaatggttatgcacataatgtgtccatgaaatctctacaagctccctctgttaaagacttcctgaagatcttcacatttctttatggcttcctgtgcccctcatacgaacttcctgacacaaagtttgaagaagaggttccaagaatctttaaagaccttgggtatccttttgcactatccaaaagctccatgtacacagtgggggctcctcatacatggcctcacattgtggcagccttagtttggctaatagactgcatcaagatacatactgccatgaaagaaagctcacctttatttgatgatgggcagccttggggagaagaaactgaagatggaattatgcataataagttgtttttggactacaccataaaatgctatgagagttttatgagtggtgccgacagctttgatgagatgaatgcagagctgcagtcaaaactgaaggatttatttaatgtggatgcttttaagctggaatcattagaagcaaaaaacagagcattgaatgaacagattgcaagattggaacaagaaagagaaaaagaaccg

SEQ ID NO: 54267 - DNA, 1812 bp, Homo sapiens
tactgcgcgcgtcgtgcgtaatgacgtcagcgccggcggagaatttcaaattcgaacggctttggcgggccgaggaaggacctggtgttttgatgaccgctgtcctgtctagcagatacttgcacggtttacagaaattcggtccctgggtcgtgtcaggaaactggaaaaaaggtcataagcatgaagcgcagttcagtttccagcggtggtgctggccgcctctccatgcaggagttaagatcccaggatgtaaataaacaaggcctctatacccctcaaaccaaagagaaaccaacctttggaaagttgagtataaacaaaccgacatctgaaagaaaagtctcgctatttggcaaaagaactagtggacatggatcccggaatagtcaacttggtatattttccagttctgagaaaatcaaggacccgagaccacttaatgacaaagcattcattcagcagtgtattcgacaactctgtgagtttcttacagaaaatggttatgcacataatgtgtccatgaaatctctacaagctccctctgttaaagacttcctgaagatcttcacatttctttatggcttcctgtgcccctcatacgaacttcctgacacaaagtttgaagaagaggttccaagaatctttaaagaccttgggtatccttttgcactatccaaaagctccatgtacacagtgggggctcctcatacatggcctcacattgtggcagccttagtttggctaatagactgcatcaagatacatactgccatgaaagaaagctcacctttatttgatgatgggcagccttggggagaagaaactgaagatggaattatgcataataagttgtttttggactacaccataaaatgctatgagagttttatgagtggtgccgacagctttgatgagatgaatgcagagctgcagtcaaaactgaaggatttatttaatgtggatgcttttaagctggaatcattagaagcaaaaaacagagcattgaatgaacagattgcaagattggaacaagaaagagaaaaagaaccgaatcgtctagagtcgttgagaaaactgaaggcttccttacaaggagatgttcaaaagtatcaggcatacatgagcaatttggagtctcattcagccattcttgaccagaaattaaatggtctcaatgaggaaattgctagagtagaactagaatgtgaaacaataaaacaggagaacactcgactacagaatatcattgacaaccagaagtactcagttgcagacattgagcgaataaatcatgaaagaaatgaattgcagcagactattaataaattaaccaaggacctggaagctgaacaacagaagttgtggaatgaggagttaaaatatgccagaggcaaagaagcggtatgtcataccatttccagagtggcaactcatcatagctgacctttctgaaggtctgtcccaattaagaagaagtcagtgggtagagtaaattggcttaagaggtaaaacattagcattgacattttaatgaaacactcatccctttatgtcaattcagtaacatcccaatttctctcaaatttaagataagttatatttcataacccaatgaaaaagtaaacaaaaaagtctctaaaactatgaaaataatgttcataggtcccactccttttactctgtagaagaggaaatgagtccttcattcacctattcactacttaagcattaagattgaacatccgctgtgtgtcacttatgctaggcatagaggaaataaagataaaacattggctttcccctcaaaaa

SEQ ID NO: 54268 - DNA, 765 bp, Homo sapiens
cggacgcgtgggtcgacccacgcgtcaaaattaaaacttattcctaaaggtgctgagaattccaaaggttatgactttgaaattaagtttaatcccgaggctggtgccaactgccttgtcaaatacagggctcaagtttatgtacctcttaaggaactcctgaatgaaactgaagaagaaattaataaagccctaaataaaaaaatgggtttggaggatactttagaacaattgaatgcaatgataacagaaagcaagagaagtgtgagaactctgaaagaagaagttcaaaagctggatgatctttaccaacaaaaaattaaggaagcagaggaagaggatgaaaaatgtgccagtgagcttgagtccttggagaaacacaagcacctgctagaaagtactgttaaccaggggctcagtgaagctatgaatgaattagatgctgttcagcgggaataccaactagttgtgcaaaccacgactgaagaaagacgaaaagtgggaaataacttgcaacgtctgttagagatggttgctacacatgttgggtctgtagagaaacatcttgaggagcagattgctaaagttgatagagaatatgaagaatgcatgtcagaagatctctcggaaaatattaaagagattagagataagtatgagaagaaagctactctaattaagtcttctgaagaatgaagataaaatgttgatcatgtatatatatccatagtgaataaaattgtctcagtaaagtgtaaaaaaatc

SEQ ID NO: 54269 - DNA, 791 bp, Homo sapiens
  misc_feature (663)..(663): n is a, c, g, or t
  misc_feature (699)..(699): n is a, c, g, or t
  misc_feature (769)..(769): n is a, c, g, or t
tactgcgcgcgtcgtgcgtaatgacgtcagcgccggcggagaatttcaaattcgaacggctttggcgggccgaggaaggacctggtgttttgatgaccgctgtcctgtctagcagatacttgcacggtttacagaaattcggtccctgggtcgtgtcaggaaactggaaaaaaggtcataagcatgaagcgcagttcagtttccagcggtggtgctggccgcctctccatgcaggagttaagatcccaggatgtaaataaacaaggcctctatacccctcaaaccaaagagaaaccaacctttggaaagttgagtataaacaaaccgacatctgaaagaaaagtctcgctatttggcaaaagaactagtggacatggatcccggaatagtcaacttggtatattttccagttctgagaaaatcaaggacccgagaccacttaatgacaaagcattcattcagcagtgtattcgacaactctgtgagtttcttacagaaaatggttatgcacataatgtgtccatgaaatctctacaagctccctctgttaaagacttcctgaagatcttcacatttctttatggcttcctgtgcccctcatacgaacttcctgacacaaagtttgaagaagaggttccaagaatctttaaagaccttgggaangaaccttttggggtattcctttttttgcacctactnccaaaaaagctcccattgtaccacaagttgggggggctccctcaatacaatggtccttcacattttgtgngcacgcctttaagttttgggct

SEQ ID NO: 54270 - DNA, 391 bp, Homo sapiens
ctagtacgagctgggtttaaatcggcaccgaatttcaaattcgaacggctttggcgggccgaggaaggacctggtgttttgatgaccgctgtcctgtctagcagatacttgcacggtttacagaaattcggtccctgggtcgtgtcaggaaactggaaaaaaggtcataagcatgaagcgcagttcagtttccagcggtggtgctggccgcctctccatgcaggagttaagatcccaggatgtaaataaacaaggcctctatacccctcaaaccaagagaaaccacctttggaagttagtatatacaaccgacatcttaagagaaggtctctatttgcaaagaccttgggcatggcccggatgtcacttgatatttccgtcttgaatcagg

SEQ ID NO: 54271 - DNA, 286 bp, Homo sapiens
gtccagagcccatttgagagcagtggatgacaggacaggtctatgtgacccaggcaggcagcaatattgggtcagccttcatgtccccttctgtcagctggggcagcctggaaggatgattgtggggtaggtgttatgggcacggaatagacctcaggtggaggctgcaggggctctccggcaccgtagacacagcaggcccaggagcaggggagggagccatgactcagggagactctggcccatatccttggcagatgagggccacaggggaatgggcagcact

SEQ ID NO: 54272 - DNA, 342 bp, Homo sapiens
cattcctattgaaagcctgtgagcatggctttcatggagttgggaaagcacagggtactgtgcccaggaaacgtggagtttgatactggagagttagagtttaacaaaatggattgtgtcatagagggccatggataccaggaagaggaatttgacctttatcctgtaagcactgggtaacattgaaggtatttgaataggagggtgcggggagtagggttatgcttctagacctgacagcattgtgaaggattggatgcagggaacccaatagttcagggcatgcaaccccagatgatacggggcctgcttgatcaaagccatgataggagggagcagaag

SEQ ID NO: 54273 - DNA, 344 bp, Homo sapiens
cctcacatttctgtttttgcttttatattgtccaagctgaataacatatatatttggttacataatcataattaacatcctctgttcagttttaacagtgttactctaaagttgaaaatcacataagtgcttccattatcgtgaacacagtgggatgtgcaaagaaaatgaaacggcttgttctttgtgactggtgtgatattaatgatgagccccgaccctcctatgtgcctgggagaacattgccttgatcaccaatcctatgtcgtcatgtcctgggcccccaagaccacctcccccctccagattcagtgattcaccaggagagcctgcaggacttgctg

SEQ ID NO: 54274 - DNA, 3590 bp, Homo sapiens
gggaagttacggcgaagtccacccagcgtttctcaggcaatctgaaggcaaatcctgtttagacccaggcgaaggttcctggtgacccaggctctcaccagccaattgtcccttgccgtcctcctgagggtatctggagcttcagtgctgtgtgctcttggcctccacactggggatgccactgactcccactgtccagggcttccagtggactctccgaggccctgatgtagaaacttccccattcggtgcaccaagagcagcctcacatggtgtgggccgacatcaagagctgcgagatccaacagtccctggccccacctcttctgccacaaacgtcagcatggtggtatctgccggcccttggtccggtgagaaggcagagatgaacattctagaaatcaacaagaaatcgcgcccccagctggcagagaacaaacagcagttcagaaacctcaaacagaaatgtcttgtaactcaagtggcctacttcctggccaaccggcaaaataattacgactatgaagactgcaaagacctcataaaatctatgctgagggatgagcggctgctcacagaagagaagcttgcagaggagctcgggcaagctgaggagctcaggcaatataaagtcctggttcactctcaggaacgagagctgacccagttaagggagaagttacaggaagggagagatgcctcccgctcattgaatcagcatctccaggccctcctcactccggatgagccggacaactcccagggacgggacctccgagaacagctggctgagggatgtaggctggcacagcacctcgtccaaaagctcagcccagaaaatgatgacgatgaggatgaagatgttaaagttgaggaggctgagaaagtacaggaattatatgcccccagggaggtgcagaaggctgaagaaaaggaagtccctgaggactcactggaggagtgtgccatcacttgttcaaatagccaccacccttgtgagtccaaccagccttacgggaacaccagaatcacatttgaggaagaccaagtcgactcaactctcattgactcatcctctcatgatgaatggttggatgctgtatgcattatcccagaaaatgaaagtgatcatgagcaagaggaagaaaaagggccagtgtctcccaggaatctgcaggagtctgaagaggaggaagccccccaggagtcctgggatgaaggtgattggactctctcaattcctcctgacatgtctgcctcataccagtctgacaggagcacctttcactcagtagaggaacagcaagtcggcttggctcttgacataggcagacattggtgtgatcaagtgaaaaaggaggaccaagaggccacaagtcccaggctcagcagggagctgctggatgagaaagagcctgaagtcttgcaggactcactggatagattttattcaactccttttgagtacctggaactgcctgacttatgccagccctacagaagtgacttttactcattgcaggaacaacaccttggcttggctcttgacttggacagaatgaaaaaggaccaagaagaggaagaagaccaaggcccaccatgccccaggctcagcagagagctgccggaggtagtagagcctgaggacttgcaggactcactggatagatggtattcgactcctttcagttatccagaactgcctgattcatgccagccctacggaagttgcttttactcattggaggaagaacacgttggcttttctcttgacgtggatgaaattgaaaagtaccaagaaggggaagaagatcaaaagccaccatgccccaggctcaacgaggtgctgatggaagcagaagagcctgaagtcttgcaggactcactggatagatgttattcgactacttcaacttactttcaactacatgcctcattccagcagtatagaagtgccttttactcatttgaggaacaggacgtcagcttggcccttgacgtggacaataggttttttactttgacagtgataaggcaccacctggccttccagatgggagtcatattcccacactaagcagcccttactaagctgagagatgtcattgctgcaggcaggacctataggcacatgtaggtttgaatgaaactgtagttccctttggaagcccagtcataggatgggaaagtgggcatggctctattcctattctcagaccatgccagtggccacctgtgctcagtctgaagacgttggacccaagttaggtgtgacacgttcacacgactatgtagcacatgccgggagtgatctgccagacattctaatttgaaccagatatctctgggtagctacaaagttcctcaggggtttcattttgcaggcatgtctctgagcttctatacctgctcaaggtcagtgtcatctttgtgtttagctcatccaaaggtgttaccctggtttcattgaacctaaccccattctttgtatcttcagtgttggtttgttttagctgatccatctgtaacacaggagggatccttggctgaggattgtatttcagaaccactgactgctcttgacagttgttaacccactaggctcctttgagtagagaagccatagtccttcagcctccaattgatatcaatacttaggaagaccacagctagacggacaaacagcattgggaggccttagtcctgctcctttcaattccatcctgtaaagaacaggagtcaggagccgctggcaagagacagcatgtcacctgggactctgccagtgcagaatatgaacaatgccatgttcttgcagaaaatgcttagcctgagtttcataggaggtaatcaccagacaactgcagaatgtagaacactgagcaggacaactgacctgtctccttcacacagtccacgtcaccacgaatcacacaacaaaaaggaggagagatattttgggttcagaagaagtaaatgataatgtagctacatttctttagttattttgaaccccaaatatttcctcatctttttgttgttgtcattgattttggtgacatggacttgtttgtagaggacaggtcagctgtctggctcaatggtctacattctgaagttgtctgaaaatgtcttcatgattaaattcagcctaaacgtttcatcaagaacactacagagtcgatactgtgagtttccaacctcagcccatctgtgggcagagaaggtctagtttgtccatcagcattatcatgatatcaggactggttacttggttaaggaggggtctaggagatctgtcccttttagagacaccttacttatgatgaagtatttgggagagtggtttttcaaagtagaaatgtcctgtattccagtgatcatcctctaaacgttttatcatttattaatcatccctgcctgtgtctattattatattcatatctctacgctggaaatttgctgcctcaatgtttactgtgcctttgtttttgctagtgtgtgttgttgaaaaaaaaacattctctgcctgagttttaatttttgtccaaagttattttaatctatacaattaaaaacttttgcctatc

SEQ ID NO: 54275 - DNA, 1009 bp, Homo sapiens
gggaatcttatactcggtgctttgctcaagatcagtgccttgactttgtacattgctaatgcacacacaaaacctttgggtatcatgaaatttttgatgacattattgaatatttgaatattgctgggtgttttttgttttgtttttggtgactcagcgtataaacctgctttctttgggggacaaaagaaaggtatggaacttaaaacgcagcatgtattttctgctactgaatccaaagatcgtagatgctactgagggagcatgtgactaatgactaaggcttggccagccattagctcttgcctgattaaactccacagactttggaatctagcaatattgtcagcatcgtgtgtccattattagaattgttggtggtgactttctgggcaaattatttcttttgaccagtctcccttggttcttaccttttatgcaatcctggttctccactactgattctgtaaactaatccaatatttttaatgaaatccgcttccttagttagctaaattcagtttcgattctttctaagaatcctgattgctacagttaggaaatcagctatcatatgagttttaaaataaggggaggtatgctatgaattattggtaagtagggtcctgctttgaaagtgatgagagagactctgtactttaataggttaaaacttatttgtaattatgttgctgtggaatataagcagtttttttcatctcacccaatacagctactaggctttatagatgtatgacagagttaccatgtgcaatagagtttggggtgataccaacaccattgaattaatcagtgttttgatagaagggtgatcatctgaattccaaatttgaggaatacaatagttttcagttaaatatgaatctttagattggcatctagagccattaaatttcctttgtaaactaaagcatgatgagtaaaaaattaccaattaccttatgtatactaaatactgtactagtctctgtattatgccaggaataaa

SEQ ID NO: 54276 - DNA, 389 bp, Homo sapiens
attattatttcactgaggtttacacctcttttaaaattaattttcatatttccctcaggatttgatttactatgaaacaacacgaagccaggtgggttgaagtttattaggaaaaaatggaagcttggggaatctgaggaatattttcaaagtacagaaaacagcagtactgtgaaagtctttatagagcagaaatgatttaggacggggcctccaaaaaggggaactttgcatagcatagaagttgtgactttttctttacctggtggtctcattacaattcttaaaggctgataacctttacttaaatacattttttgcaatgacacatttatgcatatatgcagcaggtgagcagagggcatagtcagggctttcattactaaaat

SEQ ID NO: 54277 - DNA, 474 bp, Homo sapiens
aaatatttcatgatgcactatttatataattaatacattctagaaaatagttctgttcttaactcccagctaaatgagaaaacaataaacttaccaagggccctttgagaaagttatagaaagcatattacacatattgtatacactggctctaacagattacttttagctacataaattataattttaactttaatgatttgcatctttagctaaggcagcagatatgtgaggaaaaaactgtttacacatgttgatgagagggataaaaatacttgatctatcacaaggtcaggagatcgagaccatcctggctaacacgatgaaaccccatctctactaaacatacaaaaaaattagctgggcgtggtggcaggcacctgtagtagcagctactcgggaggctgaggcagaagaatggcacgaacccgggaggccgagtttgcagtgagccgagatcgcaccattgcactc

SEQ ID NO: 54278 - DNA, 307 bp, Homo sapiens
gcatgtggatgggagatatggttgccaccatctttggaaaacagaattttctacaacatcctctatgcaatcacttatacatactgtatcttgcaataaagcctttgataagaattgacagaccttgatccttaaagggtatctttttggtgtcaaacactagatgaatagtctaaataggtatacagcacacttgagagccactgtgactgtaaactaaatggctcaacagaatctgggtcctcaaatatattagcatgctcaggctgccatcacaaaataccacaggctaggtggcttaaacaac

SEQ ID NO: 54279 - DNA, 232 bp, Homo sapiens
acaaaactacagaccaggacccctcttgaacatagatgcacaaattctaaaaaatttagcaaattatatttaacaatatatataaattcatcatgaccaggtgatgtttactccaggaatataagtttcatttaacattcaaaaattaatgtattattaccatattagcaggccaaaaaagctaaaactgtatgatctcaatagatggagaaaagatatttgccgaagtcca

SEQ ID NO: 54280 - DNA, 1145 bp, Homo sapiens
  misc_feature (33)..(33): n is a, c, g, or t
  misc_feature (1114)..(1116): n is a, c, g, or t
  misc_feature (1121)..(1123): n is a, c, g, or t
  misc_feature (1130)..(1131): n is a, c, g, or t
  misc_feature (1133)..(1133): n is a, c, g, or t
  misc_feature (1138)..(1140): n is a, c, g, or t
  misc_feature (1142)..(1142): n is a, c, g, or t
  misc_feature (1144)..(1144): n is a, c, g, or t
cggcagtgaggctgagtattttcggtcacaggncaggcccgtgaaatttcattgtcctgctctgggcccaaaggtggtggtggtttgggtcatcagaggactgcctgggacggttcagcgggcacggtgcgctgtgctggcctggctggggatggccgcggaggtgcccttttcctggtgctttgtggtggctgcagaagaccagttttgttgagaactgcttttcagcctggaatcagacatcttccagatggtttggaccctgtccatgtgtaggtcattatcacacaaagagaccaataaaaaaaaaaaattaaaaaaaaaaacagaaatagagctctaagttatgtgaaatttgatttgagaaactcggcatttcctttttaaaaaagcctgtttctaactatgaatatgagaacttctaggaaacatccaggaggtatcatataactttgtagaacttaaatacttgaatattcaaatttaaaagacactgtatcccctaaaatatttctgatggtgcactactctgaggcctgtatggcccctttcatcaatatctattcaaatatacaggtgcatatatacttgttaaagctcttatataaaaaagccccaaaatattgaagttcatctgaaatgcaaggtgctttcatcaatgaaccttttcaaacttttctatgattgcagagaagctttttatatacccagcataacttggaaacaggtatctgacctattcttatttagttaacacaagtgtgattaatttgatttctttaattccttattgaatcttatgtgatatgattttctggatttacagaacattagcacatgtaccttgtgcctcccattcaagtgaagttataatttacactgagggtttcaaaattcgactagaagtggagatatattatttatttatgcactgtactgtatttttatattgctgtttaaaacttttaagctgtgcctcacttattaaagcacaaaatgttttacctactccttatttacgacgcaataaaataacatcaatagatttttaggctgaattaatttgaaagcagcaatttgctgttctcaaccattctttcaaggcttttcattnnncaaannnaataaannantagannntnang

SEQ ID NO: 54281 - DNA, 3602 bp, Homo sapiens
  misc_feature (3571)..(3573): n is a, c, g, or t
  misc_feature (3578)..(3580): n is a, c, g, or t
  misc_feature (3587)..(3588): n is a, c, g, or t
  misc_feature (3590)..(3590): n is a, c, g, or t
  misc_feature (3595)..(3597): n is a, c, g, or t
  misc_feature (3599)..(3599): n is a, c, g, or t
  misc_feature (3601)..(3601): n is a, c, g, or t
atcagtctgtggatgatagtcccaataaaaccatattgtaaaaatttgccctaatccgaatttcagtgtattttgaaactattagatatttcaggctatgtcaaagatcctagattatttaatacagacatccaatcctaatttctgtttcttttcctttaggtaaatcattttattttcacttgattacctgagtatagcttccaaaaataactaagacatatattcacataactaaaaaatgatctctcatttatttatggcacatattaaaaatatataggataggttaaaaaagtagataactgtataaagaactcatctgtgaaacatgagaataaaaaaataggttaataacaatgctgtataaagttattcttttctgtttttcagaatccatctgagaatatgctgccacaaataccctttttgctgctagtatccttgaacttggttcatggagtgttttacgctgaacgataccaaacgcccacaggcataaaaggcccactacccaacaccaagacacagttcttcattccctacaccataaagagtaaaggtatagcagtaagaggagagcaaggtactcctggtccaccaggccctgctggacctcgagggcacccaggtccttctggaccaccaggaaaaccaggctacggaagtcctggactccaaggagagccagggttgccaggaccaccgggaccatcagctgtagggaaaccaggtgtgccaggactcccaggaaaaccaggagagagaggaccatatggaccaaaaggagatgttggaccagctggcctaccaggaccccggggcccaccaggaccacctggaatccctggaccggctggaatttctgtgccaggaaaacctggacaacagggacccacaggagccccaggacccaggggctttcctggagaaaagggtgcaccaggagtccctggtatgaatggacagaaaggggaaatgggatatggtgctcctggtcgtccaggtgagaggggtcttccaggccctcagggtcccacaggaccatctggccctcctggagtgggaaaaagaggtgaaaatggggttccaggacagccaggcatcaaaggtgatagaggttttccgggagaaatgggaccaattggcccaccaggtccccaaggccctcctggggaacgagggccagaaggcattggaaagccaggagctgctggagccccaggccagccagggattccaggaacaaaaggtctccctggggctccaggaatagctgggcccccagggcctcctggctttgggaaaccaggcttgccaggcctgaagggagaaagaggacctgctggccttcctgggggtccaggtgccaaaggggaacaagggccagcaggtcttcctgggaagccaggtctgactggaccccctgggaatatgggaccccaaggaccaaaaggcatcccgggtagccatggtctcccaggccctaaaggtgagacagggccagctgggcctgcaggataccctggggctaagggtgaaaggggttcccctgggtcagatggaaaaccagggtacccaggaaaaccaggtctcgatggtcctaagggtaacccagggttaccaggtccaaaaggtgatcctggagttggaggacctcctggtctcccaggccctgtgggcccagcaggagcaaagggaatgcccggacacaatggagaggctggcccaagaggtgcccctggaataccaggtactagaggccctattgggccaccaggcattccaggattccctgggtctaaaggggatccaggaagtcccggtcctcctggcccagctggcatagcaactaagggcctcaatggacccaccgggccaccagggcctccaggtccaagaggccactctggagagcctggtcttccagggccccctgggcctccaggcccaccaggtcaagcagtcatgcctgagggttttataaaggcaggccaaaggcccagtctttctgggacccctcttgttagtgccaaccagggggtaacaggaatgcctgtgtctgcttttactgttattctctccaaagcttacccagcaataggaactcccataccatttgataaaattttgtataacaggcaacagcattatgacccaaggactggaatctttacttgtcagataccaggaatatactatttttcataccacgtgcatgtgaaagggactcatgtttgggtaggcctgtataagaatggcacccctgtaatgtacacctatgatgaatacaccaaaggctacctggatcaggcttcagggagtgccatcatcgatctcacagaaaatgaccaggtgtggctccagcttcccaatgccgagtcaaatggcctatactcctctgagtatgtccactcctctttctcaggattcctagtggctccaatgtgagtacaccccacagagctaatctaaatcttgtgctagaaaaagcattctctaactctaccccaccctacaaaatgcatatggaggtaggctgaaaagaatgtaatttttattttctgaaatacagatttgagctatcagaccaacaaaccttccccctgaaaagtgagcagcaacgtaaaaacgtatgtgaagcctctcttgaatttctagttagcaatcttaaggctctttaaggttttctccaatattaaaaaatatcaccaaagaagtcctgctatgttaaaaacaaacaacaaaaaacaaacaacaaaaaaaaaaattaaaaaaaaaaacagaaatagagctctaagttatgtgaaatttgatttgagaaactcggcatttcctttttaaaaaagcctgtttctaactatgaatatgagaacttctaggaaacatccaggaggtatcatataactttgtagaacttaaatacttgaatattcaaatttaaaagacactgtatcccctaaaatatttctgatggtgcactactctgaggcctgtatggcccctttcatcaatatctattcaaatatacaggtgcatatatacttgttaaagctcttatataaaaaagccccaaaatattgaagttcatctgaaatgcaaggtgctttcatcaatgaaccttttcaaacttttctatgattgcagagaagctttttatatacccagcataacttggaaacaggtatctgacctattcttatttagttaacacaagtgtgattaatttgatttctttaattccttattgaatcttatgtgatatgattttctggatttacagaacattagcacatgtaccttgtgcctcccattcaagtgaagttataatttacactgagggtttcaaaattcgactagaagtggagatatattatttatttatgcactgtactgtatttttatattgctgtttaaaacttttaagctgtgcctcacttattaaagcacaaaatgttttacctactccttatttacgacgcaataaaataacatcaatagatttttaggctgaattaatttgaaagcagcaatttgctgttctcaaccattctttcaaggcttttcattnnncaaannnaataaannantagannntnang

SEQ ID NO: 54282 - DNA, 2085 bp, Homo sapiens
  misc_feature (2054)..(2056): n is a, c, g, or t
  misc_feature (2061)..(2063): n is a, c, g, or t
  misc_feature (2070)..(2071): n is a, c, g, or t
  misc_feature (2073)..(2073): n is a, c, g, or t
  misc_feature (2078)..(2080): n is a, c, g, or t
  misc_feature (2082)..(2082): n is a, c, g, or t
  misc_feature (2084)..(2084): n is a, c, g, or t
gctcatctgggcagaggaagcttcagaaagctgccaaggcaccatctccaggaactcccagcacgcagaatccatctgagaatatgctgccacaaataccctttttgctgctagtatccttgaacttggttcatggagtgttttacgctgaacgataccaaacgcccacaggcataaaaggcccactacccaacaccaagacacagttcttcattccctacaccataaagagtaaaggtatagcagtaagaggagagcaaggtactcctggtccaccaggccctgctggacctcgagggcacccaggtccttctggaccaccaggaaaaccaggctacggaagtcctggactccaaggagagccagggttgccaggaccaccgggaccatcagctgtagggaaaccaggtgtgccaggactcccaggaaaaccaggagagagaggaccatatggaccaaaaggagatgttggaccagctggcctaccaggaccccggggcccaccaggaccacctggaatccctggaccggctggaatttctgtgccaggaaaacctggacaacagggacccacaggagccccaggacccaggggctttcctggagaaaagggtgcaccaggagtccctggtatgaatggacagaaaggggaaatgggatatggtgctcctggtcgtccaggtgagaggggtcttccaggccctcagggtcccacaggaccatctggccctcctggagtgggaaaaagaggtgaaaatggggttccaggacagccaggcatcaaaggtgatagaggttttccgggagaaatgggaccaattggcccaccaggtccccaaggccctcctggggaacgagggccgagtcaaatggcctatactcctctgagtatgtccactcctctttctcaggattcctagtggctccaatgtgagtacaccccacagagctaatctaaatcttgtgctagaaaaagcattctctaactctaccccaccctacaaaatgcatatggaggtaggctgaaaagaatgtaatttttattttctgaaatacagatttgagctatcagaccaacaaaccttccccctgaaaagtgagcagcaacgtaaaaacgtatgtgaagcctctcttgaatttctagttagcaatcttaaggctctttaaggttttctccaatattaaaaaatatcaccaaagaagtcctgctatgttaaaaacaaacaacaaaaaacaaacaacaaaaaaaaaaattaaaaaaaaaaacagaaatagagctctaagttatgtgaaatttgatttgagaaactcggcatttcctttttaaaaaagcctgtttctaactatgaatatgagaacttctaggaaacatccaggaggtatcatataactttgtagaacttaaatacttgaatattcaaatttaaaagacactgtatcccctaaaatatttctgatggtgcactactctgaggcctgtatggcccctttcatcaatatctattcaaatatacaggtgcatatatacttgttaaagctcttatataaaaaagccccaaaatattgaagttcatctgaaatgcaaggtgctttcatcaatgaaccttttcaaacttttctatgattgcagagaagctttttatatacccagcataacttggaaacaggtatctgacctattcttatttagttaacacaagtgtgattaatttgatttctttaattccttattgaatcttatgtgatatgattttctggatttacagaacattagcacatgtaccttgtgcctcccattcaagtgaagttataatttacactgagggtttcaaaattcgactagaagtggagatatattatttatttatgcactgtactgtatttttatattgctgtttaaaacttttaagctgtgcctcacttattaaagcacaaaatgttttacctactccttatttacgacgcaataaaataacatcaatagatttttaggctgaattaatttgaaagcagcaatttgctgttctcaaccattctttcaaggcttttcattnnncaaannnaataaannantagannntnang

SEQ ID NO: 54283 - DNA, 3277 bp, Homo sapiens
  misc_feature (3246)..(3248): n is a, c, g, or t
  misc_feature (3253)..(3255): n is a, c, g, or t
  misc_feature (3262)..(3263): n is a, c, g, or t
  misc_feature (3265)..(3265): n is a, c, g, or t
  misc_feature (3270)..(3272): n is a, c, g, or t
  misc_feature (3274)..(3274): n is a, c, g, or t
  misc_feature (3276)..(3276): n is a, c, g, or t
gctcatctgggcagaggaagcttcagaaagctgccaaggcaccatctccaggaactcccagcacgcagaatccatctgagaatatgctgccacaaataccctttttgctgctagtatccttgaacttggttcatggagtgttttacgctgaacgataccaaacgcccacaggcataaaaggcccactacccaacaccaagacacagttcttcattccctacaccataaagagtaaaggtatagcagtaagaggagagcaaggtactcctggtccaccaggccctgctggacctcgagggcacccaggtccttctggaccaccaggaaaaccaggctacggaagtcctggactccaaggagagccagggttgccaggaccaccgggaccatcagctgtagggaaaccaggtgtgccaggactcccaggaaaaccaggagagagaggaccatatggaccaaaaggagatgttggaccagctggcctaccaggaccccggggcccaccaggaccacctggaatccctggaccggctggaatttctgtgccaggaaaacctggacaacagggacccacaggagccccaggacccaggggctttcctggagaaaagggtgcaccaggagtccctggtatgaatggacagaaaggggaaatgggatatggtgctcctggtcgtccaggtgagaggggtcttccaggccctcagggtcccacaggaccatctggccctcctggagtgggaaaaagaggtgaaaatggggttccaggacagccaggcatcaaaggtgatagaggttttccgggagaaatgggaccaattggcccaccaggtccccaaggccctcctggggaacgagggccagaaggcattggaaagccaggagctgctggagccccaggccagccagggattccaggaacaaaaggtctccctggggctccaggaatagctgggcccccagggcctcctggctttgggaaaccaggcttgccaggcctgaagggagaaagaggacctgctggccttcctgggggtccaggtgccaaaggggaacaagggccagcaggtcttcctgggaagccaggtctgactggaccccctgggaatatgggaccccaaggaccaaaaggcatcccgggtagccatggtctcccaggccctaaaggtgagacagggccagctgggcctgcaggataccctggggctaagggtgaaaggggttcccctgggtcagatggaaaaccagggtacccaggaaaaccaggtctcgatggtcctaagggtaacccagggttaccaggtccaaaaggtgatcctggagttggaggacctcctggtctcccaggccctgtgggcccagcaggagcaaagggaatgcccggacacaatggagaggctggcccaagaggtgcccctggaataccaggtactagaggccctattgggccaccaggcattccaggattccctgggtctaaaggggatccaggaagtcccggtcctcctggcccagctggcatagcaactaagggcctcaatggacccaccgggccaccagggcctccaggtccaagaggccactctggagagcctggtcttccagggccccctgggcctccaggcccaccaggtcaagcagtcatgcctgagggttttataaaggcaggccaaaggcccagtctttctgggacccctcttgttagtgccaaccagggggtaacaggaatgcctgtgtctgcttttactgttattctctccaaagcttacccagcaataggaactcccataccatttgataaaattttgtataacaggcaacagcattatgacccaaggactggaatctttacttgtcagataccaggaatatactatttttcataccacgtgcatgtgaaagggactcatgtttgggtaggcctgtataagaatggcacccctgtaatgtacacctatgatgaatacaccaaaggctacctggatcaggcttcagggagtgccatcatcgatctcacagaaaatgaccaggtgtggctccagcttcccaatgccgagtcaaatggcctatactcctctgagtatgtccactcctctttctcaggattcctagtggctccaatgtgagtacaccccacagagctaatctaaatcttgtgctagaaaaagcattctctaactctaccccaccctacaaaatgcatatggaggtaggctgaaaagaatgtaatttttattttctgaaatacagatttgagctatcagaccaacaaaccttccccctgaaaagtgagcagcaacgtaaaaacgtatgtgaagcctctcttgaatttctagttagcaatcttaaggctctttaaggttttctccaatattaaaaaatatcaccaaagaagtcctgctatgttaaaaacaaacaacaaaaaacaaacaacaaaaaaaaaaattaaaaaaaaaaacagaaatagagctctaagttatgtgaaatttgatttgagaaactcggcatttcctttttaaaaaagcctgtttctaactatgaatatgagaacttctaggaaacatccaggaggtatcatataactttgtagaacttaaatacttgaatattcaaatttaaaagacactgtatcccctaaaatatttctgatggtgcactactctgaggcctgtatggcccctttcatcaatatctattcaaatatacaggtgcatatatacttgttaaagctcttatataaaaaagccccaaaatattgaagttcatctgaaatgcaaggtgctttcatcaatgaaccttttcaaacttttctatgattgcagagaagctttttatatacccagcataacttggaaacaggtatctgacctattcttatttagttaacacaagtgtgattaatttgatttctttaattccttattgaatcttatgtgatatgattttctggatttacagaacattagcacatgtaccttgtgcctcccattcaagtgaagttataatttacactgagggtttcaaaattcgactagaagtggagatatattatttatttatgcactgtactgtatttttatattgctgtttaaaacttttaagctgtgcctcacttattaaagcacaaaatgttttacctactccttatttacgacgcaataaaataacatcaatagatttttaggctgaattaatttgaaagcagcaatttgctgttctcaaccattctttcaaggcttttcattnnncaaannnaataaannantagannntnang

SEQ ID NO: 54284 - DNA, 3348 bp, Homo sapiens
  misc_feature (3317)..(3319): n is a, c, g, or t
  misc_feature (3324)..(3326): n is a, c, g, or t
  misc_feature (3333)..(3334): n is a, c, g, or t
  misc_feature (3336)..(3336): n is a, c, g, or t
  misc_feature (3341)..(3343): n is a, c, g, or t
  misc_feature (3345)..(3345): n is a, c, g, or t
  misc_feature (3347)..(3347): n is a, c, g, or t
ggactgtttttacccctcctgggatcaccactgacagcatccatgaagttctgacagaagaacacaccaggatgacaaagtagtgacttttaaagagcagccaacaacaagcatatagggaatctctcagcaaatacagaatccatctgagaatatgctgccacaaataccctttttgctgctagtatccttgaacttggttcatggagtgttttacgctgaacgataccaaacgcccacaggcataaaaggcccactacccaacaccaagacacagttcttcattccctacaccataaagagtaaaggtatagcagtaagaggagagcaaggtactcctggtccaccaggccctgctggacctcgagggcacccaggtccttctggaccaccaggaaaaccaggctacggaagtcctggactccaaggagagccagggttgccaggaccaccgggaccatcagctgtagggaaaccaggtgtgccaggactcccaggaaaaccaggagagagaggaccatatggaccaaaaggagatgttggaccagctggcctaccaggaccccggggcccaccaggaccacctggaatccctggaccggctggaatttctgtgccaggaaaacctggacaacagggacccacaggagccccaggacccaggggctttcctggagaaaagggtgcaccaggagtccctggtatgaatggacagaaaggggaaatgggatatggtgctcctggtcgtccaggtgagaggggtcttccaggccctcagggtcccacaggaccatctggccctcctggagtgggaaaaagaggtgaaaatggggttccaggacagccaggcatcaaaggtgatagaggttttccgggagaaatgggaccaattggcccaccaggtccccaaggccctcctggggaacgagggccagaaggcattggaaagccaggagctgctggagccccaggccagccagggattccaggaacaaaaggtctccctggggctccaggaatagctgggcccccagggcctcctggctttgggaaaccaggcttgccaggcctgaagggagaaagaggacctgctggccttcctgggggtccaggtgccaaaggggaacaagggccagcaggtcttcctgggaagccaggtctgactggaccccctgggaatatgggaccccaaggaccaaaaggcatcccgggtagccatggtctcccaggccctaaaggtgagacagggccagctgggcctgcaggataccctggggctaagggtgaaaggggttcccctgggtcagatggaaaaccagggtacccaggaaaaccaggtctcgatggtcctaagggtaacccagggttaccaggtccaaaaggtgatcctggagttggaggacctcctggtctcccaggccctgtgggcccagcaggagcaaagggaatgcccggacacaatggagaggctggcccaagaggtgcccctggaataccaggtactagaggccctattgggccaccaggcattccaggattccctgggtctaaaggggatccaggaagtcccggtcctcctggcccagctggcatagcaactaagggcctcaatggacccaccgggccaccagggcctccaggtccaagaggccactctggagagcctggtcttccagggccccctgggcctccaggcccaccaggtcaagcagtcatgcctgagggttttataaaggcaggccaaaggcccagtctttctgggacccctcttgttagtgccaaccagggggtaacaggaatgcctgtgtctgcttttactgttattctctccaaagcttacccagcaataggaactcccataccatttgataaaattttgtataacaggcaacagcattatgacccaaggactggaatctttacttgtcagataccaggaatatactatttttcataccacgtgcatgtgaaagggactcatgtttgggtaggcctgtataagaatggcacccctgtaatgtacacctatgatgaatacaccaaaggctacctggatcaggcttcagggagtgccatcatcgatctcacagaaaatgaccaggtgtggctccagcttcccaatgccgagtcaaatggcctatactcctctgagtatgtccactcctctttctcaggattcctagtggctccaatgtgagtacaccccacagagctaatctaaatcttgtgctagaaaaagcattctctaactctaccccaccctacaaaatgcatatggaggtaggctgaaaagaatgtaatttttattttctgaaatacagatttgagctatcagaccaacaaaccttccccctgaaaagtgagcagcaacgtaaaaacgtatgtgaagcctctcttgaatttctagttagcaatcttaaggctctttaaggttttctccaatattaaaaaatatcaccaaagaagtcctgctatgttaaaaacaaacaacaaaaaacaaacaacaaaaaaaaaaattaaaaaaaaaaacagaaatagagctctaagttatgtgaaatttgatttgagaaactcggcatttcctttttaaaaaagcctgtttctaactatgaatatgagaacttctaggaaacatccaggaggtatcatataactttgtagaacttaaatacttgaatattcaaatttaaaagacactgtatcccctaaaatatttctgatggtgcactactctgaggcctgtatggcccctttcatcaatatctattcaaatatacaggtgcatatatacttgttaaagctcttatataaaaaagccccaaaatattgaagttcatctgaaatgcaaggtgctttcatcaatgaaccttttcaaacttttctatgattgcagagaagctttttatatacccagcataacttggaaacaggtatctgacctattcttatttagttaacacaagtgtgattaatttgatttctttaattccttattgaatcttatgtgatatgattttctggatttacagaacattagcacatgtaccttgtgcctcccattcaagtgaagttataatttacactgagggtttcaaaattcgactagaagtggagatatattatttatttatgcactgtactgtatttttatattgctgtttaaaacttttaagctgtgcctcacttattaaagcacaaaatgttttacctactccttatttacgacgcaataaaataacatcaatagatttttaggctgaattaatttgaaagcagcaatttgctgttctcaaccattctttcaaggcttttcattnnncaaannnaataaannantagannntnang

SEQ ID NO: 54285 - DNA, 961 bp, Homo sapiens
gagcgaggcccggtccctgcagcgggcgaaaggagcccgggcctggaggtttgcgtaccggtcgcctggtcccggcaccagcgccgcccagtgtggtttcccataaggaagctcttcttcctgcttggcttccacctttaacccttccacctgggagcgtcctctaacacattcagactacaagtccagacccaggagagcaaggcccagaaagaggtcaaaatggggtttatattttcaaaatctatgaatgaaagcatgaaaaatcaaaaggagttcatgcttatgaatgctcgacttcagctggaaaggcagctcatcatgcagagtgaaatgagggaaagacaaatggccatgcagattgcgtggtctcgggaattcctcaaatattttggaactttttttggccttgcagccatctctttaacagctggagcgattaaaaaaaagaagccagccttcctggtcccgattgttccattaagctttatcctcacctaccagtatgacttgggctatggaacccttttagaaagaatgaaaggtgaagctgaggacatactggaaacagaaaagagtaaattgcagctgccaagaggaatgatcacttttgaaagcattgaaaaagccagaaaggaacagagtagattcttcatagacaaatgaaatcatgcttaccaatcaaatctcaaagcacagaattattgacttgaatcatggtttttacagttttttaaatgctcaagattttgatattatagattttattttaaaatattaaaatgcaagatagttttgagctattttaaaataaaatttataacattcaacacaaaatcatggaggtgctctaaataacttttagatttcctctctctgtgtgcattaccaatatctaagtgtaaaattaataaattgttttgaattcctggaaaaaaaaatgcccagctgctctcatttc

SEQ ID NO: 54286 - DNA, 935 bp, Homo sapiens
gagcgaggcccggtccctgcagcgggcgaaaggagcccgggcctggaggtttgcgtaccggtcgcctggtcccggcaccagcgccgcccagtgtggtttcccataaggaagctcttcttcctgcttggcttccacctttaacccttccacctgggagcgtcctctaacacattcagactacaagtccagacccaggagagcaaggcccagaaagaggtcaaaatggggtttatattttcaaaatctatgaatgaaagcatgaaaaatcaaaaggagttcatgcttatgaatgctcgacttcagctggaaaggcagctcatcatgcagagtgaaatgagggaaagacaaatggccatgcagattgcgtggtctcgggaattcctcaaatattttggaactttttttggccttgcagccatctctttaacagctggagcgattaaaaaaaagaagccagccttcctggtcccgattgttccattaagctttatcctcacctaccagtatgacttgggctatggaacccttttagaaagaatgaaaggtgaagctgaggacatactggaaacagaaaagagtaaattgcagctgccaagaggaatgatcacttttgaaagcattgaaaaagccagaaaggaacagagtagattcttcatagacaaatgaaatcatgcttaccaatcaaatctcaaagcacagaattattgacttgaatcatggtttttacagttttttaaatgctcaagattttgatattatagattttattttaaaatattaaaatgcaagatagttttgagctattttaaaataaaatttataacattcaacacaaaatcatggaggtgctctaaataacttttagatttcctctctctgtgtgcattaccaatatctaagtgtaaaattaataaattgttttgaattcctggaaa

SEQ ID NO: 54287 - DNA, 982 bp, Homo sapiens
gagcgaggcccggtccctgcagcgggcgaaaggagcccgggcctggaggtttgcgtaccggtcgcctggtcccggcaccagcgccgcccagtgtggtttcccataaggaagctcttcttcctgcttggcttccacctttaacccttccacctgggagcgtcctctaacacattcagactacaagtccagacccaggagagcaaggcccagaaagaggtcaaaatggggtttatattttcaaaatctatgaatgaaagcatgaaaaatcaaaaggagttcatgcttatgaatgctcgacttcagctggaaaggcagctcatcatgcagagtgaaatgagggaaagacaaatggccatgcagattgcgtggtctcgggaattcctcaaatattttggaactttttttggccttgcagccatctctttaacagctggagcgattaaaaaaaagaagccagccttcctggtcccgattgttccattaagctttatcctcacctaccagtatgacttgggctatggaacccttttagaaagaatgaaaggtgaagctgaggacatactggaaacagaaaagagtaaattgcagctgccaagaggaatgatcacttttgaaagcattgaaaaagccagaaaggaacagagtagattcttcatagacaaatgaaatcatgcttaccaatcaaatctcaaagcacagaattattgacttgaatcatggtttttacagttttttaaatgctcaagattttgatattatagattttattttaaaatattaaaatgcaagatagttcgagtatttaaataactttaacttcacccacaatctgggggcctaataacttagattccctcgggcttcaattcacgtcactactcactgtcggttcggaaaaaaagggggcaaccgggcccgccccttaagccaagggtaaaaggggcagaagggtatcgtgcccaaattttcggtttctgtgcgt

SEQ ID NO: 54288 - DNA, 535 bp, Homo sapiens
tcggtaccctgtcgttctcgcctcaacctcaccagccatttctatcttgtataagccacgtctctctccccgcctgagagaatgcttgaattgttggcactctgttctttgctacccaatggcttggaaaaatagcatgaacgtcaccatctctctgagcagcaggggagaaagacggctctgttcaaaaaagaatgggtgtggtttcccataaggaagctcttcttcctgcttggcttccacctttaacccttccacctgggagcgtcctctaacacattcagactacaagtccagacccaggagagcaaggcccagaaagaggtcaaaatggggtttatattttcaaaatctatgaatgaaagcatgaaaaatcaaaaggagttcatgcttatgaatgctcgacttcaggtatgttttaaaataattaagctattatgttgttacaatgcttaaagtttctaccacatgtactccagccgtacattctctttgactcccaacaataaaatgttctttgggctgcatccttaaa

SEQ ID NO: 54289 - DNA, 909 bp, Homo sapiens
tgcctgcagccggcgggtacctgcggccaattcggtggaacgaggacgcggactgcgaaggcaggtgtggtttcccataaggaagctcttcttcctgcttggcttccacctttaacccttccacctgggagcgtcctctaacacattcagactacaagtccagacccaggagagcaaggcccagaaagaggtcaaaatggggtttatattttcaaaatctatgaatgaaagcatgaaaaatcaaaaggagttcatgcttatgaatgctcgacttcagctggaaaggcagctcatcatgcagagtgaaatgagggaaagacaaatggccatgcagattgcgtggtctcgggaattcctcaaatattttggaactttttttggccttgcagccatctctttaacagctggagcgattaaaaaaaagaagccagccttcctggtcccgattgttccattaagctttatcctcacctaccagtatgacttgggctatggaacccttttagaaagaatgaaaggtgaagctgaggacatactggaaacagaaaagagtaaattgcagctgccaagaggaatgatcacttttgaaagcattgaaaaagccagaaaggaacagagtagattcttcatagacaaatgaaatcatgcttaccaatcaaatctcaaagcacagaattattgacttgaatcatggtttttacagttttttaaatgctcaagattttgatattatagattttattttaaaatattaaaatgcaagatagttttgagctattttaaaataaaatttataacattcaacacaaaatcatggaggtgctctaaataacttttagatttcctctctctgtgtgcattaccaatatctaagtgtaaaattaataaattgttttgaattcctggaaa

SEQ ID NO: 54290 - DNA, 1104 bp, Homo sapiens
gagcgaggcccggtccctgcagcgggcgaaaggagcccgggcctggaggtttgcgtaccggtcgcctggtcccggcaccagcgccgcccagtgtggtttcccataaggaagctcttcttcctgcttggcttccacctttaacccttccacctgggagcgtcctctaacacattcagactacaagtccagacccaggagagcaaggcccagaaagaggtcaaaatggggtttatattttcaaaatctatgaatgaaagcatgaaaaatcaaaaggagttcatgcttatgaatgctcgacttcagggtgcacattttcaactgctaagtcttgtgactgggtaaacaagccaggggaggagtgccttgtgcttgagagctggctcaggcatggaggccctgtctcggagcagactcttcctctcatgatgtggtccctctgtgatttggtacaacttaaggatctgtgaggaagctggaaaggcagctcatcatgcagagtgaaatgagggaaagacaaatggccatgcagattgcgtggtctcgggaattcctcaaatattttggaactttttttggccttgcagccatctctttaacagctggagcgattaaaaaaaagaagccagccttcctggtcccgattgttccattaagctttatcctcacctaccagtatgacttgggctatggaacccttttagaaagaatgaaaggtgaagctgaggacatactggaaacagaaaagagtaaattgcagctgccaagaggaatgatcacttttgaaagcattgaaaaagccagaaaggaacagagtagattcttcatagacaaatgaaatcatgcttaccaatcaaatctcaaagcacagaattattgacttgaatcatggtttttacagttttttaaatgctcaagattttgatattatagattttattttaaaatattaaaatgcaagatagttttgagctattttaaaataaaatttataacattcaacacaaaatcatggaggtgctctaaataacttttagatttcctctctctgtgtgcattaccaatatctaagtgtaaaattaataaattgttttgaattcctggaaa

SEQ ID NO: 54291 - DNA, 710 bp, Homo sapiens
  misc_feature (24)..(24): n is a, c, g, or t
  misc_feature (71)..(71): n is a, c, g, or t
ccccccccccccatcaaccccccnctcccccccctcctcgtaaaagaaaaaaaaaaaaagagctacatggnaaacgcgctggaaaggcagctcatcatgcagagtgaaatgagggaaagacaaatggccatgcagattgcgtggtctcgggaattcctcaaatattttggaactttttttggccttgcagccatctctttaacagctggagcgattaaaaaaaagaagccagccttcctggtcccgattgttccattaagctttatcctcacctaccagtatgacttgggctatggaacccttttagaaagaatgaaaggtgaagctgaggacatactggaaacagaaaagagtaaattgcagctgccaagaggaatgatcacttttgaaagcattgaaaaagccagaaaggaacagagtagattcttcatagacaaatgaaatcatgcttaccaatcaaatctcaaagcacagaattattgacttgaatcatggtttttacagttttttaaatgctcaagattttgatattatagattttattttaaaatattaaaatgcaagatagttttgagctattttaaaataaaatttataacattcaacacaaaatcatggaggtgctctaaataacttttagatttcctctctctgtgtgcattaccaatatctaagtgtaaaattaataaattgttttgaattcctggaaa

SEQ ID NO: 54292 - DNA, 699 bp, Homo sapiens
ccggcagtataaatgatctccgcgcaactcataagacagcatactaatttatagcccgcacgctctgctggaaaggcagctcatcatgcagagtgaaatgagggaaagacaaatggccatgcagattgcgtggtctcgggaattcctcaaatattttggaactttttttggccttgcagccatctctttaacagctggagcgattaaaaaaaagaagccagccttcctggtcccgattgttccattaagctttatcctcacctaccagtatgacttgggctatggaacccttttagaaagaatgaaaggtgaagctgaggacatactggaaacagaaaagagtaaattgcagctgccaagaggaatgatcacttttgaaagcattgaaaaagccagaaaggaacagagtagattcttcatagacaaatgaaatcatgcttaccaatcaaatctcaaagcacagaattattgacttgaatcatggtttttacagttttttaaatgctcaagattttgatattatagattttattttaaaatattaaaatgcaagatagttttgagctattttaaaataaaatttataacattcaacacaaaatcatggaggtgctctaaataacttttagatttcctctctctgtgtgcattaccaatatctaagtgtaaaattaataaattgttttgaattcctggaaa

SEQ ID NO: 54293 - DNA, 995 bp, Homo sapiens
  misc_feature (947)..(948): n is a, c, g, or t
gagcgaggcccggtccctgcagcgggcgaaaggagcccgggcctggaggtttgcgtaccggtcgcctggtcccggcaccagcgccgcccagtgtggtttcccataaggaagctcttcttcctgcttggcttccacctttaacccttccacctgggagcgtcctctaacacattcagactacaagtccagacccaggagagcaaggcccagaaagaggtcaaaatggggtttatattttcaaaatctatgaatgaaagcatgaaaaatcaaaaggagttcatgcttatgaatgctcgacttcagctggaaaggcagctcatcatgcagagtgaaatgagggaaagacaaatggccatgcagattgcgtggtctcgggaattcctcaaatattttggaactttttttggccttgcagccatctctttaacagctggagcgattaaaaaaaagaagccagccttcctggtcccgattgttccattaagctttatcctcacctaccagtatgacttgggctatggaacccttttagaaagaatgaaaggtgaagctgaggacatactggaaacagaaaagagtaaattgcagctgccaagaggaatgatcacttttgaaagcattgaaaaagccagaaaggaacagagtagattcttcatagacaaatgaaatcatgcttaccaatcaaatctcaaagcacagaattattgacttgaatcatggtttttacagttttttaaatgctcaagattttgatattatagattttattttaaaatattaaaatgcaagatagttttgagctattttaaaataaaatttataacattcaacacaaaatcatggaggtgctctaaataacttttagatttcctctctctgtgtgcattaccaatatctaagtgtaaaattaataaattgttttgaattcctggaaacaaaaaacaacnncataagaccctagataaaatcaaataatgggcctcctctggcctaag

SEQ ID NO: 54294 - DNA, 867 bp, Homo sapiens
  misc_feature (842)..(842): n is a, c, g, or t
  misc_feature (852)..(852): n is a, c, g, or t
  misc_feature (855)..(855): n is a, c, g, or t
gagcgaggcccggtccctgcagcgggcgaaaggagcccgggcctggaggtttgcgtaccggtcgcctggtcccggcaccagcgccgcccagtgtggtttcccataaggaagctcttcttcctgcttggcttccacctttaacccttccacctgggagcgtcctctaacacattcagactacaagtccagacccaggagagcaaggcccagaaagaggtcaaaatggggtttatattttcaaaatctatgaatgaaagcatgaaaaatcaaaaggagttcatgcttatgaatgctcgacttcagctggaaaggcagctcatcatgcagagtgaaatgagggaaagacaaatggccatgcagattgcgtggtctcgggaattcctcaaatattttggaactttttttggccttgcagccatctctttaacagctggagcgattaaaaaaaagaagccagccttcctggtcccgattgttccattaagctttatcctcacctaccagtatgacttgggctatggaacccttttagaaagaatgaaaggtgaagctgaggacatactggaaacagaaaagagtaaattgcagctgccaagaggaatgatcacttttgaaagcattgaaaaagccagaaaggaacagagtagattcttcatagacaaatgaaatcatgcttaccaatcaaatctcaaagcacagaattattgacttgaatcatggtttttacagttttttaaatgctcaagattttgatattatagattttattttaaaatattaaaatgcaagatagttttgagctattttaaaataaaatttataacattcaacacaaaaaaaanaaaaaatggnctngttggcctcagt

SEQ ID NO: 54295 - DNA, 884 bp, Homo sapiens
gagcgaggcccggtccctgcagcgggcgaaaggagcccgggcctggaggtttgcgtaccggtcgcctggtcccggcaccagcgccgcccagtgtggtttcccataaggaagctcttcttcctgcttggcttccacctttaacccttccacctgggagcgtcctctaacacattcagactacaagtccagacccaggagagcaaggcccagaaagaggtcaaaatggggtttatattttcaaaatctatgaatgaaagcatgaaaaatcaaaaggagttcatgcttatgaatgctcgacttcagctggaaaggcagctcatcatgcagagtgaaatgagggaaagacaaatggccatgcagattgcgtggtctcgggaattcctcaaatattttggaactttttttggccttgcagccatctctttaacagctggagcgattaaaaaaaagaagccagccttcctggtcccgattgttccattaagctttatcctcacctaccagtatgacttgggctatggaacccttttagaaagaatgaaaggtgaagctgaggacatactggaaacagaaaagaccagaaaggaacagagtagattcttcatagacaaatgaaatcatgcttaccaatcaaatctcaaagcacagaattattgacttgaatcatggtttttacagttttttaaatgctcaagattttgatattatagattttattttaaaatattaaaatgcaagatagttttgagctattttaaaataaaatttataacattcaacacaaaatcatggaggtgctctaaataacttttagatttcctctctctgtgtgcattaccaatatctaagtgtaaaattaataaattgttttgaattcctggaaa

SEQ ID NO: 54296 - DNA, 597 bp, Homo sapiens
tgcctgcagccggcgggtacctgcggccaattcggtggaacgaggacgcggactgcgaaggcaggtgtggtttcccataaggaagctcttcttcctgcttggcttccacctttaacccttccacctgggagcgtcctctaacacattcagactacaagtccagacccaggagagcaaggcccagaaagaggtcaaaatggggtttatattttcaaaatctatgaatgaaagcatgaaaaatcaaaaggagttcatgcttatgaatgctcgacttcagatgagataactgaagcccaaagatgaaaagcagcttgcctgaggtcacacagctagtatgtaggggagctcagattcaaatcagggagcctgactacagaattggaatgcttatctcctcctgcttcacatattcatgagacatatgcaaaagccgagacatgctaatgtgagaatgtgagttagccttaagcaatttgctttatgaataactgtattataattgcacaataatgatacagtgaataggaagtgttagtagaagttttaagacacaattaaagataagttgtagaaataaagaatacattcctctgggac

SEQ ID NO: 54297 - DNA, 1577 bp, Homo sapiens
ggactacaggcgcccgccaccacgcccggctagttttgtttttgtatgtttagtagagacggggattcaccgtgttagccaagatggtctcgatctcctgacctcatgatccgcccgcctcggcctcccaaagtgctgggattacaggcgtgagccaccgcgcctcgctgtccgcctcttgaagagtaaacgaggccgggcgcggtggtttagtaataccagctgtaatcccagctacttgggaggctgaggcagaagaatcgcttgaacccgggaggcggaggttgagcaactacactgcgctgcatcggactcgacgcccgctggtgacgcacacgctgcgccggaagtgtgaactgtctgcctccaggctttgtcatggcggctgctgctgcacgctggaaccatgtgtgggtcggcaccgagactgggatcttgaaaggggtaaatcttcagcgaaaacaggcggcgaacttcacggccggaggacagccgcggcgcgaggaggcagtgagcgccctgtgttggggcaccggcggcgagacccagatgctggtgggctgcgcggacaggacggtgaagcacttcagcaccgaggatggcatattccagggtcagagacactgcccgggcggggagggcatgttccgtggcctcgcccaggccgacggcaccctcatcacatgtgtggattctgggattctcagagtctggcatgacaaggacaaggacacatcctctgacccactcctggaactgagagtgggccctggggtgtgtaggatgcgccaagacccagcacacccccatgtggttgccacaggtgggaaagagaatgctttgaagatatgggacctgcagggctctgaggaacctgtgttcagggccaagaacgtgcggaatgactggctggacttgcgggttcccatctgggaccaggacatacagtttctcccaggatcacagaagcttgtcacctgcacagggtaccaccaggtccgtgtttatgatccagcatccccccagcgccggccagtcctagagaccacctatggagagtacccactaacagccatgaccctcactccgggaggcaactcagtgattgtgggaaacactcatgggcagctggcagaaattgaccttcggcaagggcgtctactgggctgtctgaaggggctggcaggcagtgtgcgtgggttgcagtgccacccttcaaagcctctactagcctcctgtggcttggacagagtcttgaggatacacaggatccagaatccacggggtctggagcataaggtttatctcaagtctcaattgaactgcctcctcttgtcaggcagggacaactgggaggatgagccccaagagcctcaagaacccaacaaggtgcccctagaagacacagagacagatgaactttgggcatccttggaggcagctgccaagcggaagctctcgggtttggagcagccccaaggagctctccaaacgagacggagaaagaagaagcggcctgggtccaccagcccctgacgcccctgtgcccactttgtaaataaactgctgaacaccca

SEQ ID NO: 54298 - DNA, 1029 bp, Homo sapiens
cacgcgtcgcggactgcgtgggtcgacccacgcgtccgggcggctgctgctgcacgctggaaccatgtgtgggtcggcaccgagactgggatcttgaaaggggtaaatcttcagcgaaaacaggcggcgaacttcacggccggaggacagccgcggcgcgaggaggcagtgagcgccctgtgttggggcaccggcggcgagacccagatgctggtgggctgcgcggacaggacggtgaagcacttcagcaccgaggatggcatattccagggtcagagacactgcccgggcggggagggcatgttccgtggcctcgcccaggccgacggcaccctcatcacatgtgtggattctgggattctcagagtctggcatgacaaggacaaggacacatcctctgacccactcctggaactgagagtgggccctggggtgtgtaggatgcgccaagacccagcacacccccatgtggttgccacaggtgggaaagagaatgctttgaagatatgggacctgcagggctctgaggaacctgtgttcagggccaagaacgtgcggaatgactggctggacttgcgggttcccatctgggaccaggacatacagtttctcccaggatcacagaagcttgtcacctgcacagggtaccaccagggtggagtttcctgaactatgcctgttttcctcccacctggaagagaggaaaggagagtggatccccttcactgtgggaattatagggtgcaggtgtcagaggacattgggctgggtgttaagagaactgggttctggtcctgatgcagcctctctgatttgctttgggacccaggcctgagcctcccatctctggcctcagctcctcagctttacaggaagggcccgaatggggaatctttatggtttgtctcatttgaggtcttgagacacgggcggggctgggtcactgtatttgtcctattttctttgcttctgcacattgaagtctgatcttggtcatatgcctctgctcaaaacacatatgagggcatc

SEQ ID NO: 54299 - DNA, 246 bp, Homo sapiens
atgtgggagccaagggcatagatgtgaggacctccctatggagaggaaaaggaggcagctggaatgcagacttgggactatctgtttacctgcctggtcacttaatttctctgagaggcattaacagttaaaatcctgagagggttattgccaacagcatggatggggttgctttctaggagcagggaataaaggtggtggtacccagagggattctttctcagccagggtctccttccctgtggg

SEQ ID NO: 54300 - DNA, 1658 bp, Homo sapiens
agttctctcaaaagaaaaaaaaaatcgtcggtttccttttcccatctttctttcgtgacttatattccagaacgaagccccacacatcattaatgatttgaatcgtttctaaagtgtttcttaaatcgtttcttaaatcgtttgttgtttcttgtctaacagtccagaacacatattacataatggagccgggagacagactagggctggcttgatccggccacgcagtccaggaaaggtgcttttcacccccaagtgcaaaatgatcaatgtattcttccgatctacataaacaagcacctcctggtttcattttcgtaaagcaaaacaagcatggaagctttactgtttcggctcttcaaacttccagcaactacactgcgctgcatcggactcgacgcccgctggtgacgcacacgctgcgccggaagtgtgaactgtctgcctccaggctttgtcatggcggctgctgctgcacgctggaaccatgtgtgggtcggcaccgagactgggatcttgaaaggggtaaatcttcagcgaaaacaggcggcgaacttcacggccggaggacagccgcggcgcgaggaggcagtgagcgccctgtgttggggcaccggcggcgagacccagatgctggtgggctgcgcggacaggacggtgaagcacttcagcaccgaggatggcatattccagggtcagagacactgcccgggcggggagggcatgttccgtggcctcgcccaggccgacggcaccctcatcacatgtgtggattctgggattctcagagtctggcatgacaaggacaaggacacatcctctgacccactcctggaactgagagtgggccctggggtgtgtaggatgcgccaagacccagcacacccccatgtggttgccacaggtgggaaagagaatgctttgaagatatgggacctgcagggctctgaggaacctgtgttcagggccaagaacgtgcggaatgactggctggacttgcgggttcccatctgggaccaggacatacagtttctcccaggatcacagaagcttgtcacctgcacagggtaccaccaggtccgtgtttatgatccagcatccccccagcgccggccagtcctagagaccacctatggagagtacccactaacagccatgaccctcactccgggaggcaactcagtgattgtgggaaacactcatgggcagctggcagaaattgaccttcggcaagggcgtctactgggctgtctgaaggggctggcaggcagtgtgcgtgggttgcagtgccacccttcaaagcctctactagcctcctgtggcttggacagagtcttgaggatacacaggatccagaatccacggggtctggagcataaggtttatctcaagtctcaattgaactgcctcctcttgtcaggcagggacaactgggaggatgagccccaagagcctcaagaacccaacaaggtgcccctagaagacacagagacagatgaactttgggcatccttggaggcagctgccaagcggaagctctcgggtttggagcagccccaaggagctctccaaacgagacggagaaagaagaagcggcctgggtccaccagcccctgacgcccctgtgcccactttgtaaataaactgctgaacaccca

SEQ ID NO: 54301 - DNA, 1848 bp, Homo sapiens
ggactacaggcgcccgccaccacgcccggctagttttgtttttgtatgtttagtagagacggggattcaccgtgttagccaagatggtctcgatctcctgacctcatgatccgcccgcctcggcctcccaaagtgctgggattacaggcgtgagccaccgcgcctcgctgtccgcctcttgaagagtaaacgaggccgggcgcggtggtttagtaataccagctgtaatcccagctacttgggaggctgaggcagaagaatcgcttgaacccgggaggcggaggttgagtccagaacacatattacataatggagccgggagacagactagggctggcttgatccggccacgcagtccaggaaaggtgcttttcacccccaagtgcaaaatgatcaatgtattcttccgatctacataaacaagcacctcctggtttcattttcgtaaagcaaaacaagcatggaagctttactgtttcggctcttcaaacttccagcaactacactgcgctgcatcggactcgacgcccgctggtgacgcacacgctgcgccggaagtgtgaactgtctgcctccaggctttgtcatggcggctgctgctgcacgctggaaccatgtgtgggtcggcaccgagactgggatcttgaaaggggtaaatcttcagcgaaaacaggcggcgaacttcacggccggaggacagccgcggcgcgaggaggcagtgagcgccctgtgttggggcaccggcggcgagacccagatgctggtgggctgcgcggacaggacggtgaagcacttcagcaccgaggatggcatattccagggtcagagacactgcccgggcggggagggcatgttccgtggcctcgcccaggccgacggcaccctcatcacatgtgtggattctgggattctcagagtctggcatgacaaggacaaggacacatcctctgacccactcctggaactgagagtgggccctggggtgtgtaggatgcgccaagacccagcacacccccatgtggttgccacaggtgggaaagagaatgctttgaagatatgggacctgcagggctctgaggaacctgtgttcagggccaagaacgtgcggaatgactggctggacttgcgggttcccatctgggaccaggacatacagtttctcccaggatcacagaagcttgtcacctgcacagggtaccaccaggtccgtgtttatgatccagcatccccccagcgccggccagtcctagagaccacctatggagagtacccactaacagccatgaccctcactccgggaggcaactcagtgattgtgggaaacactcatgggcagctggcagaaattgaccttcggcaagggcgtctactgggctgtctgaaggggctggcaggcagtgtgcgtgggttgcagtgccacccttcaaagcctctactagcctcctgtggcttggacagagtcttgaggatacacaggatccagaatccacggggtctggagcataaggtttatctcaagtctcaattgaactgcctcctcttgtcaggcagggacaactgggaggatgagccccaagagcctcaagaacccaacaaggtgcccctagaagacacagagacagatgaactttgggcatccttggaggcagctgccaagcggaagctctcgggtttggagcagccccaaggagctctccaaacgagacggagaaagaagaagcggcctgggtccaccagcccctgacgcccctgtgcccactttgtaaataaactgctgaacacccacaagaaggagagaggaaaaaaacacaagaggaaacaagggaggcacgccacacaaaaaagacg

SEQ ID NO: 54302 - DNA, 1728 bp, Homo sapiens
ggactacaggcgcccgccaccacgcccggctagttttgtttttgtatgtttagtagagacggggattcaccgtgttagccaagatggtctcgatctcctgacctcatgatccgcccgcctcggcctcccaaagtgctgggattacaggcgtgagccaccgcgcctcgctgtccgcctcttgaagagtaaacgaggccgggcgcggtggtttagtaataccagctgtaatcccagctacttgggaggctgaggcagaagaatcgcttgaacccgggaggcggaggttgagtccagaacacatattacataatggagccgggagacagactagggctggcttgatccggccacgcagtccaggaaaggtgcttttcacccccaagtgcaaaatgatcaatgtattcttccgatctacataaacaagcacctcctggtttcattttcgtaaagcaaaacaagcatggaagctttactgtttcggctcttcaaacttccagcaactacactgcgctgcatcggactcgacgcccgctggtgacgcacacgctgcgccggaagtgtgaactgtctgcctccaggctttgtcatggcggctgctgctgcacgctggaaccatgtgtgggtcggcaccgagactgggatcttgaaaggggtaaatcttcagcgaaaacaggcggcgaacttcacggccggaggacagccgcggcgcgaggaggcagtgagcgccctgtgttggggcaccggcggcgagacccagatgctggtgggctgcgcggacaggacggtgaagcacttcagcaccgaggatggcatattccagggtcagagacactgcccgggcggggagggcatgttccgtggcctcgcccaggccgacggcaccctcatcacatgtgtggattctgggattctcagagtctggcatgacaaggacaaggacacatcctctgacccactcctggaactgagagtgggccctggggtgtgtaggatgcgccaagacccagcacacccccatgtggttgccacaggtgggaaagagaatgctttgaagatatgggacctgcagggctctgaggaacctgtgttcagggccaagaacgtgcggaatgactggctggacttgcgggttcccatctgggaccaggacatacagtttctcccaggatcacagaagcttgtcacctgcacagggtaccaccaggtccgtgtttatgatccagcatccccccagcgccggccagtcctagagaccacctatggagagtacccactaacagccatgaccctcactccgggaggcaactcagtgattgtgggaaacactcatgggcagctggcagaaattgaccttcggcaagggcgtctactgggctgtctgaaggggctggcaggcagtgtgcgtgggttgcagtgccacccttcaaagcctctactagcctcctgtggcttggacagagtcttgaggatacacaggatccagaatccacggggtctggagcataaggatgagccccaagagcctcaagaacccaacaaggtgcccctagaagacacagagacagatgaactttgggcatccttggaggcagctgccaagcggaagctctcgggtttggagcagccccaaggagctctccaaacgagacggagaaagaagaagcggcctgggtccaccagcccctgacgcccctgtgcccactttgtaaataaactgctgaacaccca

SEQ ID NO: 54303 - DNA, 1751 bp, Homo sapiens
ggactacaggcgcccgccaccacgcccggctagttttgtttttgtatgtttagtagagacggggattcaccgtgttagccaagatggtctcgatctcctgacctcatgatccgcccgcctcggcctcccaaagtgctgggattacaggcgtgagccaccgcgcctcgctgtccgcctcttgaagagtaaacgaggccgggcgcggtggtttagtaataccagctgtaatcccagctacttgggaggctgaggcagaagaatcgcttgaacccgggaggcggaggttgagtccagaacacatattacataatggagccgggagacagactagggctggcttgatccggccacgcagtccaggaaaggtgcttttcacccccaagtgcaaaatgatcaatgtattcttccgatctacataaacaagcacctcctggtttcattttcgtaaagcaaaacaagcatggaagctttactgtttcggctcttcaaacttccagcaactacactgcgctgcatcggactcgacgcccgctggtgacgcacacgctgcgccggaagtgtgaactgtctgcctccaggctttgtcatggcggctgctgctgcacgctggaaccatgggtaaatcttcagcgaaaacaggcggcgaacttcacggccggaggacagccgcggcgcgaggaggcagtgagcgccctgtgttggggcaccggcggcgagacccagatgctggtgggctgcgcggacaggacggtgaagcacttcagcaccgaggatggcatattccagggtcagagacactgcccgggcggggagggcatgttccgtggcctcgcccaggccgacggcaccctcatcacatgtgtggattctgggattctcagagtctggcatgacaaggacaaggacacatcctctgacccactcctggaactgagagtgggccctggggtgtgtaggatgcgccaagacccagcacacccccatgtggttgccacaggtgggaaagagaatgctttgaagatatgggacctgcagggctctgaggaacctgtgttcagggccaagaacgtgcggaatgactggctggacttgcgggttcccatctgggaccaggacatacagtttctcccaggatcacagaagcttgtcacctgcacagggtaccaccaggtccgtgtttatgatccagcatccccccagcgccggccagtcctagagaccacctatggagagtacccactaacagccatgaccctcactccgggaggcaactcagtgattgtgggaaacactcatgggcagctggcagaaattgaccttcggcaagggcgtctactgggctgtctgaaggggctggcaggcagtgtgcgtgggttgcagtgccacccttcaaagcctctactagcctcctgtggcttggacagagtcttgaggatacacaggatccagaatccacggggtctggagcataaggtttatctcaagtctcaattgaactgcctcctcttgtcaggcagggacaactgggaggatgagccccaagagcctcaagaacccaacaaggtgcccctagaagacacagagacagatgaactttgggcatccttggaggcagctgccaagcggaagctctcgggtttggagcagccccaaggagctctccaaacgagacggagaaagaagaagcggcctgggtccaccagcccctgacgcccctgtgcccactttgtaaataaactgctgaacaccca

SEQ ID NO: 54304 - DNA, 1205 bp, Homo sapiens
cacgcgtcgcggactgcgtgggtcgacccacgcgtccggtgggtcggcaccgagactgggatcttgaaaggggtaaatcttcagcgaaaacaggcggcgaacttcacggccggaggacagccgcggcgcgaggaggcagtgagcgccctgtgttggggcaccggcggcgagacccagatgctggtgggctgcgcggacaggacggtgaagcacttcagcaccgaggatggcatattccagggtcagagacactgcccgggcggggagggcatgttccgtggcctcgcccaggccgacggcaccctcatcacatgtgtggattctgggattctcagagtctggcatgacaaggacaaggacacatcctctgacccactcctggaactgagagtgggccctggggtgtgtaggatgcgccaagacccagcacacccccatgtggttgccacaggtgggaaagagaatgctttgaagatatgggacctgcagggctctgaggaacctgtgttcagggccaagaacgtgcggaatgactggctggacttgcgggttcccatctgggaccaggacatacagtttctcccaggatcacagaagcttgtcacctgcacagggtaccaccaggtccgtgtttatgatccagcatccccccagcgccggccagtcctagagaccacctatggagagtacccactaacagccatgaccctcactccgggaggcaactcagtgattgtgggaaacactcatgggcagctggcagaaattgaccttcggcaagggcgtctactgggctgtctgaaggggctggcaggcagtgtgcgtgggttgcagtgccacccttcaaagcctctactagcctcctgtggcttggacagagtcttgaggatacacaggatccagaatccacggggtctggagcataaggtttatctcaagtctcaattgaactgcctcctcttgtcaggcagggacaactgggaggatgagccccaagagcctcaagaacccaacaaggtgcccctagaagacacagagacagatgaactttgggcatccttggaggcagctgccaagcggaagctctcgggtttggagcagccccaaggagctctccaaacgagacggagaaagaagaagcggcctgggtccaccagcccctgacgcccctgtgcccactttgtaaataaactgctgaacaccca

SEQ ID NO: 54305 - DNA, 1827 bp, Homo sapiens
ggactacaggcgcccgccaccacgcccggctagttttgtttttgtatgtttagtagagacggggattcaccgtgttagccaagatggtctcgatctcctgacctcatgatccgcccgcctcggcctcccaaagtgctgggattacaggcgtgagccaccgcgcctcgctgtccgcctcttgaagagtaaacgaggccgggcgcggtggtttagtaataccagctgtaatcccagctacttgggaggctgaggcagaagaatcgcttgaacccgggaggcggaggttgagtccagaacacatattacataatggagccgggagacagactagggctggcttgatccggccacgcagtccaggaaaggtgcttttcacccccaagtgcaaaatgatcaatgtattcttccgatctacataaacaagcacctcctggtttcattttcgtaaagcaaaacaagcatggaagctttactgtttcggctcttcaaacttccagcaactacactgcgctgcatcggactcgacgcccgctggtgacgcacacgctgcgccggaagtgtgaactgtctgcctccaggctttgtcatggcggctgctgctgcacgctggaaccatgtgtgggtcggcaccgagactgggatcttgaaaggggtaaatcttcagcgaaaacaggcggcgaacttcacggccggaggacagccgcggcgcgaggaggcagtgagcgccctgtgttggggcaccggcggcgagacccagatgctggtgggctgcgcggacaggacggtgaagcacttcagcaccgaggatggcatattccagggtcagagacactgcccgggcggggagggcatgttccgtggcctcgcccaggccgacggcaccctcatcacatgtgtggattctgggattctcagagtctggcatgacaaggacaaggacacatcctctgacccagtgaggctcccctgccctgatggttgggggaggtgggctgggctcctggaactgagagtgggccctggggtgtgtaggatgcgccaagacccagcacacccccatgtggttgccacaggtgggaaagagaatgctttgaagatatgggacctgcagggctctgaggaacctgtgttcagggccaagaacgtgcggaatgactggctggacttgcgggttcccatctgggaccaggacatacagtttctcccaggatcacagaagcttgtcacctgcacagggtaccaccaggtccgtgtttatgatccagcatccccccagcgccggccagtcctagagaccacctatggagagtacccactaacagccatgaccctcactccgggaggcaactcagtgattgtgggaaacactcatgggcagctggcagaaattgaccttcggcaagggcgtctactgggctgtctgaaggggctggcaggcagtgtgcgtgggttgcagtgccacccttcaaagcctctactagcctcctgtggcttggacagagtcttgaggatacacaggatccagaatccacggggtctggagcataaggtttatctcaagtctcaattgaactgcctcctcttgtcaggcagggacaactgggaggatgagccccaagagcctcaagaacccaacaaggtgcccctagaagacacagagacagatgaactttgggcatccttggaggcagctgccaagcggaagctctcgggtttggagcagccccaaggagctctccaaacgagacggagaaagaagaagcggcctgggtccaccagcccctgacgcccctgtgcccactttgtaaataaactgctgaacaccca

SEQ ID NO: 54306 - DNA, 861 bp, Homo sapiens
tctgtccctccatttcccctagatgggagtatggggggatggaatgctcacacacttccaacctaggggacctctcccctcagctctgtccatttatgctgctaagcagctctcctgacaccctgatgctcagagaagaggcatacatctaagatgagaaagtttctgggagtggatcataaataagaaagcagtgtgcagggagggggtgaggatgcagagacgccagagggtaggtgcagggtgaggatacttttgtgatgcttcagccttcctctaggtccgtgtttatgatccagcatccccccagcgccggccagtcctagagaccacctatggagagtacccactaacagccatgaccctcactccgggaggcaactcagtgattgtgggaaacactcatgggcagctggcagaaattgaccttcggcaagggcgtctactgggctgtctgaaggggctggcaggcagtgtgcgtgggttgcagtgccacccttcaaagcctctactagcctcctgtggcttggacagagtcttgaggatacacaggatccagaatccacggggtctggagcataaggtttatctcaagtctcaattgaactgcctcctcttgtcaggcagggacaactgggaggatgagccccaagagcctcaagaacccaacaaggtgcccctagaagacacagagacagatgaactttgggcatccttggaggcagctgccaagcggaagctctcgggtttggagcagccccaaggagctctccaaacgagacggagaaagaagaagcggcctgggtccaccagcccctgacgcccctgtgcccactttgtaaataaactgctgaacaccca

SEQ ID NO: 54307 - DNA, 956 bp, Homo sapiens
tctgtccctccatttcccctagatgggagtatggggggatggaatgctcacacacttccaacctaggggacctctcccctcagctctgtccatttatgctgctaagcagctctcctgacaccctgatgctcagagaagaggcatacatctaagatgagaaagtttctgggagtggatcataaataagaaagcagtgtgcagggagggggtgaggatgcagagacgccagagggtaggtgcagggtgaggatacttttgtgatgcttcagccttcctctaggtccgtgtttatgatccagcatccccccagcgccggccagtcctagagaccacctatggagagtacccactaacagccatgaccctcactccgggaggcaagtgagtgtttagaggggaaggggtgggagggtggggcttgagaagggctccaggaggttactgctgatcccacttgcctctggtctcatcctcagctcagtgattgtgggaaacactcatgggcagctggcagaaattgaccttcggcaagggcgtctactgggctgtctgaaggggctggcaggcagtgtgcgtgggttgcagtgccacccttcaaagcctctactagcctcctgtggcttggacagagtcttgaggatacacaggatccagaatccacggggtctggagcataaggtttatctcaagtctcaattgaactgcctcctcttgtcaggcagggacaactgggaggatgagccccaagagcctcaagaacccaacaaggtgcccctagaagacacagagacagatgaactttgggcatccttggaggcagctgccaagcggaagctctcgggtttggagcagccccaaggagctctccaaacgagacggagaaagaagaagcggcctgggtccaccagcccctgacgcccctgtgcccactttgtaaataaactgctgaacaccca

SEQ ID NO: 54308 - DNA, 1754 bp, Homo sapiens
ggactacaggcgcccgccaccacgcccggctagttttgtttttgtatgtttagtagagacggggattcaccgtgttagccaagatggtctcgatctcctgacctcatgatccgcccgcctcggcctcccaaagtgctgggattacaggcgtgagccaccgcgcctcgctgtccgcctcttgaagagtaaacgaggccgggcgcggtggtttagtaataccagctgtaatcccagctacttgggaggctgaggcagaagaatcgcttgaacccgggaggcggaggttgagtccagaacacatattacataatggagccgggagacagactagggctggcttgatccggccacgcagtccaggaaaggtgcttttcacccccaagtgcaaaatgatcaatgtattcttccgatctacataaacaagcacctcctggtttcattttcgtaaagcaaaacaagcatggaagctttactgtttcggctcttcaaacttccagcaactacactgcgctgcatcggactcgacgcccgctggtgacgcacacgctgcgccggaagtgtgaactgtctgcctccaggctttgtcatggcggctgctgctgcacgctggaaccatgtgtgggtcggcaccgagactgggatcttgaaaggggtaaatcttcagcgaaaacaggcggcgaacttcacggccggaggacagccgcggcgcgaggaggcagtgagcgccctgtgttggggcaccggcggcgagacccagatgctggtgggctgcgcggacaggacggtgaagcacttcagcaccgaggatggcatattccagggtcagagacactgcccgggcggggagggcatgttccgtggcctcgcccaggccgacggcaccctcatcacatgtgtggattctgggattctcagagtctggcatgacaaggacaaggacacatcctctgacccactcctggaactgagagtgggccctggggtgtgtaggatgcgccaagacccagcacacccccatgtggttgccacaggtgggaaagagaatgctttgaagatatgggacctgcagggctctgaggaacctgtgttcagggccaagaacgtgcggaatgactggctggacttgcgggttcccatctgggaccaggacatacagtttctcccaggatcacagaagcttgtcacctgcacagggtaccaccaggtaaggtgtcacctcacacctgccttctcctgggataaagcagcctcctggagaaatggcccccacggtttgacacaactgctcttctcaccattctgagttcagaggagcaagcgcttccccgtctgttccaaccctgtccctgagcccatgaccttcctctactgtattctagggtggagtttcctgaactatgcctgttttcctcccacctggaagagaggaaaggagagtggatccccttcactgtgggaattatagggtgcaggtgtcagaggacattgggctgggtgttaagagaactgggttctggtcctgatgcagcctctctgatttgctttgggacccaggcctgagcctcccatctctggcctcagctcctcagctttacaggaagggcccgaatggggaatctttatggtttgtctcatttgaggtcttgagacacgggcggggctgggtcactgtatttgtcctattttctttgcttctgcacattgaagtctgatcttggtcatatgcctctgctcaaaacacatatgagggcatc

SEQ ID NO: 54309 - DNA, 1073 bp, Homo sapiens
ggactacaggcgcccgccaccacgcccggctagttttgtttttgtatgtttagtagagacggggattcaccgtgttagccaagatggtctcgatctcctgacctcatgatccgcccgcctcggcctcccaaagtgctgggattacaggcgtgagccaccgcgcctcgctgtccgcctcttgaagagtaaacgaggccgggcgcggtggtttagtaataccagctgtaatcccagctacttgggaggctgaggcagaagaatcgcttgaacccgggaggcggaggttgagtccagaacacatattacataatggagccgggagacagactagggctggcttgatccggccacgcagtccaggaaaggtgcttttcacccccaagtgcaaaatgatcaatgtattcttccgatctacataaacaagcacctcctggtttcattttcgtaaagcaaaacaagcatggaagctttactgtttcggctcttcaaacttccagcaactacactgcgctgcatcggactcgacgcccgctggtgacgcacacgctgcgccggaagtgtgaactgtctgcctccaggctttgtcatggcggctgctgctgcacgctggaaccatgtgtgggtcggcaccgagactgggatcttgaaaggggtaaatcttcagcgaaaacaggcggcgaacttcacggccggaggacagccgcggcgcgaggaggcagtgagcgccctgtgttggggcaccggcggcgagacccagatgctggtgggctgcgcggacaggacggtgaagcacttcagcaccgaggatggcatattccagggtcagagacactgcccgggcggggagggcatgatgagccccaagagcctcaagaacccaacaaggtgcccctagaagacacagagacagatgaactttgggcatccttggaggcagctgccaagcggaagctctcgggtttggagcagccccaaggagctctccaaacgagacggagaaagaagaagcggcctgggtccaccagcccctgacgcccctgtgcccactttgtaaataaactgctgaacaccca

SEQ ID NO: 54310 - DNA, 386 bp, Homo sapiens
aaacttctttttgtggagatggggtctccttatgttgcccagtctggtcgctaagtcctgggctcaagcaatcctcctgccttggtctcccaaagtgctgagattacaggtgggagccaccgtgcccggcccccctgactcctaagctttcttcccactcaccaggatgagccccaagagcctcaagaacccaacaaggtgcccctagaagacacagagacagatgaactttgggcatccttggaggcagctgccaagcggaagctctcgggtttggagcagccccaaggagctctccaaacgagacggagaaagaagaagcggcctgggtccaccagcccctgacgcccctgtgcccactttgtaaataaactgctgaacaccca

SEQ ID NO: 54311 - DNA, 283 bp, Homo sapiens
tcacgctggggaagggaggattaaggactctggaacggactcttatctcctattctttacaggatgagccccaagagcctcaagaacccaacaaggtgcccctagaagacacagagacagatgaactttgggcatccttggaggcagctgccaagcggaagctctcgggtttggagcagccccaaggagctctccaaacgagacggagaaagaagaagcggcctgggtccaccagcccctgacgcccctgtgcccactttgtaaataaactgctgaacaccca

SEQ ID NO: 54312 - DNA, 448 bp, Homo sapiens
ggccacgcggggccatgggctgctgccaagacaaggactttgagatgtctgatgagcagtccaaggaggaagagtctgaggacggcagggaagatgagaccacagacacacaaagagggcccagggagtgtgagagggggcttcccgagggtaggggtgagctcagaggcctcgtcgtcccctcaggcgccgaagatatcgacttgaactccccggaccatccgaatcacaagtcgaacgaaagccttctgattaccgtgctgtggcggcgactatccacgttcggtcgtcggggctcctcgcggccaagcaagaggcaaccagaccagattcggaagcaggagagtccgatccgagaaggcaaccaggaggagccggagaagggatgaccccagacctgctctcagtccgccccaacctccagagaataaaatttctaacgtatacc

SEQ ID NO: 54313 - DNA, 1785 bp, Homo sapiens
ggactacaggcgcccgccaccacgcccggctagttttgtttttgtatgtttagtagagacggggattcaccgtgttagccaagatggtctcgatctcctgacctcatgatccgcccgcctcggcctcccaaagtgctgggattacaggcgtgagccaccgcgcctcgctgtccgcctcttgaagagtaaacgaggccgggcgcggtggtttagtaataccagctgtaatcccagctacttgggaggctgaggcagaagaatcgcttgaacccgggaggcggaggttgagtccagaacacatattacataatggagccgggagacagactagggctggcttgatccggccacgcagtccaggaaaggtgcttttcacccccaagtgcaaaatgatcaatgtattcttccgatctacataaacaagcacctcctggtttcattttcgtaaagcaaaacaagcatggaagctttactgtttcggctcttcaaacttccagcaactacactgcgctgcatcggactcgacgcccgctggtgacgcacacgctgcgccggaagtgtgaactgtctgcctccaggctttgtcatggcggctgctgctgcacgctggaaccatgtgtgggtcggcaccgagactgggatcttgaaaggggtaaatcttcagcgaaaacaggcggcgaacttcacggccggaggacagccgcggcgcgaggaggcagtgagcgccctgtgttggggcaccggcggcgagacccagatgctggtgggctgcgcggacaggacggtgaagcacttcagcaccgaggatggcatattccagggtcagagacactgcccgggcggggagggcatgttccgtggcctcgcccaggccgacggcaccctcatcacatgtgtggattctgggattctcagagtctggcatgacaaggacaaggacacatcctctgacccactcctggaactgagagtgggccctggggtgtgtaggatgcgccaagacccagcacacccccatgtggttgccacaggtgggaaagagaatgctttgaagatatgggacctgcagggctctgaggaacctgtgttcagggccaagaacgtgcggaatgactggctggacttgcgggttcccatctgggaccaggacatacagtttctcccaggatcacagaagcttgtcacctgcacagggtaccaccaggtccgtgtttatgatccagcatccccccagcgccggccagtcctagagaccacctatggagagtacccactaacagccatgaccctcactccgggaggcaactcagtgattgtgggaaacactcatgggcagctggcagaaattgaccttcggcaagggcgtctactgggctgtctgaaggggctggcaggcagtgtgcgtgggttgcagtgccacccttcaaagcctctactagcctcctgtggcttggacagagtcttgaggatacacaggatccagaatccacggggtctggagcataaggtttatctcaagtctcaattgaactgcctcctcttgtcaggcagggacaactgggaggatgagccccaagagcctcaagaacccaacaaggtgcccctagaagacacagagacagatgaactttgggcatccttggaggcagctgccaagcggaagctctcgggtttggagcagccccaaggagctctccaaacgagacggagaaagaagaagcggcctgggtccaccagcccctgacgcccctgtgcccactttgtaaataaactgctgaacaccca

SEQ ID NO: 54314 - DNA, 1887 bp, Homo sapiens
ggactacaggcgcccgccaccacgcccggctagttttgtttttgtatgtttagtagagacggggattcaccgtgttagccaagatggtctcgatctcctgacctcatgatccgcccgcctcggcctcccaaagtgctgggattacaggcgtgagccaccgcgcctcgctgtccgcctcttgaagagtaaacgaggccgggcgcggtggtttagtaataccagctgtaatcccagctacttgggaggctgaggcagaagaatcgcttgaacccgggaggcggaggttgagtccagaacacatattacataatggagccgggagacagactagggctggcttgatccggccacgcagtccaggaaaggtgcttttcacccccaagtgcaaaatgatcaatgtattcttccgatctacataaacaagcacctcctggtttcattttcgtaaagcaaaacaagcatggaagctttactgtttcggctcttcaaacttccagcaactacactgcgctgcatcggactcgacgcccgctggtgacgcacacgctgcgccggaagtgtgaactgtctgcctccaggctttgtcatggcggctgctgctgcacgctggaaccatgtgtgggtcggcaccgagactgggatcttgaaaggggtaaatcttcagcgaaaacaggcggcgaacttcacggccggaggacagccgcggcgcgaggaggcagtgagcgccctgtgttggggcaccggcggcgagacccagatgctggtgggctgcgcggacaggacggtgaagcacttcagcaccgaggatggcatattccagggtcagagacactgcccgggcggggagggcatgttccgtggcctcgcccaggccgacggcaccctcatcacatgtgtggattctgggattctcagagtctggcatgacaaggacaaggacacatcctctgacccactcctggaactgagagtgggccctggggtgtgtaggatgcgccaagacccagcacacccccatgtggttgccacaggtgggaaagagaatgctttgaagatatgggacctgcagggctctgaggaacctgtgttcagggccaagaacgtgcggaatgactggctggacttgcgggttcccatctgggaccaggacatacagtttctcccaggatcacagaagcttgtcacctgcacagggtaccaccaggtccgtgtttatgatccagcatccccccagcgccggccagtcctagagaccacctatggagagtacccactaacagccatgaccctcactccgggaggcaactcagtgattgtgggaaacactcatgggcagctggcagaaattgaccttcggcaagggcgtctactgggctgtctgaaggggctggcaggcagtgtgcgtgggttgcagtgccacccttcaaagcctctactagcctcctgtggcttggacagagtcttgaggatacacaggatccagaatccacggggtctggagcataaggtttatctcaagtctcaattgaactgcctcctcttgtcaggcagggacaactgggaggatgagccccaagagcctcaagaacccaacaaggtgcccctagaagacacagagacagatgaactttgggcatccttggaggcagctgccaagcggaagctctcgggtttggagcagccccaaggagctctccaaacgagacggagaaagaagaagcggcctgggtccaccagcccctgacgcccctgtgcccactttgtaaataaactgctgaacacccaaaaaaaaaacaaaaggggcggccgccttattatatagaaagaaatagaaagaaacaaaaagagaagagaaaaagaaaaagagccagagaaaaaacaaaaggg

SEQ ID NO: 54315 - DNA, 2024 bp, Homo sapiens
ggactacaggcgcccgccaccacgcccggctagttttgtttttgtatgtttagtagagacggggattcaccgtgttagccaagatggtctcgatctcctgacctcatgatccgcccgcctcggcctcccaaagtgctgggattacaggcgtgagccaccgcgcctcgctgtccgcctcttgaagagtaaacgaggccgggcgcggtggtttagtaataccagctgtaatcccagctacttgggaggctgaggcagaagaatcgcttgaacccgggaggcggaggttgagtccagaacacatattacataatggagccgggagacagactagggctggcttgatccggccacgcagtccaggaaaggtgcttttcacccccaagtgcaaaatgatcaatgtattcttccgatctacataaacaagcacctcctggtttcattttcgtaaagcaaaacaagcatggaagctttactgtttcggctcttcaaacttccagcaactacactgcgctgcatcggactcgacgcccgctggtgacgcacacgctgcgccggaagtgtgaactgtctgcctccaggctttgtcatggcggctgctgctgcacgctggaaccatgtgtgggtcggcaccgagactgggatcttgaaaggggtaaatcttcagcgaaaacaggcggcgaacttcacggccggaggacagccgcggcgcgaggaggcagtgagcgccctgtgttggggcaccggcggcgagacccagatgctggtgggctgcgcggacaggacggtgaagcacttcagcaccgaggatggcatattccagggtcagagacactgcccgggcggggagggcatgttccgtggcctcgcccaggccgacggcaccctcatcacatgtgtggattctgggattctcagagtctggcatgacaaggacaaggacacatcctctgacccactcctggaactgagagtgggccctggggtgtgtaggatgcgccaagacccagcacacccccatgtggttgccacaggtgggaaagagaatgctttgaagatatgggacctgcagggctctgaggaacctgtgttcagggccaagaacgtgcggaatgactggctggacttgcgggttcccatctgggaccaggacatacagtttctcccaggatcacagaagcttgtcacctgcacagggtaccaccaggtccgtgtttatgatccagcatccccccagcgccggccagtcctagagaccacctatggagagtacccactaacagccatgaccctcactccgggaggcaactcagtgattgtgggaaacactcatgggcagctggcagaaattgaccttcggcaagggcgtctactgggctgtctgaaggggctggcaggcagtgtgcgtgggttgcagtgccacccttcaaagcctctactagcctcctgtggcttggacagagtcttgaggatacacaggatccagaatccacggggtctggagcataaggtttatctcaagtctcaattgaactgcctcctcttgtcaggcagggacaactgggaggatgagccccaagagcctcaagaacccaacaaggtgcccctagaagacacagagacagatgaactttgggcatccttggaggcagctgccaagcggaagctctcgggtttggagcagccccaaggagctctccaaacgagacggagaaagaagaagcggcctgggtccaccagcccctgacgcccctgtgcccactttgcgccgaagatatcgacttgaactccccggaccatccgaatcacaagtcgaacgaaagccttctgattaccgtgctgtggcggcgactatccacgttcggtcgtcggggctcctcgcggccaagcaagaggcaaccagaccagattcggaagcaggagagtccgatccgagaaggcaaccaggaggagccggagaagggatgaccccagacctgctctcagtccgccccaacctccagagaataaaatttctaacgtatacc

SEQ ID NO: 54316 - DNA, 1736 bp, Homo sapiens
agttctctcaaaagaaaaaaaaaatcgtcggtttccttttcccatctttctttcgtgacttatattccagaacgaagccccacacatcattaatgatttgaatcgtttctaaagtgtttcttaaatcgtttcttaaatcgtttgttgtttcttgtctaacagtccagaacacatattacataatggagccgggagacagactagggctggcttgatccggccacgcagtccaggaaaggtgcttttcacccccaagtgcaaaatgatcaatgtattcttccgatctacataaacaagcacctcctggtttcattttcgtaaagcaaaacaagcatggaagctttactgtttcggctcttcaaacttccagcaactacactgcgctgcatcggactcgacgcccgctggtgacgcacacgctgcgccggaagtgtgaactgtctgcctccaggctttgtcatggcggctgctgctgcacgctggaaccatgtgtgggtcggcaccgagactgggatcttgaaaggtgggtggcaggctcgggcgtcgggaagtgcaggggtgcactcgcgcccctggcgtgactgacgccttcgtctctcaggggtaaatcttcagcgaaaacaggcggcgaacttcacggccggaggacagccgcggcgcgaggaggcagtgagcgccctgtgttggggcaccggcggcgagacccagatgctggtgggctgcgcggacaggacggtgaagcacttcagcaccgaggatggcatattccagggtcagagacactgcccgggcggggagggcatgttccgtggcctcgcccaggccgacggcaccctcatcacatgtgtggattctgggattctcagagtctggcatgacaaggacaaggacacatcctctgacccactcctggaactgagagtgggccctggggtgtgtaggatgcgccaagacccagcacacccccatgtggttgccacaggtgggaaagagaatgctttgaagatatgggacctgcagggctctgaggaacctgtgttcagggccaagaacgtgcggaatgactggctggacttgcgggttcccatctgggaccaggacatacagtttctcccaggatcacagaagcttgtcacctgcacagggtaccaccaggtccgtgtttatgatccagcatccccccagcgccggccagtcctagagaccacctatggagagtacccactaacagccatgaccctcactccgggaggcaactcagtgattgtgggaaacactcatgggcagctggcagaaattgaccttcggcaagggcgtctactgggctgtctgaaggggctggcaggcagtgtgcgtgggttgcagtgccacccttcaaagcctctactagcctcctgtggcttggacagagtcttgaggatacacaggatccagaatccacggggtctggagcataaggtttatctcaagtctcaattgaactgcctcctcttgtcaggcagggacaactgggaggatgagccccaagagcctcaagaacccaacaaggtgcccctagaagacacagagacagatgaactttgggcatccttggaggcagctgccaagcggaagctctcgggtttggagcagccccaaggagctctccaaacgagacggagaaagaagaagcggcctgggtccaccagcccctgacgcccctgtgcccactttgtaaataaactgctgaacaccca

SEQ ID NO: 54317 - DNA, 1555 bp, Homo sapiens
ggactacaggcgcccgccaccacgcccggctagttttgtttttgtatgtttagtagagacggggattcaccgtgttagccaagatggtctcgatctcctgacctcatgatccgcccgcctcggcctcccaaagtgctgggattacaggcgtgagccaccgcgcctcgctgtccgcctcttgaagagtaaacgaggccgggcgcggtggtttagtaataccagctgtaatcccagctacttgggaggctgaggcagaagaatcgcttgaacccgggaggcggaggttgagtccagaacacatattacataatggagccgggagacagactagggctggcttgatccggccacgcagtccaggaaaggtgcttttcacccccaagtgcaaaatgatcaatgtattcttccgatctacataaacaagcacctcctggtttcattttcgtaaagcaaaacaagcatggaagctttactgtttcggctcttcaaacttccagcaactacactgcgctgcatcggactcgacgcccgctggtgacgcacacgctgcgccggaagtgtgaactgtctgcctccaggctttgtcatggcggctgctgctgcacgctggaaccatgtgtgggtcggcaccgagactgggatcttgaaaggggtaaatcttcagcgaaaacaggcggcgaacttcacggccggaggacagccgcggcgcgaggaggcagtgagcgccctgtgttggggcaccggcggcgagacccagatgctggtgggctgcgcggacaggacggtgaagcacttcagcaccgaggatggcatattccagggtcagagacactgcccgggcggggagggcatgttccgtggcctcgcccaggccgacggcaccctcatcacatgtgtggattctgggattctcagagtctggcatgacaaggacaaggacacatcctctgacccactcctggaactgagagtgggccctggggtgtgtaggatgcgccaagacccagcacacccccatgtggttgccacaggtgggaaagagaatgctttgaagatatgggacctgcagggctctgaggaacctgtgttcagggccaagaacgtgcggaatgactggctggacttgcgggttcccatctgggaccaggacatacagtttctcccaggatcacagaagcttgtcacctgcacagggtaccaccaggtccgtgtttatgatccagcatccccccagcgccggccagtcctagagaccacctatggagagtacccactaacagccatgaccctcactccgggaggcaactcagtgattgtgggaaacactcatgggcagctggcagaaattgaccttcggcaagggcgtctactgggctgtctgaaggggctggcaggcagtgtgcgtgggttgcagtgccacccttcaaagcctctactagcctcctgtggcttggacagagtcttgaggatacacaggatcccggaattcggctacattcagaggtcgggcagacacatgcaggacattgagtcggacattgttgagttggggctc

SEQ ID NO: 54318 - DNA, 1556 bp, Homo sapiens
tcaggcaagtcgatacagagcccgaaccagctagggagggttggcaggtgtgagaaagaacataggcgcaggctgtgcagatcctggggagagacttgcttggacttctcgggagggatattttaagcaagagactgacatttagtgcctgaaactcagagcaaggaacccaagaagttggtgtttgactttgaccaagccctaaattcagaccagccctagtaagcaactcaagattcagacagatcagtacagccagatgctagacatagctgtgaacagcaaaagcactctggaatatcacagagttgatttctagctgtggttgtaacatagctgagtggcaaattagtttctcagcgcttctatttcctcacttggtaaaccctcaccctgttgagaaagttgaattaacagattaggaagctggaagctgtcaagccctgcctagagcccagtgacctagaggcttccttctaaactggactgttagtagggaatctggttgatatgagtttggggcctagagaatacttttatacttttttttttctttaaacattagtcaactgtagtagtaaggaggagagaaagattagaacaaggagtttaagcacttaaaaaatcccaactctatcctttctctgcagcaccctcatcacatgtgtggattctgggattctcagagtctggcatgacaaggacaaggacacatcctctgacccactcctggaactgagagtgggccctggggtgtgtaggatgcgccaagacccagcacacccccatgtggttgccacaggtgggaaagagaatgctttgaagatatgggacctgcagggctctgaggaacctgtgttcagggccaagaacgtgcggaatgactggctggacttgcgggttcccatctgggaccaggacatacagtttctcccaggatcacagaagcttgtcacctgcacagggtaccaccaggtccgtgtttatgatccagcatccccccagcgccggccagtcctagagaccacctatggagagtacccactaacagccatgaccctcactccgggaggcaactcagtgattgtgggaaacactcatgggcagctggcagaaattgaccttcggcaagggcgtctactgggctgtctgaaggggctggcaggcagtgtgcgtgggttgcagtgccacccttcaaagcctctactagcctcctgtggcttggacagagtcttgaggatacacaggatccagaatccacggggtctggagcataaggtttatctcaagtctcaattgaactgcctcctcttgtcaggcagggacaactgggaggatgagccccaagagcctcaagaacccaacaaggtgcccctagaagacacagagacagatgaactttgggcatccttggaggcagctgccaagcggaagctctcgggtttggagcagccccaaggagctctccaaacgagacggagaaagaagaagcggcctgggtccaccagcccctgacgcccctgtgcccactttgtaaataaactgctgaacaccca

SEQ ID NO: 54319 - DNA, 1579 bp, Homo sapiens
ggactacaggcgcccgccaccacgcccggctagttttgtttttgtatgtttagtagagacggggattcaccgtgttagccaagatggtctcgatctcctgacctcatgatccgcccgcctcggcctcccaaagtgctgggattacaggcgtgagccaccgcgcctcgctgtccgcctcttgaagagtaaacgaggccgggcgcggtggtttagtaataccagctgtaatcccagctacttgggaggctgaggcagaagaatcgcttgaacccgggaggcggaggttgagtccagaacacatattacataatggagccgggagacagactagggctggcttgatccggccacgcagtccaggaaaggtgcttttcacccccaagtgcaaaatgatcaatgtattcttccgatctacataaacaagcacctcctggtttcattttcgtaaagcaaaacaagcatggaagctttactgtttcggctcttcaaacttccagcaactacactgcgctgcatcggactcgacgcccgctggtgacgcacacgctgcgccggaagtgtgaactgtctgcctccaggctttgtcatggcggctgctgctgcacgctggaaccatgtgtgggtcggcaccgagactgggatcttgaaaggggtaaatcttcagcgaaaacaggcggcgaacttcacggccggaggacagccgcggcgcgaggaggcagtgagcgccctgtgttggggcaccggcggcgagacccagatgctggtgggctgcgcggacaggacggtgaagcacttcagcaccgaggatggcatattccagggtcagagacactgcccgggcggggagggcatgttccgtggcctcgcccaggccgacggcaccctcatcacatgtgtggattctgggattctcagagtctggcatgacaaggacaaggacacatcctctgacccactcctggaactgagagtgggccctggggtgtgtaggatgcgccaagacccagcacacccccatgtggttgccacaggtgggaaagagaatgctttgaagatatgggacctgcagggctctgaggaacctgtgttcagggccaagaacgtgcggaatgactggctggacttgcgggttcccatctgggaccaggacatacagtttctcccaggatcacagaagcttgtcacctgcacagggtaccaccagggtggagtttcctgaactatgcctgttttcctcccacctggaagagaggaaaggagagtggatccccttcactgtgggaattatagggtgcaggtgtcagaggacattgggctgggtgttaagagaactgggttctggtcctgatgcagcctctctgatttgctttgggacccaggcctgagcctcccatctctggcctcagctcctcagctttacaggaagggcccgaatggggaatctttatggtttgtctcatttgaggtcttgagacacgggcggggctgggtcactgtatttgtcctattttctttgcttctgcacattgaagtctgatcttggtcatatgcctctgctcaaaacacatatgagggcatc

SEQ ID NO: 54320 - DNA, 978 bp, Homo sapiens
tctgtccctccatttcccctagatgggagtatggggggatggaatgctcacacacttccaacctaggggacctctcccctcagctctgtccatttatgctgctaagcagctctcctgacaccctgatgctcagagaagaggcatacatctaagatgagaaagtttctgggagtggatcataaataagaaagcagtgtgcagggagggggtgaggatgcagagacgccagagggtaggtgcagggtgaggatacttttgtgatgcttcagccttcctctaggtccgtgtttatgatccagcatccccccagcgccggccagtcctagagaccacctatggagagtacccactaacagccatgaccctcactccgggaggcaactcagtgattgtgggaaacactcatgggcagctggcagaaattgaccttcggcaagggcgtctactgggctgtctgaaggggctggcaggcagtgtgcgtgggttgcagtgccacccttcaaagcctctactagcctcctgtggcttggacagagtcttgaggatacacaggatccagaatccacggggtctggagcataaggtaagttgtctctcccacctccaactcatggtcttgtggaggccccgcctcctgtgccctccgttcatgtttctgtctcagcatgcctggctccttaaggtccctcatcttttgcaggtttatctcaagtctcaattgaactgcctcctcttgtcaggcagggacaactgggaggatgagccccaagagcctcaagaacccaacaaggtgcccctagaagacacagagacagatgaactttgggcatccttggaggcagctgccaagcggaagctctcgggtttggagcagccccaaggagctctccaaacgagacggagaaagaagaagcggcctgggtccaccagcccctgacgcccctgtgcccactttgtaaataaactgctgaacaccca

SEQ ID NO: 54321 - DNA, 480 bp, Homo sapiens
tgttgcagattaaatgttgaaatggaaagtgattggaacaggaaacaatgaatggttggttattggccagccagttatcacggatgcttccccccttctctagggcgtctactgggctgtctgaaggggctggcaggcagtgtgcgtgggttgcagtgccacccttcaaagcctctactagcctcctgtggcttggacagagtcttgaggatacacaggatccagaatccacggggtctggagcataaggtaagttgtctctcccacctccaactcatggtcttgtggaggccccgcctcctgtgccctccgttcatgtttctgtctcagcatgcctggctccttaaggtccctcatcttttgcaggtttatctcaagtctcaattgaactgcctcctcttgtcaggcagggacaactgggaggtgagcagttgggcccgggaatgtgggagccaagggcatagatgtgaggacctccct

SEQ ID NO: 54322 - DNA, 463 bp, Homo sapiens
tagctgatcgatcgagctggtaccccccgactagcccgacagggcgttcttggctcgccgagctgcagcagtggctcaagccaggcctcaaggtactgagcattgcccaagcacactcgcctgccttttcctgcgaacaggttcgcgccttcccggcccttaccagcctagacctgtctgacaatcctggactgggcgaacgcggactgatggcggctctctgtccccacaagttcccggccatccagaatctagcgctgcgcaacacaggaatggagacgcccacaggcgtgtgcgccgcactggcggcggcaggtgtgcagccccacagcctagacctcagccacaactcgctgcgcgccaccgtaaaccctagcgctccgagatgcatgtggtccagcgccctgaactccctcaatctgtcgggctagtcgggggtaccagctcgattgtatcatgtcac

SEQ ID NO: 54323 - DNA, 1634 bp, Homo sapiens
accagagaaggcttaggctcccgagtcaacagggcattcaccgcctggggcgcctgagtcatcaggacactgccaggagacacagaaccctagatgccctgcagaatccttcctgttacggtccccctccctgaaacatccttcattgcaatatttccaggaaaggaagggggctggctcggaggaagagaggtggggaggtgatcagggttcacagaggagggaactgaatgacatcccaggattacataaactgtcagaggcagccgaagagttcacaagtgtgaagcctggaagccggcgggtgccgctgtgtaggaaagaagctaaagcacttccagagcctgtccggagctcagaggttcggaagacttatcgaccatggagcgcgcgtcctgcttgttgctgctgctgctgccgctggtgcacgtctctgcgaccacgccagaaccttgtgagctggacgatgaagatttccgctgcgtctgcaacttctccgaacctcagcccgactggtccgaagccttccagtgtgtgtctgcagtagaggtggagatccatgccggcggtctcaacctagagccgtttctaaagcgcgtcgatgcggacgccgacccgcggcagtatgctgacacggtcaaggctctccgcgtgcggcggctcacagtgggagccgcacaggttcctgctcagctactggtaggcgccctgcgtgtgctagcgtactcccgcctcaaggaactgacgctcgaggacctaaagataaccggcaccatgcctccgctgcctctggaagccacaggacttgcactttccagcttgcgcctacgcaacgtgtcgtgggcgacagggcgttcttggctcgccgagctgcagcagtggctcaagccaggcctcaaggtactgagcattgcccaagcacactcgcctgccttttcctgcgaacaggttcgcgccttcccggcccttaccagcctagacctgtctgacaatcctggactgggcgaacgcggactgatggcggctctctgtccccacaagttcccggccatccagaatctagcgctgcgcaacacaggaatggagacgcccacaggcgtgtgcgccgcactggcggcggcaggtgtgcagccccacagcctagacctcagccacaactcgctgcgcgccaccgtaaaccctagcgctccgagatgcatgtggtccagcgccctgaactccctcaatctgtcgttcgctgggctggaacaggtgcctaaaggactgccagccaagctcagagtgctcgatctcagctgcaacagactgaacagggcgccgcagcctgacgagctgcccgaggtggataacctgacactggacgggaatcccttcctggtccctggaactgccctcccccacgagggctcaatgaactccggcgtggtcccagcctgtgcacgttcgaccctgtcggtgggggtgtcgggaaccctggtgctgctccaaggggcccggggctttgcctaagatccaagacagaataatgaatggactcaaactgccttggcttcaggggagtcccgtcaggacgttgaggacttttcgaccaattcaaccctttgccccacctttattaaaatcttaaacaacga

SEQ ID NO: 54324 - DNA, 1532 bp, Homo sapiens
catgtactatactgtaagcagtgtacgcgatccggataccaaactaatgctgaaatctctggttacgccctcctaaatctcattgcatattcaggaaggaaggggctgtcgaggagagaggtgggaggtgtcggtcacgagagggactgattactccaggatacttaatgtcaggcgcgaagtcacagtgtagctggacggggtgccgctgtgtaggaaagaagctaaagcacttccagagcctgtccggagctcagaggttcggaagacttatcgaccatggagcgcgcgtcctgcttgttgctgctgctgctgccgctggtgcacgtctctgcgaccacgccagaaccttgtgagctggacgatgaagatttccgctgcgtctgcaacttctccgaacctcagcccgactggtccgaagccttccagtgtgtgtctgcagtagaggtggagatccatgccggcggtctcaacctagagccgtttctaaagcgcgtcgatgcggacgccgacccgcggcagtatgctgacacggtcaaggctctccgcgtgcggcggctcacagtgggagccgcacaggttcctgctcagctactggtaggcgccctgcgtgtgctagcgtactcccgcctcaaggaactgacgctcgaggacctaaagataaccggcaccatgcctccgctgcctctggaagccacaggacttgcactttccagcttgcgcctacgcaacgtgtcgtgggcgacagggcgttcttggctcgccgagctgcagcagtggctcaagccaggcctcaaggtactgagcattgcccaagcacactcgcctgccttttcctgcgaacaggttcgcgccttcccggcccttaccagcctagacctgtctgacaatcctggactgggcgaacgcggactgatggcggctctctgtccccacaagttcccggccatccagaatctagcgctgcgcaacacaggaatggagacgcccacaggcgtgtgcgccgcactggcggcggcaggtgtgcagccccacagcctagacctcagccacaactcgctgcgcgccaccgtaaaccctagcgctccgagatgcatgtggtccagcgccctgaactccctcaatctgtcgttcgctgggctggaacaggtgcctaaaggactgccagccaagctcagagtgctcgatctcagctgcaacagactgaacagggcgccgcagcctgacgagctgcccgaggtggataacctgacactggacgggaatcccttcctggtccctggaactgccctcccccacgagggctcaatgaactccggcgtggtcccagcctgtgcacgttcgaccctgtcggtgggggtgtcgggaaccctggtgctgctccaaggggcccggggctttgcctaagatccaagacagaataatgaatggactcaaactgccttggcttcaggggagtcccgtcaggacgttgaggacttttcgaccaattcaaccctttgccccacctttattaaaatcttaaacaacga

SEQ ID NO: 54325 - DNA, 826 bp, Homo sapiens
tagctgatcgatcgagctggtaccccccgactagcccgacagggcgttcttggctcgccgagctgcagcagtggctcaagccaggcctcaaggtactgagcattgcccaagcacactcgcctgccttttcctgcgaacaggttcgcgccttcccggcccttaccagcctagacctgtctgacaatcctggactgggcgaacgcggactgatggcggctctctgtccccacaagttcccggccatccagaatctagcgctgcgcaacacaggaatggagacgcccacaggcgtgtgcgccgcactggcggcggcaggtgtgcagccccacagcctagacctcagccacaactcgctgcgcgccaccgtaaaccctagcgctccgagatgcatgtggtccagcgccctgaactccctcaatctgtcgttcgctgggctggaacaggtgcctaaaggactgccagccaagctcagagtgctcgatctcagctgcaacagactgaacagggcgccgcagcctgacgagctgcccgaggtggataacctgacactggacgggaatcccttcctggtccctggaactgccctcccccacgagggctcaatgaactccggcgtggtcccagcctgtgcacgttcgaccctgtcggtgggggtgtcgggaaccctggtgctgctccaaggggcccggggctttgcctaagatccaagacagaataatgaatggactcaaactgccttggcttcaggggagtcccgtcaggacgttgaggacttttcgaccaattcaaccctttgccccacctttattaaaatcttaaacaacga

SEQ ID NO: 54326 - DNA, 1271 bp, Homo sapiens
accagagaaggcttaggctcccgagtcaacagggcattcaccgcctggggcgcctgagtcatcaggacactgccaggagacacagaaccctagatgccctgcagaatccttcctgttacggtccccctccctgaaacatccttcattgcaatatttccaggaaaggaagggggctggctcggaggaagagaggtggggaggtgatcagggttcacagaggagggaactgaatgacatcccaggattacataaactgtcagaggcagccgaagagttcacaagtgtgaagcctggaagccggcgggtgccgctgtgtaggaaagaagctaaagcacttccagagcctgtccggagctcagaggttcggaagacttatcgaccatggagcgcgcgtcctgcttgttgctgctgctgctgccgctggtgcacgtctctgcgaccacgccagaaccttgtgagctggacgatgaagatttccgctgcgtctgcaacttctccgaacctcagcccgactggtccgaagccttccagtgtgtgtctgcagtagaggtggagatccatgccggcggtctcaacctagagccgtttctaaagcgcgtcgatgcggacgccgacccgcggcagtatgctgacacggtcaaggctctccgcgtgcggcggctcacagtgggagccgcacaggttcctgctcagctactggtaggcgccctgcgtgtgctagcgtactcccgcctcaaggaactgacgctcgaggacctaaagataaccggcaccatgcctccgctgcctctggaagccacaggacttgcactttccagcttgcgcctacgcaacgtgtcgtgggcgacagggcgttcttggctcgccgagctgcagcagtggctcaagccaggcctcaaggtactgagcattgcccaagcacactcgcctgccttttcctgcgaacaggttcgcgccttcccggcccttaccagcctagacctgtctgacaatcctggactgggcgaacgcggactgatggcggctctctgtccccacaagttcccggccatccagaatctagcgctgcgcaacacaggaatggagacgcccacaggcgtgtgcgccgcactggcggcggcaggtgtgcagccccacagcctagacctcagccacaactcgctgcgcgccaccgtaaaccctagcgctccgagatgcatgtggtccagcgccctgaactccctcaatctgtcgggctagtcgggggtaccagctcgattgtatcatgtcac

SEQ ID NO: 54327 - DNA, 661 bp, Homo sapiens
  misc_feature (264)..(265): n is a, c, g, or t
  misc_feature (267)..(267): n is a, c, g, or t
  misc_feature (271)..(271): n is a, c, g, or t
  misc_feature (274)..(274): n is a, c, g, or t
  misc_feature (276)..(276): n is a, c, g, or t
  misc_feature (278)..(279): n is a, c, g, or t
  misc_feature (281)..(281): n is a, c, g, or t
  misc_feature (285)..(285): n is a, c, g, or t
  misc_feature (292)..(292): n is a, c, g, or t
  misc_feature (296)..(296): n is a, c, g, or t
  misc_feature (302)..(302): n is a, c, g, or t
  misc_feature (307)..(307): n is a, c, g, or t
  misc_feature (310)..(310): n is a, c, g, or t
  misc_feature (313)..(313): n is a, c, g, or t
  misc_feature (324)..(324): n is a, c, g, or t
  misc_feature (329)..(330): n is a, c, g, or t
  misc_feature (333)..(333): n is a, c, g, or t
  misc_feature (335)..(335): n is a, c, g, or t
  misc_feature (337)..(338): n is a, c, g, or t
  misc_feature (340)..(340): n is a, c, g, or t
  misc_feature (343)..(343): n is a, c, g, or t
  misc_feature (351)..(351): n is a, c, g, or t
  misc_feature (356)..(357): n is a, c, g, or t
  misc_feature (359)..(359): n is a, c, g, or t
  misc_feature (365)..(365): n is a, c, g, or t
  misc_feature (368)..(368): n is a, c, g, or t
  misc_feature (371)..(371): n is a, c, g, or t
  misc_feature (374)..(374): n is a, c, g, or t
  misc_feature (376)..(376): n is a, c, g, or t
  misc_feature (379)..(380): n is a, c, g, or t
  misc_feature (385)..(385): n is a, c, g, or t
  misc_feature (387)..(387): n is a, c, g, or t
  misc_feature (393)..(393): n is a, c, g, or t
  misc_feature (396)..(396): n is a, c, g, or t
  misc_feature (401)..(401): n is a, c, g, or t
  misc_feature (403)..(404): n is a, c, g, or t
  misc_feature (406)..(407): n is a, c, g, or t
  misc_feature (409)..(410): n is a, c, g, or t
  misc_feature (414)..(415): n is a, c, g, or t
  misc_feature (422)..(422): n is a, c, g, or t
  misc_feature (430)..(430): n is a, c, g, or t
  misc_feature (433)..(433): n is a, c, g, or t
  misc_feature (437)..(437): n is a, c, g, or t
  misc_feature (439)..(440): n is a, c, g, or t
  misc_feature (443)..(443): n is a, c, g, or t
  misc_feature (452)..(452): n is a, c, g, or t
  misc_feature (458)..(458): n is a, c, g, or t
  misc_feature (489)..(489): n is a, c, g, or t
  misc_feature (492)..(492): n is a, c, g, or t
  misc_feature (498)..(498): n is a, c, g, or t
  misc_feature (515)..(515): n is a, c, g, or t
  misc_feature (536)..(536): n is a, c, g, or t
  misc_feature (555)..(555): n is a, c, g, or t
  misc_feature (563)..(563): n is a, c, g, or t
  misc_feature (586)..(586): n is a, c, g, or t
  misc_feature (598)..(598): n is a, c, g, or t
  misc_feature (624)..(624): n is a, c, g, or t
ctcttccacaaaacatgcagttaaatatctgaggatattcagggacttggatttggtggcaggagatcaacataaaccaagacaaggaagaagtcaaagaaatgaatcaagtagattctctgggatataagaggcagccgaagagttcacaagtgtgaagcctggaagccggcgggtgccgctgtgtaggaaagaagctaaagcacttccagagcctgtccggagctcagaggttcggaagacttatcgaccatggggaggggnntnctgnttntncnntnctgntgactgnacgntggtgnccgtntcntgngaaccaccgcnagccnnttntncnntngcngatgccgntttanngntgggtntgnacncantntanngcccntncagccngancttantnngnngnnttcnngtgtgtntcatgccntcnagantnnacncataaattngttgtntgagccgggctctggtaggggccctgtagtngtntgatcntggtcggagtgttgctnaatggtcacgtatagccttgnggagtgtatgatattgggngctaatantggtgacacttcaaggatgcagntggcgctttctngagagatagtttttggctgtacgggngtgggagccttcacggtcgtgggatcattcgggcccc

SEQ ID NO: 54328 - DNA, 1505 bp, Homo sapiens
ctcttccacaaaacatgcagttaaatatctgaggatattcagggacttggatttggtggcaggagatcaacataaaccaagacaaggaagaagtcaaagaaatgaatcaagtagattctctgggatataagaggcagccgaagagttcacaagtgtgaagcctggaagccggcgggtgccgctgtgtaggaaagaagctaaagcacttccagagcctgtccggagctcagaggttcggaagacttatcgaccatggagcgcgcgtcctgcttgttgctgctgctgctgccgctggtgcacgtctctgcgaccacgccagaaccttgtgagctggacgatgaagatttccgctgcgtctgcaacttctccgaacctcagcccgactggtccgaagccttccagtgtgtgtctgcagtagaggtggagatccatgccggcggtctcaacctagagccgtttctaaagcgcgtcgatgcggacgccgacccgcggcagtatgctgacacggtcaaggctctccgcgtgcggcggctcacagtgggagccgcacaggttcctgctcagctactggtaggcgccctgcgtgtgctagcgtactcccgcctcaaggaactgacgctcgaggacctaaagataaccggcaccatgcctccgctgcctctggaagccacaggacttgcactttccagcttgcgcctacgcaacgtgtcgtgggcgacagggcgttcttggctcgccgagctgcagcagtggctcaagccaggcctcaaggtactgagcattgcccaagcacactcgcctgccttttcctgcgaacaggttcgcgccttcccggcccttaccagcctagacctgtctgacaatcctggactgggcgaacgcggactgatggcggctctctgtccccacaagttcccggccatccagaatctagcgctgcgcaacacaggaatggagacgcccacaggcgtgtgcgccgcactggcggcggcaggtgtgcagccccacagcctagacctcagccacaactcgctgcgcgccaccgtaaaccctagcgctccgagatgcatgtggtccagcgccctgaactccctcaatctgtcgttcgctgggctggaacaggtgcctaaaggactgccagccaagctcagagtgctcgatctcagctgcaacagactgaacagggcgccgcagcctgacgagctgcccgaggtggataacctgacactggacgggaatcccttcctggtccctggaactgccctcccccacgagggctcaatgaactccggcgtggtcccagcctgtgcacgttcgaccctgtcggtgggggtgtcgggaaccctggtgctgctccaaggggcccggggctttgcctaagatccaagacagaataatgaatggactcaaactgccttggcttcaggggagtcccgtcaggacgttgaggacttttcgaccaattcaaccctttgccccacctttattaaaatcttaaacaacga

SEQ ID NO: 54329 - DNA, 1593 bp, Homo sapiens
ctcttccacaaaacatgcagttaaatatctgaggatattcagggacttggatttggtggcaggagatcaacataaaccaagacaaggaagaagtcaaagaaatgaatcaagtagattctctgggatataagaggcagccgaagagttcacaagtgtgaagcctggaagccggcgggtgccgctgtgtaggaaagaagctaaagcacttccagagcctgtccggagctcagaggttcggaagacttatcgaccatggtgagtgtagggtcttggggtcgaacgcgtgccactcgggagccacaggggttggatggggcctcctagacctctgctctctccccaggagcgcgcgtcctgcttgttgctgctgctgctgccgctggtgcacgtctctgcgaccacgccagaaccttgtgagctggacgatgaagatttccgctgcgtctgcaacttctccgaacctcagcccgactggtccgaagccttccagtgtgtgtctgcagtagaggtggagatccatgccggcggtctcaacctagagccgtttctaaagcgcgtcgatgcggacgccgacccgcggcagtatgctgacacggtcaaggctctccgcgtgcggcggctcacagtgggagccgcacaggttcctgctcagctactggtaggcgccctgcgtgtgctagcgtactcccgcctcaaggaactgacgctcgaggacctaaagataaccggcaccatgcctccgctgcctctggaagccacaggacttgcactttccagcttgcgcctacgcaacgtgtcgtgggcgacagggcgttcttggctcgccgagctgcagcagtggctcaagccaggcctcaaggtactgagcattgcccaagcacactcgcctgccttttcctgcgaacaggttcgcgccttcccggcccttaccagcctagacctgtctgacaatcctggactgggcgaacgcggactgatggcggctctctgtccccacaagttcccggccatccagaatctagcgctgcgcaacacaggaatggagacgcccacaggcgtgtgcgccgcactggcggcggcaggtgtgcagccccacagcctagacctcagccacaactcgctgcgcgccaccgtaaaccctagcgctccgagatgcatgtggtccagcgccctgaactccctcaatctgtcgttcgctgggctggaacaggtgcctaaaggactgccagccaagctcagagtgctcgatctcagctgcaacagactgaacagggcgccgcagcctgacgagctgcccgaggtggataacctgacactggacgggaatcccttcctggtccctggaactgccctcccccacgagggctcaatgaactccggcgtggtcccagcctgtgcacgttcgaccctgtcggtgggggtgtcgggaaccctggtgctgctccaaggggcccggggctttgcctaagatccaagacagaataatgaatggactcaaactgccttggcttcaggggagtcccgtcaggacgttgaggacttttcgaccaattcaaccctttgccccacctttattaaaatcttaaacaacga

SEQ ID NO: 54330 - DNA, 364 bp, Homo sapiens
taattctgccctttaaaatgcatcatttaccctagaatctctgtcaccttaagtggtctgaatgatgtgtccctcactgttggcttcctcagttctctcagcattctgtgcgccgaagcctccttaggccccctgagaatatccagaggtgatgaggcccagcccctgtccctgagtttgccatctggctgggggagaggcaggcactcttagctctgatacctgcagactgatttgtcttaggagggttcgcagagttggtagagtctccaagaaagcgtggatcacctcctggcagagagagcagggcaggcttcaaagaggaggtagcctgtaatctcaccttgaaggatttcaatagatg

SEQ ID NO: 54331 - DNA, 133 bp, Homo sapiens
ctgggatggagtgcacacgagcaccagggagcaattcccagaagggctgccctgctaggagactgcacaggaatctcctaacagaggccacggtgcgcaggaatactggaagggatgcgagatttctatgggc

SEQ ID NO: 54332 - DNA, 279 bp, Homo sapiens
atgatcatgctgccgcactccaacctaggccacggagtgagaccctgtctcaaaaaaacccttaagtggtggttgaaaaggaaaataccagttcctttttaaaaattctgaccaaaaaaaaaacctagttctgaaaattattgacagtccttttgtattctgattataatatccctgttactgagctaagccagtgttgacagtgtgaatgatgctactcacgcagtgtgatccgtctcctttcagtcttctaaatagctgagtaatccattatttaaa

SEQ ID NO: 54333 - DNA, 251 bp, Homo sapiens
cactggattggaagggcaatccagtgggagaatgcccccgcctcaccaaagggctgcaggcttctccagggtaaggggaaagggcttctcttttagaaagaggcgtccacagagctgggaggaggtggcgtggggaagcggggacagtctgcaggacagagacgtcagagccaagcgtggttggccctggtgcgcctgttctcaggaaggcatctgctggctcgagtgagggcagccaaggttcggggctc

SEQ ID NO: 54334 - DNA, 406 bp, Homo sapiens
gcttggtgaatttttataaagtgcatatgcccatgtgaccactacagaagtcaaggtttggggtgttgcctgcaccctggaagcctctttcatgcctgtcatcttcattattccccaaagtaaccccaatgagacttctaccatcacagaatagtttttcctatttttaaacgtcatttaaatgaatcatgtggtttttactcttttgtctggtttcatttgctcagtgttatgtgcctgagattcattcatgcttttgcatatagcagtacttcattcttttccattgctatacagaattcctttgtatgatgatattacaatttatttatccattctactgctgttggacatttgagtatttctagctttttgttatcacaataaaggtgctatgaacatcctt

SEQ ID NO: 54335 - DNA, 403 bp, Homo sapiens
aatgaactgtggcaaagaataaaaggttctctgagaatagattattaattattataatgtctattgaaaaacttcgcaagtaaaaagagaaccaaattcacttttaaagattggtgtgcaggtggtggggaggggccgcacactccttcctcaccacgtttttttttttaaaggttggacatgcattgttgcaaggttttcaatgtgtgctatacacagaaaagtcaaaggttactcctttattcacaactgaatttccattcccaattcatattattgaaatgtgtaattctgactttctccatttgcatcgctttatttttaacactcttataagcaaactgttataaataccatgacaaattattttatgaacaatttatctcagtaacggtgacctctg

SEQ ID NO: 54336 - DNA, 2618 bp, Homo sapiens
gaattcctttttttttactaatgaaacactgcagattagtatccccaaacaattcattttctgacgaaactcttaaagcccagtttcagaacataagctttaagcaacaagcaatcttgtgttaatctgagctctgttacagctctgccgtaatctcagccaaattgcttcatctgtacgtggtgataccaccatctttgtaatattgtggtgaggattagagatgtatgtaaaagtgcatgcactgcctaatacccaagaattgctcaataaatgtcagctattactactcttactgacttccaactatgtgcagattatggtggaaacatgtgatacagcagatacagtacttaaatgaaaatgtcaaaattgtacaactaatttaagagtgggaaatgacagtaatgctaaattttcctaagaatatgtatgaaaaatagcacttccttgatggaacatacatttttagaacagaaaccttatgttataatggtaaaactagagagtcaaagtctctagttctaactctggctatgaccttatctagttgcatggcttttgacaagacaactgctcccctctggagttcagttttgtcatctggctggatttgagtaatctcaaataatctctaaagtcctttgcagctttaaattatctattgagtgtgataaagattacatcagcttgcttttcatcctgcacttcatttttggttcttgttgtttgcttaacttgcactttagagtcataagcaattcacacagacaacacaactaaagaactgataatatcagacttgcagggtaatccaaaatgaagtttcaacaaggaggataaaacaaaatagaatcacactgaactctttaatagggccaaagtaaaccccaatgtttattctccagtcatttcattaagttattatatggaaaatatgcctggtagaatcttatacattcactgaaatagtctccacagaaaataataggctcatagtgaaataaaataccactttcttttctctcatcaggttgatctttaaataaagcaaaaatttatccaaagaagggctttcatcaagaaattaaagagagaaattacaagccatagagaaactgggcatttctatactagagaaaccacctaaaacaactgtatggagtaagatgaaaggtactgaatatgcctggaagaaattttacctagtgtgacatttttgctcatctttttgtcacaaaaggctgctaaggaagagagaatacagttttctagagaataagagtgcagtgtaaaaatggaaaccacaatttcagaaattcatgtagaaaacaaggatgagaagagatcagcagaaggtagtcctggggctgaaaggcagaaggaaaaggcatccatgctttgcttcaagagaagaaagaaagcagccaaagcactgaagcccaaagctggctctgaagctgctgatgtggcaaggaagtgtccacaagaagcaggagcttctgatcagccagagcccacacggggggcctgggcctcactcaaacgtcttgtaacacgcaggaaaaggtcagagtcttcaaagcagcaaaagccattggagggtgaaatgcaacctgcaataaatgctgaggatgctgatctttctaagaaaaaggcaaaatctagacttaagattccctgcataaaattcccaagagggccaaaaaggagtaatcattccaaaattatagaagactcagactgcagcatcaaagtccaggaagaagctgaaattttggatatacaaacacagaccccattgaatgatcaggcaacaaaggctaagtcaacccaggatctaagtgaaggcatctcacagaaagatggtgatgaggtctgtgaatcaaatgtgagcaatagcataacttctggagagaaagtgatttcagtagaacttggattagataatgggcattctgctattcaaacgggaactctaatccttgaagaaattgaaacgatcaaggaaaaacaagatgttcaaccccagcaagcaagcccacttgaaacttcagaaacagaccatcagcagccagtactttctgatgttcctcctttacctgcaattccagatcaacaaattgtggaagaagccagtaacagtaccctagaaagtgcaccaaatggaaaagactatgaaagtacagagattgtagctgaagaaactaagccaaaagatactgaattgagccaagaatcagattttaaagaaaatgggatcactgaagagaaatccaaatcagaagaaagcaaaagaatggagccaattgctattattattacagacactgaaatcagtgaatttgatgttacaaaatctaaaaatgtccctaagcaattcttaatttcagctgaaaatgagcaagtaggggtttttgctaatgataatggttttgaggatagaacttcagaacaatatgaaacactcttaattgaaacagcctcttctctagtcaagaatgctattcagttgtcaatagaacagctggttaatgaaatggcctctgatgataataaaataaacaatcttctacagtgacttactctccagagtcacggcagaaaaaaaggaattc

SEQ ID NO: 54337 - DNA, 309 bp, Homo sapiens
accatgttggccaggctggtctccaactcctgacctcgtgatccgcctgccttggcctcccaaagtgctgggattataggcatgagccaccacacctggccaactcctgcagttttaagtccatatgacctcaggagcaggtgacctcaggagcagacctcaggagccacctgggaggtggcttagaggctgctcccatcccacctgcaaaaatggtggggcctggacatggtctcaagcctcttccgtacccccagagctagaagtcctttaagccaggctctgcttctttatcgagtggccttgctg

SEQ ID NO: 54338 - DNA, 392 bp, Homo sapiens
tttcttttacttgtagtgttcattgatgtttaatgtaattcttgatttagctgggtttcctctatcattttatttttgttttctgcctgactcctctggtttttgttcatctgttcctccttccccatcttttaaaatgacttgaatactttttcttagaatgcatttagttttaatttttctgtcagcagtttagctattctttgcattatttttgacagtggttgtgctaggattccatcatacatccttaacttttcacagtccatttacagttaatcataggcccttcacataaagtatggacatctggcttcattatagccccagaaccacccccatcccttaataacagttgttgtaagtaatgcatctacatatgtcgtgagccc

SEQ ID NO: 54339 - DNA, 164 bp, Homo sapiens
gaatatttaaaatacttatggaaacaaatgatttttaagtgctgtcaggagcttgagaaacatccatttataaccaaacaattgagaagctcattaaaaatagtttttagccatttattacaaagcttctctaactacttttattgaaataccctttgaaattt

SEQ ID NO: 54340 - DNA, 334 bp, Homo sapiens
atttattataaggtactggtacacacaattatggaagatgagaagtcccatgatctgccatcttcaagctggagacccaggaaagctagtgttggtgtttgaaagcctgagaaccaatggtgtagatttcagtccaggtctgaaggcctgacaaccatgagtaccaatgacagaagactgatgtcctagctcagtcaggtagaaggaagatgattccaaattcctctgcttttttgttctattcagctatcaatggataggataatgccactcacactagggagggccatctgctttattcagtttaccaattcaaatgctaatctcttccgga

SEQ ID NO: 54341 - DNA, 198 bp, Homo sapiens
cttgcattcctcagcacattcccgttaagccattttcattttgttattggtactcgttagagtgtttctctgacattacccaagacatggatattttaggttttaggattatgttatgtccttcagtcataaagacagttgcagttaatgcccgggagcaaaccaataatcgtctctctaatgatgtgttctatactt

SEQ ID NO: 54342 - DNA, 365 bp, Homo sapiens
ctgttgaagggaatccagtgggagaatagagacattgtacaagtttttgaagttctgatccccaaattcctatgaatttttggtgttttgatccagaattggggtgcaatattttccactgctcgtgctttttctggagggctttaacttatatttctcaagcctgtcaaaaaccttagttattggggtgatttctggccagatggacctctctcatgggtatgacaggctgaactattggcccgagtcctgatttttggcagagtccagacctgtgccatgactgggataagtaggtaattagggattaattagggaagcagagaggtaggtgaagtagagtggtgagaaagtggttcactagc

SEQ ID NO: 54343 - DNA, 468 bp, Homo sapiens
gcaggggcagccgctcccagcctgatacctcatggcagccacacttgcacaaatctttaattgtttagtttaaagaattgtgttttgaccgcgaggggattttggctggagctcaagaagtgataatgatatttcgctgccaagacgtctccttggctctctgtgtgttaatgtgcactttcaagacgctccaattaactgcatcagctctcagggagagaaagggagagggagcgggcaggagagagaagggaaggagaacactggcgatgattgggaggaggcgatggagaggaaaagagacagcccacccccccaatctttttactagcaaacaaattgggggggatgggtgacaaagttttgaagatgagctccaagtgaagtggtgtctcatgctttggagggggagacattgatgagacagggaaaagtcttgaggtcaggtgccctggcccaataggaggc

SEQ ID NO: 54344 - DNA, 260 bp, Homo sapiens
  misc_feature (195)..(196): n is a, c, g, or t
tagcattagaagaaacacctaatgtcaatgacaggttgatgggtgcagcaaaccatcatggcacatgtatacctatgtaaaaaacctgtacgttctgcacatgtatcccagaacttaaagcataataataataaaaaagattttcctataaaataacttgactatgagggaatagaggtaaggaacggcccctgnngtatatgccaggtggggaccagaagtcgggaaggcacctaccacctgccctggctttcctcccc

SEQ ID NO: 54345 - DNA, 466 bp, Homo sapiens
tatctgggtacctgttcagttccgccagtcacaaatttggtctccaatttagtatagataatattgtttattgagtactattctctaccacagtctctgctaaacactttgtaaacattgttccatttaatactcaccaccctgataggtagtggtatatgcattttggaggagagagcactgagggttaataataactttcctcaagtcagctaactagtaagtgctcaaacctaggttttcataacttcagagtctgtgtgctcattcatgtagtagctgtgcagaaaaattaacttggctggactgtttgaagaaattagttcatatcagaaactgttttttctttgtttgttttgtctgtgactgggtcttgttctgttacccaggctggagtgtggtggcgtgatcatggctcactgcagcctcaatttcccaatccccttgtctcaggctcccaagtagt

SEQ ID NO: 54346 - DNA, 6741 bp, Homo sapiens
agcactcaagaaattatgattattttgaccttagacctctcttaactgtctgaaactggggtttcttattttcaggggaagaaacaggacacaggcagtctagaggctcctgccagccgagacaatctccaattaaaagtcggcatcgattaaatatttgctgaacaaagtaaactgtctctccaccgccgggctgagcgcccactcgagatccggcccggaacaagggcgagactggcccgcgggtcccacactccctgtaaggggtggagaacacgcccacacgcccagaccaacaggcgaggctgttcgaggaccttgttagccacctcagccccgcccgccgcgagccttctgctggcctcccgttctgcagggaccctccctagccagcccggccgcgtcccacatccgccgacacgccccttccggcctaatccccgcccctcaagcaccggccccgccccataggccccgtccgtggccccgccccgccgcgagctggcgccgggtcctctcagcgcccgccggcggccgcgtccacccccgacgctctgaggtcaccgactgggccggcccgcggggggcggagggacggagggaagatggcggcaggggccggatattggcgccgcctcccccaatcccggagccggcgcagatgaggcagttcggctggggccagcggcgctttggaacccgaggtggggggaccctggcggtggggcctggtcctgctatatgccggcgcctcggctagagtgagcggcggcgacgcctctttcctccatctctttccctgtcgctgcgagagcgagcgggcggcggaggcggcggcggcggcggggccgggatggaggacgttaactccaacgtgaacgcggaccaggaggtgcggaagctgcaggagctggtgaagaagctggagaagcagaacgaacagctgaggagccgctcgggggccgtgcagggcgccggctcccttgggcccggcagcccggttcgggccggcgcgtccattccctcctccggcgcggcgtctcctcggggcttccccttgggcctcagcgccaagtcgggcggcgggcccgggtcgggcccgaggcggacgagtagcgaagagctgcgggacgccacctccttgctagcggcgggcgagggcggcttgctggacgaggtggagccgctgcggcccgacgagctggagcgcctgtcaggctgggaggaggaggaggagagctggctgtattcatcaccaaagaaaaaacttacaccaatgcagaaatcggttagtccattagtttggtgcaggcaagttttggattacccaagtcctgatgttgagtgtgctaaaaaatctcttatccacaaacttgatcaaactatgtcagctctcaagaggcagaatttatataataatcctttcaactctatgagttacaccagtccttacagtccaaatgccagtagcccatacagcagtggcttcaattctccatcctcaaccccagtgcgacctcctatagtcaaacagcttatacttcctggaaattcaggtaacttgaaaagctcagacagaaatcctccactcagtcctcagtcctctatagatagtgagttaagtgcttcagaattagatgaagattcaattggatccaattataagctaaatgatgtaactgatgtacagattctagcccggatgcaggaagaaagtctccggcaagaatatgcagccaccacgtctcggcgcagttctggttcatcttgcaattctacaagacggggtacttttagtgatcaggaacttgatgcacaaagtttagatgatgaagatgacaatatgcatcatgcagtataccctgctgttaacaggttttcaccatcaccacgcaattcacctcgaccgtcacctaagcagtcacccagaaattcacctcgttcacgatctcctgctcggggaatagaatatagtagagtgtccccacagcctatgattagccgcttacagcaacctcgcctttcacttcaaggccatcccacagatttacagacaagcaatgttaaaaatgaagaaaaactaagacgcagtcttccaaacctgtcccgaacatctaatacacaagttgactcagtgaaaagcagcagaagtgactcaaattttcaagtgccaaacggaggaatacctcgtatgcaacctcaggcttcagccataccttctccaggcaaattccgttcccctgcagcaccatctcctttggctcttcggcaaccagtgaaagcatttagtaaccatggctctggttctcctggtagccaagaaataacacagctcacacaaaccacctcctcacctgggcctcctatggttcagagcacagtctcagcaaatcctcccagcaatatcaacagcgctactctaaccagacctgcagggacaactgcaatgagaagtggcttgcccagacccagtgccccttctgctgggggcataccagtgcctcgcagcaaacttgcacagcctgttcgcagatccttgccagctcctaaaacctatggtagcatgaaagatgacagttggaaagatggctgttactgaccagcaaagacaagaatgcagaagtccacggcttcatggatacccttcaccaggctaaaaaacaacttttatatgcagactgttcagataagactcttgggatttataaaatcccagccctctctgtcttaattagcacaaaccgacagagatcatcaaacagcactttaatgacatttaacatcagatgtgtttggtaatcatacaatcactctccatagaatcacttttagttttgtttaatagaaactaggttgatttttaaaaaatatttgacagaggccaatatctgggcaaatacctaatggatgccaaagagaaatgcccatttgtaaatgagaaaaatgcccatttgtgcacaagaaaatggtgaattcaggctatccaaaacttcacattcaacctaatttactgtataaatagtatcaataaatatttgtgttaatgagaactaatattctgactaattatctaaagtgtttcactagtacaccaggaaactacagattgagattagggggtgggaggaaagaaacctgggctagagattaaaacattcctaaatttagcagaatttcagaaatgatttttgcagattcattagaaaagaaaaattgtcatttaatcttaagttttggatgtagctcacatgtcaccaccaccagatagtgttacagcatgtatccatcatgttgcattgacacatcaaacttgtgtgtgtttgttttgattgccaaaagggcttaatatcagttgtacaatctttctgaactttatagttcctggctcaggaaagatggcctttgctattgaagccaacttcttcacatgctgttatctttacagaactaagagatcttgtttctattagcaggttttcatgataggaaagaacaagtagtgtgtgtctttattcttgatacaacaccacctcggtgcttgcaacctggaacaaaaccataccatgagagagagggggaaaaaaatctatgcacttaacctacaaaatctctggtgatgacagttgtattgttgctattacatggcataacggtctattatgtggtaggaaaatatagcctgctaaatcctacttaagttgatccactttaaactgagtaactgtataaaacatctattgaaaattcttttccttttgacttagattctgccttacatcaatttttgcatttttggtaaaaaaaaaaccctactacgtatgactctaacctgatacttgctctctaatggctcttaatatatccttgaaatcggctatttcaattttatcagacttttaccagagtaaaacttgcttctgtagcaggcctctcattttttattatgaggtctgtttttaaatacttaatttgaacagctctaagatattgtcacttaggtcatctaaaagcttttagagatttgaacataagttcatttcctgttaatcaaagacattccgtaagttggcaaaagaaattgggagagagaaatagaaggcttgatattctggacagcattaaggttgataggttgatgataaaaacttaaaaccaggacctccattctgtcatgactgacaccatggtagtctgtcagcttgaccagtggagagtcattcatttagcacaagcagctggagatttaaactgccagtactatgtatttggtgtataatgcaaggaagaaactttatccttgaatttgagggtgatggggtgggtcaggaaaggatggcgccagaattctacatgataatgaactaaaaaatgttgcttttcagaggaagataaagcatcttcttttgggaggggggtatctcatgtctaagtaagtaaaagaaagaagtagctactgtctcttttaaaaaccacgtacaaaacagaacaagtctcagttttcagtgcaacatttcaaaaaatatatatgctgcaatctaataattaaaaggaattttacctattatgaaacatattacattttttaagttagataatcagtttcaaaaggagtattcaggttatttaactttgtttttaaatggctgcatcagaaaaaaatgtctatttttttttattaaaatatttcatcacttgttaaaacatatttttgatctgagtttggtaaagtattattttacctgctgttgtactaccacagactgttgacttttagtttcttaaagagaaaaattgcctttttactagaaagcctttgtatattgcaatttttctgtttgggaaaatctaaggatttactgtggttagtcttacagaagaaatgtggatttgataaactagtgcctatgattttaacttatgtttgatatatagtagtaagggttttatgaatgttgattattttgtgccaacagcccagaattgtcacttatatgtaagcagaaaacaatgagctctgcttccaaagttatttaattttctcagtgtttgaatgttattttttgtaagtgtgttaataaaagtgtaaagaattggaaaaaatataaatattcttaactcaagcatttgctggatcatttttctacaaaacttgtttgtacaatataaaacactctctgaagagttgactttttttcagtttcgtatcctggaaatcacattttgtaaaactggggaccattcataattgtcagatactttttaaaattatctcaatacatcacttttataaaaaaaaaaagtttttttgaaagaaaattagatacatatgtggccccagatgtttgtataactctagaatgatctagactatgtatgtttaaattaactttttattgaatgtacaggtgtccatttttgacgttaagcatggtcctttaaggtcacatgacgtttgatttgcaaacatttctatagccgaacttgtatatgtggttgcctccttaataaacagcctgaccataatgtttattattaaatttatattctttaagtgtttaattaatctctggatatggtaagattccttttttcctctcagttgcctacacttggttttaataaattactcagttgagtttttctttaaccacagaaacccaaatcatattgccctttcagatttagtcttcatggggttggattatgtcttatattttctctgtcagagttatttcatatatggattttacttgaaggaaatttatagtttactctaaattgatttgttcttggaacttttttacctgctgtgaattgatacctagttataaaaagctagcatttgcctagatcataactatgtatggtatctagttagaaaaaaacaagcaaaaagctattatgagtttccaagagggacaattaatgcattttcataccaaatgcgaatatttaggtgatcacgtgcatcttttcttgtatggatggaaaaatcaagaattgtacactgtttaatgagttctccatattcctttaggagatatttgctttgcaattacatgttacaattagaataattacaattaaaataatattacatgttacaattagattaatagtgatgagagggaaaaaagacacccttctgtttttttctctcaagccagtctaaaaacttgaagagccatttaaaattaaatgtcactatacttgtattataaatcaatacataagtttaaacctgttatatactcagtgcaacagaaaaacccatatggaggttcaaccactgatgtattttgaatgatcctaaatataagtcttgggtggctaaatggccctctgcttaccagtctgaaaatgaaaccgattatactcatcggccttatttactgtaatacaaactggttaaaactatgttaactgaatgctagtttgaaacaaattatctacattaagtcatcttaatgttttctctttaaaagaaataaaaaaatctgtttcttctgatttcgaaagtaatagaaactctgctgtagaacataaactaaaaatattaaaaagtataaaggtaaaaaatgatagttgtctgcaatcccataatccggaaatattgaagtactgtccgtaacatggttatgacatgttaagtggaagggtagaaggtctttttttttttaaggagaaaatgtttcttttaaataaatgtttcttatgtaaaaatgttgacatgagtttgct

SEQ ID NO: 54347 - DNA, 3046 bp, Homo sapiens
agcactcaagaaattatgattattttgaccttagacctctcttaactgtctgaaactggggtttcttattttcaggggaagaaacaggacacaggcagtctagaggctcctgccagccgagacaatctccaattaaaagtcggcatcgattaaatatttgctgaacaaagtaaactgtctctccaccgccgggctgagcgcccactcgagatccggcccggaacaagggcgagactggcccgcgggtcccacactccctgtaaggggtggagaacacgcccacacgcccagaccaacaggcgaggctgttcgaggaccttgttagccacctcagccccgcccgccgcgagccttctgctggcctcccgttctgcagggaccctccctagccagcccggccgcgtcccacatccgccgacacgccccttccggcctaatccccgcccctcaagcaccggccccgccccataggccccgtccgtggccccgccccgccgcgagctggcgccgggtcctctcagcgcccgccggcggccgcgtccacccccgacgctctgaggtcaccgactgggccggcccgcggggggcggagggacggagggaagatggcggcaggggccggatattggcgccgcctcccccaatcccggagccggcgcagatgaggcagttcggctggggccagcggcgctttggaacccgaggtggggggaccctggcggtggggcctggtcctgctatatgccggcgcctcggctagagtgagcggcggcgacgcctctttcctccatctctttccctgtcgctgcgagagcgagcgggcggcggaggcggcggcggcggcggggccgggatggaggacgttaactccaacgtgaacgcggaccaggaggtgcggaagctgcaggagctggtgaagaagctggagaagcagaacgaacagctgaggagccgctcgggggccgtgcagggcgccggctcccttgggcccggcagcccggttcgggccggcgcgtccattccctcctccggcgcggcgtctcctcggggcttccccttgggcctcagcgccaagtcgggcggcgggcccgggtcgggcccgaggcggacgagtagcgaagagctgcgggacgccacctccttgctagcggcgggcgagggcggcttgctggacgaggtggagccgctgcggcccgacgagctggagcgcctgtcaggctgggaggaggaggaggagagctggctgtattcatcaccaaagaaaaaacttacaccaatgcagaaatcggttagtccattagtttggtgcaggcaagttttggattacccaagtcctgatgttgagtgtgctaaaaaatctcttatccacaaacttgatcaaactatgtcagctctcaagaggcagaatttatataataatcctttcaactctatgagttacaccagtccttacagtccaaatgccagtagcccatacagcagtggcttcaattctccatcctcaaccccagtgcgacctcctatagtcaaacagcttatacttcctggaaattcaggtaacttgaaaagctcagacagaaatcctccactcagtcctcagtcctctatagatagtgagttaagtgcttcagaattagatgaagattcaattggatccaattataagctaaatgatgtaactgatgtacagattctagcccggatgcaggaagaaagtctccggcaagaatatgcagccaccacgtctcggcgcagttctggttcatcttgcaattctacaagacggggtacttttagtgatcaggaacttgatgcacaaagtttagatgatgaagatgacaatatgcatcatgcagtataccctgctgttaacaggttttcaccatcaccacgcaattcacctcgaccgtcacctaagcagtcacccagaaattcacctcgttcacgatctcctgctcggggaatagaatatagtagagtgtccccacagcctatgattagccgcttacagcaacctcgcctttcacttcaaggccatcccacagatttacagacaagcaatgttaaaaatgaagaaaaactaagacgcagtcttccaaacctgtcccgaacatctaatacacaagttgactcagtgaaaagcagcagaagtgactcaaattttcaagtgccaaacggaggaatacctcgtatgcaacctcaggcttcagccataccttctccaggcaaattccgttcccctgcagcaccatctcctttggctcttcggcaaccagtgaaagcatttagtaaccatggctctggttctcctggtagccaagaaataacacagctcacacaaaccacctcctcacctgggcctcctatggttcagagcacagtctcagcaaatcctcccagcaatatcaacagcgctactctaaccagacctgcagggacaactgcaatgagaagtggcttgcccagacccagtgccccttctgctgggggcataccagtgcctcgcagcaaacttgcacagcctgttcgcagatccttgccagctcctaaaacctatggtagcatgaaagatgacagttggaaagatggctgttactgaccagcaaagacaagaatgcagaagtccacggcttcatggatacccttcaccaggctaaaaaacaacttttatatgcagactgttcagataagactcttgggatttataaaatcccagccctctctgtcttaattagcacaaaccgacagagatcatcaaacagcactttaatgacatttaacatcagatgtgtttggtaatcatacaatcactctccatagaatcacttttagttttgtttaatagaaactaggttgatttttaaaaaatatttgacagaggccaatatctgggcaaatacctaatggatgccaaagagaaatgcccatttgtaaatgagaaaaatgcccatttgtgcacaagaaaatggtgaattcaggctatccaaaacttcacattcaacctaatttactgtataaatagtatcaataaatatttgtgttaatg

SEQ ID NO: 54348 - DNA, 2458 bp, Homo sapiens
  misc_feature (556)..(556): n is a, c, g, or t
  misc_feature (1907)..(1907): n is a, c, g, or t
aaaattatttaaatgtttaaaaatattgtttaaataaataacattcattgttgccaggtctccggcaagaatatgcagccaccacgtctcggcgcagttctggttcatcttgcaattctacaagacggggtacttttagtgatcaggaacttgatgcacaaagtttagatgatgaagatgacaatatgcatcatgcagtataccctgctgttaacaggttttcaccatcaccacgcaattcacctcgaccgtcacctaagcagtcacccagaaattcacctcgttcacgatctcctgctcggggaatagaatatagtagagtgtccccacagcctatgattagccgcttacagcaacctcgcctttcacttcaaggccatcccacagatttacagacaagcaatgttaaaaatgaagaaaaactaagacgcagtcttccaaacctgtcccgaacatctaatacacaagttgactcagtgaaaagcagcagaagtgactcaaattttcaagtgccaaacggaggaatacctcgtatgcaacctcaggcttcagccantaagtatccttcttatgctttcatgtatcagttatttaaagagaagtgaaaattttagatatttgttttatgctgaaaaaccgttttttatgctgaaaaaccgttttaaaccatagctatagtaaaatttagtgtttattagttgctggatgataatcaaagttatattacaatttaaaattttctatgtaggatacttgattctgccagtacatctgtctatacaaaactctggtctctccagaattttaaaataagcaaaatgtaactattaaaaaagtaggtgtagcttttgcttatagatactagaattagaaataaaaaccagtagagcatccaaaaatatatgtcccttagtacgtaaattttctttaataacctccactttaaaaatacctaaaagtttgattattacataattttagaatcatactcaaaataatccattgttcaaacctgcaatatattaaatctgttatcaaagttgaattgttgaagttcttttctttccaaaacaaaagtataccaggagaactcttggatgatctcattttatttctgcatctgttgagataagatttctggttttgatttgattttctgtgtttgttaaggctattttaatgaaaaaatacaatattgaatcaatatgtatgccaaattaattcatagtcctaatcctacttatagattaaaatttgagataaattgccagaaaccatcactttttaagaattgatcaggacttgtctctttaaattatctttcagaaaacaaattcttagagttaaagctaaactcttaaacagagaaggtgaattttagaagtatagtagaaagaacacatgtagattataatttttaataagttttggtcattgggtggttactaacccatgaatgtgacagtatttgtattcaactattatttgtaatagatacttgagtttttattttgtggcaagtagtatgttaaatcaatacaggcatttctactatagcacaaaatatgcactccttaaaaacctcacattctgcagtattacacaataaaaatgataggatgatgaggagtggagggaatagtcctggaacagaccactgaaaacccaagcaactttcttagaaagcattaataaaaacaataatgatactagcacagttaaattcatgttaaatctttattaaatactccaggagatatagaacttcatttttaaagaaagatttgaaggtaatgtgatggaaaggaaaggttgagactgttgaattaaggaaacatatgcagcatagacgaagatcagagagaatcatacagtaagatcatctaggacaaaatagccaaactganccaagaagtagtgatgttggagtaaatgggcattgtgtatattaatgtacaagttgattttaaaggaatttcaaaaaattactttttagctaggatagatttgagcgtgtagtcaaaacggttttaaataaatgattacagttatttttatgatcttatgaacgctcagtattcatcccatgtgtttcacagctcacatcagtcccgtatatgagctctgagacacaaagggtgcatattcactggggtccttgtagggacacaagggatgcttattcactcagatccttgtaggtacacaatggatgcatattgtctcagatccttgtggcatattactatcagtggttgaagtggtagctgtgttatattctttcattttctcaaggctatgaagaagtgatacaaacgagtttgttgactgttcacttataacttgtttattaagcagttaaaaatttgaagatatttaacccttttttcattttcatctttttttttcttttttttttgattgagtcagggtttcactccagtctattgaaagaaaa

SEQ ID NO: 54349 - DNA, 6682 bp, Homo sapiens
agcactcaagaaattatgattattttgaccttagacctctcttaactgtctgaaactggggtttcttattttcaggggaagaaacaggacacaggcagtctagaggctcctgccagccgagacaatctccaattaaaagtcggcatcgattaaatatttgctgaacaaagtaaactgtctctccaccgccgggctgagcgcccactcgagatccggcccggaacaagggcgagactggcccgcgggtcccacactccctgtaaggggtggagaacacgcccacacgcccagaccaacaggcgaggctgttcgaggaccttgttagccacctcagccccgcccgccgcgagccttctgctggcctcccgttctgcagggaccctccctagccagcccggccgcgtcccacatccgccgacacgccccttccggcctaatccccgcccctcaagcaccggccccgccccataggccccgtccgtggccccgccccgccgcgagctggcgccgggtcctctcagcgcccgccggcggccgcgtccacccccgacgctctgaggtcaccgactgggccggcccgcggggggcggagggacggagggaagatggcggcaggggccggatattggcgccgcctcccccaatcccggagccggcgcagatgaggcagttcggctggggccagcggcgctttggaacccgaggtggggggaccctggcggtggggcctggtcctgctatatgccggcgcctcggctagagtgagcggcggcgacgcctctttcctccatctctttccctgtcgctgcgagagcgagcgggcggcggaggcggcggcggcggcggggccgggatggaggacgttaactccaacgtgaacgcggaccaggaggtgcggaagctgcaggagctggtgaagaagctggagaagcagaacgaacagctgaggagccgctcgggggccgtgcagggcgccggctcccttgggcccggcagcccggttcgggccggcgcgtccattccctcctccggcgcggcgtctcctcggggcttccccttgggcctcagcgccaagtcgggcggcgggcccgggtcgggcccgaggcggacgagtagcgaagagctgcgggacgccacctccttgctagcggcgggcgagggcggcttgctggacgaggtggagccgctgcggcccgacgagctggagcgcctgtcaggctgggaggaggaggaggagagctggctgtattcatcaccaaagaaaaaacttacaccaatgcagaaatcggttagtccattagtttggtgcaggcaagttttggattacccaagtcctgatgttgagtgtgctaaaaaatctcttatccacaaacttgatcaaactatgtcagctctcaagaggcagaatttatataataatcctttcaactctatgagttacaccagtccttacagtccaaatgccagtagcccatacagcagtggcttcaattctccatcctcaaccccagtgcgacctcctatagtcaaacagcttatacttcctggaaattcaggtaacttgaaaagctcagacagaaatcctccactcagtcctcagtcctctatagatagtgagttaagtgcttcagaattagatgaagattcaattggatccaattataagctaaatgatgtaactgatgtacagattctagcccggatgcaggaagaaagtctccggcaagaatatgcagccaccacgtctcggcgcagttctggttcatcttgcaattctacaagacggggtacttttagtgatcaggaacttgatgcacaaagtttagatgatgaagatgacaatatgcatcatgcagtataccctgctgttaacaggttttcaccatcaccacgcaattcacctcgaccgtcacctaagcagtcacccagaaattcacctcgttcacgatctcctgctcggggaatagaatatagtagagtgtccccacagcctatgattagccgcttacagcaacctcgcctttcacttcaaggccatcccacagatttacagacaagcaatgttaaaaatgaagaaaaactaagacgcagtcttccaaacctgtcccgaacatctaatacacaagttgactcagtgaaaagcagcagaagtgactcaaattttcaagtgccaaacggaggaatacctcgtatgcaacctcaggcttcagccataccttctccaggcaaattccgttcccctgcagcaccatctcctttggctcttcggcaaccagtgaaagcatttagtaaccatggctctggttctcctggtagccaagaaataacacagctcacacaaaccacctcctcacctgggcctcctatggttcagagcacagtctcagcaaatcctcccagcaatatcaacagcgctactctaaccagacctgcagggacaactgcaatgagaagtggcttgcccagacccagtgccccttctgctgggggcataccagtgcctcgcagcaaacttgcacagcctgttcgcagatccttgccagctcctaaaacctatggtagcatgaaagatgacagttggaaagatggctgttactgaccagcaaagacaagaatgcagaagtccacggcttcatggatacccttcaccaggctaaaaaacaacttttatatgcagactgttcagataagactcttgggatttataaaatcccagccctctctgtcttaattagcacaaaccgacagagatcatcaaacagcactttaatgacatttaacatcagatgtgtttggtaatcatacaatcactctccatagaatcacttttagttttgtttaatagaaactaggttgatttttaaaaaatatttgacagaggccaatatctgggcaaatacctaatggatgccaaagagaaatgcccatttgtaaatgagaaaaatgcccatttgtgcacaagaaaatggtgaattcaggctatccaaaacttcacattcaacctaatttactgtataaatagtatcaataaatatttgtgttaatgagaactaatattctgactaattatctaaagtgtttcactagtacaccaggaaactacagattgagattagggggtgggaggaaagaaacctgggctagagattaaaacattcctaaatttagcagaatttcagaaatgatttttgcagattcattagaaaagaaaaattgtcatttaatcttaagttttggatgtagctcacatgtcaccaccaccagatagtgttacagcatgtatccatcatgttgcattgacacatcaaacttgtgtgtgtttgttttgattgccaaaagggcttaatatcagttgtacaatctttctgaactttatagttcctggctcaggaaagatggcctttgctattgaagccaacttcttcacatgctgttatctttacagaactaagagatcttgtttctattagcaggttttcatgataggaaagaacaagtagtgtgtgtctttattcttgatacaacaccacctcggtgcttgcaacctggaacaaaaccataccatgagagagagggggaaaaaaatctatgcacttaacctacaaaatctctggtgatgacagttgtattgttgctattacatggcataacggtctattatgtggtaggaaaatatagcctgctaaatcctacttaagttgatccactttaaactgagtaactgtataaaacatctattgaaaattcttttccttttgacttagattctgccttacatcaatttttgcatttttggtatatatccttgaaatcggctatttcaattttatcagacttttaccagagtaaaacttgcttctgtagcaggcctctcattttttattatgaggtctgtttttaaatacttaatttgaacagctctaagatattgtcacttaggtcatctaaaagcttttagagatttgaacataagttcatttcctgttaatcaaagacattccgtaagttggcaaaagaaattgggagagagaaatagaaggcttgatattctggacagcattaaggttgataggttgatgataaaaacttaaaaccaggacctccattctgtcatgactgacaccatggtagtctgtcagcttgaccagtggagagtcattcatttagcacaagcagctggagatttaaactgccagtactatgtatttggtgtataatgcaaggaagaaactttatccttgaatttgagggtgatggggtgggtcaggaaaggatggcgccagaattctacatgataatgaactaaaaaatgttgcttttcagaggaagataaagcatcttcttttgggaggggggtatctcatgtctaagtaagtaaaagaaagaagtagctactgtctcttttaaaaaccacgtacaaaacagaacaagtctcagttttcagtgcaacatttcaaaaaatatatatgctgcaatctaataattaaaaggaattttacctattatgaaacatattacattttttaagttagataatcagtttcaaaaggagtattcaggttatttaactttgtttttaaatggctgcatcagaaaaaaatgtctatttttttttattaaaatatttcatcacttgttaaaacatatttttgatctgagtttggtaaagtattattttacctgctgttgtactaccacagactgttgacttttagtttcttaaagagaaaaattgcctttttactagaaagcctttgtatattgcaatttttctgtttgggaaaatctaaggatttactgtggttagtcttacagaagaaatgtggatttgataaactagtgcctatgattttaacttatgtttgatatatagtagtaagggttttatgaatgttgattattttgtgccaacagcccagaattgtcacttatatgtaagcagaaaacaatgagctctgcttccaaagttatttaattttctcagtgtttgaatgttattttttgtaagtgtgttaataaaagtgtaaagaattggaaaaaatataaatattcttaactcaagcatttgctggatcatttttctacaaaacttgtttgtacaatataaaacactctctgaagagttgactttttttcagtttcgtatcctggaaatcacattttgtaaaactggggaccattcataattgtcagatactttttaaaattatctcaatacatcacttttataaaaaaaaaaagtttttttgaaagaaaattagatacatatgtggccccagatgtttgtataactctagaatgatctagactatgtatgtttaaattaactttttattgaatgtacaggtgtccatttttgacgttaagcatggtcctttaaggtcacatgacgtttgatttgcaaacatttctatagccgaacttgtatatgtggttgcctccttaataaacagcctgaccataatgtttattattaaatttatattctttaagtgtttaattaatctctggatatggtaagattccttttttcctctcagttgcctacacttggttttaataaattactcagttgagtttttctttaaccacagaaacccaaatcatattgccctttcagatttagtcttcatggggttggattatgtcttatattttctctgtcagagttatttcatatatggattttacttgaaggaaatttatagtttactctaaattgatttgttcttggaacttttttacctgctgtgaattgatacctagttataaaaagctagcatttgcctagatcataactatgtatggtatctagttagaaaaaaacaagcaaaaagctattatgagtttccaagagggacaattaatgcattttcataccaaatgcgaatatttaggtgatcacgtgcatcttttcttgtatggatggaaaaatcaagaattgtacactgtttaatgagttctccatattcctttaggagatatttgctttgcaattacatgttacaattagaataattacaattaaaataatattacatgttacaattagattaatagtgatgagagggaaaaaagacacccttctgtttttttctctcaagccagtctaaaaacttgaagagccatttaaaattaaatgtcactatacttgtattataaatcaatacataagtttaaacctgttatatactcagtgcaacagaaaaacccatatggaggttcaaccactgatgtattttgaatgatcctaaatataagtcttgggtggctaaatggccctctgcttaccagtctgaaaatgaaaccgattatactcatcggccttatttactgtaatacaaactggttaaaactatgttaactgaatgctagtttgaaacaaattatctacattaagtcatcttaatgttttctctttaaaagaaataaaaaaatctgtttcttctgatttcgaaagtaatagaaactctgctgtagaacataaactaaaaatattaaaaagtataaaggtaaaaaatgatagttgtctgcaatcccataatccggaaatattgaagtactgtccgtaacatggttatgacatgttaagtggaagggtagaaggtctttttttttttaaggagaaaatgtttcttttaaataaatgtttcttatgtaaaaatgttgacatgagtttgct

SEQ ID NO: 54350 - DNA, 6683 bp, Homo sapiens
agcactcaagaaattatgattattttgaccttagacctctcttaactgtctgaaactggggtttcttattttcaggggaagaaacaggacacaggcagtctagaggctcctgccagccgagacaatctccaattaaaagtcggcatcgattaaatatttgctgaacaaagtaaactgtctctccaccgccgggctgagcgcccactcgagatccggcccggaacaagggcgagactggcccgcgggtcccacactccctgtaaggggtggagaacacgcccacacgcccagaccaacaggcgaggctgttcgaggaccttgttagccacctcagccccgcccgccgcgagccttctgctggcctcccgttctgcagggaccctccctagccagcccggccgcgtcccacatccgccgacacgccccttccggcctaatccccgcccctcaagcaccggccccgccccataggccccgtccgtggccccgccccgccgcgagctggcgccgggtcctctcagcgcccgccggcggccgcgtccacccccgacgctctgaggtcaccgactgggccggcccgcggggggcggagggacggagggaagatggcggcaggggccggatattggcgccgcctcccccaatcccggagccggcgcagatgaggcagttcggctggggccagcggcgctttggaacccgaggtggggggaccctggcggtggggcctggtcctgctatatgccggcgcctcggctagagtgagcggcggcgacgcctctttcctccatctctttccctgtcgctgcgagagcgagcgggcggcggaggcggcggcggcggcggggccgggatggaggacgttaactccaacgtgaacgcggaccaggaggtgcggaagctgcaggagctggtgaagaagctggagaagcagaacgaacagctgaggagccgctcgggggccgtgcagggcgccggctcccttgggcccggcagcccggttcgggccggcgcgtccattccctcctccggcgcggcgtctcctcggggcttccccttgggcctcagcgccaagtcgggcggcgggcccgggtcgggcccgaggcggacgagtagcgaagagctgcgggacgccacctccttgctagcggcgggcgagggcggcttgctggacgaggtggagccgctgcggcccgacgagctggagcgcctgtcaggctgggaggaggaggaggagagctggctgtattcatcaccaaagaaaaaacttacaccaatgcagaaatcggttagtccattagtttggtgcaggcaagttttggattacccaagtcctgatgttgagtgtgctaaaaaatctcttatccacaaacttgatcaaactatgtcagctctcaagaggcagaatttatataataatcctttcaactctatgagttacaccagtccttacagtccaaatgccagtagcccatacagcagtggcttcaattctccatcctcaaccccagtgcgacctcctatagtcaaacagcttatacttcctggaaattcaggtaacttgaaaagctcagacagaaatcctccactcagtcctcagtcctctatagatagtgagttaagtgcttcagaattagatgaagattcaattggatccaattataagctaaatgatgtaactgatgtacagattctagcccggatgcaggaagaaagtctccggcaagaatatgcagccaccacgtctcggcgcagttctggttcatcttgcaattctacaagacggggtacttttagtgatcaggaacttgatgcacaaagtttagatgatgaagatgacaatatgcatcatgcagtataccctgctgttaacaggttttcaccatcaccacgcaattcacctcgaccgtcacctaagcagtcacccagaaattcacctcgttcacgatctcctgctcggggaatagaatatagtagagtgtccccacagcctatgattagccgcttacagcaacctcgcctttcacttcaaggccatcccacagatttacagacaagcaatgttaaaaatgaagaaaaactaagacgcagtcttccaaacctgtcccgaacatctaatacacaagttgactcagtgaaaagcagcagaagtgactcaaattttcaagtgccaaacggaggaatacctcgtatgcaacctcaggcttcagccataccttctccaggcaaattccgttcccctgcagcaccatctcctttggctcttcggcaaccagtgaaagcatttagtaaccatggctctggttctcctggtagccaagaaataacacagctcacacaaaccacctcctcacctgggcctcctatggttcagagcacagtctcagcaaatcctcccagcaatatcaacagcgctactctaaccagacctgcagggacaactgcaatgagaagtggcttgcccagacccagtgccccttctgctgggggcataccagtgcctcgcagcaaacttgcacagcctgttcgcagatccttgccagctcctaaaacctatggtagcatgaaagatgacagttggaaagatggctgttactgaccagcaaagacaagaatgcagaagtccacggcttcatggatacccttcaccaggctaaaaaacaacttttatatgcagactgttcagataagactcttgggatttataaaatcccagccctctctgtcttaattagcacaaaccgacagagatcatcaaacagcactttaatgacatttaacatcagatgtgtttggtaatcatacaatcactctccatagaatcacttttagttttgtttaatagaaactaggttgatttttaaaaaatatttgacagaggccaatatctgggcaaatacctaatggatgccaaagagaaatgcccatttgtaaatgagaaaaatgcccatttgtgcacaagaaaatggtgaattcaggctatccaaaacttcacattcaacctaatttactgtataaatagtatcaataaatatttgtgttaatgagaactaatattctgactaattatctaaagtgtttcactagtacaccaggaaactacagattgagattagggggtgggaggaaagaaacctgggctagagattaaaacattcctaaatttagcagaatttcagaaatgatttttgcagattcattagaaaagaaaaattgtcatttaatcttaagttttggatgtagctcacatgtcaccaccaccagatagtgttacagcatgtatccatcatgttgcattgacacatcaaacttgtgtgtgtttgttttgattgccaaaagggcttaatatcagttgtacaatctttctgaactttatagttcctggctcaggaaagatggcctttgctattgaagccaacttcttcacatgctgttatctttacagaactaagagatcttgatacaacaccacctcggtgcttgcaacctggaacaaaaccataccatgagagagagggggaaaaaaatctatgcacttaacctacaaaatctctggtgatgacagttgtattgttgctattacatggcataacggtctattatgtggtaggaaaatatagcctgctaaatcctacttaagttgatccactttaaactgagtaactgtataaaacatctattgaaaattcttttccttttgacttagattctgccttacatcaatttttgcatttttggtaaaaaaaaaaccctactacgtatgactctaacctgatacttgctctctaatggctcttaatatatccttgaaatcggctatttcaattttatcagacttttaccagagtaaaacttgcttctgtagcaggcctctcattttttattatgaggtctgtttttaaatacttaatttgaacagctctaagatattgtcacttaggtcatctaaaagcttttagagatttgaacataagttcatttcctgttaatcaaagacattccgtaagttggcaaaagaaattgggagagagaaatagaaggcttgatattctggacagcattaaggttgataggttgatgataaaaacttaaaaccaggacctccattctgtcatgactgacaccatggtagtctgtcagcttgaccagtggagagtcattcatttagcacaagcagctggagatttaaactgccagtactatgtatttggtgtataatgcaaggaagaaactttatccttgaatttgagggtgatggggtgggtcaggaaaggatggcgccagaattctacatgataatgaactaaaaaatgttgcttttcagaggaagataaagcatcttcttttgggaggggggtatctcatgtctaagtaagtaaaagaaagaagtagctactgtctcttttaaaaaccacgtacaaaacagaacaagtctcagttttcagtgcaacatttcaaaaaatatatatgctgcaatctaataattaaaaggaattttacctattatgaaacatattacattttttaagttagataatcagtttcaaaaggagtattcaggttatttaactttgtttttaaatggctgcatcagaaaaaaatgtctatttttttttattaaaatatttcatcacttgttaaaacatatttttgatctgagtttggtaaagtattattttacctgctgttgtactaccacagactgttgacttttagtttcttaaagagaaaaattgcctttttactagaaagcctttgtatattgcaatttttctgtttgggaaaatctaaggatttactgtggttagtcttacagaagaaatgtggatttgataaactagtgcctatgattttaacttatgtttgatatatagtagtaagggttttatgaatgttgattattttgtgccaacagcccagaattgtcacttatatgtaagcagaaaacaatgagctctgcttccaaagttatttaattttctcagtgtttgaatgttattttttgtaagtgtgttaataaaagtgtaaagaattggaaaaaatataaatattcttaactcaagcatttgctggatcatttttctacaaaacttgtttgtacaatataaaacactctctgaagagttgactttttttcagtttcgtatcctggaaatcacattttgtaaaactggggaccattcataattgtcagatactttttaaaattatctcaatacatcacttttataaaaaaaaaaagtttttttgaaagaaaattagatacatatgtggccccagatgtttgtataactctagaatgatctagactatgtatgtttaaattaactttttattgaatgtacaggtgtccatttttgacgttaagcatggtcctttaaggtcacatgacgtttgatttgcaaacatttctatagccgaacttgtatatgtggttgcctccttaataaacagcctgaccataatgtttattattaaatttatattctttaagtgtttaattaatctctggatatggtaagattccttttttcctctcagttgcctacacttggttttaataaattactcagttgagtttttctttaaccacagaaacccaaatcatattgccctttcagatttagtcttcatggggttggattatgtcttatattttctctgtcagagttatttcatatatggattttacttgaaggaaatttatagtttactctaaattgatttgttcttggaacttttttacctgctgtgaattgatacctagttataaaaagctagcatttgcctagatcataactatgtatggtatctagttagaaaaaaacaagcaaaaagctattatgagtttccaagagggacaattaatgcattttcataccaaatgcgaatatttaggtgatcacgtgcatcttttcttgtatggatggaaaaatcaagaattgtacactgtttaatgagttctccatattcctttaggagatatttgctttgcaattacatgttacaattagaataattacaattaaaataatattacatgttacaattagattaatagtgatgagagggaaaaaagacacccttctgtttttttctctcaagccagtctaaaaacttgaagagccatttaaaattaaatgtcactatacttgtattataaatcaatacataagtttaaacctgttatatactcagtgcaacagaaaaacccatatggaggttcaaccactgatgtattttgaatgatcctaaatataagtcttgggtggctaaatggccctctgcttaccagtctgaaaatgaaaccgattatactcatcggccttatttactgtaatacaaactggttaaaactatgttaactgaatgctagtttgaaacaaattatctacattaagtcatcttaatgttttctctttaaaagaaataaaaaaatctgtttcttctgatttcgaaagtaatagaaactctgctgtagaacataaactaaaaatattaaaaagtataaaggtaaaaaatgatagttgtctgcaatcccataatccggaaatattgaagtactgtccgtaacatggttatgacatgttaagtggaagggtagaaggtctttttttttttaaggagaaaatgtttcttttaaataaatgtttcttatgtaaaaatgttgacatgagtttgct

SEQ ID NO: 54351 - DNA, 6653 bp, Homo sapiens
agcactcaagaaattatgattattttgaccttagacctctcttaactgtctgaaactggggtttcttattttcaggggaagaaacaggacacaggcagtctagaggctcctgccagccgagacaatctccaattaaaagtcggcatcgattaaatatttgctgaacaaagtaaactgtctctccaccgccgggctgagcgcccactcgagatccggcccggaacaagggcgagactggcccgcgggtcccacactccctgtaaggggtggagaacacgcccacacgcccagaccaacaggcgaggctgttcgaggaccttgttagccacctcagccccgcccgccgcgagccttctgctggcctcccgttctgcagggaccctccctagccagcccggccgcgtcccacatccgccgacacgccccttccggcctaatccccgcccctcaagcaccggccccgccccataggccccgtccgtggccccgccccgccgcgagctggcgccgggtcctctcagcgcccgccggcggccgcgtccacccccgacgctctgaggtcaccgactgggccggcccgcggggggcggagggacggagggaagatggcggcaggggccggatattggcgccgcctcccccaatcccggagccggcgcagatgaggcagttcggctggggccagcggcgctttggaacccgaggtggggggaccctggcggtggggcctggtcctgctatatgccggcgcctcggctagagtgagcggcggcgacgcctctttcctccatctctttccctgtcgctgcgagagcgagcgggcggcggaggcggcggcggcggcggggccgggatggaggacgttaactccaacgtgaacgcggaccaggaggtgcggaagctgcaggagctggtgaagaagctggagaagcagaacgaacagctgaggagccgctcgggggccgtgcagggcgccggctcccttgggcccggcagcccggttcgggccggcgcgtccattccctcctccggcgcggcgtctcctcggggcttccccttgggcctcagcgccaagtcgggcggcgggcccgggtcgggcccgaggcggacgagtagcgaagagctgcgggacgccacctccttgctagcggcgggcgagggcggcttgctggacgaggtggagccgctgcggcccgacgagctggagcgcctgtcaggctgggaggaggaggaggagagctggctgtattcatcaccaaagaaaaaacttacaccaatgcagaaatcggttagtccattagtttggtgcaggcaagttttggattacccaagtcctgatgttgagtgtgctaaaaaatctcttatccacaaacttgatcaaactatgtcagctctcaagaggcagaatttatataataatcctttcaactctatgagttacaccagtccttacagtccaaatgccagtagcccatacagcagtggcttcaattctccatcctcaaccccagtgcgacctcctatagtcaaacagcttatacttcctggaaattcaggtaacttgaaaagctcagacagaaatcctccactcagtcctcagtcctctatagatagtgagttaagtgcttcagaattagatgaagattcaattggatccaattataagctaaatgatgtaactgatgtacagattctagcccggatgcaggaagaaagtctccggcaagaatatgcagccaccacgtctcggcgcagttctggttcatcttgcaattctacaagacggggttttcaccatcaccacgcaattcacctcgaccgtcacctaagcagtcacccagaaattcacctcgttcacgatctcctgctcggggaatagaatatagtagagtgtccccacagcctatgattagccgcttacagcaacctcgcctttcacttcaaggccatcccacagatttacagacaagcaatgttaaaaatgaagaaaaactaagacgcagtcttccaaacctgtcccgaacatctaatacacaagttgactcagtgaaaagcagcagaagtgactcaaattttcaagtgccaaacggaggaatacctcgtatgcaacctcaggcttcagccataccttctccaggcaaattccgttcccctgcagcaccatctcctttggctcttcggcaaccagtgaaagcatttagtaaccatggctctggttctcctggtagccaagaaataacacagctcacacaaaccacctcctcacctgggcctcctatggttcagagcacagtctcagcaaatcctcccagcaatatcaacagcgctactctaaccagacctgcagggacaactgcaatgagaagtggcttgcccagacccagtgccccttctgctgggggcataccagtgcctcgcagcaaacttgcacagcctgttcgcagatccttgccagctcctaaaacctatggtagcatgaaagatgacagttggaaagatggctgttactgaccagcaaagacaagaatgcagaagtccacggcttcatggatacccttcaccaggctaaaaaacaacttttatatgcagactgttcagataagactcttgggatttataaaatcccagccctctctgtcttaattagcacaaaccgacagagatcatcaaacagcactttaatgacatttaacatcagatgtgtttggtaatcatacaatcactctccatagaatcacttttagttttgtttaatagaaactaggttgatttttaaaaaatatttgacagaggccaatatctgggcaaatacctaatggatgccaaagagaaatgcccatttgtaaatgagaaaaatgcccatttgtgcacaagaaaatggtgaattcaggctatccaaaacttcacattcaacctaatttactgtataaatagtatcaataaatatttgtgttaatgagaactaatattctgactaattatctaaagtgtttcactagtacaccaggaaactacagattgagattagggggtgggaggaaagaaacctgggctagagattaaaacattcctaaatttagcagaatttcagaaatgatttttgcagattcattagaaaagaaaaattgtcatttaatcttaagttttggatgtagctcacatgtcaccaccaccagatagtgttacagcatgtatccatcatgttgcattgacacatcaaacttgtgtgtgtttgttttgattgccaaaagggcttaatatcagttgtacaatctttctgaactttatagttcctggctcaggaaagatggcctttgctattgaagccaacttcttcacatgctgttatctttacagaactaagagatcttgtttctattagcaggttttcatgataggaaagaacaagtagtgtgtgtctttattcttgatacaacaccacctcggtgcttgcaacctggaacaaaaccataccatgagagagagggggaaaaaaatctatgcacttaacctacaaaatctctggtgatgacagttgtattgttgctattacatggcataacggtctattatgtggtaggaaaatatagcctgctaaatcctacttaagttgatccactttaaactgagtaactgtataaaacatctattgaaaattcttttccttttgacttagattctgccttacatcaatttttgcatttttggtaaaaaaaaaaccctactacgtatgactctaacctgatacttgctctctaatggctcttaatatatccttgaaatcggctatttcaattttatcagacttttaccagagtaaaacttgcttctgtagcaggcctctcattttttattatgaggtctgtttttaaatacttaatttgaacagctctaagatattgtcacttaggtcatctaaaagcttttagagatttgaacataagttcatttcctgttaatcaaagacattccgtaagttggcaaaagaaattgggagagagaaatagaaggcttgatattctggacagcattaaggttgataggttgatgataaaaacttaaaaccaggacctccattctgtcatgactgacaccatggtagtctgtcagcttgaccagtggagagtcattcatttagcacaagcagctggagatttaaactgccagtactatgtatttggtgtataatgcaaggaagaaactttatccttgaatttgagggtgatggggtgggtcaggaaaggatggcgccagaattctacatgataatgaactaaaaaatgttgcttttcagaggaagataaagcatcttcttttgggaggggggtatctcatgtctaagtaagtaaaagaaagaagtagctactgtctcttttaaaaaccacgtacaaaacagaacaagtctcagttttcagtgcaacatttcaaaaaatatatatgctgcaatctaataattaaaaggaattttacctattatgaaacatattacattttttaagttagataatcagtttcaaaaggagtattcaggttatttaactttgtttttaaatggctgcatcagaaaaaaatgtctatttttttttattaaaatatttcatcacttgttaaaacatatttttgatctgagtttggtaaagtattattttacctgctgttgtactaccacagactgttgacttttagtttcttaaagagaaaaattgcctttttactagaaagcctttgtatattgcaatttttctgtttgggaaaatctaaggatttactgtggttagtcttacagaagaaatgtggatttgataaactagtgcctatgattttaacttatgtttgatatatagtagtaagggttttatgaatgttgattattttgtgccaacagcccagaattgtcacttatatgtaagcagaaaacaatgagctctgcttccaaagttatttaattttctcagtgtttgaatgttattttttgtaagtgtgttaataaaagtgtaaagaattggaaaaaatataaatattcttaactcaagcatttgctggatcatttttctacaaaacttgtttgtacaatataaaacactctctgaagagttgactttttttcagtttcgtatcctggaaatcacattttgtaaaactggggaccattcataattgtcagatactttttaaaattatctcaatacatcacttttataaaaaaaaaaagtttttttgaaagaaaattagatacatatgtggccccagatgtttgtataactctagaatgatctagactatgtatgtttaaattaactttttattgaatgtacaggtgtccatttttgacgttaagcatggtcctttaaggtcacatgacgtttgatttgcaaacatttctatagccgaacttgtatatgtggttgcctccttaataaacagcctgaccataatgtttattattaaatttatattctttaagtgtttaattaatctctggatatggtaagattccttttttcctctcagttgcctacacttggttttaataaattactcagttgagtttttctttaaccacagaaacccaaatcatattgccctttcagatttagtcttcatggggttggattatgtcttatattttctctgtcagagttatttcatatatggattttacttgaaggaaatttatagtttactctaaattgatttgttcttggaacttttttacctgctgtgaattgatacctagttataaaaagctagcatttgcctagatcataactatgtatggtatctagttagaaaaaaacaagcaaaaagctattatgagtttccaagagggacaattaatgcattttcataccaaatgcgaatatttaggtgatcacgtgcatcttttcttgtatggatggaaaaatcaagaattgtacactgtttaatgagttctccatattcctttaggagatatttgctttgcaattacatgttacaattagaataattacaattaaaataatattacatgttacaattagattaatagtgatgagagggaaaaaagacacccttctgtttttttctctcaagccagtctaaaaacttgaagagccatttaaaattaaatgtcactatacttgtattataaatcaatacataagtttaaacctgttatatactcagtgcaacagaaaaacccatatggaggttcaaccactgatgtattttgaatgatcctaaatataagtcttgggtggctaaatggccctctgcttaccagtctgaaaatgaaaccgattatactcatcggccttatttactgtaatacaaactggttaaaactatgttaactgaatgctagtttgaaacaaattatctacattaagtcatcttaatgttttctctttaaaagaaataaaaaaatctgtttcttctgatttcgaaagtaatagaaactctgctgtagaacataaactaaaaatattaaaaagtataaaggtaaaaaatgatagttgtctgcaatcccataatccggaaatattgaagtactgtccgtaacatggttatgacatgttaagtggaagggtagaaggtctttttttttttaaggagaaaatgtttcttttaaataaatgtttcttatgtaaaaatgttgacatgagtttgct

SEQ ID NO: 54352 - DNA, 4532 bp, Homo sapiens
agcactcaagaaattatgattattttgaccttagacctctcttaactgtctgaaactggggtttcttattttcaggggaagaaacaggacacaggcagtctagaggctcctgccagccgagacaatctccaattaaaagtcggcatcgattaaatatttgctgaacaaagtaaactgtctctccaccgccgggctgagcgcccactcgagatccggcccggaacaagggcgagactggcccgcgggtcccacactccctgtaaggggtggagaacacgcccacacgcccagaccaacaggcgaggctgttcgaggaccttgttagccacctcagccccgcccgccgcgagccttctgctggcctcccgttctgcagggaccctccctagccagcccggccgcgtcccacatccgccgacacgccccttccggcctaatccccgcccctcaagcaccggccccgccccataggccccgtccgtggccccgccccgccgcgagctggcgccgggtcctctcagcgcccgccggcggccgcgtccacccccgacgctctgaggtcaccgactgggccggcccgcggggggcggagggacggagggaagatggcggcaggggccggatattggcgccgcctcccccaatcccggagccggcgcagatgaggcagttcggctggggccagcggcgctttggaacccgaggtggggggaccctggcggtggggcctggtcctgctatatgccggcgcctcggctagagtgagcggcggcgacgcctctttcctccatctctttccctgtcgctgcgagagcgagcgggcggcggaggcggcggcggcggcggggccgggatggaggacgttaactccaacgtgaacgcggaccaggaggtgcggaagctgcaggagctggtgaagaagctggagaagcagaacgaacagctgaggagccgctcgggggccgtgcagggcgccggctcccttgggcccggcagcccggttcgggccggcgcgtccattccctcctccggcgcggcgtctcctcggggcttccccttgggcctcagcgccaagtcgggcggcgggcccgggtcgggcccgaggcggacgagtagcgaagagctgcgggacgccacctccttgctagcggcgggcgagggcggcttgctggacgaggtggagccgctgcggcccgacgagctggagcgcctgtcaggctgggaggaggaggaggagagctggctgtattcatcaccaaagaaaaaacttacaccaatgcagaaatcggttagtccattagtttggtgcaggcaagttttggattacccaagtcctgatgttgagtgtgctaaaaaatctcttatccacaaacttgatcaaactatgtcagctctcaagaggcagaatttatataataatcctttcaactctatgagttacaccagtccttacagtccaaatgccagtagcccatacagcagtggcttcaattctccatcctcaaccccagtgcgacctcctatagtcaaacagcttatacttcctggaaattcaggtaacttgaaaagctcagacagaaatcctccactcagtcctcagtcctctatagatagtgagttaagtgcttcagaattagatgaagattcaattggatccaattataagctaaatgatgtaactgatgtacagattctagcccggatgcaggaagaaagtctccggcaagaatatgcagccaccacgtctcggcgcagttctggttcatcttgcaattctacaagacggggtacttttagtgatcaggaacttgatgcacaaagtttagatgatgaagatgacaatatgcatcatgcagtataccctgctgttaacaggttttcaccatcaccacgcaattcacctcgaccgtcacctaagcagtcacccagaaattcacctcgttcacgatctcctgctcggggaatagaatatagtagagtgtccccacagcctatgattagccgcttacagcaacctcgcctttcacttcaaggccatcccacagatttacagacaagcaatgttaaaaatgaagaaaaactaagacgcagtcttccaaacctgtcccgaacatctaatacacaagttgactcagtgaaaagcagcagaagtgactcaaattttcaagtgccaaacggaggaatacctcgtatgcaacctcaggcttcagccataccttctccaggcaaattccgttcccctgcagcaccatctcctttggctcttcggcaaccagtgaaagcatttagtaaccatggctctggttctcctggtagccaagaaataacacagctcacacaaaccacctcctcacctgggcctcctatggttcagagcacagtctcagcaaatcctcccagcaatatcaacagcgctactctaaccagacctgcagggacaactgcaatgagaagtggcttgcccagacccagtgccccttctgctgggggcataccagtgcctcgcagcaaacttgcacagcctgttcgcagatccttgccagctcctaaaacctatggtagcatgaaagatgacagttggaaagatggctgttactgaccagcaaagacaagaatgcagaagtccacggcttcatggatacccttcaccaggctaaaaaacaacttttatatgcagactgttcagataagactcttgggatttataaaatcccagccctctctgtcttaattagcacaaaccgacagagatcatcaaacagcactttaatgacatttaacatcagatgtgtttggtaatcatacaatcactctccatagaatcacttttagttttgtttaatagaaactaggttgatttttaaaaaatatttgacagaggccaatatctgggcaaatacctaatggatgccaaagagaaatgcccatttgtaaatgagaaaaatgcccatttgtgcacaagaaaatggtgaattcaggctatccaaaacttcacattcaacctaatttactgtataaatagtatcaataaatatttgtgttaatgagaactaatattctgactaattatctaaagtgtttcactagtacaccaggaaactacagattgagattagggggtgggaggaaagaaacctgggctagagattaaaacattcctaaatttagcagaatttcagaaatgatttttgcagattcattagaaaagaaaaattgtcatttaatcttaagttttggatgtagctcacatgtcaccaccaccagatagtgttacagcatgtatccatcatgttgcattgacacatcaaacttgtgtgtgtttgttttgattgccaaaagggcttaatatcagttgtacaatctttctgaactttatagttcctggctcaggaaagatggcctttgctattgaagccaacttcttcacatgctgttatctttacagaactaagagatcttgtttctattagcaggttttcatgataggaaagaacaagtagtgtgtgtctttattcttgatacaacaccacctcggtgcttgcaacctggaacaaaaccataccatgagagagagggggaaaaaaatctatgcacttaacctacaaaatctctggtgatgacagttgtattgttgctattacatggcataacggtctattatgtggtaggaaaatatagcctgctaaatcctacttaagttgatccactttaaactgagtaactgtataaaacatctattgaaaattcttttccttttgacttagattctgccttacatcaatttttgcatttttggtaaaaaaaaaaccctactacgtatgactctaacctgatacttgctctctaatggctcttaatatatccttgaaatcggctatttcaattttatcagacttttaccagagtaaaacttgcttctgtagcaggcctctcattttttattatgaggtctgtttttaaatacttaatttgaacagctctaagatattgtcacttaggtcatctaaaagcttttagagatttgaacataagttcatttcctgttaatcaaagacattccgtaagttggcaaaagaaattgggagagagaaatagaaggcttgatattctggacagcattaaggttgataggttgatgataaaaacttaaaaccaggacctccattctgtcatgactgcatcacagtgatggccaagctgcatcagccgcactctcctggacgccatatagctttaagatcgggggagggtaaataatgcaaaaattgcacagtggaagaaggggtctcacaaaaagcaatccatcctgtagtataggtaatggagttgggggaagcagcttccattctggatgtttggaaccctttagctttgttttggaatggcccaccattctcactggaaaacagtggtctgctgtgaaaggccagctctcggcagcccctgtggtttcagcgctgccgctctgtgtcattcaggttgtgcacattgtttttcttctgacttccagaaataaaagtgtttccatggga

SEQ ID NO: 54353 - DNA, 4868 bp, Homo sapiens
cgattcgagctcggacccctccatatgtggcccacattagttgctactgtgagacagaatcctgcagtgccttttctcttctggtattatggattccaagctggcctatttaaaatactgttgtcaaagacagttgtaatcctctaagtacttggtcatttagaactcacagttactttttttcttttagtagcccaggaatagcttttattgtttgcattgctgtgaagtttcctgaatacacatgtactagtgcccaatcatcagttgtaatttaaagcaatggtttcatatatacagatttccactcaaaaattggtttttctttgccatcccacagtaccttctccaggcaaattccgttcccctgcagcaccatctcctttggctcttcggcaaccagtgaaagcatttagtaaccatggctctggttctcctggtagccaagaaataacacagctcacacaaaccacctcctcacctgggcctcctatggttcagagcacagtctcagcaaatcctcccagcaatatcaacagcgctactctaaccagacctgcagggacaactgcaatgagaagtggcttgcccagacccagtgccccttctgctgggggcataccagtgcctcgcagcaaacttgcacagcctgttcgcagatccttgccagctcctaaaacctatggtagcatgaaagatgacagttggaaagatggctgttactgaccagcaaagacaagaatgcagaagtccacggcttcatggatacccttcaccaggctaaaaaacaacttttatatgcagactgttcagataagactcttgggatttataaaatcccagccctctctgtcttaattagcacaaaccgacagagatcatcaaacagcactttaatgacatttaacatcagatgtgtttggtaatcatacaatcactctccatagaatcacttttagttttgtttaatagaaactaggttgatttttaaaaaatatttgacagaggccaatatctgggcaaatacctaatggatgccaaagagaaatgcccatttgtaaatgagaaaaatgcccatttgtgcacaagaaaatggtgaattcaggctatccaaaacttcacattcaacctaatttactgtataaatagtatcaataaatatttgtgttaatgagaactaatattctgactaattatctaaagtgtttcactagtacaccaggaaactacagattgagattagggggtgggaggaaagaaacctgggctagagattaaaacattcctaaatttagcagaatttcagaaatgatttttgcagattcattagaaaagaaaaattgtcatttaatcttaagttttggatgtagctcacatgtcaccaccaccagatagtgttacagcatgtatccatcatgttgcattgacacatcaaacttgtgtgtgtttgttttgattgccaaaagggcttaatatcagttgtacaatctttctgaactttatagttcctggctcaggaaagatggcctttgctattgaagccaacttcttcacatgctgttatctttacagaactaagagatcttgtttctattagcaggttttcatgataggaaagaacaagtagtgtgtgtctttattcttgatacaacaccacctcggtgcttgcaacctggaacaaaaccataccatgagagagagggggaaaaaaatctatgcacttaacctacaaaatctctggtgatgacagttgtattgttgctattacatggcataacggtctattatgtggtaggaaaatatagcctgctaaatcctacttaagttgatccactttaaactgagtaactgtataaaacatctattgaaaattcttttccttttgacttagattctgccttacatcaatttttgcatttttggtaaaaaaaaaaccctactacgtatgactctaacctgatacttgctctctaatggctcttaatatatccttgaaatcggctatttcaattttatcagacttttaccagagtaaaacttgcttctgtagcaggcctctcattttttattatgaggtctgtttttaaatacttaatttgaacagctctaagatattgtcacttaggtcatctaaaagcttttagagatttgaacataagttcatttcctgttaatcaaagacattccgtaagttggcaaaagaaattgggagagagaaatagaaggcttgatattctggacagcattaaggttgataggttgatgataaaaacttaaaaccaggacctccattctgtcatgactgacaccatggtagtctgtcagcttgaccagtggagagtcattcatttagcacaagcagctggagatttaaactgccagtactatgtatttggtgtataatgcaaggaagaaactttatccttgaatttgagggtgatggggtgggtcaggaaaggatggcgccagaattctacatgataatgaactaaaaaatgttgcttttcagaggaagataaagcatcttcttttgggaggggggtatctcatgtctaagtaagtaaaagaaagaagtagctactgtctcttttaaaaaccacgtacaaaacagaacaagtctcagttttcagtgcaacatttcaaaaaatatatatgctgcaatctaataattaaaaggaattttacctattatgaaacatattacattttttaagttagataatcagtttcaaaaggagtattcaggttatttaactttgtttttaaatggctgcatcagaaaaaaatgtctatttttttttattaaaatatttcatcacttgttaaaacatatttttgatctgagtttggtaaagtattattttacctgctgttgtactaccacagactgttgacttttagtttcttaaagagaaaaattgcctttttactagaaagcctttgtatattgcaatttttctgtttgggaaaatctaaggatttactgtggttagtcttacagaagaaatgtggatttgataaactagtgcctatgattttaacttatgtttgatatatagtagtaagggttttatgaatgttgattattttgtgccaacagcccagaattgtcacttatatgtaagcagaaaacaatgagctctgcttccaaagttatttaattttctcagtgtttgaatgttattttttgtaagtgtgttaataaaagtgtaaagaattggaaaaaatataaatattcttaactcaagcatttgctggatcatttttctacaaaacttgtttgtacaatataaaacactctctgaagagttgactttttttcagtttcgtatcctggaaatcacattttgtaaaactggggaccattcataattgtcagatactttttaaaattatctcaatacatcacttttataaaaaaaaaaagtttttttgaaagaaaattagatacatatgtggccccagatgtttgtataactctagaatgatctagactatgtatgtttaaattaactttttattgaatgtacaggtgtccatttttgacgttaagcatggtcctttaaggtcacatgacgtttgatttgcaaacatttctatagccgaacttgtatatgtggttgcctccttaataaacagcctgaccataatgtttattattaaatttatattctttaagtgtttaattaatctctggatatggtaagattccttttttcctctcagttgcctacacttggttttaataaattactcagttgagtttttctttaaccacagaaacccaaatcatattgccctttcagatttagtcttcatggggttggattatgtcttatattttctctgtcagagttatttcatatatggattttacttgaaggaaatttatagtttactctaaattgatttgttcttggaacttttttacctgctgtgaattgatacctagttataaaaagctagcatttgcctagatcataactatgtatggtatctagttagaaaaaaacaagcaaaaagctattatgagtttccaagagggacaattaatgcattttcataccaaatgcgaatatttaggtgatcacgtgcatcttttcttgtatggatggaaaaatcaagaattgtacactgtttaatgagttctccatattcctttaggagatatttgctttgcaattacatgttacaattagaataattacaattaaaataatattacatgttacaattagattaatagtgatgagagggaaaaaagacacccttctgtttttttctctcaagccagtctaaaaacttgaagagccatttaaaattaaatgtcactatacttgtattataaatcaatacataagtttaaacctgttatatactcagtgcaacagaaaaacccatatggaggttcaaccactgatgtattttgaatgatcctaaatataagtcttgggtggctaaatggccctctgcttaccagtctgaaaatgaaaccgattatactcatcggccttatttactgtaatacaaactggttaaaactatgttaactgaatgctagtttgaaacaaattatctacattaagtcatcttaatgttttctctttaaaagaaataaaaaaatctgtttcttctgatttcgaaagtaatagaaactctgctgtagaacataaactaaaaatattaaaaagtataaaggtaaaaaatgatagttgtctgcaatcccataatccggaaatattgaagtactgtccgtaacatggttatgacatgttaagtggaagggtagaaggtctttttttttttaaggagaaaatgtttcttttaaataaatgtttcttatgtaaaaatgttgacatgagtttgct

SEQ ID NO: 54354 - DNA, 4116 bp, Homo sapiens
  misc_feature (2214)..(2214): n is a, c, g, or t
  misc_feature (3565)..(3565): n is a, c, g, or t
agcactcaagaaattatgattattttgaccttagacctctcttaactgtctgaaactggggtttcttattttcaggggaagaaacaggacacaggcagtctagaggctcctgccagccgagacaatctccaattaaaagtcggcatcgattaaatatttgctgaacaaagtaaactgtctctccaccgccgggctgagcgcccactcgagatccggcccggaacaagggcgagactggcccgcgggtcccacactccctgtaaggggtggagaacacgcccacacgcccagaccaacaggcgaggctgttcgaggaccttgttagccacctcagccccgcccgccgcgagccttctgctggcctcccgttctgcagggaccctccctagccagcccggccgcgtcccacatccgccgacacgccccttccggcctaatccccgcccctcaagcaccggccccgccccataggccccgtccgtggccccgccccgccgcgagctggcgccgggtcctctcagcgcccgccggcggccgcgtccacccccgacgctctgaggtcaccgactgggccggcccgcggggggcggagggacggagggaagatggcggcaggggccggatattggcgccgcctcccccaatcccggagccggcgcagatgaggcagttcggctggggccagcggcgctttggaacccgaggtggggggaccctggcggtggggcctggtcctgctatatgccggcgcctcggctagagtgagcggcggcgacgcctctttcctccatctctttccctgtcgctgcgagagcgagcgggcggcggaggcggcggcggcggcggggccgggatggaggacgttaactccaacgtgaacgcggaccaggaggtgcggaagctgcaggagctggtgaagaagctggagaagcagaacgaacagctgaggagccgctcgggggccgtgcagggcgccggctcccttgggcccggcagcccggttcgggccggcgcgtccattccctcctccggcgcggcgtctcctcggggcttccccttgggcctcagcgccaagtcgggcggcgggcccgggtcgggcccgaggcggacgagtagcgaagagctgcgggacgccacctccttgctagcggcgggcgagggcggcttgctggacgaggtggagccgctgcggcccgacgagctggagcgcctgtcaggctgggaggaggaggaggagagctggctgtattcatcaccaaagaaaaaacttacaccaatgcagaaatcggttagtccattagtttggtgcaggcaagttttggattacccaagtcctgatgttgagtgtgctaaaaaatctcttatccacaaacttgatcaaactatgtcagctctcaagaggcagaatttatataataatcctttcaactctatgagttacaccagtccttacagtccaaatgccagtagcccatacagcagtggcttcaattctccatcctcaaccccagtgcgacctcctatagtcaaacagcttatacttcctggaaattcaggtaacttgaaaagctcagacagaaatcctccactcagtcctcagtcctctatagatagtgagttaagtgcttcagaattagatgaagattcaattggatccaattataagctaaatgatgtaactgatgtacagattctagcccggatgcaggaagaaagtctccggcaagaatatgcagccaccacgtctcggcgcagttctggttcatcttgcaattctacaagacggggtacttttagtgatcaggaacttgatgcacaaagtttagatgatgaagatgacaatatgcatcatgcagtataccctgctgttaacaggttttcaccatcaccacgcaattcacctcgaccgtcacctaagcagtcacccagaaattcacctcgttcacgatctcctgctcggggaatagaatatagtagagtgtccccacagcctatgattagccgcttacagcaacctcgcctttcacttcaaggccatcccacagatttacagacaagcaatgttaaaaatgaagaaaaactaagacgcagtcttccaaacctgtcccgaacatctaatacacaagttgactcagtgaaaagcagcagaagtgactcaaattttcaagtgccaaacggaggaatacctcgtatgcaacctcaggcttcagccantaagtatccttcttatgctttcatgtatcagttatttaaagagaagtgaaaattttagatatttgttttatgctgaaaaaccgttttttatgctgaaaaaccgttttaaaccatagctatagtaaaatttagtgtttattagttgctggatgataatcaaagttatattacaatttaaaattttctatgtaggatacttgattctgccagtacatctgtctatacaaaactctggtctctccagaattttaaaataagcaaaatgtaactattaaaaaagtaggtgtagcttttgcttatagatactagaattagaaataaaaaccagtagagcatccaaaaatatatgtcccttagtacgtaaattttctttaataacctccactttaaaaatacctaaaagtttgattattacataattttagaatcatactcaaaataatccattgttcaaacctgcaatatattaaatctgttatcaaagttgaattgttgaagttcttttctttccaaaacaaaagtataccaggagaactcttggatgatctcattttatttctgcatctgttgagataagatttctggttttgatttgattttctgtgtttgttaaggctattttaatgaaaaaatacaatattgaatcaatatgtatgccaaattaattcatagtcctaatcctacttatagattaaaatttgagataaattgccagaaaccatcactttttaagaattgatcaggacttgtctctttaaattatctttcagaaaacaaattcttagagttaaagctaaactcttaaacagagaaggtgaattttagaagtatagtagaaagaacacatgtagattataatttttaataagttttggtcattgggtggttactaacccatgaatgtgacagtatttgtattcaactattatttgtaatagatacttgagtttttattttgtggcaagtagtatgttaaatcaatacaggcatttctactatagcacaaaatatgcactccttaaaaacctcacattctgcagtattacacaataaaaatgataggatgatgaggagtggagggaatagtcctggaacagaccactgaaaacccaagcaactttcttagaaagcattaataaaaacaataatgatactagcacagttaaattcatgttaaatctttattaaatactccaggagatatagaacttcatttttaaagaaagatttgaaggtaatgtgatggaaaggaaaggttgagactgttgaattaaggaaacatatgcagcatagacgaagatcagagagaatcatacagtaagatcatctaggacaaaatagccaaactganccaagaagtagtgatgttggagtaaatgggcattgtgtatattaatgtacaagttgattttaaaggaatttcaaaaaattactttttagctaggatagatttgagcgtgtagtcaaaacggttttaaataaatgattacagttatttttatgatcttatgaacgctcagtattcatcccatgtgtttcacagctcacatcagtcccgtatatgagctctgagacacaaagggtgcatattcactggggtccttgtagggacacaagggatgcttattcactcagatccttgtaggtacacaatggatgcatattgtctcagatccttgtggcatattactatcagtggttgaagtggtagctgtgttatattctttcattttctcaaggctatgaagaagtgatacaaacgagtttgttgactgttcacttataacttgtttattaagcagttaaaaatttgaagatatttaacccttttttcattttcatctttttttttcttttttttttgattgagtcagggtttcactccagtctattgaaagaaaa

SEQ ID NO: 54355 - DNA, 318 bp, Homo sapiens
ctgtcaccaggctggagtgcagtggcacaatcatggctcactgcggcctcaccttcctgggctcaagtgatcctcctgcgtagctgggaccacaggcgtgcaccaccatgcccagctaatttaatttcttcacacttttccttggccctgttgtgtttagctgacttcatatacttcatgttaagctgttgttacttagtggctcaaaaatcaacaggctagcaggagtttgagaccagcctgagcaacacaagacctcgtctctaaaaaaatgtttttttttttttaattacccaggcatgatggtcacatgcctat

SEQ ID NO: 54356 - DNA, 5522 bp, Homo sapiens
agcactcaagaaattatgattattttgaccttagacctctcttaactgtctgaaactggggtttcttattttcaggggaagaaacaggacacaggcagtctagaggctcctgccagccgagacaatctccaattaaaagtcggcatcgattaaatatttgctgaacaaagtaaactgtctctccaccgccgggctgagcgcccactcgagatccggcccggaacaagggcgagactggcccgcgggtcccacactccctgtaaggggtggagaacacgcccacacgcccagaccaacaggcgaggctgttcgaggaccttgttagccacctcagccccgcccgccgcgagccttctgctggcctcccgttctgcagggaccctccctagccagcccggccgcgtcccacatccgccgacacgccccttccggcctaatccccgcccctcaagcaccggccccgccccataggccccgtccgtggccccgccccgccgcgagctggcgccgggtcctctcagcgcccgccggcggccgcgtccacccccgacgctctgaggtcaccgactgggccggcccgcggggggcggagggacggagggaagatggcggcaggggccggatattggcgccgcctcccccaatcccggagccggcgcagatgaggcagttcggctggggccagcggcgctttggaacccgaggtggggggaccctggcggtggggcctggtcctgctatatgccggcgcctcggctagagtgagcggcggcgacgcctctttcctccatctctttccctgtcgctgcgagagcgagcgggcggcggaggcggcggcggcggcggggccgggatggaggacgttaactccaacgtgaacgcggaccaggaggtgcggaagctgcaggagctggtgaagaagctggagaagcagaacgaacagctgaggagccgctcgggggccgtgcagggcgccggctcccttgggcccggcagcccggttcgggccggcgcgtccattccctcctccggcgcggcgtctcctcggggcttccccttgggcctcagcgccaagtcgggcggcgggcccgggtcgggcccgaggcggacgagtagcgaagagctgcgggacgccacctccttgctagcggcgggcgagggcggcttgctggacgaggtggagccgctgcggcccgacgagctggagcgcctgtcaggctgggaggaggaggaggagagctggctgtattcatcaccaaagaaaaaacttacaccaatgcagaaatcggttagtccattagtttggtgcaggcaagttttggattacccaagtcctgatgttgagtgtgctaaaaaatctcttatccacaaacttgatcaaactatgtcagctctcaagaggcagaatttatataataatcctttcaactctatgagttacaccagtccttacagtccaaatgccagtagcccatacagcagtggcttcaattctccatcctcaaccccagtgcgacctcctatagtcaaacagcttatacttcctggaaattcaggtaacttgaaaagctcagacagaaatcctccactcagtcctcagtcctctatagatagtgagttaagtgcttcagaattagatgaagattcaattggatccaattataagctaaatgatgtaactgatgtacagattctagcccggatgcaggaagaaagtctccggcaagaatatgcagccaccacgtctcggcgcagttctggttcatcttgcaattctacaagacggggtacttttagtgatcaggaacttgatgcacaaagtttagatgatgaagatgacaatatgcatcatgcagtataccctgctgttaacaggttttcaccatcaccacgcaattcacctcgaccgtcacctaagcagtcacccagaaattcacctcgttcacgatctcctgctcggggaatagaatatagtagagtgtccccacagcctatgattagccgcttacagcaacctcgcctttcacttcaaggccatcccacagatttacagacaagcaatgttaaaaatgaagaaaaactaagacgcagtcttccaaacctgtcccgaacatctaatacacaagttgactcagtgaaaagcagcagaagtgactcaaattttcaagtgccaaacggaggaatacctcgtatgcaacctcaggcttcagccataccttctccaggcaaattccgttcccctgcagcaccatctcctttggctcttcggcaaccagtgaaagcatttagtaaccatggctctggttctcctggtagccaagaaataacacagctcacacaaaccacctcctcacctgggcctcctatggttcagagcacagtctcagcaaatcctcccagcaatatcaacagcgctactctaaccagacctgcagggacaactgcaatgagaagtggcttgcccagacccagtgccccttctgctgggggcataccagtgcctcgcagcaaacttgcacagcctgttcgcagatccttgccagctcctaaaacctatggtagcatgaaagatgacagttggaaagatggctgttactgaccagcaaagacaagaatgcagaagtccacggcttcatggatacccttcaccaggctaaaaaacaacttttatatgcagactgttcagataagactcttgggatttataaaatcccagccctctctgtcttaattagcacaaaccgacagagatcatcaaacagcactttaatgacatttaacatcagatgtgtttggtaatcatacaatcactctccatagaatcacttttagttttgtttaatagaaactaggttgatttttaaaaaatatttgacagaggccaatatctgggcaaatacctaatggatgccaaagagaaatgcccatttgtaaatgagaaaaatgcccatttgtgcacaagaaaatggtgaattcaggctatccaaaacttcacattcaacctaatttactgtataaatagtatcaataaatatttgtgttaatgagaactaatattctgactaattatctaaagtgtttcactagtacaccaggaaactacagattgagattagggggtgggaggaaagaaacctgggctagagattaaaacattcctaaatttagcagaatttcagaaatgatttttgcagattcattagaaaagaaaaattgtcatttaatcttaagttttggatgtagctcacatgtcaccaccaccagatagtgttacagcatgtatccatcatgttgcattgacacatcaaacttgtgtgtgtttgttttgattgccaaaagggcttaatatcagttgtacaatctttctgaactttatagttcctggctcaggaaagatggcctttgctattgaagccaacttcttcacatgctgttatctttacagaactaagagatcttgtttctattagcaggttttcatgataggaaagaacaagtagtgtgtgtctttattcttgatacaacaccacctcggtgcttgcaacctggaacaaaaccataccatgagagagagggggaaaaaaatctatgcacttaacctacaaaatctctggtgatgacagttgtattgttgctattacatggcataacggtctattatgtggtaggaaaatatagcctgctaaatcctacttaagttgatccactttaaactgagtaactgtataaaacatctattgaaaattcttttccttttgacttagattctgccttacatcaatttttgcatttttggtaaaaaaaaaaccctactacgtatgactctaacctgatacttgctctctaatggctcttaatatatccttgaaatcggctatttcaattttatcagacttttaccagagtaaaacttgcttctgtagcaggcctctcattttttattatgaggtctgtttttaaatacttaatttgaacagctctaagatattgtcacttaggtcatctaaaagcttttagagatttgaacataagttcatttcctgttaatcaaagacattccgtaagttggcaaaagaaattgggagagagaaatagaaggcttgatattctggacagcattaaggttgataggttgatgataaaaacttaaaaccaggacctccattctgtcatgactgacaccatggtagtctgtcagcttgaccagtggagagtcattcatttagcacaagcagctggagatttaaactgccagtactatgtatttggtgtataatgcaaggaagaaactttatccttgaatttgagggtgatggggtgggtcaggaaaggatggcgccagaattctacatgataatgaactaaaaaatgttgcttttcagaggaagataaagcatcttcttttgggaggggggtatctcatgtctaagtaagtaaaagaaagaagtagctactgtctcttttaaaaaccacgtacaaaacagaacaagtctcagttttcagtgcaacatttcaaaaaatatatatgctgcaatctaataattaaaaggaattttacctattatgaaacatattacattttttaagttagataatcagtttcaaaaggagtattcaggttatttaactttgtttttaaatggctgcatcagaaaaaaatgtctatttttttttattaaaatatttcatcacttgttaaaacatatttttgatctgagtttggtaaagtattattttacctgctgttgtactaccacagactgttgacttttagtttcttaaagagaaaaattgcctttttactagaaagcctttgtatattgcaatttttctgtttgggaaaatctaaggatttactgtggttagtcttacagaagaaatgtggatttgataaactagtgcctatgattttaacttatgtttgatatatagtagtaagggttttatgaatgttgattattttgtgccaacagcccagaattgtcacttatatgtaagcagaaaacaatgagctctgcttccaaagttatttaattttctcagtgtttgaatgttattttttgtaagtgtgttaataaaagtgtaaagaattggaaaaaatataaatattcttaactcaagcatttgctggatcatttttctacaaaacttgtttgtacaatataaaacactctctgaagagttgactttttttcagtttcgtatcctggaaatcacattttgtaaaactggggaccattcataattgtcagatactttttaaaattatctcaatacatcacttttataaaaaaaaaaagtttttttgaaagaaaattagatacatatgtggccccagatgtttgtataactctagaatgatctagactatgtatgtttaaattaactttttattgaatgtacaggtgtccatttttgacgttaagcatggtcctttaaggtcacatgacgtttgatttgcaaacatttctatagccgaacttgtatatgtggttgcctccttaataaacagcctgaccata

SEQ ID NO: 54357 - DNA, 5704 bp, Homo sapiens
ggaaagaggtttaattgactcacaattccacatggctgtaggtcagggcagtggggttcacaatcatggaggaaggcaaggatgagcgaagtcatgtcttacacggtggcaggcaagagagcatgtgcaggggaactgccctctataaaatcatcagatcttgtgacatatattcactaccacgagaacagcttgggaaagatgcacacccgtgattcgattacctccctccaggtccctctcatatcacacgggaattatgggagctacaattcaagatgagatttgggtggggatacagccaaaccatatcattcatcatctgagggaactgtggtctcagacagctgggcactgagagtgcacgctgccccctagaattccacacctacatcacagagagacagaacagtctcaaaggattcttaaggttaatgtggggagccaaaggaggagatgaattcacagcttgtgccttaccttctggtctaactaaaactacttttgtcctggcccaacaagattcccagactcttttctgggttgcaccaggggtaattcagaaagacaaaaagttattaatgcccctccattccccacagctcctgaggtctaagttgttcattccctgggttttaggttgttgttctccctctgcttccacagaatcagtgtgccccattccagtacctatgatttcacctgtattcttgtcacttcctactttctcctagacattttatctaacagagccaggtgaaacagagacaaggatatttacataaaacttaaacagaactaagttggagttccataacccccattgggctgggatggcactcaggctggcctaagattgtggttatggaacagaaagacacatttcacccagaaattcacctcgttcacgatctcctgctcggggaatagaatatagtagagtgtccccacagcctatgattagccgcttacagcaacctcgcctttcacttcaaggccatcccacagatttacagacaagcaatgttaaaaatgaagaaaaactaagacgcagtcttccaaacctgtcccgaacatctaatacacaagttgactcagtgaaaagcagcagaagtgactcaaattttcaagtgccaaacggaggaatacctcgtatgcaacctcaggcttcagccataccttctccaggcaaattccgttcccctgcagcaccatctcctttggctcttcggcaaccagtgaaagcatttagtaaccatggctctggttctcctggtagccaagaaataacacagctcacacaaaccacctcctcacctgggcctcctatggttcagagcacagtctcagcaaatcctcccagcaatatcaacagcgctactctaaccagacctgcagggacaactgcaatgagaagtggcttgcccagacccagtgccccttctgctgggggcataccagtgcctcgcagcaaacttgcacagcctgttcgcagatccttgccagctcctaaaacctatggtagcatgaaagatgacagttggaaagatggctgttactgaccagcaaagacaagaatgcagaagtccacggcttcatggatacccttcaccaggctaaaaaacaacttttatatgcagactgttcagataagactcttgggatttataaaatcccagccctctctgtcttaattagcacaaaccgacagagatcatcaaacagcactttaatgacatttaacatcagatgtgtttggtaatcatacaatcactctccatagaatcacttttagttttgtttaatagaaactaggttgatttttaaaaaatatttgacagaggccaatatctgggcaaatacctaatggatgccaaagagaaatgcccatttgtaaatgagaaaaatgcccatttgtgcacaagaaaatggtgaattcaggctatccaaaacttcacattcaacctaatttactgtataaatagtatcaataaatatttgtgttaatgagaactaatattctgactaattatctaaagtgtttcactagtacaccaggaaactacagattgagattagggggtgggaggaaagaaacctgggctagagattaaaacattcctaaatttagcagaatttcagaaatgatttttgcagattcattagaaaagaaaaattgtcatttaatcttaagttttggatgtagctcacatgtcaccaccaccagatagtgttacagcatgtatccatcatgttgcattgacacatcaaacttgtgtgtgtttgttttgattgccaaaagggcttaatatcagttgtacaatctttctgaactttatagttcctggctcaggaaagatggcctttgctattgaagccaacttcttcacatgctgttatctttacagaactaagagatcttgtttctattagcaggttttcatgataggaaagaacaagtagtgtgtgtctttattcttgatacaacaccacctcggtgcttgcaacctggaacaaaaccataccatgagagagagggggaaaaaaatctatgcacttaacctacaaaatctctggtgatgacagttgtattgttgctattacatggcataacggtctattatgtggtaggaaaatatagcctgctaaatcctacttaagttgatccactttaaactgagtaactgtataaaacatctattgaaaattcttttccttttgacttagattctgccttacatcaatttttgcatttttggtaaaaaaaaaaccctactacgtatgactctaacctgatacttgctctctaatggctcttaatatatccttgaaatcggctatttcaattttatcagacttttaccagagtaaaacttgcttctgtagcaggcctctcattttttattatgaggtctgtttttaaatacttaatttgaacagctctaagatattgtcacttaggtcatctaaaagcttttagagatttgaacataagttcatttcctgttaatcaaagacattccgtaagttggcaaaagaaattgggagagagaaatagaaggcttgatattctggacagcattaaggttgataggttgatgataaaaacttaaaaccaggacctccattctgtcatgactgacaccatggtagtctgtcagcttgaccagtggagagtcattcatttagcacaagcagctggagatttaaactgccagtactatgtatttggtgtataatgcaaggaagaaactttatccttgaatttgagggtgatggggtgggtcaggaaaggatggcgccagaattctacatgataatgaactaaaaaatgttgcttttcagaggaagataaagcatcttcttttgggaggggggtatctcatgtctaagtaagtaaaagaaagaagtagctactgtctcttttaaaaaccacgtacaaaacagaacaagtctcagttttcagtgcaacatttcaaaaaatatatatgctgcaatctaataattaaaaggaattttacctattatgaaacatattacattttttaagttagataatcagtttcaaaaggagtattcaggttatttaactttgtttttaaatggctgcatcagaaaaaaatgtctatttttttttattaaaatatttcatcacttgttaaaacatatttttgatctgagtttggtaaagtattattttacctgctgttgtactaccacagactgttgacttttagtttcttaaagagaaaaattgcctttttactagaaagcctttgtatattgcaatttttctgtttgggaaaatctaaggatttactgtggttagtcttacagaagaaatgtggatttgataaactagtgcctatgattttaacttatgtttgatatatagtagtaagggttttatgaatgttgattattttgtgccaacagcccagaattgtcacttatatgtaagcagaaaacaatgagctctgcttccaaagttatttaattttctcagtgtttgaatgttattttttgtaagtgtgttaataaaagtgtaaagaattggaaaaaatataaatattcttaactcaagcatttgctggatcatttttctacaaaacttgtttgtacaatataaaacactctctgaagagttgactttttttcagtttcgtatcctggaaatcacattttgtaaaactggggaccattcataattgtcagatactttttaaaattatctcaatacatcacttttataaaaaaaaaaagtttttttgaaagaaaattagatacatatgtggccccagatgtttgtataactctagaatgatctagactatgtatgtttaaattaactttttattgaatgtacaggtgtccatttttgacgttaagcatggtcctttaaggtcacatgacgtttgatttgcaaacatttctatagccgaacttgtatatgtggttgcctccttaataaacagcctgaccataatgtttattattaaatttatattctttaagtgtttaattaatctctggatatggtaagattccttttttcctctcagttgcctacacttggttttaataaattactcagttgagtttttctttaaccacagaaacccaaatcatattgccctttcagatttagtcttcatggggttggattatgtcttatattttctctgtcagagttatttcatatatggattttacttgaaggaaatttatagtttactctaaattgatttgttcttggaacttttttacctgctgtgaattgatacctagttataaaaagctagcatttgcctagatcataactatgtatggtatctagttagaaaaaaacaagcaaaaagctattatgagtttccaagagggacaattaatgcattttcataccaaatgcgaatatttaggtgatcacgtgcatcttttcttgtatggatggaaaaatcaagaattgtacactgtttaatgagttctccatattcctttaggagatatttgctttgcaattacatgttacaattagaataattacaattaaaataatattacatgttacaattagattaatagtgatgagagggaaaaaagacacccttctgtttttttctctcaagccagtctaaaaacttgaagagccatttaaaattaaatgtcactatacttgtattataaatcaatacataagtttaaacctgttatatactcagtgcaacagaaaaacccatatggaggttcaaccactgatgtattttgaatgatcctaaatataagtcttgggtggctaaatggccctctgcttaccagtctgaaaatgaaaccgattatactcatcggccttatttactgtaatacaaactggttaaaactatgttaactgaatgctagtttgaaacaaattatctacattaagtcatcttaatgttttctctttaaaagaaataaaaaaatctgtttcttctgatttcgaaagtaatagaaactctgctgtagaacataaactaaaaatattaaaaagtataaaggtaaaaaatgatagttgtctgcaatcccataatccggaaatattgaagtactgtccgtaacatggttatgacatgttaagtggaagggtagaaggtctttttttttttaaggagaaaatgtttcttttaaataaatgtttcttatgtaaaaatgttgacatgagtttgct

SEQ ID NO: 54358 - DNA, 4373 bp, Homo sapiens
agcactcaagaaattatgattattttgaccttagacctctcttaactgtctgaaactggggtttcttattttcaggggaagaaacaggacacaggcagtctagaggctcctgccagccgagacaatctccaattaaaagtcggcatcgattaaatatttgctgaacaaagtaaactgtctctccaccgccgggctgagcgcccactcgagatccggcccggaacaagggcgagactggcccgcgggtcccacactccctgtaaggggtggagaacacgcccacacgcccagaccaacaggcgaggctgttcgaggaccttgttagccacctcagccccgcccgccgcgagccttctgctggcctcccgttctgcagggaccctccctagccagcccggccgcgtcccacatccgccgacacgccccttccggcctaatccccgcccctcaagcaccggccccgccccataggccccgtccgtggccccgccccgccgcgagctggcgccgggtcctctcagcgcccgccggcggccgcgtccacccccgacgctctgaggtcaccgactgggccggcccgcggggggcggagggacggagggaagatggcggcaggggccggatattggcgccgcctcccccaatcccggagccggcgcagatgaggcagttcggctggggccagcggcgctttggaacccgaggtggggggaccctggcggtggggcctggtcctgctatatgccggcgcctcggctagagtgagcggcggcgacgcctctttcctccatctctttccctgtcgctgcgagagcgagcgggcggcggaggcggcggcggcggcggggccgggatggaggacgttaactccaacgtgaacgcggaccaggaggtgcggaagctgcaggagctggtgaagaagctggagaagcagaacgaacagctgaggagccgctcgggggccgtgcagggcgccggctcccttgggcccggcagcccggttcgggccggcgcgtccattccctcctccggcgcggcgtctcctcggggcttccccttgggcctcagcgccaagtcgggcggcgggcccgggtcgggcccgaggcggacgagtagcgaagagctgcgggacgccacctccttgctagcggcgggcgagggcggcttgctggacgaggtggagccgctgcggcccgacgagctggagcgcctgtcaggctgggaggaggaggaggagagctggctgtattcatcaccaaagaaaaaacttacaccaatgcagaaatcggttagtccattagtttggtgcaggcaagttttggattacccaagtcctgatgttgagtgtgctaaaaaatctcttatccacaaacttgatcaaactatgtcagctctcaagaggcagaatttatataataatcctttcaactctatgagttacaccagtccttacagtccaaatgccagtagcccatacagcagtggcttcaattctccatcctcaaccccagtgcgacctcctatagtcaaacagcttatacttcctggaaattcaggtaacttgaaaagctcagacagaaatcctccactcagtcctcagtcctctatagatagtgagttaagtgcttcagaattagatgaagattcaattggatccaattataagctaaatgatgtaactgatgtacagattctagcccggatgcaggaagaaagtctccggcaagaatatgcagccaccacgtctcggcgcagttctggttcatcttgcaattctacaagacggggtacttttagtgatcaggaacttgatgcacaaagtttagatgatgaagatgacaatatgcatcatgcagtataccctgctgttaacaggttttcaccatcaccacgcaattcacctcgaccgtcacctaagcagtcacccagaaattcacctcgttcacgatctcctgctcggggaatagaatatagtagagtgtccccacagcctatgattagccgcttacagcaacctcgcctttcacttcaaggccatcccacagatttacagacaagcaatgttaaaaatgaagaaaaactaagacgcagtcttccaaacctgtcccgaacatctaatacacaagttgactcagtgaaaagcagcagaagtgactcaaattttcaagtgccaaacggaggaatacctcgtatgcaacctcaggcttcagccataccttctccaggcaaattccgttcccctgcagcaccatctcctttggctcttcggcaaccagtgaaagcatttagtaaccatggctctggttctcctggtagccaagaaataacacagctcacacaaaccacctcctcacctgggcctcctatggttcagagcacagtctcagcaaatcctcccagcaatatcaacagcgctactctaaccagacctgcagggacaactgcaatgagaagtggcttgcccagacccagtgccccttctgctgggggcataccagtgcctcgcagcaaacttgcacagcctgttcgcagatccttgccagctcctaaaacctatggtagcatgaaagatgacagttggaaagatggctgttactgaccagcaaagacaagaatgcagaagtccacggcttcatggatacccttcaccaggctaaaaaacaacttttatatgcagactgttcagataagactcttgggatttataaaatcccagccctctctgtcttaattagcacaaaccgacagagatcatcaaacagcactttaatgacatttaacatcagatgtgtttggtaatcatacaatcactctccatagaatcacttttagttttgtttaatagaaactaggttgatttttaaaaaatatttgacagaggccaatatctgggcaaatacctaatggatgccaaagagaaatgcccatttgtaaatgagaaaaatgcccatttgtgcacaagaaaatggtgaattcaggctatccaaaacttcacattcaacctaatttactgtataaatagtatcaataaatatttgtgttaatgagaactaatattctgactaattatctaaagtgtttcactagtacaccaggaaactacagattgagattagggggtgggaggaaagaaacctgggctagagattaaaacattcctaaatttagcagaatttcagaaatgatttttgcagattcattagaaaagaaaaattgtcatttaatcttaagttttggatgtagctcacatgtcaccaccaccagatagtgttacagcatgtatccatcatgttgcattgacacatcaaacttgtgtgtgtttgttttgattgccaaaagggcttaatatcagttgtacaatctttctgaactttatagttcctggctcaggaaagatggcctttgctattgaagccaacttcttcacatgctgttatctttacagaactaagagatcttgtttctattagcaggttttcatgataggaaagaacaagtagtgtgtgtctttattcttgatacaacaccacctcggtgcttgcaacctggaacaaaaccataccatgagagagagggggaaaaaaatctatgcacttaacctacaaaatctctggtgatgacagttgtattgttgctattacatggcataacggtctattatgtggtaggaaaatatagcctgctaaatcctacttaagttgatccactttaaactgagtaactgtataaaacatctattgaaaattcttttccttttgacttagattctgccttacatcaatttttgcatttttggtaaaaaaaaaaccctactacgtatgactctaacctgatacttgctctctaatggctcttaatatatccttgaaatcggctatttcaattttatcagacttttaccagagtaaaacttgcttctgtagcaggcctctcattttttattatgaggtctgtttttaaatacttaatttgaacagctctaagatattgtcacttaggtcatctaaaagcttttagagatttgaacataagttcatttcctgttaatcaaagacattccgtaagttggcaaaagaaattgggagagagaaatagaaggcttgatattctggacagcattaaggttgataggttgatgataaaaacttaaaaccaggacctccattctgtcatgactgacaccatggtagtctgtcagcttgaccagtggagagtcattcatttagcacaagcagctggagatttaaactgccagtactatgtatttggtgtataatgcaaggaagaaactttatccttgaatttgagggtgatgggatagctcagctcaggtacttctcagtgtgtctacgctgctactgcttatggggtcc

SEQ ID NO: 54359 - DNA, 669 bp, Homo sapiens
ggctgagatgggagatttacctgagcctgggaactcaaggctgcagtgagtggtgattgcaccactgcactccagcctgggtgatgggagtgagaccctgtctcaaaaaacaaaatccaaatatgttgattagccatttacatgtttgtagtttttttttttttaatttcagtgaattgcctgttcatagcttttttctacttttcaggagtgtttgcatttttcttattgatatctaataactctttatatctgaaggatatgaacgctttgtgatacaggttacagattttggggtttttttctccgcttgctgtgagccttttgggtttgtttcctagctccaaatcttaacttggtgtcaagtttcctggctgggagacaagcttttaccgacttcctctgcttgccagcaaagtcatctgctaactggatattggcagcttctctgctgtcttgcagctgcttccggagtgggttccacagggattcccgtgtgttcttggttcagcttgcagagggactttcacactccctggagaccgtttcctcccattctgtctggagttttcggcctaccccaagacaatgagatattcctgacctttccacctatttccctccaaccccaccttccgaaatacatttgctcaatacatttgcacttca

SEQ ID NO: 54360 - DNA, 876 bp, Homo sapiens
ggctgagatgggagatttacctgagcctgggaactcaaggctgcagtgagtggtgattgcaccactgcactccagcctgggtgatgggagtgagaccctgtctcaaaaaacaaaatccaaatatgttgattagccatttacatgtttgtagtttttttttttttaatttcagtgaattgcctgttcatagcttttttctacttttcaggagtgtttgcatttttcttattgatatctaataactctttatatctgaaggatatgaacgctttgtgatacaggttacagattttggggtttttttctccgcttgctgtgagccttttgggtttgtttcctagctccaaatcttaacttggtgtcaagtttcctggctgggagacaagcttttaccgacttcctctgcttgccagcaaagtcatctgctaactggatattggcagcttctctgctgtcttgcagctgcttccggagtgggttccacagggattcccgtgtgttcttggttcagcttgcagagggactttcacactccctggagaccgtttcctcccattctgtctggagttttcggcctaccccaagacaatgagatattcctgacctttccacctatttccctccaaccccaccttccgaaatacatttgctcaatacatttgcacttcataggcttctttagctgtcttccttttaccccggacgggatgtagatgttaattctggaacaattgcagctacaagaatttgtcatcctgccccttttgagaaaaacattgtttgcccttgggtctaaatccttccagatgggatgggatgtatcttgtcacctcctttttcttacttaatatgaaaagacctttcctcatcaagtcc

SEQ ID NO: 54361 - DNA, 411 bp, Homo sapiens
tttggggtttttttctcccgccctttggcttgataggaagaaccccctttttttggggggttttttgttttttccccctaaggctccaaatcttaacttggtgtcaagtttcctggctgggagacaagcttttaccgacttcctctgcttgccagcaaagtcatctgctaactggatattggcagcttctctgctgtcttgcagctgcttccggagtgggttccacagggattcccgtgtgttcttggttcagcttgcagagggactttcacactccctggagaccgtttcctcccattctgtctggagttttcggcctaccccaagacaatgagatattcctgacctttccacctatttccctccaaccccaccttccgaaatacatttgctcaatacatttgcacttca

SEQ ID NO: 54362 - DNA, 847 bp, Homo sapiens
ggtattttaagaaccagttacctcagacctcatgttgaacagtgtcgccatctgggtcctcttgatactgcagacttttaacgtacacatgcaggaaccctgctgagcgtgggcacttgttttaaagcaaaactcttcccaaggactgaagaaagggcttctggcaagctcgtcatggcattgtggtgggatgggtctagagtgtcatctgaatggtgcttcctgtgttcctctttgaattctgccattttcagtattcttgtgtgtctgaataggcaaagcgatttaattggctggtcttgcacgcaaattagttccaaagataagctctttgtaacacatttccagtcactaatgctcaaatgtagaacattcctttaaatggcaggataaaaaacccactatccaccatagtgcattttgggaagatgtctgtagcatatgttgctgtgaaattaggccttgtgggatatggctgtttgtcattttgatgtattttaaataaatatatatattttttaaagagccttttttaccagttcaaaaagtttaattaaccagcagtcaccgcatctgaatttttgtctctggggcatagatggcagaccaagattaaaagtggtaactcagctatacgagcatgggctaccttcctgggctctcctgcagtcctgtagacctgctgttccgcagaccatgggacacaaggtcagtgtgttcccagtgagggtcccaagtcagtcatcttaagtgtttgttctctgccccattcagtggactgttgacttcagtccctgcaagtgctttagcccgagtggggttttctcagagcactgccacgagttaa

SEQ ID NO: 54363 - DNA, 366 bp, Homo sapiens
gaggtttcaccacgatggtcaggctggtatcaaactcctgatctcaggtgagccacccgcctcagtctcccaaagtgctgggactacaggcgtgagcaccgcacctggtcaaggcttgaactttctaatgggccatagctcttgtagtgggctgcactcttctaaattacctggtccctgcaccatagtccaaaggtttaagcagaaacctcaatgcacttgatgttactggccctctttgtacagaggataaatatgctaattctcttccttaggagttagccctgagaaggaaaagctcaatgttgtcaaatgcaacaggtccaccccactgaggggttccccttttaaattcttcatgggttt

SEQ ID NO: 54364 - DNA, 623 bp, Homo sapiens
tcctgtattctgctttgtgctgaccctgtaatctcagcagtacccattcgcctagcagggcttcgggatgcttccccgactctcctcgcaccttcacaccaacgcactccgggaatgtttctgatgggtgtcaagtccactctctgatgaacggactcgtgctttgagagcatcttcagggtcagtgcatccagtgaccgtttcatgacaccgtttgcctcgagcgccaccgcctggccaaaactggaacgacctgtgcccgttgctgaggaggaaaaacacccgggatggaatttctagtttttgtgcaatcctcatccttttccattttctgtaaagtgacgatgacagatattttcgcttactaatgcaagtatttttcatctgaataaatataccaatttctctggcaataatttgggtttaaaaatactgaggctggcccggcacagtggctcacacctgtaatcccagcactttgggaggccaaggcgggcggatcacgaggtcaggagttcgagaccatcctggccaacatggtgaaaccccgtctctactaaaaatacaaaaattagccgggtttggtggcgtgcgcctgtaatcccagctactcgcgaggctga

SEQ ID NO: 54365 - DNA, 383 bp, Homo sapiens
cccacctaaactgttcctgctgtgattatggctgctatgcatttatcttcccatgtttctgtgattttctccctcaattatcccttcctgagaaccatcaccatcaggcatgcctctcgcctttttcttccattactcaaacctcctcttgcctacagttcttcctctggcatatccatgcagctctgctctctttccctaccgcgtttctggccgttccttgtgtctcccaactgcatattcacccacctgactgtatggctaggagtctgtccctattatcaatgggcagaacttttcccactccccacctgggttggggaaggggagtggggtgtgggagccagggaaggagcccatagttagagattggtgagtatcga

SEQ ID NO: 54366 - DNA, 470 bp, Homo sapiens
agcgtcgatcacaatccaggtttgtatatcctggctttcagaccccttagggcatgctttctgggctcctgctagacatggtgtcaggtgccacctggaggcagcatagcaacctgattagggcccaagcagaatcactgctggcctcaatcccaactcctggctatgtgatcttgaatgcccatttcctcacctgcaaaatggggataataaagaactcacatctgaggtccttgtgagaatgaaaataagataaatgaaggtatacagcttattagtaagtgcttgaaacagagcatttcacctctctgagacttagatgtgtcctctataaaatggtgtattcttggccaggcatagtggctcatgcctataagcctagcactttgggaggccaaggcagacagatcacttgagcccatgagttcaagaccagcctgggcaacatggtgaaatactgtccctacaaa

SEQ ID NO: 54367 - DNA, 846 bp, Homo sapiens
aagcaagtaaaatatttatccgtttatttcagcgcaggatcgggtcatgagtggccagagcctatcctgcttagggtacaaagcaggaaacagccctggacaggacgccacccccatcgcagggcttactcatacacacgctcacactcagactgggactgtttacacatgccagctaacctaacatgcacagttttgtgatgtgggagtacctggagaaaacccatgccaacatgaggagaacatgcaaacagacagtggccccagccaggagtcagatttttttcccatcaacgttataaccaaatgacattggacaaaatattattcaagaacctgctataaataggaaagtttgcttctgtcctagggcttcatctatgaaactggaagagattgcagtgaaaccctttccatttcagcatcaatatgccttcaaagatgctgggactgacttatgaagccagcctgataacagaggacttcaccatgagcgcaggcccagagcattggtgatgggaaagcagagacttgtgttgtttcctaagggagctcagcactctctgtctgagtggttttctaaaattaatgttacacatctctgatggtctgttgaagtcagaggcatctgtcctaaaccaaagtaggtagaaaaattaaagtaatatttaactatgtttccatatctaaacataactgtcacttaagatgcttttagtggcagttgttttagaagcaattcaaactggctcaaacaagaagtgttattatatcacttaacgagaactgttcttatcacaatgtaagttgaagttaatataatctgaaaaaaaagccattagtttg

SEQ ID NO: 54368 - DNA, 277 bp, Homo sapiens
tatttgtagtacatattatagtgtatatccatataactataaacaaagcatactgtatgcttaaaaatgtacatgaagtcaagctaggcgcagtggctcacacttgtaatcccagcactttgggaggccgaggtggacagatcacaaggtcaggagtttgagacctgcctggacaacatggtgaaaccccgtctgtactaaaaatacaaaaaatagctgggtgtggtggcgtgcgcctgtaatctgagctacttgggaggctgaggcagaagaatct

SEQ ID NO: 54369 - DNA, 449 bp, Homo sapiens
gttggtgaagcatgcctcagagttgagatgacatcagggatgtacccttaatggtaatgccctttgtcatcaggtccttgcaaggaataaggtgacatcaagcatatccttttagtaacaacagggtgcctacaaactatcaaggtgtggcctacagcagcctgatgtgggggtacacattgtcagacgtagagaggcatattgccaaaggaatttggctgtggcttctgacacacagtgggctggagtcaaatacatagaaaactcctgagatgcttgagagatcgctctgggcaaaggcatcgcccaggactcaaggaaactgagactgtttgaacctaaagaaccttaggtcccaacttcccacaggcaggaagaagctgaaagttactctgctaccaaagggactgttttccaacatcctcatcagaagttgaaaggacgatgga

SEQ ID NO: 54370 - DNA, 202 bp, Homo sapiens
tttgcatccatatacatgtaatcccactgcatccccacactctgagggtgggactgttattctccctgttttacagatggggaaactgaggctttgagcaatgcagcagtttgccccagactacagagctatgggctacatcaggatgtaaaaatgtgtttcttactgcgtggcatggtgaaaacatgttggggaggcatga

SEQ ID NO: 54371 - DNA, 234 bp, Homo sapiens
atttggtggcatagagtattctatcgatcagtggtcaaaagagtagtcattctgagtgatctctaacattagggttgatggaagagatgacccatagatgtccctacatctcatttctcttaggacacacacttgggagaaatcgtccagtgcactttgtccaggccttttacttgtaccaactactttgctttatgctgttttcactttagtggttctgccttctagtccaca

SEQ ID NO: 54372 - DNA, 376 bp, Homo sapiens
gcggcccattctgcagatgttggtgaggttggtatttctgtggaggtgtcagcaaaggttgaatgcgccaggcatgaggcaaaggccaaggtttagggggacttctacacacacacctgcccccttgccttgtccagccagaaagcagagagcagtggcatctgcccagcacagaggcagatgggtggatccactcacccgaggatagagcagggaagacgggacaggagaaatccaagagggcttctcaggggaggaggcgtgtagtttggcttagatacagaggctagacaggggcctgagcagatgagtaggggactgggcatttgaagccaagagtcttgcacctccctacccctttctttgcaccctcata

SEQ ID NO: 54373 - DNA, 681 bp, Homo sapiens
agtgagtggccaggcaggtgcctgctcctgcaaccctgaagccgggaaagggtggtctctctccccatccttgacatagaaatcaccacccgacatttttgctgttttaaaacagttcatcctgccatggtaagtgatggcaaacatctgtgtcatttcattctcaaaggcccaccttctgtgtgctgcctgcttctggacactttcctgatggtcctgctggaaataccgtccctgccgctatgagtttgagagcgggcttcagcctccccatgatgcagcacatgctgcctgggatggcgctgcttgtgtcaatctccctgaaatgaagcaccctctgtccaggggactatgttctatttgtcgaaacttcacaggacataagtcactgctgggcctgtgctctttactttcttcaccaatctctctgctccccacataatactagacatatttccaacccctgaaattcccaactgctctctcatatataagtaagcaaaggaaaaattatgtggaagaatttttttttgatgtcaagaaaagaggaatttaggctggctgcagtggctcatgcctgtagtcccagctactcaggaggctgaggtaggagaatcccttgaaccaggaggcggaggttgcagtgacctgagtttgcgccactgcacttcagactgggtg

SEQ ID NO: 54374 - DNA, 457 bp, Homo sapiens
actgtaggccctcagattaagaaacggattcatcaaccaataaaacatacctttctacaaaccccttccccataaaagccaagctctctctttattttggttaacattttttttttcctgagtctgcttgctagggaactgttgaaatattaagccatctaagagcaaaggatatctttgttccccagaaagtaaaagaaaaagtaaaaaaatttaccaagcttaacttatatataagtcctagatctaatataagtcatttaatttatccttaaaacgtagaaaactattaaaactctattttctgatctcaaaggtgacttctgcttgtaacattaagtgctaagtggtagtttcatactttcaaatacaaattatcaattttaaaattaaaaaaattttgaattgggaatctaagtggtgtaaaagtcaaagggttcaaaatgatatttagtaa

SEQ ID NO: 54375 - DNA, 480 bp, Homo sapiens
cttctggggtccacaatgttgctttgctccatcaggctgaccagggtggaatccctgaccactcctgctggacaagagtggtccttggacaagacccttgatctccctgggcttccattttttctcattctgagaaaaaaaaaaatttaaatagaccagatcagatggactctaagggctccttcaatgaaggtccccctgtgccctgagtggggagaaaggttggagacagaagagaaggaaagccctctcctaagcaccctagatgctgcctcgtagttggtcctaagtccactacttctctaagccaccaaggcctcctctggctccaagggcaagtccagtttcccactcacacatttttcctcttactggtgatcgtgtaaatgcatgatctgaacagccctccacggtcagcatgttccttccccttgtgccattccccagctgagcttgtaaaaataaacataaaatgtgcag

SEQ ID NO: 54376 - DNA, 470 bp, Homo sapiens
gcccttttcacataagtaattttacttcatcttcattaatatgatttttatagatgaccaaatggaagttaaatgatttaacaaggccatacagctagaaagtgtctggactaagatttgaatccagatggggttaactccaaaaccagtatgtttagtttctataagaatcatggatagattaggcacaggggcttatgcctctaatcccaccactttgggaggttgaagtgagaggatcccttgaggtcagggagattgagaccagcctgggcagcatagtgagtcccctatatcgctctctctaaaaaaaaataaataaaaagccatttgtgttgttatgcacctgtagtctcagctacttgggaggctgaggctggaggattacttgagcccaggagttcaaggctgcaatgagctatgattgtgccactgcattttaacctgggagacagcaggactttctcaaa

SEQ ID NO: 54377 - DNA, 443 bp, Homo sapiens
ctctacaatctctttcgacagatggaagcagagggaacagttcctaactcattctgtgaggctagtttcaccctaataccaaaaccggtcaaagacattacaagaaaagaaaactatagaccaatatctctcataaacatagatgcaaaatccccaacaaaatacagtcatatgctgcatagtgatgttttggtcaatgatagaccatatacatgatgcggtaccataagattataatggaactgaaaaactcctattgcctagtgacatcataacatcatagcaaaacacattactcatgtctctgtggtaatcctggtgttaacttgccgcattgccagttgcataaaagcatagtatgtacaattatgtgcagtacataatacttgatatgttactagtttatgtatttattacatacttttatcattatttagagtgaa

SEQ ID NO: 54378 - DNA, 164 bp, Homo sapiens
gttgggagaggagagccacgaggcaggacatgtgcatttcttgctccctcctttgtgcttggcctggtgcatccagtgtggtccaggcacgctgcagctccagcagctctgtgaggcgggagcgtcatctcgtctgtccttagtgccagtccagggtgcagtcc

SEQ ID NO: 54379 - DNA, 210 bp, Homo sapiens
ttgacattgaggaaacctttgccataaataatccctgctattcaagagaacatttatcctcttgctgcagagtgaagacaaaagagtcaacgaagttttcaggaggcgatcacagactctgggagctctctttaggaagattaagaaaggcacaacaggcatcagaaccataatgatggataaaacaaataaagaggtgttgagttgctg

SEQ ID NO: 54380 - DNA, 876 bp, Homo sapiens
tatttttatattatttatttattctttgttagtttttggagtgtgggttttgttttttgaattttttattttgttctactcggttttattcttattgctcaggcttgagtgcactggcctcttctcagctcaacctccgcctcttgggttcgggtaatgatggttccacgtcagcggccctccgcctcttgggtttgcgtgacggttccacgtcaccgaccctccgcctcttgggttccggtgacgatggttccacgtcagcggccctccgcctcttgggtttgcgtgacggttccacatcaccgaccctccgcctcttgggttcgggtgatgatggttccacgtcagcggccctccgcctcttgggtttgcgtgacggttccacgtcaccgaccctccgcctcttgggttcgggaggtggttccatctcagccgccctctgcctcttgggtttgcgtggtttttctgcctcagcctcctgagtagctaagggaggtgtcttgagattatcatcggctgagggtggaagcggcccccgcagacgctcggcaggtgtcttgatattatcatctgctgagggtggagctgagggtggaaggggagtgagctgacgctcggaaggtgtcttgagattatcatccgctgagggtggaagcggcccccgcagacgctcggcaggtgtcttgatattatcatctgctgagggtggagctgagggtggaaggggagtgagctgacgctcggaaggtgtcttgagattatcatccgctgagggtggaagcggcccccgcagacgctcggcaggtgtcttgatattatcatctgctgagggtggaaggggagtgagctgacgctcggaaggtgtcttgagattat

SEQ ID NO: 54381 - DNA, 1187 bp, Homo sapiens
tatttttatattatttatttattctttgttagtttttggagtgtgggttttgttttttgaattttttattttgttctactcggttttattcttattgctcaggcttgagtgcactggcctcttctcagctcaacctccgcctcttgggttcgggtaatgatggttccacgtcagcggccctccgcctcttgggtttgcgtgacggttccacgtcaccgaccctccgcctcttgggttccggtgacgatggttccacgtcagcggccctccgcctcttgggtttgcgtgacggttccacatcaccgaccctccgcctcttgggttcgggtgatgatggttccacgtcagcggccctccgcctcttgggtttgcgtgacggttccacgtcaccgaccctccgcctcttggtttctgcctcagcctcctgagtagctaagggaggtgtcttgagattatcatcggctgaggtggaagcagaccccgcagacgctcggcaggtgtcttgatattatcatctgctgagggtggagctgagggtggaaggggagtgagctgacgctcggaaggtgtcttgagattatcatccgctgagggtggaagcggcccccgcagacgctcggcaggtggcttgatattatcatctgctgagggtggaaggggagtgagctgacgctcggaaggtgtcttgagattatcatccgctgagggtggaagcggcccccgcagacgctcggcaggtggcttgatattatcatctgctgagggtggagctgagggtggaaggggagtgagctgacgctcggaaggtgtcttgagattatcatccgctgagggtggaagcggcccccgcagacgctcggcaggtgtcttgatattatcatctgctgagggtggagctgagggtggaaggggagtgagctgacgctcggaaggtgtcttgagattatcatccgctgagggtggaagcggcccccgcagacgctcggcaggtgtcttgatattatcatctgctgagggtggagctgagggtggaaggggagtgagctgacgctcggaaggtgtcttgagattatcatccgctgagggtggaagcggcccccgcagacgctcggcaggtgtcttgatattatcatctgctgagggtggaaggggagtgagctgacgctcggaaggtgtcttgagattat

SEQ ID NO: 54382 - DNA, 983 bp, Homo sapiens
tatttttatattatttatttattctttgttagtttttggagtgtgggttttgttttttgaattttttattttgttctactcggttttattcttattgctcaggcttgagtgcactggcctcttctcagctcaacctccgcctcttgggttcgggtaatgatggttccacgtcagcggccctccgcctcttgggtttgcgtgacggttccacgtcaccgaccctccgcctcttgggttccggtgacgatggttccacgtcagcggccctccgcctcttgggtttgcgtgacggttccacatcaccgaccctccgcctcttgggttcgggtgatgatggttccacgtcagcggccctccgcctcttgggtttgcgtgacggttccacgtcaccgaccctccgcctcttgggttcgggaggtggttccatctcagccgccctctgcctcttgggtttgcgtggtttttctgcctcagcctcctgagtagctaagggaggtgtcttgagattatcatcggctgaggtggaagcagaccccgcagacgctcggcaggtgtcttgatattatcatctgctgagggtggagctgagggtggaaggggagtgagctgacgctcggaaggtgtcttgagattatcatccgctgagggtggaagcgcaggtgtcttgatattatcatctgctgagggtggagctgagggtggaaggggagtgagctgacgctcggaaggtgtcttgagattatcatccgctgagggtggaagcggcccccgcagacgctcggcaggtgtcttgatattatcatctgctgagggtggagctgagggtggaaggggagtgagctgacgctcggaaggtgtcttgagattatcatccgctgagggtggaagcggcccccgcagacgctcggcaggtgtcttgatattatcatctgctgagggtggaaggggagtgagctgacgctcggaaggtgtcttgagattat

SEQ ID NO: 54383 - DNA, 392 bp, Homo sapiens
tccttggaggggcttctgggtggccagccgtgtattgttgcttggttgtgcttttagggttgtctggcttgtgtgggtgctgggtttgtcggtgcagagagcacagctggttccaggctggcttcagaaggctgcaggcagattcctggggagagggtgacactatagcgccagttcttcttacagccttgttctgcactttctaaaaatattcctgacaaacagctaatgggcattttggccattctattgccaaactattgctgccatttcaaatggaatgcttctccttcaagcctgttcatcttgacttatatgatggggatagattcatccgtttcatgggacttcacaacagcccactcaccagaggctctttgaaaacaatcaag

SEQ ID NO: 54384 - DNA, 395 bp, Homo sapiens
cagaggtgccccagactttttaaccaggacaccctccaacatcagaggagagggaattaatgaataccctgagtagcctaagacatagccaaaagctgccctagcacaaacatcttcattcttggctattcatgtacattttcctttctactcagggacatatttgctgtgttgacagttaaatttttttttctccgacctattagtgaaattgacagaccaaaaatttgtaccaaatatagcctgtgccattttgggggaacacatgtctgtcaaaaggacagaacatacatacagcagtcaaccaaagtccttacagaaaaacatgatcaacaaggagaaaagagcagaatataaaccaagcacctattgctcaaacagtgaactgagactgc

SEQ ID NO: 54385 - DNA, 2436 bp, Homo sapiens
cagccccgcagcggccgagctgcagcccgggctcagtctccgccgccgccgtgaacatggagcccccggacgcaccggcccaggcgcgcggggccccgcggctgctgttgctcgcagtcctgctggcggcgcacccagatgcccaggcggaggtgcgcttgtctgtacccccgctggtggaggtgatgcgaggaaagtctgtcattctggactgcacccctacgggaacccacgaccattatatgctggaatggttccttaccgaccgctcgggagctcgcccccgcctagcctcggctgagatgcagggctctgagctccaggtcacaatgcacgacacccggggccgcagtcccccataccagctggactcccaggggcgcctggtgctggctgaggcccaggtgggcgacgagcgagactacgtgtgcgtggtgagggcaggggcggcaggcactgctgaggccactgcgcggctcaacgtgtttgcaaagccagaggccactgaggtctcccccaacaaagggacactgtctgtgatggaggactctgcccaggagatcgccacctgcaacagccggaacgggaacccggcccccaagatcacgtggtatcgcaacgggcagcgcctggaggtgcccgtagagatgaacccagagggctacatgaccagccgcacggtccgggaggcctcgggcctgctctccctcaccagcaccctctacctgcggctccgcaaggatgaccgagacgccagcttccactgcgccgcccactacagcctgcccgagggccgccacggccgcctggacagccccaccttccacctcaccctgcactatcccacggagcacgtgcagttctgggtgggcagcccgtccaccccagcaggctgggtacgcgagggtgacactgtccagctgctctgccggggggacggcagccccagcccggagtatacgcttttccgccttcaggatgagcaggaggaagtgctgaatgtgaatctcgaggggaacttgaccctggagggagtgacccggggccagagcgggacctatggctgcagagtggaggattacgacgcggcagatgacgtgcagctctccaagacgctggagctgcgcgtggcctatctggaccccctggagctcagcgaggggaaggtgctttccttacctctaaacagcagtgcagtcgtgaactgctccgtgcacggcctgcccacccctgccctacgctggaccaaggactccactcccctgggcgatggccccatgctgtcgctcagttctatcaccttcgattccaatggcacctacgtatgtgaggcctccctgcccacagtcccggtcctcagccgcacccagaacttcacgctgctggtccaaggctcgccagagctaaagacagcggaaatagagcccaaggcagatggcagctggagggaaggagacgaagtcacactcatctgctctgcccgcggccatccagaccccaaactcagctggagccaattggggggcagccccgcagagccaatccccggacggcagggttgggtgagcagctctctgaccctgaaagtgaccagcgccctgagccgcgatggcatctcctgtgaagcctccaacccccacgggaacaagcgccatgtcttccacttcggcgccgtgagcccccagacctcccaggctggagtggccgtcatggccgtggccgtcagcgtgggcctcctgctcctcgtcgttgctgtcttctactgcgtgagacgcaaagggggcccctgctgccgccagcggcgggagaagggggctccgccgccaggggagccagggctgagccactcggggtcggagcaaccagagcagaccggccttctcatgggaggtgcctccggaggagccaggggtggcagcgggggcttcggagacgagtgctgagccaagaacctcctagaggctgtccctggacctggagctgcaggcatcagagaaccagccctgctcacgccatgcccgcccccgccttccctcttccctcttccctctccctgcccagccctcccttccttcctctgccggcaaggcagggacccacagtggctgcctgcctccgggagggaaggagagggagggtgggtgggtgggagggggccttcctccagggaatgtgactctcccaggccccagaatagctcctggacccaagcccaaggcccagcctgggacaaggctccgagggtcggctggccggagctatttttacctcccgcctcccctgctggtccccccacctgacgtcttgctgcagagtctgacactggattcccccccctcaccccgcccctggtcccactcctgcccccgccctacctccgccccaccccatcatctgtggacactggagtctggaataaatgctgtttgtcacatc

SEQ ID NO: 54386 - DNA, 984 bp, Homo sapiens
ccggtctaggtagagtgcttgtgttactctggacgaggctgcagcccgggctcagtctccgccgccgccgtgaacatggagcccccggacgcaccggcccaggcgcgcggggccccgcggctgctgttgctcgcagtcctgctggcggcgcacccagatgcccaggcggaggtgcgcttgtctgtacccccgctggtggaggtgatgcgaggaaagtctgtcattctggactgcacccctacgggaacccacgaccattatatgctggaatggttccttaccgaccgctcgggagctcgcccccgcctagcctcggctgagatgcagggctctgagctccaggtcacaatgcacgacacccggggccgcagtcccccataccagctggactcccaggggcgcctggtgctggctgaggcccaggtgggcgacgagcgagactacgtgtgcgtggtgagggcaggggcggcaggcactgctgaggccactgcgcggctcaacgtgtttgcaaagccagaggccactgaggtctcccccaacaaagggacactgtctgtgatggaggactctgcccaggaggtacctctcgggtggaccttggccccagggtcctggaggaggaggggacagggccctggactcctgggtctgagggaggaggggctggggacccctgggtaataaaggaggaggggtaaggccaggcgaggtggctcatgcctgtaatcccagcattttgggaggcagaggcaggcggatcacctgaggtcaggagttccagaccagcctggccaacataatgaaaccccgtctctactaaagatacaaaaattagctgggtgtgttggtgtgcaactgtaatcccagctgctcgggaggctgagacaggagaatcactcgaacccagaaggcagaggctacagtgagctaagatcacaccactgcactccagcctgggccacagagcaatactccgtctcaaaa

SEQ ID NO: 54387 - DNA, 853 bp, Homo sapiens
  misc_feature (483)..(483): n is a, c, g, or t
  misc_feature (486)..(486): n is a, c, g, or t
  misc_feature (497)..(497): n is a, c, g, or t
  misc_feature (517)..(517): n is a, c, g, or t
  misc_feature (539)..(539): n is a, c, g, or t
  misc_feature (554)..(554): n is a, c, g, or t
  misc_feature (571)..(571): n is a, c, g, or t
  misc_feature (592)..(592): n is a, c, g, or t
  misc_feature (653)..(653): n is a, c, g, or t
  misc_feature (696)..(696): n is a, c, g, or t
  misc_feature (704)..(705): n is a, c, g, or t
  misc_feature (712)..(712): n is a, c, g, or t
  misc_feature (723)..(723): n is a, c, g, or t
  misc_feature (737)..(738): n is a, c, g, or t
  misc_feature (742)..(742): n is a, c, g, or t
  misc_feature (746)..(746): n is a, c, g, or t
  misc_feature (751)..(751): n is a, c, g, or t
  misc_feature (769)..(769): n is a, c, g, or t
  misc_feature (780)..(780): n is a, c, g, or t
  misc_feature (785)..(785): n is a, c, g, or t
  misc_feature (787)..(787): n is a, c, g, or t
  misc_feature (810)..(810): n is a, c, g, or t
cagccccgcagcggccgagctgcagcccgggctcagtctccgccgccgccgtgaacatggagcccccggacgcaccggcccaggcgcgcggggccccgcggctgctgttgctcgcagtcctgctggcggcgcacccagatgcccaggcggaggtgcgcttgtctgtacccccgctggtggaggtgatgcgaggaaagtctgtcattctggactgcacccctacgggaacccacgaccattatatgctggaatggttccttaccgaccgctcgggagctcgcccccgcctagcctcggctgagatgcagggctctgagctccaggtcacaatgcacgacacccggggccgcagtcccccataccagctggactcccaggggcgcctggtgctggctgaggcccaggtgggcgacgagcgagactacgtgtgcgtggtgagggcaggggcggcaggcactgctgaggcccataagcggcataccngtntttgccccacncgcggcccctgcggtatccncccacaaagggacactgtactntaatgaagaccatcngccccggcgatcgcccncctgtccccagccggccccgngccccccggtcccccaccactccccgtgtgtatgcgccaccgggccgtcgcctgtgtcggngccccgttgacgcatgtcccccccgcgcggactcccatgtctnccgaccgnnccaggtnccgggacggcnctcagggccttgcnnctcncctnccccnggcacccctctcacctancggcttccgcncgggngnggaccggcgcgcgcccgctatanccctgacgccgacccactttcagcatggcccgaggggccgccc

SEQ ID NO: 54388 - DNA, 2455 bp, Homo sapiens
ccggtctaggtagagtgcttgtgttactctggacgaggctgcagcccgggctcagtctccgccgccgccgtgaacatggagcccccggacgcaccggcccaggcgcgcggggccccgcggctgctgttgctcgcagtcctgctggcggcgcacccagatgcccaggcggaggtgcgcttgtctgtacccccgctggtggaggtgatgcgaggaaagtctgtcattctggactgcacccctacgggaacccacgaccattatatgctggaatggttccttaccgaccgctcgggagctcgcccccgcctagcctcggctgagatgcagggctctgagctccaggtcacaatgcacgacacccggggccgcagtcccccataccagctggactcccaggggcgcctggtgctggctgaggcccaggtgggcgacgagcgagactacgtgtgcgtggtgagggcaggggcggcaggcactgctgaggccactgcgcggctcaacgtgtttgcaaagccagaggccactgaggtctcccccaacaaagggacactgtctgtgatggaggactctgcccaggagatcgccacctgcaacagccggaacgggaacccggcccccaagatcacgtggtatcgcaacgggcagcgcctggaggtgcccgtagagatgaacccagagggctacatgaccagccgcacggtccgggaggcctcgggcctgctctccctcaccagcaccctctacctgcggctccgcaaggatgaccgagacgccagcttccactgcgccgcccactacagcctgcccgagggccgccacggccgcctggacagccccaccttccacctcaccctgcactatcccacggagcacgtgcagttctgggtgggcagcccgtccaccccagcaggctgggtacgcgagggtgacactgtccagctgctctgccggggggacggcagccccagcccggagtatacgcttttccgccttcaggatgagcaggaggaagtgctgaatgtgaatctcgaggggaacttgaccctggagggagtgacccggggccagagcgggacctatggctgcagagtggaggattacgacgcggcagatgacgtgcagctctccaagacgctggagctgcgcgtggcctatctggaccccctggagctcagcgaggggaaggtgctttccttacctctaaacagcagtgcagtcgtgaactgctccgtgcacggcctgcccacccctgccctacgctggaccaaggactccactcccctgggcgatggccccatgctgtcgctcagttctatcaccttcgattccaatggcacctacgtatgtgaggcctccctgcccacagtcccggtcctcagccgcacccagaacttcacgctgctggtccaaggctcgccagagctaaagacagcggaaatagagcccaaggcagatggcagctggagggaaggagacgaagtcacactcatctgctctgcccgcggccatccagaccccaaactcagctggagccaattggggggcagccccgcagagccaatccccggacggcagggttgggtgagcagctctctgaccctgaaagtgaccagcgccctgagccgcgatggcatctcctgtgaagcctccaacccccacgggaacaagcgccatgtcttccacttcggcgccgtgagcccccagacctcccaggctggagtggccgtcatggccgtggccgtcagcgtgggcctcctgctcctcgtcgttgctgtcttctactgcgtgagacgcaaagggggcccctgctgccgccagcggcgggagaagggggctccgccgccaggggagccagggctgagccactcggggtcggagcaaccagagcagaccggccttctcatgggaggtgcctccggaggagccaggggtggcagcgggggcttcggagacgagtgctgagccaagaacctcctagaggctgtccctggacctggagctgcaggcatcagagaaccagccctgctcacgccatgcccgcccccgccttccctcttccctcttccctctccctgcccagccctcccttccttcctctgccggcaaggcagggacccacagtggctgcctgcctccgggagggaaggagagggagggtgggtgggtgggagggggccttcctccagggaatgtgactctcccaggccccagaatagctcctggacccaagcccaaggcccagcctgggacaaggctccgagggtcggctggccggagctatttttacctcccgcctcccctgctggtccccccacctgacgtcttgctgcagagtctgacactggattcccccccctcaccccgcccctggtcccactcctgcccccgccctacctccgccccaccccatcatctgtggacactggagtctggaataaatgctgtttgtcacatc

SEQ ID NO: 54389 - DNA, 2465 bp, Homo sapiens
  misc_feature (2225)..(2225): n is a, c, g, or t
ccggtctaggtagagtgcttgtgttactctggacgaggctgcagcccgggctcagtctccgccgccgccgtgaacatggagcccccggacgcaccggcccaggcgcgcggggccccgcggctgctgttgctcgcagtcctgctggcggcgcacccagatgcccaggcggaggtgcgcttgtctgtacccccgctggtggaggtgatgcgaggaaagtctgtcattctggactgcacccctacgggaacccacgaccattatatgctggaatggttccttaccgaccgctcgggagctcgcccccgcctagcctcggctgagatgcagggctctgagctccaggtcacaatgcacgacacccggggccgcagtcccccataccagctggactcccaggggcgcctggtgctggctgaggcccaggtgggcgacgagcgagactacgtgtgcgtggtgagggcaggggcggcaggcactgctgaggccactgcgcggctcaacgtgtttgcaaagccagaggccactgaggtctcccccaacaaagggacactgtctgtgatggaggactctgcccaggagatcgccacctgcaacagccggaacgggaacccggcccccaagatcacgtggtatcgcaacgggcagcgcctggaggtgcccgtagagatgaacccagagggctacatgaccagccgcacggtccgggaggcctcgggcctgctctccctcaccagcaccctctacctgcggctccgcaaggatgaccgagacgccagcttccactgcgccgcccactacagcctgcccgagggccgccacggccgcctggacagccccaccttccacctcaccctgcactatcccacggagcacgtgcagttctgggtgggcagcccgtccaccccagcaggctgggtacgcgagggtgacactgtccagctgctctgccggggggacggcagccccagcccggagtatacgcttttccgccttcaggatgagcaggaggaagtgctgaatgtgaatctcgaggggaacttgaccctggagggagtgacccggggccagagcgggacctatggctgcagagtggaggattacgacgcggcagatgacgtgcagctctccaagacgctggagctgcgcgtggcctatctggaccccctggagctcagcgaggggaaggtgctttccttacctctaaacagcagtgcagtcgtgaactgctccgtgcacggcctgcccacccctgccctacgctggaccaaggactccactcccctgggcgatggccccatgctgtcgctcagttctatcaccttcgattccaatggcacctacgtatgtgaggcctccctgcccacagtcccggtcctcagccgcacccagaacttcacgctgctggtccaaggctcgccagagctaaagacagcggaaatagagcccaaggcagatggcagctggagggaaggagacgaagtcacactcatctgctctgcccgcggccatccagaccccaaactcagctggagccaattggggggcagccccgcagagccaatccccggacggcagggttgggtgagcagctctctgaccctgaaagtgaccagcgccctgagccgcgatggcatctcctgtgaagcctccaacccccacgggaacaagcgccatgtcttccacttcggcgccgtgagcccccagacctcccaggctggagtggccgtcatggccgtggccgtcagcgtgggcctcctgctcctcgtcgttgctgtcttctactgcgtgagacgcaaagggggcccctgctgccgccagcggcgggagaagggggctccgtgagtggcctgctatctgcaatgaccaccatagcttaaccccatccccaccctcaaccccaagctcaacccataacctcaaccacatcttatcctccaccccacatcccaccacatccacctccatccccaacccatcctcatccccaactacagccccaaacccagccccagactaatccacagccatccccaactcatcctcatccccaactgcagccccaaacccaacccagggccatccccaaacccatccccaagccaaactcaacaccatccccttccctaatcacctctcctgcccctagctcagcctcatccccaactccatgcctgtctccaatcccaaccctgcccccaatctcccctcaactccaatccataacncccttcaaaccatcctcaactaagctcctctccagccctggccacatccccatcctcccccaacctccagccccaacacccatcatccccctgagctcacccttaactccaatttatcctccaagcctatctctcaccatccagccctcacctagccatttcccaaccctagtcctccaccgtcccgaagccaacttcacccatgtccccatccccaatcttgtccccattcctgactcc

SEQ ID NO: 54390 - DNA, 287 bp, Homo sapiens
gtcattgtgcagctgttattcagttcatgcacagacaacaaagcatgtagatgttttgactccatgaatctcagtgataaacacaagtgacattttacaaagatcaattaaaaagagagaaaactggacaacatagacgaggttgcaacaaagaaatagaaagtaagaatattggaaatgaaatttgaatacaatatatatggagtcacagaataaattgttgatcatgggaatgttgacatcatttcaaagactctagatatgcaaccagatgaacctaaagaaga

SEQ ID NO: 54391 - DNA, 555 bp, Homo sapiens
actcaaggatttcaatatatttctctcctaatgggtagaacagaagcaaacagaagatcagtaaggatgtcttgaactgcattatcaaccaacatgacctaattgacatttatagaacaccacatccaatatcagcaagatacacattcgttataagttcattcagaacatttaccaagacagacactattttgagccttaaaatcaatcaataaattaaattataaatcaataacagagagatctgaaagatctccaaacatctggaaactaagtaacaaatgtctaaatgacccatgggtcaaagaagagaccaaaagagatgttagtattttgaattgaatgaaagtaaaaaacagcatataaaaattggtgaaatgctgttgatatatagggagatctttatagtaataacttctgtgttagaaaagaagacaggtctcaaataaatggtctcggattccgtcttaagaaactgggggttggggctggagaaggcaaatttaaaacaaagtgagcagagggaaggaaataatgaaaatcaaaaataaacca

SEQ ID NO: 54392 - DNA, 294 bp, Homo sapiens
gtacctggctcaggcctaaagtacagagagcacaactagtgcaggaagatccgttaggaagcaacgcgagtagttgaggaagaggtgacggggtttggaccaaactggggacaggcagattggagtagacattggagagggcatccagaggcggggtcggcaccaggagatgtgggcgccagaggaaggggaaggaggttctgagggtgacccccacccccactctcaggggaaggacgctggcctgctccaagctggcttcctggagggaaggcaggtttctgtagacagacg

SEQ ID NO: 54393 - DNA, 553 bp, Homo sapiens
tctgcttggggtgctggacaagcagaaggggaacactcaagttctttctctccataactgccttcgggaagccatggcagatgcgttgactctctgtagggctggcaagctgtgtggcgagtcccttatccaatgtcgctgtgtcccacagggaggtcttaaagaggcagccgacttttgtggcctccttgtgaaagcttcgatgcctcagggattatttctgagctgactgctagttggacttgggcccactgaagagacagcctgggatcggatgtccagaagagacagatctgagcacgtctctttcctctccctcctcttttcttcttagcccttccacctatcactcattcattgccccttcctaggttctgtattcatttgctgggggctttaacaatgagacgttattttctcccagtctggaggctggaagttcaaggcctaggtgccagcaggattggggtccctggagccctccctccttggctaggagatggccgcccccttgctctgagcccacatggtccttcctgtatgcacctgcacc

SEQ ID NO: 54394 - DNA, 688 bp, Homo sapiens
gcggccgcgcagtgtggttcagcccggactccgcggggcgagctgcccttcctcccccgacccccgcgcaagtggtgcattggcgcgcggcgccgaggggcggggcccgagccgggcgcgcgcgggcgctgctctataaataccgggccgcaccgcccgctgcttcgttcgctccgcgccgcccgcctgctacgagtagaacgctgtccgcagcttgcgcatttcgcagccgctgccgcctcgccgctgctccttcgtaaggccacttccgcacaccgacaccaacatgaacggacagctcaacggcttccacgaggcgttcatcgaggagggcacattccttttcacctcagagtcggtcggggaaggccacccaggtgaggggacggcctgaagcgaagcgtggggcggggcagaaggcagcgccaaggtccggctggctgcggccggccggtggtggggcccgcgcgggtcgtcctcgtccgccgggtgatggaagagcggcgaccgcgcgctttcctcgtggcgccgccagggcctggcgcgtggccgccgctcctcttccccctcccctctccacccttcccttcccccctcccttttcattcggtcgcgcgcctaggcatgcggaaggttccagaaaacgtgaagggcgggggctgtggtcgctagtgagttctggccggga

SEQ ID NO: 54395 - DNA, 907 bp, Homo sapiens
  misc_feature (885)..(885): n is a, c, g, or t
  misc_feature (900)..(900): n is a, c, g, or t
  misc_feature (907)..(907): n is a, c, g, or t
gcggccgcgcagtgtggttcagcccggactccgcggggcgagctgcccttcctcccccgacccccgcgcaagtggtgcattggcgcgcggcgccgaggggcggggcccgagccgggcgcgcgcgggcgctgctctataaataccgggccgcaccgcccgctgcttcgttcgctccgcgccgcccgcctgctacgagtagaacgctgtccgcagcttgcgcatttcgcagccgctgccgcctcgccgctgctccttcgtaaggccacttccgcacaccgacaccaacatgaacggacagctcaacggcttccacgaggcgttcatcgaggagggcacattccttttcacctcagagtcggtcggggaaggccacccagataagatttgtgaccaaatcagtgatgctgtccttgatgcccaccttcagcaggatcctgatgccaaagtagcttgtgaaactgttgctaaaactggaatgatccttcttgctggggaaattacatccagagctgctgttgactaccagaaagtggttcgtgaagctgttaaacacattggatatgatgattcttccaaaggttttgactacaagacttgtaacgtgctggtagccttggagcaacagtcaccagatattgctcaaggtgttcatcttgacagaaatgaagaagacattggtgctggagaccagggcttaatgtttggctatgccactgatgaaactgaggagtgtatgcctttaaccattgtcttggcacacaagctaaatgccaaactggcagaactacgccgtaatggcactttgccttggttacgccctgattctaaaactcaatgatctagagtccacaccaatggtatatctggtcagcatgatggaggttngtcttgatgtgaggntgccctn

SEQ ID NO: 54396 - DNA, 3572 bp, Homo sapiens
gcggccgcgcagtgtggttcagcccggactccgcggggcgagctgcccttcctcccccgacccccgcgcaagtggtgcattggcgcgcggcgccgaggggcggggcccgagccgggcgcgcgcgggcgctgctctataaataccgggccgcaccgcccgctgcttcgttcgctccgcgccgcccgcctgctacgagtagaacgctgtccgcagcttgcgcatttcgcagccgctgccgcctcgccgctgctccttcgtaaggccacttccgcacaccgacaccaacatgaacggacagctcaacggcttccacgaggcgttcatcgaggagggcacattccttttcacctcagagtcggtcggggaaggccacccagataagatttgtgaccaaatcagtgatgctgtccttgatgcccaccttcagcaggatcctgatgccaaagtagcttgtgaaactgttgctaaaactggaatgatccttcttgctggggaaattacatccagagctgctgttgactaccagaaagtggttcgtgaagctgttaaacacattggatatgatgattcttccaaaggttttgactacaagacttgtaacgtgctggtagccttggagcaacagtcaccagatattgctcaaggtgttcatcttgacagaaatgaagaagacattggtgctggagaccagggcttaatgtttggctatgccactgatgaaactgaggagtgtatgcctttaaccattgtcttggcacacaagctaaatgccaaactggcagaactacgccgtaatggcactttgccttggttacgccctgattctaaaactcaagttactgtgcagtatatgcaggatcgaggtgctgtgcttcccatcagagtccacacaattgttatatctgttcagcatgatgaagaggtttgtcttgatgaaatgagggatgccctaaaggagaaagtcatcaaagcagttgtgcctgcgaaataccttgatgaggatacaatctaccacctacagccaagtggcagatttgttattggtgggcctcagggtgatgctggtttgactggacgcaaaatcattgtggacacttatggcggttggggtgctcatggaggaggtgccttttcaggaaaggattataccaaggtcgaccgttcagctgcttatgctgctcgttgggtggcaaaatcccttgttaaaggaggtctgtgccggagggttcttgttcaggtatacactctttatataacgaacgattaaaagtcatgtaagtgggagggtatttagtagtaatctacttaactacttgttttataccaacgtattatacaagtgtatgggtctttgcaatcactgattcttacgacatttgaatccttttaggtctcttatgctattggagtttctcatccattatctatctccattttccattatggtacctctcagaagagtgagagagagctattagagattgtgaagaagaatttcgatctccgccctggggtcattgtcagaagatggtaaagcctgttgctagtcaagtattgagggtgttgggtgtgtgtgtatatacttaaggctgaggaggtgaaggtgtgaaggaagactcctcaaatgggaatatattttaattcctggaacagttttgaactgctgccttagtgaagacttagttatttgagaaatttaaaattacggtgctccatggcttaggctaaccactctagagaatgttccagatttgatccagggacggaaaaacaactatagttactaataaggactgtgcaaggagtttggacaccagggaagtaacacttttgccacaaatttttttcctagcatatcccagagaactcatttgccagagctcttgaaaatgagtcttgctgattgttttgctttattttaatttaatgctacatattaagttacggacttgtatattccagggatctggatctgaagaagccaatttatcagaggactgcagcctatggccactttggtagggacagcttcccatgggaagtgcccaaaaagcttaaatattgaaagtgttagccttttttccccagacttgttggcgtaggctacagagaagccttcaagctctgagggaaagggccctccttcctaaattttcctgtcctctttcagctcctgaccagttgcagtcactctagtcaatgacatgaattttagcttttgtgggggactgtaagttgggcttgctattctgtccctaggtgttttgttcaccattataatgaatttagtgagcataggtgatccatgtaactgcctagaaacaacactgtagtaaataatgctttgaaattgaacctttgtgccctatcacccaacgctccaaagtcataattgcattgactttccccaccagatgctgaaaatgtccttgtgatgtgcacgtaaagtacttgtagttccacttatagcctctgtctggcaatgccacagccctgtcagcatgaatttgtaatgtcttgagctctattatgaatgtgaagccttccccttatcctccctgtaacttgatccatttctaattatgtagctctttgtcagggagtgttccctatccaatcaatcttgcatgtaacgcaagttcccagttggagctccagcctgacatcaaaaaaggcagttaccattaaaccatctccctggtgcttatgctcttaattgccacctctaacagcaccaaatcaaaatctctccactttcagctgtcttttggaggacgtacgtaataaggttttaatttagtaaaccaatcctatgcatggtttcagcactagccaaacctcaccaactcctagttctagaaaaacaggcacttggcagccttgtgatgtcatacagagaagtcacagggcagtacctgagggtctgtaggttgcacactttggtaccagataacttttttttttctttataagaaagcctgagtactccacactgcacaataactcctcccagggttttaactttgttttattttcaaaaccaggtccaatgagctttctgaacagctggtgtagctacagagaaaccagcttccttcagagagcagtgcttttggcggggaggaggaaatcccttcatacttgaacgttttctaattgcttatttattgtattctggggtatggcgtaagtacagagaagccatcacctcagatggcagcttttaaaagattttttttttttctctcaacaccatgattcctttaacaacatgtttccagcattcccaggtaggccaaggtgtcctacagaaaaaccttgggttagacctacagggggtctggctggtgttaacagaagggagggcagagctggtgcggctggccatggagaaagctgacttggctggtgtggtacagagaagccagcttgtttacatgcttattccatgactgcttgccctaagcagaaagtgcctttcaggatctatttttggaggtttattacgtatgtctggttctcaattccaacagtttaatgaagatctaaataaaatgctaggttctacctta

SEQ ID NO: 54397 - DNA, 2637 bp, Homo sapiens
tggtgaggccccgggtatatcggccgaggccagataagatttgtgaccaaatcagtgatgctgtccttgatgcccaccttcagcaggatcctgatgccaaagtagcttgtgaaactgttgctaaaactggaatgatccttcttgctggggaaattacatccagagctgctgttgactaccagaaagtggttcgtgaagctgttaaacacattggatatgatgattcttccaaaggttttgactacaagacttgtaacgtgctggtagccttggagcaacagtcaccagatattgctcaaggtgttcatcttgacagaaatgaagaagacattggtgctggagaccagggcttaatgtttggctatgccactgatgaaactgaggagtgtatgcctttaaccattgtcttggcacacaagctaaatgccaaactggcagaactacgccgtaatggcactttgccttggttacgccctgattctaaaactcaagttactgtgcagtatatgcaggatcgaggtgctgtgcttcccatcagagtccacacaattgttatatctgttcagcatgatgaagaggtttgtcttgatgaaatgagggatgccctaaaggagaaagtcatcaaagcagttgtgcctgcgaaataccttgatgaggatacaatctaccacctacagccaagtggcagatttgttattggtgggcctcagggtgatgctggtttgactggacgcaaaatcattgtggacacttatggcggttggggtgctcatggaggaggtgccttttcaggaaaggattataccaaggtcgaccgttcagctgcttatgctgctcgttgggtggcaaaatcccttgttaaaggaggtctgtgccggagggttcttgttcaggtctcttatgctattggagtttctcatccattatctatctccattttccattatggtacctctcagaagagtgagagagagctattagagattgtgaagaagaatttcgatctccgccctggggtcattgtcagggatctggatctgaagaagccaatttatcagaggactgcagcctatggccactttggtagggacagcttcccatgggaagtgcccaaaaagcttaaatattgaaagtgttagccttttttccccagacttgttggcgtaggctacagagaagccttcaagctctgagggaaagggccctccttcctaaattttcctgtcctctttcagctcctgaccagttgcagtcactctagtcaatgacatgaattttagcttttgtgggggactgtaagttgggcttgctattctgtccctaggtgttttgttcaccattataatgaatttagtgagcataggtgatccatgtaactgcctagaaacaacactgtagtaaataatgctttgaaattgaacctttgtgccctatcacccaacgctccaaagtcataattgcattgactttccccaccagatgctgaaaatgtccttgtgatgtgcacgtaaagtacttgtagttccacttatagcctctgtctggcaatgccacagccctgtcagcatgaatttgtaatgtcttgagctctattatgaatgtgaagccttccccttatcctccctgtaacttgatccatttctaattatgtagctctttgtcagggagtgttccctatccaatcaatcttgcatgtaacgcaagttcccagttggagctccagcctgacatcaaaaaaggcagttaccattaaaccatctccctggtgcttatgctcttaattgccacctctaacagcaccaaatcaaaatctctccactttcagctgtcttttggaggacgtacgtaataaggttttaatttagtaaaccaatcctatgcatggtttcagcactagccaaacctcaccaactcctagttctagaaaaacaggcacttggcagccttgtgatgtcatacagagaagtcacagggcagtacctgagggtctgtaggttgcacactttggtaccagataacttttttttttctttataagaaagcctgagtactccacactgcacaataactcctcccagggttttaactttgttttattttcaaaaccaggtccaatgagctttctgaacagctggtgtagctacagagaaaccagcttccttcagagagcagtgcttttggcggggaggaggaaatcccttcatacttgaacgttttctaattgcttatttattgtattctggggtatggcgtaagtacagagaagccatcacctcagatggcagcttttaaaagattttttttttttctctcaacaccatgattcctttaacaacatgtttccagcattcccaggtaggccaaggtgtcctacagaaaaaccttgggttagacctacagggggtctggctggtgttaacagaagggagggcagagctggtgcggctggccatggagaaagctgacttggctggtgtggtacagagaagccagcttgtttacatgcttattccatgactgcttgccctaagcagaaagtgcctttcaggatctatttttggaggtttattacgtatgtctggttctcaattccaacagtttaatgaagatctaaataaaatgctaggttctacctta

SEQ ID NO: 54398 - DNA, 2613 bp, Homo sapiens
aaggctagagaggctgggtgttaatcggccgaggtgctgtcctgattgcccaccttcagcaggatcctgatgccaaagtagcttgtgaaactgttgctaaaactggaatgatccttcttgctggggaaattacatccagagctgctgttgactaccagaaagtggttcgtgaagctgttaaacacattggatatgatgattcttccaaaggttttgactacaagacttgtaacgtgctggtagccttggagcaacagtcaccagatattgctcaaggtgttcatcttgacagaaatgaagaagacattggtgctggagaccagggcttaatgtttggctatgccactgatgaaactgaggagtgtatgcctttaaccattgtcttggcacacaagctaaatgccaaactggcagaactacgccgtaatggcactttgccttggttacgccctgattctaaaactcaagttactgtgcagtatatgcaggatcgaggtgctgtgcttcccatcagagtccacacaattgttatatctgttcagcatgatgaagaggtttgtcttgatgaaatgagggatgccctaaaggagaaagtcatcaaagcagttgtgcctgcgaaataccttgatgaggatacaatctaccacctacagccaagtggcagatttgttattggtgggcctcagggtgatgctggtttgactggacgcaaaatcattgtggacacttatggcggttggggtgctcatggaggaggtgccttttcaggaaaggattataccaaggtcgaccgttcagctgcttatgctgctcgttgggtggcaaaatcccttgttaaaggaggtctgtgccggagggttcttgttcaggtctcttatgctattggagtttctcatccattatctatctccattttccattatggtacctctcagaagagtgagagagagctattagagattgtgaagaagaatttcgatctccgccctggggtcattgtcagggatctggatctgaagaagccaatttatcagaggactgcagcctatggccactttggtagggacagcttcccatgggaagtgcccaaaaagcttaaatattgaaagtgttagccttttttccccagacttgttggcgtaggctacagagaagccttcaagctctgagggaaagggccctccttcctaaattttcctgtcctctttcagctcctgaccagttgcagtcactctagtcaatgacatgaattttagcttttgtgggggactgtaagttgggcttgctattctgtccctaggtgttttgttcaccattataatgaatttagtgagcataggtgatccatgtaactgcctagaaacaacactgtagtaaataatgctttgaaattgaacctttgtgccctatcacccaacgctccaaagtcataattgcattgactttccccaccagatgctgaaaatgtccttgtgatgtgcacgtaaagtacttgtagttccacttatagcctctgtctggcaatgccacagccctgtcagcatgaatttgtaatgtcttgagctctattatgaatgtgaagccttccccttatcctccctgtaacttgatccatttctaattatgtagctctttgtcagggagtgttccctatccaatcaatcttgcatgtaacgcaagttcccagttggagctccagcctgacatcaaaaaaggcagttaccattaaaccatctccctggtgcttatgctcttaattgccacctctaacagcaccaaatcaaaatctctccactttcagctgtcttttggaggacgtacgtaataaggttttaatttagtaaaccaatcctatgcatggtttcagcactagccaaacctcaccaactcctagttctagaaaaacaggcacttggcagccttgtgatgtcatacagagaagtcacagggcagtacctgagggtctgtaggttgcacactttggtaccagataacttttttttttctttataagaaagcctgagtactccacactgcacaataactcctcccagggttttaactttgttttattttcaaaaccaggtccaatgagctttctgaacagctggtgtagctacagagaaaccagcttccttcagagagcagtgcttttggcggggaggaggaaatcccttcatacttgaacgttttctaattgcttatttattgtattctggggtatggcgtaagtacagagaagccatcacctcagatggcagcttttaaaagattttttttttttctctcaacaccatgattcctttaacaacatgtttccagcattcccaggtaggccaaggtgtcctacagaaaaaccttgggttagacctacagggggtctggctggtgttaacagaagggagggcagagctggtgcggctggccatggagaaagctgacttggctggtgtggtacagagaagccagcttgtttacatgcttattccatgactgcttgccctaagcagaaagtgcctttcaggatctatttttggaggtttattacgtatgtctggttctcaattccaacagtttaatgaagatctaaataaaatgctaggttctacctta

SEQ ID NO: 54399 - DNA, 2273 bp, Homo sapiens
gctaggtggaggccggtgtaaatcggacgaggttaccattgtcttggcacacaagctaaatgccaaactggcagaactacgccgtaatggcactttgccttggttacgccctgattctaaaactcaagttactgtgcagtatatgcaggatcgaggtgctgtgcttcccatcagagtccacacaattgttatatctgttcagcatgatgaagaggtttgtcttgatgaaatgagggatgccctaaaggagaaagtcatcaaagcagttgtgcctgcgaaataccttgatgaggatacaatctaccacctacagccaagtggcagatttgttattggtgggcctcagggtgatgctggtttgactggacgcaaaatcattgtggacacttatggcggttggggtgctcatggaggaggtgccttttcaggaaaggattataccaaggtcgaccgttcagctgcttatgctgctcgttgggtggcaaaatcccttgttaaaggaggtctgtgccggagggttcttgttcaggtctcttatgctattggagtttctcatccattatctatctccattttccattatggtacctctcagaagagtgagagagagctattagagattgtgaagaagaatttcgatctccgccctggggtcattgtcagggatctggatctgaagaagccaatttatcagaggactgcagcctatggccactttggtagggacagcttcccatgggaagtgcccaaaaagcttaaatattgaaagtgttagccttttttccccagacttgttggcgtaggctacagagaagccttcaagctctgagggaaagggccctccttcctaaattttcctgtcctctttcagctcctgaccagttgcagtcactctagtcaatgacatgaattttagcttttgtgggggactgtaagttgggcttgctattctgtccctaggtgttttgttcaccattataatgaatttagtgagcataggtgatccatgtaactgcctagaaacaacactgtagtaaataatgctttgaaattgaacctttgtgccctatcacccaacgctccaaagtcataattgcattgactttccccaccagatgctgaaaatgtccttgtgatgtgcacgtaaagtacttgtagttccacttatagcctctgtctggcaatgccacagccctgtcagcatgaatttgtaatgtcttgagctctattatgaatgtgaagccttccccttatcctccctgtaacttgatccatttctaattatgtagctctttgtcagggagtgttccctatccaatcaatcttgcatgtaacgcaagttcccagttggagctccagcctgacatcaaaaaaggcagttaccattaaaccatctccctggtgcttatgctcttaattgccacctctaacagcaccaaatcaaaatctctccactttcagctgtcttttggaggacgtacgtaataaggttttaatttagtaaaccaatcctatgcatggtttcagcactagccaaacctcaccaactcctagttctagaaaaacaggcacttggcagccttgtgatgtcatacagagaagtcacagggcagtacctgagggtctgtaggttgcacactttggtaccagataacttttttttttctttataagaaagcctgagtactccacactgcacaataactcctcccagggttttaactttgttttattttcaaaaccaggtccaatgagctttctgaacagctggtgtagctacagagaaaccagcttccttcagagagcagtgcttttggcggggaggaggaaatcccttcatacttgaacgttttctaattgcttatttattgtattctggggtatggcgtaagtacagagaagccatcacctcagatggcagcttttaaaagattttttttttttctctcaacaccatgattcctttaacaacatgtttccagcattcccaggtaggccaaggtgtcctacagaaaaaccttgggttagacctacagggggtctggctggtgttaacagaagggagggcagagctggtgcggctggccatggagaaagctgacttggctggtgtggtacagagaagccagcttgtttacatgcttattccatgactgcttgccctaagcagaaagtgcctttcaggatctatttttggaggtttattacgtatgtctggttctcaattccaacagtttaatgaagatctaaataaaatgctaggttctacctta

SEQ ID NO: 54400 - DNA, 3367 bp, Homo sapiens
  misc_feature (47)..(47): n is a, c, g, or t
taaacgcggaaccaaacacaaaaatcaagttggaacaaccggggaancaacgctcaacggcttccacgaggcgttcatcgaggagggcacattccttttcacctcagagtcggtcggggaaggccacccagataagatttgtgaccaaatcagtgatgctgtccttgatgcccaccttcagcaggatcctgatgccaaagtagcttgtgaaactgttgctaaaactggaatgatccttcttgctggggaaattacatccagagctgctgttgactaccagaaagtggttcgtgaagctgttaaacacattggatatgatgattcttccaaaggttttgactacaagacttgtaacgtgctggtagccttggagcaacagtcaccagatattgctcaaggtgttcatcttgacagaaatgaagaagacattggtgctggagaccagggcttaatgtttggctatgccactgatgaaactgaggagtgtatgcctttaaccattgtcttggcacacaagctaaatgccaaactggcagaactacgccgtaatggcactttgccttggttacgccctgattctaaaactcaagttactgtgcagtatatgcaggatcgaggtgctgtgcttcccatcagagtccacacaattgttatatctgttcagcatgatgaagaggtttgtcttgatgaaatgagggatgccctaaaggagaaagtcatcaaagcagttgtgcctgcgaaataccttgatgaggatacaatctaccacctacagccaagtggcagatttgttattggtgggcctcagggtgatgctggtttgactggacgcaaaatcattgtggacacttatggcggttggggtgctcatggaggaggtgccttttcaggaaaggattataccaaggtcgaccgttcagctgcttatgctgctcgttgggtggcaaaatcccttgttaaaggaggtctgtgccggagggttcttgttcaggtctcttatgctattggagtttctcatccattatctatctccattttccattatggtacctctcagaagagtgagagagagctattagagattgtgaagaagaatttcgatctccgccctggggtcattgtcagaagatggtaaagcctgttgctagtcaagtattgagggtgttgggtgtgtgtgtatatacttaaggctgaggaggtgaaggtgtgaaggaagactcctcaaatgggaatatattttaattcctggaacagttttgaactgctgccttagtgaagacttagttatttgagaaatttaaaattacggtgctccatggcttaggctaaccactctagagaatgttccagatttgatatttgagctttgtgctcttctacttaagggtgttaagaaaatagagataaagtgggttgctcaaggtttgttgcaatgtaaaaaccatggtagggtgtgggcggcgggaccttggtaagtattgtgtgatctcaggtgagctttttgacaattgaaatttctcagaataatgacaagttttcgtatttgttgagccagggacggaaaaacaactatagttactaataaggactgtgcaaggagtttggacaccagggaagtaacacttttgccacaaatttttttcctagcatatcccagagaactcatttgccagagctcttgaaaatgagtcttgctgattgttttgctttattttaatttaatgctacatattaagttacggacttgtatattccagggatctggatctgaagaagccaatttatcagaggactgcagcctatggccactttggtagggacagcttcccatgggaagtgcccaaaaagcttaaatattgaaagtgttagccttttttccccagacttgttggcgtaggctacagagaagccttcaagctctgagggaaagggccctccttcctaaattttcctgtcctctttcagctcctgaccagttgcagtcactctagtcaatgacatgaattttagcttttgtgggggactgtaagttgggcttgctattctgtccctaggtgttttgttcaccattataatgaatttagtgagcataggtgatccatgtaactgcctagaaacaacactgtagtaaataatgctttgaaattgaacctttgtgccctatcacccaacgctccaaagtcataattgcattgactttccccaccagatgctgaaaatgtccttgtgatgtgcacgtaaagtacttgtagttccacttatagcctctgtctggcaatgccacagccctgtcagcatgaatttgtaatgtcttgagctctattatgaatgtgaagccttccccttatcctccctgtaacttgatccatttctaattatgtagctctttgtcagggagtgttccctatccaatcaatcttgcatgtaacgcaagttcccagttggagctccagcctgacatcaaaaaaggcagttaccattaaaccatctccctggtgcttatgctcttaattgccacctctaacagcaccaaatcaaaatctctccactttcagctgtcttttggaggacgtacgtaataaggttttaatttagtaaaccaatcctatgcatggtttcagcactagccaaacctcaccaactcctagttctagaaaaacaggcacttggcagccttgtgatgtcatacagagaagtcacagggcagtacctgagggtctgtaggttgcacactttggtaccagataacttttttttttctttataagaaagcctgagtactccacactgcacaataactcctcccagggttttaactttgttttattttcaaaaccaggtccaatgagctttctgaacagctggtgtagctacagagaaaccagcttccttcagagagcagtgcttttggcggggaggaggaaatcccttcatacttgaacgttttctaattgcttatttattgtattctggggtatggcgtaagtacagagaagccatcacctcagatggcagcttttaaaagattttttttttttctctcaacaccatgattcctttaacaacatgtttccagcattcccaggtaggccaaggtgtcctacagaaaaaccttgggttagacctacagggggtctggctggtgttaacagaagggagggcagagctggtgcggctggccatggagaaagctgacttggctggtgtggtacagagaagccagcttgtttacatgcttattccatgactgcttgccctaagcagaaagtgcctttcaggatctatttttggaggtttattacgtatgtctggttctcaattccaacagtttaatgaagatctaaataaaatgctaggttctacctta

SEQ ID NO: 54401 - DNA, 3713 bp, Homo sapiens
gcggccgcgcagtgtggttcagcccggactccgcggggcgagctgcccttcctcccccgacccccgcgcaagtggtgcattggcgcgcggcgccgaggggcggggcccgagccgggcgcgcgcgggcgctgctctataaataccgggccgcaccgcccgctgcttcgttcgctccgcgccgcccgcctgctacgagtagaacgctgtccgcagcttgcgcatttcgcagccgctgccgcctcgccgctgctccttcgtaaggccacttccgcacaccgacaccaacatgaacggacagctcaacggcttccacgaggcgttcatcgaggagggcacattccttttcacctcagagtcggtcggggaaggccacccagataagatttgtgaccaaatcagtgatgctgtccttgatgcccaccttcagcaggatcctgatgccaaagtagcttgtgaaactgttgctaaaactggaatgatccttcttgctggggaaattacatccagagctgctgttgactaccagaaagtggttcgtgaagctgttaaacacattggatatgatgattcttccaaaggttttgactacaagacttgtaacgtgctggtagccttggagcaacagtcaccagatattgctcaaggtgttcatcttgacagaaatgaagaagacattggtgctggagaccagggcttaatgtttggctatgccactgatgaaactgaggagtgtatgcctttaaccattgtcttggcacacaagctaaatgccaaactggcagaactacgccgtaatggcactttgccttggttacgccctgattctaaaactcaagttactgtgcagtatatgcaggatcgaggtgctgtgcttcccatcagagtccacacaattgttatatctgttcagcatgatgaagaggtttgtcttgatgaaatgagggatgccctaaaggagaaagtcatcaaagcagttgtgcctgcgaaataccttgatgaggatacaatctaccacctacagccaagtggcagatttgttattggtgggcctcagggtgatgctggtttgactggacgcaaaatcattgtggacacttatggcggttggggtgctcatggaggaggtgccttttcaggaaaggattataccaaggtcgaccgttcagctgcttatgctgctcgttgggtggcaaaatcccttgttaaaggaggtctgtgccggagggttcttgttcaggtatacactctttatataacgaacgattaaaagtcatgtaagtgggagggtatttagtagtaatctacttaactacttgttttataccaacgtattatacaagtgtatgggtctttgcaatcactgattcttacgacatttgaatccttttaggtctcttatgctattggagtttctcatccattatctatctccattttccattatggtacctctcagaagagtgagagagagctattagagattgtgaagaagaatttcgatctccgccctggggtcattgtcagaagatggtaaagcctgttgctagtcaagtattgagggtgttgggtgtgtgtgtatatacttaaggctgaggaggtgaaggtgtgaaggaagactcctcaaatgggaatatattttaattcctggaacagttttgaactgctgccttagtgaagacttagttatttgagaaatttaaaattacggtgctccatggcttaggctaaccactctagagaatgttccagatttgatatttgagctttgtgctcttctacttaagggtgttaagaaaatagagataaagtgggttgctcaaggtttgttgcaatgtaaaaaccatggtagggtgtgggcggcgggaccttggtaagtattgtgtgatctcaggtgagctttttgacaattgaaatttctcagaataatgacaagttttcgtatttgttgagccagggacggaaaaacaactatagttactaataaggactgtgcaaggagtttggacaccagggaagtaacacttttgccacaaatttttttcctagcatatcccagagaactcatttgccagagctcttgaaaatgagtcttgctgattgttttgctttattttaatttaatgctacatattaagttacggacttgtatattccagggatctggatctgaagaagccaatttatcagaggactgcagcctatggccactttggtagggacagcttcccatgggaagtgcccaaaaagcttaaatattgaaagtgttagccttttttccccagacttgttggcgtaggctacagagaagccttcaagctctgagggaaagggccctccttcctaaattttcctgtcctctttcagctcctgaccagttgcagtcactctagtcaatgacatgaattttagcttttgtgggggactgtaagttgggcttgctattctgtccctaggtgttttgttcaccattataatgaatttagtgagcataggtgatccatgtaactgcctagaaacaacactgtagtaaataatgctttgaaattgaacctttgtgccctatcacccaacgctccaaagtcataattgcattgactttccccaccagatgctgaaaatgtccttgtgatgtgcacgtaaagtacttgtagttccacttatagcctctgtctggcaatgccacagccctgtcagcatgaatttgtaatgtcttgagctctattatgaatgtgaagccttccccttatcctccctgtaacttgatccatttctaattatgtagctctttgtcagggagtgttccctatccaatcaatcttgcatgtaacgcaagttcccagttggagctccagcctgacatcaaaaaaggcagttaccattaaaccatctccctggtgcttatgctcttaattgccacctctaacagcaccaaatcaaaatctctccactttcagctgtcttttggaggacgtacgtaataaggttttaatttagtaaaccaatcctatgcatggtttcagcactagccaaacctcaccaactcctagttctagtacctgagggtctgtaggttgcacactttggtaccagataacttttttttttctttataagaaagcctgagtactccacactgcacaataactcctcccagggttttaactttgttttattttcaaaaccaggtccaatgagctttctgaacagctggtgtagctacagagaaaccagcttccttcagagagcagtgcttttggcggggaggaggaaatcccttcatacttgaacgttttctaattgcttatttattgtattctggggtatggcgtaagtacagagaagccatcacctcagatggcagcttttaaaagattttttttttttctctcaacaccatgattcctttaacaacatgtttccagcattcccaggtaggccaaggtgtcctacagaaaaaccttgggttagacctacagggggtctggctggtgttaacagaagggagggcagagctggtgcggctggccatggagaaagctgacttggctggtgtggtacagagaagccagcttgtttacatgcttattccatgactgcttgccctaagcagaaagtgcctttcaggatctatttttggaggtttattacgtatgtctggttctcaattccaacagtttaatgaagatctaaataaaatgctaggttctacctta

SEQ ID NO: 54402 - DNA, 2599 bp, Homo sapiens
cggtaccccatacaccgcaatctcaaaatcccttgttaaaggaggtctgtgccggagggttcttgttcaggtatacactctttatataacgaacgattaaaagtcatgtaagtgggagggtatttagtagtaatctacttaactacttgttttataccaacgtattatacaagtgtatgggtctttgcaatcactgattcttacgacatttgaatccttttaggtctcttatgctattggagtttctcatccattatctatctccattttccattatggtacctctcagaagagtgagagagagctattagagattgtgaagaagaatttcgatctccgccctggggtcattgtcagaagatggtaaagcctgttgctagtcaagtattgagggtgttgggtgtgtgtgtatatacttaaggctgaggaggtgaaggtgtgaaggaagactcctcaaatgggaatatattttaattcctggaacagttttgaactgctgccttagtgaagacttagttatttgagaaatttaaaattacggtgctccatggcttaggctaaccactctagagaatgttccagatttgatatttgagctttgtgctcttctacttaagggtgttaagaaaatagagataaagtgggttgctcaaggtttgttgcaatgtaaaaaccatggtagggtgtgggcggcgggaccttggtaagtattgtgtgatctcaggtgagctttttgacaattgaaatttctcagaataatgacaagttttcgtatttgttgagccagggacggaaaaacaactatagttactaataaggactgtgcaaggagtttggacaccagggaagtaacacttttgccacaaatttttttcctagcatatcccagagaactcatttgccagagctcttgaaaatgagtcttgctgattgttttgctttattttaatttaatgctacatattaagttacggacttgtatattccagggatctggatctgaagaagccaatttatcagaggactgcagcctatggccactttggtagggacagcttcccatgggaagtgcccaaaaagcttaaatattgaaagtgttagccttttttccccagacttgttggcgtaggctacagagaagccttcaagctctgagggaaagggccctccttcctaaattttcctgtcctctttcagctcctgaccagttgcagtcactctagtcaatgacatgaattttagcttttgtgggggactgtaagttgggcttgctattctgtccctaggtgttttgttcaccattataatgaatttagtgagcataggtgatccatgtaactgcctagaaacaacactgtagtaaataatgctttgaaattgaacctttgtgccctatcacccaacgctccaaagtcataattgcattgactttccccaccagatgctgaaaatgtccttgtgatgtgcacgtaaagtacttgtagttccacttatagcctctgtctggcaatgccacagccctgtcagcatgaatttgtaatgtcttgagctctattatgaatgtgaagccttccccttatcctccctgtaacttgatccatttctaattatgtagctctttgtcagggagtgttccctatccaatcaatcttgcatgtaacgcaagttcccagttggagctccagcctgacatcaaaaaaggcagttaccattaaaccatctccctggtgcttatgctcttaattgccacctctaacagcaccaaatcaaaatctctccactttcagctgtcttttggaggacgtacgtaataaggttttaatttagtaaaccaatcctatgcatggtttcagcactagccaaacctcaccaactcctagttctagaaaaacaggcacttggcagccttgtgatgtcatacagagaagtcacagggcagtacctgagggtctgtaggttgcacactttggtaccagataacttttttttttctttataagaaagcctgagtactccacactgcacaataactcctcccagggttttaactttgttttattttcaaaaccaggtccaatgagctttctgaacagctggtgtagctacagagaaaccagcttccttcagagagcagtgcttttggcggggaggaggaaatcccttcatacttgaacgttttctaattgcttatttattgtattctggggtatggcgtaagtacagagaagccatcacctcagatggcagcttttaaaagattttttttttttctctcaacaccatgattcctttaacaacatgtttccagcattcccaggtaggccaaggtgtcctacagaaaaaccttgggttagacctacagggggtctggctggtgttaacagaagggagggcagagctggtgcggctggccatggagaaagctgacttggctggtgtggtacagagaagccagcttgtttacatgcttattccatgactgcttgccctaagcagaaagtgcctttcaggatctatttttggaggtttattacgtatgtctggttctcaattccaacagtttaatgaagatctaaataaaatgctaggttctacctta

SEQ ID NO: 54403 - DNA, 2273 bp, Homo sapiens
caggctcggacctctccctactgtatcctagaagatggtaaagcctgttgctagtcaagtattgagggtgttgggtgtgtgtgtatatacttaaggctgaggaggtgaaggtgtgaaggaagactcctcaaatgggaatatattttaattcctggaacagttttgaactgctgccttagtgaagacttagttatttgagaaatttaaaattacggtgctccatggcttaggctaaccactctagagaatgttccagatttgatatttgagctttgtgctcttctacttaagggtgttaagaaaatagagataaagtgggttgctcaaggtttgttgcaatgtaaaaaccatggtagggtgtgggcggcgggaccttggtaagtattgtgtgatctcaggtgagctttttgacaattgaaatttctcagaataatgacaagttttcgtatttgttgagccagggacggaaaaacaactatagttactaataaggactgtgcaaggagtttggacaccagggaagtaacacttttgccacaaatttttttcctagcatatcccagagaactcatttgccagagctcttgaaaatgagtcttgctgattgttttgctttattttaatttaatgctacatattaagttacggacttgtatattccagggatctggatctgaagaagccaatttatcagaggactgcagcctatggccactttggtagggacagcttcccatgggaagtgcccaaaaagcttaaatattgaaagtgttagccttttttccccagacttgttggcgtaggctacagagaagccttcaagctctgagggaaagggccctccttcctaaattttcctgtcctctttcagctcctgaccagttgcagtcactctagtcaatgacatgaattttagcttttgtgggggactgtaagttgggcttgctattctgtccctaggtgttttgttcaccattataatgaatttagtgagcataggtgatccatgtaactgcctagaaacaacactgtagtaaataatgctttgaaattgaacctttgtgccctatcacccaacgctccaaagtcataattgcattgactttccccaccagatgctgaaaatgtccttgtgatgtgcacgtaaagtacttgtagttccacttatagcctctgtctggcaatgccacagccctgtcagcatgaatttgtaatgtcttgagctctattatgaatgtgaagccttccccttatcctccctgtaacttgatccatttctaattatgtagctctttgtcagggagtgttccctatccaatcaatcttgcatgtaacgcaagttcccagttggagctccagcctgacatcaaaaaaggcagttaccattaaaccatctccctggtgcttatgctcttaattgccacctctaacagcaccaaatcaaaatctctccactttcagctgtcttttggaggacgtacgtaataaggttttaatttagtaaaccaatcctatgcatggtttcagcactagccaaacctcaccaactcctagttctagaaaaacaggcacttggcagccttgtgatgtcatacagagaagtcacagggcagtacctgagggtctgtaggttgcacactttggtaccagataacttttttttttctttataagaaagcctgagtactccacactgcacaataactcctcccagggttttaactttgttttattttcaaaaccaggtccaatgagctttctgaacagctggtgtagctacagagaaaccagcttccttcagagagcagtgcttttggcggggaggaggaaatcccttcatacttgaacgttttctaattgcttatttattgtattctggggtatggcgtaagtacagagaagccatcacctcagatggcagcttttaaaagattttttttttttctctcaacaccatgattcctttaacaacatgtttccagcattcccaggtaggccaaggtgtcctacagaaaaaccttgggttagacctacagggggtctggctggtgttaacagaagggagggcagagctggtgcggctggccatggagaaagctgacttggctggtgtggtacagagaagccagcttgtttacatgcttattccatgactgcttgccctaagcagaaagtgcctttcaggatctatttttggaggtttattacgtatgtctggttctcaattccaacagtttaatgaagatctaaataaaatgctaggttctacctta

SEQ ID NO: 54404 - DNA, 1295 bp, Homo sapiens
ccaacaatcgagccggacgtagtgatccatgtaactgcctagaaacaacactgtagtaaataatgctttgaaattgaacctttgtgccctatcacccaacgctccaaagtcataattgcattgactttccccaccagatgctgaaaatgtccttgtgatgtgcacgtaaagtacttgtagttccacttatagcctctgtctggcaatgccacagccctgtcagcatgaatttgtaatgtcttgagctctattatgaatgtgaagccttccccttatcctccctgtaacttgatccatttctaattatgtagctctttgtcagggagtgttccctatccaatcaatcttgcatgtaacgcaagttcccagttggagctccagcctgacatcaaaaaaggcagttaccattaaaccatctccctggtgcttatgctcttaattgccacctctaacagcaccaaatcaaaatctctccactttcagctgtcttttggaggacgtacgtaataaggttttaatttagtaaaccaatcctatgcatggtttcagcactagccaaacctcaccaactcctagttctagaaaaacaggcacttggcagccttgtgatgtcatacagagaagtcacagggcagtacctgagggtctgtaggttgcacactttggtaccagataacttttttttttctttataagaaagcctgagtactccacactgcacaataactcctcccagggttttaactttgttttattttcaaaaccaggtccaatgagctttctgaacagctggtgtagctacagagaaaccagcttccttcagagagcagtgcttttggcggggaggaggaaatcccttcatacttgaacgttttctaattgcttatttattgtattctggggtatggcgtaagtacagagaagccatcacctcagatggcagcttttaaaagattttttttttttctctcaacaccatgattcctttaacaacatgtttccagcattcccaggtaggccaaggtgtcctacagaaaaaccttgggttagacctacagggggtctggctggtgttaacagaagggagggcagagctggtgcggctggccatggagaaagctgacttggctggtgtggtacagagaagccagcttgtttacatgcttattccatgactgcttgccctaagcagaaagtgcctttcaggatctatttttggaggtttattacgtatgtctggttctcaattccaacagtttaatgaagatctaaataaaatgctaggttctacctta

SEQ ID NO: 54405 - DNA, 1266 bp, Homo sapiens
  misc_feature (1)..(1): n is a, c, g, or t
  misc_feature (24)..(24): n is a, c, g, or t
  misc_feature (30)..(30): n is a, c, g, or t
  misc_feature (33)..(33): n is a, c, g, or t
nattcggaacgaggcctagtgcgnattcgngangacttttgaaattgaacctttgtgccctatcacccaacgctccaaagtcataattgcattgactttccccaccagatgctgaaaatgtccttgtgatgtgcacgtaaagtacttgtagttccacttatagcctctgtctggcaatgccacagccctgtcagcatgaatttgtaatgtcttgagctctattatgaatgtgaagccttccccttatcctccctgtaacttgatccatttctaattatgtagctctttgtcagggagtgttccctatccaatcaatcttgcatgtaacgcaagttcccagttggagctccagcctgacatcaaaaaaggcagttaccattaaaccatctccctggtgcttatgctcttaattgccacctctaacagcaccaaatcaaaatctctccactttcagctgtcttttggaggacgtacgtaataaggttttaatttagtaaaccaatcctatgcatggtttcagcactagccaaacctcaccaactcctagttctagaaaaacaggcacttggcagccttgtgatgtcatacagagaagtcacagggcagtacctgagggtctgtaggttgcacactttggtaccagataacttttttttttctttataagaaagcctgagtactccacactgcacaataactcctcccagggttttaactttgttttattttcaaaaccaggtccaatgagctttctgaacagctggtgtagctacagagaaaccagcttccttcagagagcagtgcttttggcggggaggaggaaatcccttcatacttgaacgttttctaattgcttatttattgtattctggggtatggcgtaagtacagagaagccatcacctcagatggcagcttttaaaagattttttttttttctctcaacaccatgattcctttaacaacatgtttccagcattcccaggtaggccaaggtgtcctacagaaaaaccttgggttagacctacagggggtctggctggtgttaacagaagggagggcagagctggtgcggctggccatggagaaagctgacttggctggtgtggtacagagaagccagcttgtttacatgcttattccatgactgcttgccctaagcagaaagtgcctttcaggatctatttttggaggtttattacgtatgtctggttctcaattccaacagtttaatgaagatctaaataaaatgctaggttctacctta

SEQ ID NO: 54406 - DNA, 3895 bp, Homo sapiens
gcggccgcgcagtgtggttcagcccggactccgcggggcgagctgcccttcctcccccgacccccgcgcaagtggtgcattggcgcgcggcgccgaggggcggggcccgagccgggcgcgcgcgggcgctgctctataaataccgggccgcaccgcccgctgcttcgttcgctccgcgccgcccgcctgctacgagtagaacgctgtccgcagcttgcgcatttcgcagccgctgccgcctcgccgctgctccttcgtaaggccacttccgcacaccgacaccaacatgaacggacagctcaacggcttccacgaggcgttcatcgaggagggcacattccttttcacctcagagtcggtcggggaaggccacccagataagatttgtgaccaaatcagtgatgctgtccttgatgcccaccttcagcaggatcctgatgccaaagtagcttgtgaaactgttgctaaaactggaatgatccttcttgctggggaaattacatccagagctgctgttgactaccagaaagtggttcgtgaagctgttaaacacattggatatgatgattcttccaaaggttttgactacaagacttgtaacgtgctggtagccttggagcaacagtcaccagatattgctcaaggtgttcatcttgacagaaatgaagaagacattggtgctggagaccagggcttaatgtttggctatgccactgatgaaactgaggagtgtatgcctttaaccattgtcttggcacacaagctaaatgccaaactggcagaactacgccgtaatggcactttgccttggttacgccctgattctaaaactcaagttactgtgcagtatatgcaggatcgaggtgctgtgcttcccatcagagtccacacaattgttatatctgttcagcatgatgaagaggtttgtcttgatgaaatgagggatgccctaaaggagaaagtcatcaaagcagttgtgcctgcgaaataccttgatgaggatacaatctaccacctacagccaagtggcagatttgttattggtgggcctcagggtgatgctggtttgactggacgcaaaatcattgtggacacttatggcggttggggtgctcatggaggaggtgccttttcaggaaaggattataccaaggtcgaccgttcagctgcttatgctgctcgttgggtggcaaaatcccttgttaaaggaggtctgtgccggagggttcttgttcaggtatacactctttatataacgaacgattaaaagtcatgtaagtgggagggtatttagtagtaatctacttaactacttgttttataccaacgtattatacaagtgtatgggtctttgcaatcactgattcttacgacatttgaatccttttaggtctcttatgctattggagtttctcatccattatctatctccattttccattatggtacctctcagaagagtgagagagagctattagagattgtgaagaagaatttcgatctccgccctggggtcattgtcagaagatggtaaagcctgttgctagtcaagtattgagggtgttgggtgtgtgtgtatatacttaaggctgaggaggtgaaggtgtgaaggaagactcctcaaatgggaatatattttaattcctggaacagttttgaactgctgccttagtgaagacttagttatttgagaaatttaaaattacggtgctccatggcttaggctaaccactctagagaatgttccagatttgatatttgagctttgtgctcttctacttaagggtgttaagaaaatagagataaagtgggttgctcaaggtttgttgcaatgtaaaaaccatggtagggtgtgggcggcgggaccttggtaagtattgtgtgatctcaggtgagctttttgacaattgaaatttctcagaataatgacaagttttcgtatttgttgagccagggacggaaaaacaactatagttactaataaggactgtgcaaggagtttggacaccagggaagtaacacttttgccacaaatttttttcctagcatatcccagagaactcatttgccagagctcttgaaaatgagtcttgctgattgttttgctttattttaatttaatgctacatattaagttacggacttgtatattccagggatctggatctgaagaagccaatttatcagaggactgcagcctatggccactttggtagggacagcttcccatgggaagtgcccaaaaagcttaaatattgaaagtgttagccttttttccccagacttgttggcgtaggctacagagaagccttcaagctctgagggaaagggccctccttcctaaattttcctgtcctctttcagctcctgaccagttgcagtcactctagtcaatgacatgaattttagcttttgtgggggactgtaagttgggcttgctattctgtccctaggtgttttgttcaccattataatgaatttagtgagcataggtgatccatgtaactgcctagaaacaacactgtagtaaataatgctttgaaattgaacctttgtgccctatcacccaacgctccaaagtcataattgcattgactttccccaccagatgctgaaaatgtccttgtgatgtgcacgtaaagtacttgtagttccacttatagcctctgtctggcaatgccacagccctgtcagcatgaatttgtaatgtcttgagctctattatgaatgtgaagccttccccttatcctccctgtaacttgatccatttctaattatgtagctctttgtcagggagtgttccctatccaatcaatcttgcatgtaacgcaagttcccagttggagctccagcctgacatcaaaaaaggcagttaccattaaaccatctccctggtgcttatgctcttaattgccacctctaacagcaccaaatcaaaatctctccactttcagctgtcttttggaggacgtacgtaataaggttttaatttagtaaaccaatcctatgcatggtttcagcactagccaaacctcaccaactcctagttctagaaaaacaggcacttggcagccttgtgatgtcatacagagaagtcacagggcagtacctgagggtctgtaggttgcacactttggtaccagataacttttttttttctttataagaaagcctgagtactccacactgcacaataactcctcccagggttttaactttgttttattttcaaaaccaggtccaatgagctttctgaacagctggtgtagctacagagaaaccagcttccttcagagagcagtgcttttggcggggaggaggaaatcccttcatacttgaacgttttctaattgcttatttattgtattctggggtatggcgtaagtacagagaagccatcacctcagatggcagcttttaaaagattttttttttttctctcaacaccatgattcctttaacaacatgtttccagcattcccaggtaggccaaggtgtcctacagaaaaaccttgggttagacctacagggggtctggctggtgttaacagaagggagggcagagctggtgcggctggccatggagaaagctgacttggctggtgtggtacagagaagccagcttgtttacatgcttattccatgactgcttgccctaagcagaaagtgcctttcaggatctatttttggaggtttattacgtatgtctggttctcaattccaacagtttaatgaagatctaaataaaatgctaggttctaccttaaaaaaaaaatcttttaaaagctgccatctgaggtgatggcttctctgtacttacgccatcgcccagaatacaataaataagcaattaggtcgaccggccgcgaatttagtagtagtagtaggcggccgc

SEQ ID NO: 54407 - DNA, 4772 bp, Homo sapiens
gcggccgcgcagtgtggttcagcccggactccgcggggcgagctgcccttcctcccccgacccccgcgcaagtggtgcattggcgcgcggcgccgaggggcggggcccgagccgggcgcgcgcgggcgctgctctataaataccgggccgcaccgcccgctgcttcgttcgctccgcgccgcccgcctgctacgagtagaacgctgtccgcagcttgcgcatttcgcagccgctgccgcctcgccgctgctccttcgtaaggccacttccgcacaccgacaccaacatgaacggacagctcaacggcttccacgaggcgttcatcgaggagggcacattccttttcacctcagagtcggtcggggaaggccacccagataagatttgtgaccaaatcagtgatgctgtccttgatgcccaccttcagcaggatcctgatgccaaagtagcttgtgaaactgttgctaaaactggaatgatccttcttgctggggaaattacatccagagctgctgttgactaccagaaagtggttcgtgaagctgttaaacacattggatatgatgattcttccaaaggttttgactacaagacttgtaacgtgctggtagccttggagcaacagtcaccagatattgctcaaggtgttcatcttgacagaaatgaagaagacattggtgctggagaccagggcttaatgtttggctatgccactgatgaaactgaggagtgtatgcctttaaccattgtcttggcacacaagctaaatgccaaactggcagaactacgccgtaatggcactttgccttggttacgccctgattctaaaactcaagttactgtgcagtatatgcaggatcgaggtgctgtgcttcccatcagagtccacacaattgttatatctgttcagcatgatgaagaggtttgtcttgatgaaatgagggatgccctaaaggagaaagtcatcaaagcagttgtgcctgcgaaataccttgatgaggatacaatctaccacctacagccaagtggcagatttgttattggtgggcctcagggtgatgctggtttgactggacgcaaaatcattgtggacacttatggcggttggggtgctcatggaggaggtgccttttcaggaaaggattataccaaggtcgaccgttcagctgcttatgctgctcgttgggtggcaaaatcccttgttaaaggaggtctgtgccggagggttcttgttcaggtatacactctttatataacgaacgattaaaagtcatgtaagtgggagggtatttagtagtaatctacttaactacttgttttataccaacgtattatacaagtgtatgggtctttgcaatcactgattcttacgacatttgaatccttttaggtctcttatgctattggagtttctcatccattatctatctccattttccattatggtacctctcagaagagtgagagagagctattagagattgtgaagaagaatttcgatctccgccctggggtcattgtcagaagatggtaaagcctgttgctagtcaagtattgagggtgttgggtgtgtgtgtatatacttaaggctgaggaggtgaaggtgtgaaggaagactcctcaaatgggaatatattttaattcctggaacagttttgaactgctgccttagtgaagacttagttatttgagaaatttaaaattacggtgctccatggcttaggctaaccactctagagaatgttccagatttgatatttgagctttgtgctcttctacttaagggtgttaagaaaatagagataaagtgggttgctcaaggtttgttgcaatgtaaaaaccatggtagggtgtgggcggcgggaccttggtaagtattgtgtgatctcaggtgagctttttgacaattgaaatttctcagaataatgacaagttttcgtatttgttgagccagggacggaaaaacaactatagttactaataaggactgtgcaaggagtttggacaccagggaagtaacacttttgccacaaatttttttcctagcatatcccagagaactcatttgccagagctcttgaaaatgagtcttgctgattgttttgctttattttaatttaatgctacatattaagttacggacttgtatattccagggatctggatctgaagaagccaatttatcagaggactgcagcctatggccactttggtagggacagcttcccatgggaagtgcccaaaaagcttaaatattgaaagtgttagccttttttccccagacttgttggcgtaggctacagagaagccttcaagctctgagggaaagggccctccttcctaaattttcctgtcctctttcagctcctgaccagttgcagtcactctagtcaatgacatgaattttagcttttgtgggggactgtaagttgggcttgctattctgtccctaggtgttttgttcaccattataatgaatttagtgagcataggtgatccatgtaactgcctagaaacaacactgtagtaaataatgctttgaaattgaacctttgtgccctatcacccaacgctccaaagtcataattgcattgactttccccaccagatgctgaaaatgtccttgtgatgtgcacgtaaagtacttgtagttccacttatagcctctgtctggcaatgccacagccctgtcagcatgaatttgtaatgtcttgagctctattatgaatgtgaagccttccccttatcctccctgtaacttgatccatttctaattatgtagctctttgtcagggagtgttccctatccaatcaatcttgcatgtaacgcaagttcccagttggagctccagcctgacatcaaaaaaggcagttaccattaaaccatctccctggtgcttatgctcttaattgccacctctaacagcaccaaatcaaaatctctccactttcagctgtcttttggaggacgtacgtaataaggttttaatttagtaaaccaatcctatgcatggtttcagcactagccaaacctcaccaactcctagttctagaaaaacaggcacttggcagccttgtgatgtcatacagagaagtcacagggcagtacctgagggtctgtaggttgcacactttggtaccagataacttttttttttctttataagaaagcctgagtactccacactgcacaataactcctcccagggttttaactttgttttattttcaaaaccaggtccaatgagctttctgaacagctggtgtagctacagagaaaccagcttccttcagagagcagtgcttttggcggggaggaggaaatcccttcatacttgaacgttttctaattgcttatttattgtattctggggtatggcgtaagtacagagaagccatcacctcagatggcagcttttaaaagattttttttttttctctcaacaccatgattcctttaacaacatgtttccagcattcccaggtaggccaaggtgtcctacagaaaaaccttgggttagacctacagggggtctggctggtgttaacagaagggagggcagagctggtgcggctggccatggagaaagctgacttggctggtgtggtacagagaagccagcttgtttacatgcttattccatgactgcttgccctaagcagaaagtgcctttcaggatctatttttggaggtttattacgtatgtctggttctcaattccaacagtttaatgaagatctaaataaaatgctaggttctaccttaactgtgtctgttactcatttgttaaagtgctttggggccataggtacgtgcctataatcccaacactttgaaaggctgaggtaggaggatcactttaacatagaagttggaggctgtagcgaaccattatcaagccactgcactccagcctgggtgactgagactttggctcttaaaaaatgctatcatatgaataacctgagaatactatatgtgtatctttaaccttgaattgtaatccataattagccataattcaggaaaataacctcaatccctagacccagtgggtgggcattttttaaaagcctaagcaagatttagtcctcctagtccacttaagccaaaattcatgtgtccttattgcagcagccattcaatgccatttttaagttttcaactaaggttgagggcttcaaaccattgaaggcataaaaaccgctaaaagtattaacctggaagtggtaatgtctatctaaagtcctggcaatttaagcctattaatctgcatacatttttaaattatgagcttagttttaagggttgtatgatgttttcatctgagaagttctgaaacgtgatttctagtcaatatcttgcagagataaataatgcaaattagctgaaaatgctataaatttccaaaggcttaaatttcatttatggcaggttgtgtagaaaatccgcagaccacactgctcttgaacctaggagctacatgcatagagaatagccacttggattacatttctaccaacatctgaatggtggtccagcttgtcctgcaaatgtagagccaaggagtgcttgcttatgcctgtttgcatggagacttaaaaacttggaaatttggaggccaggcggagtggcctgtaatataggccactatatagtaatataggcgtgagcctataatcctagcactttgggaggccaaggcatgcagatcacgagaccatcctggctaacacagcgaaaccctgtctctactaaaaatataaaaaag

SEQ ID NO: 54408 - DNA, 3805 bp, Homo sapiens
gcggccgcgcagtgtggttcagcccggactccgcggggcgagctgcccttcctcccccgacccccgcgcaagtggtgcattggcgcgcggcgccgaggggcggggcccgagccgggcgcgcgcgggcgctgctctataaataccgggccgcaccgcccgctgcttcgttcgctccgcgccgcccgcctgctacgagtagaacgctgtccgcagcttgcgcatttcgcagccgctgccgcctcgccgctgctccttcgtaaggccacttccgcacaccgacaccaacatgaacggacagctcaacggcttccacgaggcgttcatcgaggagggcacattccttttcacctcagagtcggtcggggaaggccacccagataagatttgtgaccaaatcagtgatgctgtccttgatgcccaccttcagcaggatcctgatgccaaagtagcttgtgaaactgttgctaaaactggaatgatccttcttgctggggaaattacatccagagctgctgttgactaccagaaagtggttcgtgaagctgttaaacacattggatatgatgattcttccaaaggttttgactacaagacttgtaacgtgctggtagccttggagcaacagtcaccagatattgctcaaggtgttcatcttgacagaaatgaagaagacattggtgctggagaccagggcttaatgtttggctatgccactgatgaaactgaggagtgtatgcctttaaccattgtcttggcacacaagctaaatgccaaactggcagaactacgccgtaatggcactttgccttggttacgccctgattctaaaactcaagttactgtgcagtatatgcaggatcgaggtgctgtgcttcccatcagagtccacacaattgttatatctgttcagcatgatgaagaggtttgtcttgatgaaatgagggatgccctaaaggagaaagtcatcaaagcagttgtgcctgcgaaataccttgatgaggatacaatctaccacctacagccaagtggcagatttgttattggtgggcctcagggtgatgctggtttgactggacgcaaaatcattgtggacacttatggcggttggggtgctcatggaggaggtgccttttcaggaaaggattataccaaggtcgaccgttcagctgcttatgctgctcgttgggtggcaaaatcccttgttaaaggaggtctgtgccggagggttcttgttcaggtatacactctttatataacgaacgattaaaagtcatgtaagtgggagggtatttagtagtaatctacttaactacttgttttataccaacgtattatacaagtgtatgggtctttgcaatcactgattcttacgacatttgaatccttttaggtctcttatgctattggagtttctcatccattatctatctccattttccattatggtacctctcagaagagtgagagagagctattagagattgtgaagaagaatttcgatctccgccctggggtcattgtcagaagatggtaaagcctgttgctagtcaagtattgagggtgttgggtgtgtgtgtatatacttaaggctgaggaggtgaaggtgtgaaggaagactcctcaaatgggaatatattttaattcctggaacagttttgaactgctgccttagtgaagacttagttatttgagaaatttaaaattacggtgctccatggcttaggctaaccactctagagaatgttccagatttgatatttgagctttgtgctcttctacttaagggtgttaagaaaatagagataaagtgggttgctcaaggtttgttgcaatgtaaaaaccatggtagggtgtgggcggcgggaccttggtaagtattgtgtgatctcaggtgagctttttgacaattgaaatttctcagaataatgacaagttttcgtatttgttgagccagggacggaaaaacaactatagttactaataaggactgtgcaaggagtttggacaccagggaagtaacacttttgccacaaatttttttcctagcatatcccagagaactcatttgccagagctcttgaaaatgagtcttgctgattgttttgctttattttaatttaatgctacatattaagttacggacttgtatattccagggatctggatctgaagaagccaatttatcagaggactgcagcctatggccactttggtagggacagcttcccatgggaagtgcccaaaaagcttaaatattgaaagtgttagccttttttccccagacttgttggcgtaggctacagagaagccttcaagctctgagggaaagggccctccttcctaaattttcctgtcctctttcagctcctgaccagttgcagtcactctagtcaatgacatgaattttagcttttgtgggggactgtaagttgggcttgctattctgtccctaggtgttttgttcaccattataatgaatttagtgagcataggtgatccatgtaactgcctagaaacaacactgtagtaaataatgctttgaaattgaacctttgtgccctatcacccaacgctccaaagtcataattgcattgactttccccaccagatgctgaaaatgtccttgtgatgtgcacgtaaagtacttgtagttccacttatagcctctgtctggcaatgccacagccctgtcagcatgaatttgtaatgtcttgagctctattatgaatgtgaagccttccccttatcctccctgtaacttgatccatttctaattatgtagctctttgtcagggagtgttccctatccaatcaatcttgcatgtaacgcaagttcccagttggagctccagcctgacatcaaaaaaggcagttaccattaaaccatctccctggtgcttatgctcttaattgccacctctaacagcaccaaatcaaaatctctccactttcagctgtcttttggaggacgtacgtaataaggttttaatttagtaaaccaatcctatgcatggtttcagcactagccaaacctcaccaactcctagttctagaaaaacaggcacttggcagccttgtgatgtcatacagagaagtcacagggcagtacctgagggtctgtaggttgcacactttggtaccagataacttttttttttctttataagaaagcctgagtactccacactgcacaataactcctcccagggttttaactttgttttattttcaaaaccaggtccaatgagctttctgaacagctggtgtagctacagagaaaccagcttccttcagagagcagtgcttttggcggggaggaggaaatcccttcatacttgaacgttttctaattgcttatttattgtattctggggtatggcgtaagtacagagaagccatcacctcagatggcagcttttaaaagattttttttttttctctcaacaccatgattcctttaacaacatgtttccagcattcccaggtaggccaaggtgtcctacagaaaaaccttgggttagacctacagggggtctggctggtgttaacagaagggagggcagagctggtgcggctggccatggagaaagctgacttggctggtgtggtacagagaagccagcttgtttacatgcttattccatgactgcttgccctaagcagaaagtgcctttcaggatctatttttggaggtttattacgtatgtctggttctcaattccaacagtttaatgaagatctaaataaaatgctaggttctaccttaggggtagacctaacgtctttacgtgggtacttgcgctta

SEQ ID NO: 54409 - DNA, 3756 bp, Homo sapiens
gcggccgcgcagtgtggttcagcccggactccgcggggcgagctgcccttcctcccccgacccccgcgcaagtggtgcattggcgcgcggcgccgaggggcggggcccgagccgggcgcgcgcgggcgctgctctataaataccgggccgcaccgcccgctgcttcgttcgctccgcgccgcccgcctgctacgagtagaacgctgtccgcagcttgcgcatttcgcagccgctgccgcctcgccgctgctccttcgtaaggccacttccgcacaccgacaccaacatgaacggacagctcaacggcttccacgaggcgttcatcgaggagggcacattccttttcacctcagagtcggtcggggaaggccacccagataagatttgtgaccaaatcagtgatgctgtccttgatgcccaccttcagcaggatcctgatgccaaagtagcttgtgaaactgttgctaaaactggaatgatccttcttgctggggaaattacatccagagctgctgttgactaccagaaagtggttcgtgaagctgttaaacacattggatatgatgattcttccaaaggttttgactacaagacttgtaacgtgctggtagccttggagcaacagtcaccagatattgctcaaggtgttcatcttgacagaaatgaagaagacattggtgctggagaccagggcttaatgtttggctatgccactgatgaaactgaggagtgtatgcctttaaccattgtcttggcacacaagctaaatgccaaactggcagaactacgccgtaatggcactttgccttggttacgccctgattctaaaactcaagttactgtgcagtatatgcaggatcgaggtgctgtgcttcccatcagagtccacacaattgttatatctgttcagcatgatgaagaggtttgtcttgatgaaatgagggatgccctaaaggagaaagtcatcaaagcagttgtgcctgcgaaataccttgatgaggatacaatctaccacctacagccaagtggcagatttgttattggtgggcctcagggtgatgctggtttgactggacgcaaaatcattgtggacacttatggcggttggggtgctcatggaggaggtgccttttcaggaaaggattataccaaggtcgaccgttcagctgcttatgctgctcgttgggtggcaaaatcccttgttaaaggaggtctgtgccggagggttcttgttcaggtatacactctttatataacgaacgattaaaagtcatgtaagtgggagggtatttagtagtaatctacttaactacttgttttataccaacgtattatacaagtgtatgggtctttgcaatcactgattcttacgacatttgaatccttttaggtctcttatgctattggagtttctcatccattatctatctccattttccattatggtacctctcagaagagtgagagagagctattagagattgtgaagaagaatttcgatctccgccctggggtcattgtcagaagatggtaaagcctgttgctagtcaagtattgagggtgttgggtgtgtgtgtatatacttaaggctgaggaggtgaaggtgtgaaggaagactcctcaaatgggaatatattttaattcctggaacagttttgaactgctgccttagtgaagacttagttatttgagaaatttaaaattacggtgctccatggcttaggctaaccactctagagaatgttccagatttgatatttgagctttgtgctcttctacttaagggtgttaagaaaatagagataaagtgggttgctcaaggtttgttgcaatgtaaaaaccatggtagggtgtgggcggcgggaccttggtaagtattgtgtgatctcaggtgagctttttgacaattgaaatttctcagaataatgacaagttttcgtatttgttgagccagggacggaaaaacaactatagttactaataaggactgtgcaaggagtttggacaccagggaagtaacacttttgccacaaatttttttcctagcatatcccagagaactcatttgccagagctcttgaaaatgagtcttgctgattgttttgctttattttaatttaatgctacatattaagttacggacttgtatattccagggatctggatctgaagaagccaatttatcagaggactgcagcctatggccactttggtagggacagcttcccatgggaagtgcccaaaaagcttaaatattgaaagtgttagccttttttccccagacttgttggcgtaggctacagagaagccttcaagctctgagggaaagggccctccttcctaaattttcctgtcctctttcagctcctgaccagttgcagtcactctagtcaatgacatgaattttagcttttgtgggggactgtaagttgggcttgctattctgtccctaggtgttttgttcaccattataatgaatttagtgagcataggtgatccatgtaactgcctagaaacaacactgtagtaaataatgctttgaaattgaacctttgtgccctatcacccaacgctccaaagtcataattgcattgactttccccaccagatgctgaaaatgtccttgtgatgtgcacgtaaagtacttgtagttccacttatagcctctgtctggcaatgccacagccctgtcagcatgaatttgtaatgtcttgagctctattatgaatgtgaagccttccccttatcctccctgtaacttgatccatttctaattatgtagctctttgtcagggagtgttccctatccaatcaatcttgcatgtaacgcaagttcccagttggagctccagcctgacatcaaaaaaggcagttaccattaaaccatctccctggtgcttatgctcttaattgccacctctaacagcaccaaatcaaaatctctccactttcagctgtcttttggaggacgtacgtaataaggttttaatttagtaaaccaatcctatgcatggtttcagcactagccaaacctcaccaactcctagttctagaaaaacaggcacttggcagccttgtgatgtcatacagagaagtcacagggcagtacctgagggtctgtaggttgcacactttggtaccagataacttttttttttctttataagaaagcctgagtactccacactgcacaataactcctcccagggttttaactttgttttattttcaaaaccaggtccaatgagctttctgaacagctggtgtagctacagagaaaccagcttccttcagagagcagtgcttttggcggggaggaggaaatcccttcatacttgaacgttttctaattgcttatttattgtattctggggtatggcgtaagtacagagaagccatcacctcagatggcagcttttaaaagattttttttttttctctcaacaccatgattcctttaacaacatgtttccagcattcccaggtaggccaaggtgtcctacagaaaaaccttgggttagacctacagggggtctggctggtgttaacagaagggagggcagagctggtgcggctggccatggagaaagctgacttggctggtgtggtacagagaagccagcttgtttacatgcttattccatgactgcttgccctaagcagaaagtgcctttcaggatctatttttggaggtttattacgtatgtctggttctcaattccaacagtttaatgataggcacgagctcgtgccgaa

SEQ ID NO: 54410 - DNA, 949 bp, Homo sapiens
ccgacccaatgaattgatatgagttggagctccagcctgacatcaaaaaaggcagttaccattaaaccatctccctggtgcttatgctcttaattgccacctctaacagcaccaaatcaaaatctctccactttcagctgtcttttggaggacgtacgtaataaggttttaatttagtaaaccaatcctatgcatggtttcagcactagccaaacctcaccaactcctagttctagaaaaacaggcacttggcagccttgtgatgtcatacagagaagtcacagggcagtacctgagggtctgtaggttgcacactttggtaccagataacttttttttttctttataagaaagcctgagtactccacactgcacaataactcctcccagggttttaactttgttttattttcaaaaccaggtccaatgagctttctgaacagctggtgtagctacagagaaaccagcttccttcagagagcagtgcttttggcggggaggaggaaatcccttcatacttgaacgttttctaattgcttatttattgtattctggggtatggcgtaagtacagagaagccatcacctcagatggcagcttttaaaagattttttttttttctctcaacaccatgattcctttaacaacatgtttccagcattcccaggtaggccaaggtgtcctacagaaaaaccttgggttagacctacagggggtctggctggtgttaacagaagggagggcagagctggtgcggctggccatggagaaagctgacttggctggtgtggtacagagaagccagcttgtttacatgcttattccatgactgcttgccctaagcagaaagtgcctttcaggatctatttttggaggtttattacgtatgtctggttctcaattccaacagtttaatgaagatctaaataaaatgctaggttctacctta

SEQ ID NO: 54411 - DNA, 4070 bp, Homo sapiens
gcggccgcgcagtgtggttcagcccggactccgcggggcgagctgcccttcctcccccgacccccgcgcaagtggtgcattggcgcgcggcgccgaggggcggggcccgagccgggcgcgcgcgggcgctgctctataaataccgggccgcaccgcccgctgcttcgttcgctccgcgccgcccgcctgctacgagtagaacgctgtccgcagcttgcgcatttcgcagccgctgccgcctcgccgctgctccttcgtaaggccacttccgcacaccgacaccaacatgaacggacagctcaacggcttccacgaggcgttcatcgaggagggcacattccttttcacctcagagtcggtcggggaaggccacccagataagatttgtgaccaaatcagtgatgctgtccttgatgcccaccttcagcaggatcctgatgccaaagtagcttgtgaaactgttgctaaaactggaatgatccttcttgctggggaaattacatccagagctgctgttgactaccagaaagtggttcgtgaagctgttaaacacattggatatgatgattcttccaaaggttttgactacaagacttgtaacgtgctggtagccttggagcaacagtcaccagatattgctcaaggtgttcatcttgacagaaatgaagaagacattggtgctggagaccagggcttaatgtttggctatgccactgatgaaactgaggagtgtatgcctttaaccattgtcttggcacacaagctaaatgccaaactggcagaactacgccgtaatggcactttgccttggttacgccctgattctaaaactcaagttactgtgcagtatatgcaggatcgaggtgctgtgcttcccatcagagtccacacaattgttatatctgttcagcatgatgaagaggtttgtcttgatgaaatgagggatgccctaaaggagaaagtcatcaaagcagttgtgcctgcgaaataccttgatgaggatacaatctaccacctacagccaagtggcagatttgttattggtgggcctcagggtgatgctggtttgactggacgcaaaatcattgtggacacttatggcggttggggtgctcatggaggaggtgccttttcaggaaaggattataccaaggtcgaccgttcagctgcttatgctgctcgttgggtggcaaaatcccttgttaaaggaggtctgtgccggagggttcttgttcaggtatacactctttatataacgaacgattaaaagtcatgtaagtgggagggtatttagtagtaatctacttaactacttgttttataccaacgtattatacaagtgtatgggtctttgcaatcactgattcttacgacatttgaatccttttaggtctcttatgctattggagtttctcatccattatctatctccattttccattatggtacctctcagaagagtgagagagagctattagagattgtgaagaagaatttcgatctccgccctggggtcattgtcagaagatggtaaagcctgttgctagtcaagtattgagggtgttgggtgtgtgtgtatatacttaaggctgaggaggtgaaggtgtgaaggaagactcctcaaatgggaatatattttaattcctggaacagttttgaactgctgccttagtgaagacttagttatttgagaaatttaaaattacggtgctccatggcttaggctaaccactctagagaatgttccagatttgatatttgagctttgtgctcttctacttaagggtgttaagaaaatagagataaagtgggttgctcaaggtttgttgcaatgtaaaaaccatggtagggtgtgggcggcgggaccttggtaagtattgtgtgatctcaggtgagctttttgacaattgaaatttctcagaataatgacaagttttcgtatttgttgagccagggacggaaaaacaactatagttactaataaggactgtgcaaggagtttggacaccagggaagtaacacttttgccacaaatttttttcctagcatatcccagagaactcatttgccagagctcttgaaaatgagtcttgctgattgttttgctttattttaatttaatgctacatattaagttacggacttgtatattccagggatctggatctgaagaagccaatttatcagaggactgcagcctatggccactttggtagggacagcttcccatgggaagtgcccaaaaagcttaaatattgaaagtgttagccttttttccccagacttgttggcgtaggctacagagaagccttcaagctctgagggaaagggccctccttcctaaattttcctgtcctctttcagctcctgaccagttgcagtcactctagtcaatgacatgaattttagcttttgtgggggactgtaagttgggcttgctattctgtccctaggtgttttgttcaccattataatgaatttagtgagcataggtgatccatgtaactgcctagaaacaacactgtagtaaataatgctttgaaattgaacctttgtgccctatcacccaacgctccaaagtcataattgcattgactttccccaccagatgctgaaaatgtccttgtgatgtgcacgtaaagtacttgtagttccacttatagcctctgtctggcaatgccacagccctgtcagcatgaatttgtaatgtcttgagctctattatgaatgtgaagccttccccttatcctccctgtaacttgatccatttctaattatgtagctctttgtcagggagtgttccctatccaatcaatcttgcatgtaacgcaagttcccagttggagctccagcctgacatcaaaaaaggcagttaccattaaaccatctccctggtgcttatgctcttaattgccacctctaacagcaccaaatcaaaatctctccactttcagctgtcttttggaggacgtacgtaataaggttttaatttagtaaaccaatcctatgcatggtttcagcactagccaaacctcaccaactcctagttctagaaaaacaggcacttggcagccttgtgatgtcatacagagaagtcacagggcagtacctgagggtctgtaggttgcacactttggtaccagataacttttttttttctttataagaaagcctgagtactccacactgcacaataactcctcccagggttttaactttgttttattttcaaaaccaggtccaatgagctttctgaacagctggtgtagctacagagaaaccagcttccttcagagagcagtgcttttggcggggaggaggaaatcccttcatacttgaacgttttctaattgcttatttattgtattctggggtatggcgtaagtacagagaagccatcacctcagatggcagcttttaaaagattttttttttttctctcaacaccatgattcctttaacaacatgtttccagcattcccaggtaggccaaggtgtcctacagaaaaaccttgggttagacctacagggggtctggctggtgttaacagaagggagggcagagctggtgcggctggccatggagaaagctgacttggctggtgtggtacagagaagccagcttgtttacatggaggtttattacgtatgtctggttctcaattccaacagtttaatgaagatctaaataaaatgctaggttctaccttaaaaaaaaaaaaaaaaaactcgagtttttttttttttttttaagaccctcatcaatagatggagacatacagaaatagtcaaaccacatctacaaaatgccagtatcaggcggcggcttcgaagccaaagtgatgtttggatgtaaagtgaaatattagttggcggatgaagcagatagtgaggaaagttgagccaataatgacgtgaagtccgtggaagcctgtggctacaaaaaatgttgagccgtagatgccgtcggaaatggtgaagggagactcgaagtactctgaggcttgtaggagggtaaaatagagacccagtaaaattgtaataagcagtgcttgaattatctcgtgccg

SEQ ID NO: 54412 - DNA, 3691 bp, Homo sapiens
gcggccgcgcagtgtggttcagcccggactccgcggggcgagctgcccttcctcccccgacccccgcgcaagtggtgcattggcgcgcggcgccgaggggcggggcccgagccgggcgcgcgcgggcgctgctctataaataccgggccgcaccgcccgctgcttcgttcgctccgcgccgcccgcctgctacgagtagaacgctgtccgcagcttgcgcatttcgcagccgctgccgcctcgccgctgctccttcgtaaggccacttccgcacaccgacaccaacatgaacggacagctcaacggcttccacgaggcgttcatcgaggagggcacattccttttcacctcagagtcggtcggggaaggccacccagataagatttgtgaccaaatcagtgatgctgtccttgatgcccaccttcagcaggatcctgatgccaaagtagcttgtgaaactgttgctaaaactggaatgatccttcttgctggggaaattacatccagagctgctgttgactaccagaaagtggttcgtgaagctgttaaacacattggatatgatgattcttccaaaggttttgactacaagacttgtaacgtgctggtagccttggagcaacagtcaccagatattgctcaaggtgttcatcttgacagaaatgaagaagacattggtgctggagaccagggcttaatgtttggctatgccactgatgaaactgaggagtgtatgcctttaaccattgtcttggcacacaagctaaatgccaaactggcagaactacgccgtaatggcactttgccttggttacgccctgattctaaaactcaagttactgtgcagtatatgcaggatcgaggtgctgtgcttcccatcagagtccacacaattgttatatctgttcagcatgatgaagaggtttgtcttgatgaaatgagggatgccctaaaggagaaagtcatcaaagcagttgtgcctgcgaaataccttgatgaggatacaatctaccacctacagccaagtggcagatttgttattggtgggcctcagggtgatgctggtttgactggacgcaaaatcattgtggacacttatggcggttggggtgctcatggaggaggtgccttttcaggaaaggattataccaaggtcgaccgttcagctgcttatgctgctcgttgggtggcaaaatcccttgttaaaggaggtctgtgccggagggttcttgttcaggtatacactctttatataacgaacgattaaaagtcatgtaagtgggagggtatttagtagtaatctacttaactacttgttttataccaacgtattatacaagtgtatgggtctttgcaatcactgattcttacgacatttgaatccttttaggtctcttatgctattggagtttctcatccattatctatctccattttccattatggtacctctcagaagagtgagagagagctattagagattgtgaagaagaatttcgatctccgccctggggtcattgtcagaagatggtaaagcctgttgctagtcaagtattgagggtgttgggtgtgtgtgtatatacttaaggctgaggaggtgaaggtgtgaaggaagactcctcaaatgggaatatattttaattcctggaacagttttgaactgctgccttagtgaagacttagttatttgagaaatttaaaattacggtgctccatggcttaggctaaccactctagagaatgttccagatttgatatttgagctttgtgctcttctacttaagggtgttaagaaaatagagataaagtgggttgctcaaggtttgttgcaatgtaaaaaccatggtagggtgtgggcggcgggaccttggtaagtattgtgtgatctcaggtgagctttttgacaattgaaatttctcagaataatgacaagttttcgtatttgttgagccagggacggaaaaacaactatagttactaataaggactgtgcaaggagtttggacaccagggaagtaacacttttgccacaaatttttttcctagcatatcccagagaactcatttgccagagctcttgaaaatgagtcttgctgattgttttgctttattttaatttaatgctacatattaagttacggacttgtatattccagggatctggatctgaagaagccaatttatcagaggactgcagcctatggccactttggtagggacagcttcccatgggaagtgcccaaaaagcttaaatattgaaagtgttagccttttttccccagacttgttggcgtaggctacagagaagccttcaagctctgagggaaagggccctccttcctaaattttcctgtcctctttcagctcctgaccagttgcagtcactctagtcaatgacatgaattttagcttttgtgggggactgtaagttgggcttgctattctgtccctaggtgttttgttcaccattataatgaatttagtgagcataggtgatccatgtaactgcctagaaacaacactgtagtaaataatgctttgaaattgaacctttgtgccctatcacccaacgctccaaagtcataattgcattgactttccccaccagatgctgaaaatgtccttgtgatgtgcacgtaaagtacttgtagttccacttatagcctctgtctggcaatgccacagccctgtcagcatgaatttgtaatgtcttgagctctattatgaatgtgaagccttccccttatcctccctgtaacttgatccatttctaattatgtagctctttgtcagggagtgttccctatccaatcaatcttgcatgtaacgcaagttcccagttggagctccagcctgacatcaaaaaaggcagttaccattaaaccatctccctggtgcttatgctcttaattgccacctctaacagcaccaaatcaaaatctctccactttcagctgtcttttggaggacgtacgtaataaggttttaatttagtaaaccaatcctatgcatggtttcagcactagccaaacctcaccaactcctagttctagaaaaacaggcacttggcagccttgtgatgtcatacagagaagtcacagggcagtacctgagggtctgtaggttgcacactttggtaccagataacttttttttttctttataagaaagcctgagtactccacactgcacaataactcctcccagggttttaactttgttttattttcaaaaccaggtccaatgagctttctgaacagctggtgtagctacagagaaaccagcttccttcagagagcagtgcttttggcggggaggaggaaatcccttcatacttgaacgttttctaattgcttatttattgtattctggggtatggcgtaagtacagagaagccatcacctcagatggcagcttttaaaagattttttttttttctctcaacaccatgattcctttaacaacatgtttccagcattcccaggtaggccaaggtgtcctacagaaaaaccttgggttagacctacagggggtctggctggtgttaacagaagggagggcagagctggtgcggctggccatggagaaagctgacttggctggtgtggtacagagaagccagcttgtttacatgcttattccatgactgcttgccctaagcagatgagtggcaatgaggtgggcagaagag

SEQ ID NO: 54413 - DNA, 3748 bp, Homo sapiens
gcggccgcgcagtgtggttcagcccggactccgcggggcgagctgcccttcctcccccgacccccgcgcaagtggtgcattggcgcgcggcgccgaggggcggggcccgagccgggcgcgcgcgggcgctgctctataaataccgggccgcaccgcccgctgcttcgttcgctccgcgccgcccgcctgctacgagtagaacgctgtccgcagcttgcgcatttcgcagccgctgccgcctcgccgctgctccttcgtaaggccacttccgcacaccgacaccaacatgaacggacagctcaacggcttccacgaggcgttcatcgaggagggcacattccttttcacctcagagtcggtcggggaaggccacccagataagatttgtgaccaaatcagtgatgctgtccttgatgcccaccttcagcaggatcctgatgccaaagtagcttgtgaaactgttgctaaaactggaatgatccttcttgctggggaaattacatccagagctgctgttgactaccagaaagtggttcgtgaagctgttaaacacattggatatgatgattcttccaaaggttttgactacaagacttgtaacgtgctggtagccttggagcaacagtcaccagatattgctcaaggtgttcatcttgacagaaatgaagaagacattggtgctggagaccagggcttaatgtttggctatgccactgatgaaactgaggagtgtatgcctttaaccattgtcttggcacacaagctaaatgccaaactggcagaactacgccgtaatggcactttgccttggttacgccctgattctaaaactcaagttactgtgcagtatatgcaggatcgaggtgctgtgcttcccatcagagtccacacaattgttatatctgttcagcatgatgaagaggtttgtcttgatgaaatgagggatgccctaaaggagaaagtcatcaaagcagttgtgcctgcgaaataccttgatgaggatacaatctaccacctacagccaagtggcagatttgttattggtgggcctcagggtgatgctggtttgactggacgcaaaatcattgtggacacttatggcggttggggtgctcatggaggaggtgccttttcaggaaaggattataccaaggtcgaccgttcagctgcttatgctgctcgttgggtggcaaaatcccttgttaaaggaggtctgtgccggagggttcttgttcaggtatacactctttatataacgaacgattaaaagtcatgtaagtgggagggtatttagtagtaatctacttaactacttgttttataccaacgtattatacaagtgtatgggtctttgcaatcactgattcttacgacatttgaatccttttaggtctcttatgctattggagtttctcatccattatctatctccattttccattatggtacctctcagaagagtgagagagagctattagagattgtgaagaagaatttcgatctccgccctggggtcattgtcagaagatggtaaagcctgttgctagtcaagtattgagggtgttgggtgtgtgtgtatatacttaaggctgaggaggtgaaggtgtgaaggaagactcctcaaatgggaatatattttaattcctggaacagttttgaactgctgccttagtgaagacttagttatttgagaaatttaaaattacggtgctccatggcttaggctaaccactctagagaatgttccagatttgatatttgagctttgtgctcttctacttaagggtgttaagaaaatagagataaagtgggttgctcaaggtttgttgcaatgtaaaaaccatggtagggtgtgggcggcgggaccttggtaagtattgtgtgatctcaggtgagctttttgacaattgaaatttctcagaataatgacaagttttcgtatttgttgagccagggacggaaaaacaactatagttactaataaggactgtgcaaggagtttggacaccagggaagtaacacttttgccacaaatttttttcctagcatatcccagagaactcatttgccagagctcttgaaaatgagtcttgctgattgttttgctttattttaatttaatgctacatattaagttacggacttgtatattccagggatctggatctgaagaagccaatttatcagaggactgcagcctatggccactttggtagggacagcttcccatgggaagtgcccaaaaagcttaaatattgaaagtgttagccttttttccccagacttgttggcgtaggctacagagaagccttcaagctctgagggaaagggccctccttcctaaattttcctgtcctctttcagctcctgaccagttgcagtcactctagtcaatgacatgaattttagcttttgtgggggactgtaagttgggcttgctattctgtccctaggtgttttgttcaccattataatgaatttagtgagcataggtgatccatgtaactgcctagaaacaacactgtagtaaataatgctttgaaattgaacctttgtgccctatcacccaacgctccaaagtcataattgcattgactttccccaccagatgctgaaaatgtccttgtgatgtgcacgtaaagtacttgtagttccacttatagcctctgtctggcaatgccacagccctgtcagcatgaatttgtaatgtcttgagctctattatgaatgtgaagccttccccttatcctccctgtaacttgatccatttctaattatgtagctctttgtcagggagtgttccctatccaatcaatcttgcatgtaacgcaagttcccagttggagctccagcctgacatcaaaaaaggcagttaccattaaaccatctccctggtgcttatgctcttaattgccacctctaacagcaccaaatcaaaatctctccactttcagctgtcttttggaggacgtacgtaataaggttttaatttagtaaaccaatcctatgcatggtttcagcactagccaaacctcaccaactcctagttctagaaaaacaggcacttggcagccttgtgatgtcatacagagaagtcacagggcagtacctgagggtctgtaggttgcacactttggtaccagataacttttttttttctttataagaaagcctgagtactccacactgcacaataactcctcccagggttttaactttgttttattttcaaaaccaggtccaatgagctttctgaacagctggtgtagctacagagaaaccagcttccttcagagagcagtgcttttggcggggaggaggaaatcccttcatacttgaacgttttctaattgcttatttattgtattctggggtatggcgtaagtacagagaagccatcacctcagatggcagcttttaaaagattttttttttttctctcaacaccatgattcctttaacaacatgtttccagcattcccaggtaggccaaggtgtcctacagaaaaaccttgggttagacctacagggggtctggctggtgttaacagaagggagggcagagctggtgcggctggccatggagaaagctgacttggctggtgtggtacagatgcttattccatgactgcttgccctaagcagaaagtgcctttcaggatctatttttggaggtttattacgtatgtctggttctcaattccaacagtttaatgaagatctaaataaaatgctaggttctacctta

SEQ ID NO: 54414 - DNA, 3236 bp, Homo sapiens
  misc_feature (3210)..(3210): n is a, c, g, or t
gcggccgcgcagtgtggttcagcccggactccgcggggcgagctgcccttcctcccccgacccccgcgcaagtggtgcattggcgcgcggcgccgaggggcggggcccgagccgggcgcgcgcgggcgctgctctataaataccgggccgcaccgcccgctgcttcgttcgctccgcgccgcccgcctgctacgagtagaacgctgtccgcagcttgcgcatttcgcagccgctgccgcctcgccgctgctccttcgtaaggccacttccgcacaccgacaccaacatgaacggacagctcaacggcttccacgaggcgttcatcgaggagggcacattccttttcacctcagagtcggtcggggaaggccacccagataagatttgtgaccaaatcagtgatgctgtccttgatgcccaccttcagcaggatcctgatgccaaagtagcttgtgaaactgttgctaaaactggaatgatccttcttgctggggaaattacatccagagctgctgttgactaccagaaagtggttcgtgaagctgttaaacacattggatatgatgattcttccaaaggttttgactacaagacttgtaacgtgctggtagccttggagcaacagtcaccagatattgctcaaggtgttcatcttgacagaaatgaagaagacattggtgctggagaccagggcttaatgtttggctatgccactgatgaaactgaggagtgtatgcctttaaccattgtcttggcacacaagctaaatgccaaactggcagaactacgccgtaatggcactttgccttggttacgccctgattctaaaactcaagttactgtgcagtatatgcaggatcgaggtgctgtgcttcccatcagagtccacacaattgttatatctgttcagcatgatgaagaggtttgtcttgatgaaatgagggatgccctaaaggagaaagtcatcaaagcagttgtgcctgcgaaataccttgatgaggatacaatctaccacctacagccaagtggcagatttgttattggtgggcctcagggtgatgctggtttgactggacgcaaaatcattgtggacacttatggcggttggggtgctcatggaggaggtgccttttcaggaaaggattataccaaggtcgaccgttcagctgcttatgctgctcgttgggtggcaaaatcccttgttaaaggaggtctgtgccggagggttcttgttcaggtatacactctttatataacgaacgattaaaagtcatgtaagtgggagggtatttagtagtaatctacttaactacttgttttataccaacgtattatacaagtgtatgggtctttgcaatcactgattcttacgacatttgaatccttttaggtctcttatgctattggagtttctcatccattatctatctccattttccattatggtacctctcagaagagtgagagagagctattagagattgtgaagaagaatttcgatctccgccctggggtcattgtcagaagatggtaaagcctgttgctagtcaagtattgagggtgttgggtgtgtgtgtatatacttaaggctgaggaggtgaaggtgtgaaggaagactcctcaaatgggaatatattttaattcctggaacagttttgaactgctgccttagtgaagacttagttatttgagaaatttaaaattacggtgctccatggcttaggctaaccactctagagaatgttccagatttgatatttgagctttgtgctcttctacttaagggtgttaagaaaatagagataaagtgggttgctcaaggtttgttgcaatgtaaaaaccatggtagggtgtgggcggcgggaccttggtaagtattgtgtgatctcaggtgagctttttgacaattgaaatttctcagaataatgacaagttttcgtatttgttgagccagggacggaaaaacaactatagttactaataaggactgtgcaaggagtttggacaccagggaagtaacacttttgccacaaatttttttcctagcatatcccagagaactcatttgccagagctcttgaaaatgagtcttgctgattgttttgctttattttaatttaatgctacatattaagttacggacttgtatattccagggatctggatctgaagaagccaatttatcagaggactgcagcctatggccactttggtagggacagcttcccatgggaagtgcccaaaaagcttaaatattgaaagtgttagccttttttccccagacttgttggcgtaggctacagagaagccttcaagctctgagggaaagggccctccttcctaaattttcctgtcctctttcagctcctgaccagttgcagtcactctagtcaatgacatgaattttagcttttgtgggggactgtaagttgggcttgctattctgtccctaggtgttttgttcaccattataatgaatttagtgagcataggtgatccatgtaactgcctagaaacaacactgtagtaaataatgctttgaaattgaacctttgtgccctatcacccaacgctccaaagtcataattgcattgactttccccaccagatgctgaaaatgtccttgtgatgtgcacgtaaagtacttgtagttccacttatagcctctgtctggcaatgccacagccctgtcagcatgaatttgtaatgtcttgagctctattatgaatgtgaagccttccccttatcctccctgtaacttgatccatttctaattatgtagctctttgtcagggagtgttccctatccaatcaatcttgcatgtaacgcaagttcccagttggagctccagcctgacatcaaaaaaggcagttaccattaaaccatctccctggtgcttatgctcttaattgccacctctaacagcaccaaatcaaaatctctccactttcagctgtcttttggaggacgtacgtaataaggttttaatttagtaaaccaatcctatgcatggtttcagcactagccaaacctcaccaactcctagttctagaaaaacaggcacttggcagccttgtgatgtcatacagagaagtcacagggcagtacctgagggtctgtaggttgcacactttggtaccagataacttttttttttctttataagaaagcctgagtactccacactgcacaataactccgtactcctnactcccatcggcaggccagtactgat

SEQ ID NO: 54415 - DNA, 3255 bp, Homo sapiens
gcggccgcgcagtgtggttcagcccggactccgcggggcgagctgcccttcctcccccgacccccgcgcaagtggtgcattggcgcgcggcgccgaggggcggggcccgagccgggcgcgcgcgggcgctgctctataaataccgggccgcaccgcccgctgcttcgttcgctccgcgccgcccgcctgctacgagtagaacgctgtccgcagcttgcgcatttcgcagccgctgccgcctcgccgctgctccttcgtaaggccacttccgcacaccgacaccaacatgaacggacagctcaacggcttccacgaggcgttcatcgaggagggcacattccttttcacctcagagtcggtcggggaaggccacccagataagatttgtgaccaaatcagtgatgctgtccttgatgcccaccttcagcaggatcctgatgccaaagtagcttgtgaaactgttgctaaaactggaatgatccttcttgctggggaaattacatccagagctgctgttgactaccagaaagtggttcgtgaagctgttaaacacattggatatgatgattcttccaaaggttttgactacaagacttgtaacgtgctggtagccttggagcaacagtcaccagatattgctcaaggtgttcatcttgacagaaatgaagaagacattggtgctggagaccagggcttaatgtttggctatgccactgatgaaactgaggagtgtatgcctttaaccattgtcttggcacacaagctaaatgccaaactggcagaactacgccgtaatggcactttgccttggttacgccctgattctaaaactcaagttactgtgcagtatatgcaggatcgaggtgctgtgcttcccatcagagtccacacaattgttatatctgttcagcatgatgaagaggtttgtcttgatgaaatgagggatgccctaaaggagaaagtcatcaaagcagttgtgcctgcgaaataccttgatgaggatacaatctaccacctacagccaagtggcagatttgttattggtgggcctcagggtgatgctggtttgactggacgcaaaatcattgtggacacttatggcggttggggtgctcatggaggaggtgccttttcaggaaaggattataccaaggtcgaccgttcagctgcttatgctgctcgttgggtggcaaaatcccttgttaaaggaggtctgtgccggagggttcttgttcaggtatacactctttatataacgaacgattaaaagtcatgtaagtgggagggtatttagtagtaatctacttaactacttgttttataccaacgtattatacaagtgtatgggtctttgcaatcactgattcttacgacatttgaatccttttaggtctcttatgctattggagtttctcatccattatctatctccattttccattatggtacctctcagaagagtgagagagagctattagagattgtgaagaagaatttcgatctccgccctggggtcattgtcagaagatggtaaagcctgttgctagtcaagtattgagggtgttgggtgtgtgtgtatatacttaaggctgaggaggtgaaggtgtgaaggaagactcctcaaatgggaatatattttaattcctggaacagttttgaactgctgccttagtgaagacttagttatttgagaaatttaaaattacggtgctccatggcttaggctaaccactctagagaatgttccagatttgatatttgagctttgtgctcttctacttaagggtgttaagaaaatagagataaagtgggttgctcaaggtttgttgcaatgtaaaaaccatggtagggtgtgggcggcgggaccttggtaagtattgtgtgatctcaggtgagctttttgacaattgaaatttctcagaataatgacaagttttcgtatttgttgagccagggacggaaaaacaactatagttactaataaggactgtgcaaggagtttggacaccagggaagtaacacttttgccacaaatttttttcctagcatatcccagagaactcatttgccagagctcttgaaaatgagtcttgctgattgttttgctttattttaatttaatgctacatattaagttacggacttgtatattccagggatctggatctgaagaagccaatttatcagaggactgcagcctatggccactttggtagggacagcttcccatgggaagtgcccaaaaagcttaaatattgaaagtgttagccttttttccccagacttgttggcgtaggctacagagaagccttcaagctctgagggaaagggccctccttcctaaattttcctgtcctctttcagctcctgaccagttgcagtcactctagtcaatgacatgaattttagcttttgtgggggactgtaagttgggcttgctattctgtccctaggtgttttgttcaccattataatgaatttagtgagcataggtgatccatgtaactgcctagaaacaacactgtagtaaataatgctttgaaattgaacctttgtgccctatcacccaacgctccaaagtcataattgcattgactttccccaccagatgctgaaaatgtccttgtgatgtgcacgtaaagtacttgtagttccacttatagcctctgtctggcaatgccacagccctgtcagcatgaatttgtaatgtcttgagctctattatgaatgtgaagccttccccttatcctccctgtaacttgatccatttctaattatgtagctctttgtcagggagtgttccctatccaatcaatcttgcatgtaacgcaagttcccagttggagctccagcctgacatcaaaaaaggcagttaccattaaaccatctccctggtgaaaaaaaaaaaaaaaaaaaaaaaaaaaaaaaaaaaaaaaaaaaaaaaaaaaaaaaaaaaaaggggggggggggaaaaaaaaaccgaggggggcccaagatgcgccacacagactactttcggtgaaggaggggccccacataaggaggcgcaccaaaaacagacgagcgaaggaggcgcgcggaacaaacgacgcagtgaggaggaccagccgccaccggggacctggagaagaaacccctctgcggggccaaactcggcgcacacccacaaagataagcccgagaggaaaacactccgtggacggggggacacgaaccatgtgggcaaacggcaggaaaagaatcacagagaagacg

SEQ ID NO: 54416 - DNA, 2923 bp, Homo sapiens
gcggccgcgcagtgtggttcagcccggactccgcggggcgagctgcccttcctcccccgacccccgcgcaagtggtgcattggcgcgcggcgccgaggggcggggcccgagccgggcgcgcgcgggcgctgctctataaataccgggccgcaccgcccgctgcttcgttcgctccgcgccgcccgcctgctacgagtagaacgctgtccgcagcttgcgcatttcgcagccgctgccgcctcgccgctgctccttcgtaaggccacttccgcacaccgacaccaacatgaacggacagctcaacggcttccacgaggcgttcatcgaggagggcacattccttttcacctcagagtcggtcggggaaggccacccagataagatttgtgaccaaatcagtgatgctgtccttgatgcccaccttcagcaggatcctgatgccaaagtagcttgtgaaactgttgctaaaactggaatgatccttcttgctggggaaattacatccagagctgctgttgactaccagaaagtggttcgtgaagctgttaaacacattggatatgatgattcttccaaaggttttgactacaagacttgtaacgtgctggtagccttggagcaacagtcaccagatattgctcaaggtgttcatcttgacagaaatgaagaagacattggtgctggagaccagggcttaatgtttggctatgccactgatgaaactgaggagtgtatgcctttaaccattgtcttggcacacaagctaaatgccaaactggcagaactacgccgtaatggcactttgccttggttacgccctgattctaaaactcaagttactgtgcagtatatgcaggatcgaggtgctgtgcttcccatcagagtccacacaattgttatatctgttcagcatgatgaagaggtttgtcttgatgaaatgagggatgccctaaaggagaaagtcatcaaagcagttgtgcctgcgaaataccttgatgaggatacaatctaccacctacagccaagtggcagatttgttattggtgggcctcagggtgatgctggtttgactggacgcaaaatcattgtggacacttatggcggttggggtgctcatggaggaggtgccttttcaggaaaggattataccaaggtcgaccgttcagctgcttatgctgctcgttgggtggcaaaatcccttgttaaaggaggtctgtgccggagggttcttgttcaggtatacactctttatataacgaacgattaaaagtcatgtaagtgggagggtatttagtagtaatctacttaactacttgttttataccaacgtattatacaagtgtatgggtctttgcaatcactgattcttacgacatttgaatccttttaggtctcttatgctattggagtttctcatccattatctatctccattttccattatggtacctctcagaagagtgagagagagctattagagattgtgaagaagaatttcgatctccgccctggggtcattgtcagaagatggtaaagcctgttgctagtcaagtattgagggtgttgggtgtgtgtgtatatacttaaggctgaggaggtgaaggtgtgaaggaagactcctcaaatgggaatatattttaattcctggaacagttttgaactgctgccttagtgaagacttagttatttgagaaatttaaaattacggtgctccatggcttaggctaaccactctagagaatgttccagatttgatatttgagctttgtgctcttctacttaagggtgttaagaaaatagagataaagtgggttgctcaaggtttgttgcaatgtaaaaaccatggtagggtgtgggcggcgggaccttggtaagtattgtgtgatctcaggtgagctttttgacaattgaaatttctcagaataatgacaagttttcgtatttgttgagccagggacggaaaaacaactatagttactaataaggactgtgcaaggagtttggacaccagggaagtaacacttttgccacaaatttttttcctagcatatcccagagaactcatttgccagagctcttgaaaatgagtcttgctgattgttttgctttattttaatttaatgctacatattaagttacggacttgtatattccagggatctggatctgaagaagccaatttatcagaggactgcagcctatggccactttggtagggacagcttcccatgggaagtgcccaaaaagcttaaatattgaaagtgttagccttttttccccagacttgttggcgtaggctacagagaagccttcaagctctgagggaaagggccctccttcctaaattttcctgtcctctttcagctcctgaccagttgcagtcactctagtcaatgacatgaattttagcttttgtgggggactgtaagttgggcttgctattctgtccctaggtgttttgttcaccattataatgaatttagtgagcataggtgatccatgtaactgcctagaaacaacactgtagtaaataatgctttgaaattgaacctttgtgccctatcacccaacgctccaaagtcataattgcattgactttccccaccagatgctgaaaatgtccttgtgatgtgcacgtaaagtacttgtagttccacttatagcctctgtctggcaatgccacagccctgtcagcatgaatttgtaatgtcttgagctctattatgaatgtgaagagggaaatggggggagttattgtttaatgggtacagagtttccatttgagatgatgaaaaagtcctggtgataaatagtggtgacagttatacaacattgtgaatgtacttaatgcgactgaactgtacagttaaaaatggataagatagcaaattttatgtatataaaacaataataaaaaatagca

SEQ ID NO: 54417 - DNA, 3847 bp, Homo sapiens
gcggccgcgcagtgtggttcagcccggactccgcggggcgagctgcccttcctcccccgacccccgcgcaagtggtgcattggcgcgcggcgccgaggggcggggcccgagccgggcgcgcgcgggcgctgctctataaataccgggccgcaccgcccgctgcttcgttcgctccgcgccgcccgcctgctacgagtagaacgctgtccgcagcttgcgcatttcgcagccgctgccgcctcgccgctgctccttcgtaaggccacttccgcacaccgacaccaacatgaacggacagctcaacggcttccacgaggcgttcatcgaggagggcacattccttttcacctcagagtcggtcggggaaggccacccagataagatttgtgaccaaatcagtgatgctgtccttgatgcccaccttcagcaggatcctgatgccaaagtagcttgtgaaactgttgctaaaactggaatgatccttcttgctggggaaattacatccagagctgctgttgactaccagaaagtggttcgtgaagctgttaaacacattggatatgatgattcttccaaaggttttgactacaagacttgtaacgtgctggtagccttggagcaacagtcaccagatattgctcaaggtgttcatcttgacagaaatgaagaagacattggtgctggagaccagggcttaatgtttggctatgccactgatgaaactgaggagtgtatgcctttaaccattgtcttggcacacaagctaaatgccaaactggcagaactacgccgtaatggcactttgccttggttacgccctgattctaaaactcaagttactgtgcagtatatgcaggatcgaggtgctgtgcttcccatcagagtccacacaattgttatatctgttcagcatgatgaagaggtttgtcttgatgaaatgagggatgccctaaaggagaaagtcatcaaagcagttgtgcctgcgaaataccttgatgaggatacaatctaccacctacagccaagtggcagatttgttattggtgggcctcagggtgatgctggtttgactggacgcaaaatcattgtggacacttatggcggttggggtgctcatggaggaggtgccttttcaggaaaggattataccaaggtcgaccgttcagctgcttatgctgctcgttgggtggcaaaatcccttgttaaaggaggtctgtgccggagggttcttgttcaggtatacactctttatataacgaacgattaaaagtcatgtaagtgggagggtatttagtagtaatctacttaactacttgttttataccaacgtattatacaagtgtatgggtctttgcaatcactgattcttacgacatttgaatccttttaggtctcttatgctattggagtttctcatccattatctatctccattttccattatggtacctctcagaagagtgagagagagctattagagattgtgaagaagaatttcgatctccgccctggggtcattgtcagaagatggtaaagcctgttgctagtcaagtattgagggtgttgggtgtgtgtgtatatacttaaggctgaggaggtgaaggtgtgaaggaagactcctcaaatgggaatatattttaattcctggaacagttttgaactgctgccttagtgaagacttagttatttgagaaatttaaaattacggtgctccatggcttaggctaaccactctagagaatgttccagatttgatatttgagctttgtgctcttctacttaagggtgttaagaaaatagagataaagtgggttgctcaaggtttgttgcaatgtaaaaaccatggtagggtgtgggcggcgggaccttggtaagtattgtgtgatctcaggtgagctttttgacaattgaaatttctcagaataatgacaagttttcgtatttgttgagccagggacggaaaaacaactatagttactaataaggactgtgcaaggagtttggacaccagggaagtaacacttttgccacaaatttttttcctagcatatcccagagaactcatttgccagagctcttgaaaatgagtcttgctgattgttttgctttattttaatttaatgctacatattaagttacggacttgtatattccagggatctggatctgaagaagccaatttatcagaggactgcagcctatggccactttggtagggacagcttcccatgggaagtgcccaaaaagcttaaatattgaaagtgttagccttttttccccagacttgttggcgtaggctacagagaagccttcaagctctgagggaaagggccctccttcctaaattttcctgtcctctttcagctcctgaccagttgcagtcactctagtcaatgacatgaattttagcttttgtgggggactgtaagttgggcttgctattctgtccctaggtgttttgttcaccattataatgaatttagtgagcataggtgatccatgtaactgcctagaaacaacactgtagtaaataatgctttgaaattgaacctttgtgccctatcacccaacgctccaaagtcataattgcattgactttccccaccagatgctgaaaatgtccttgtgatgtgcacgtaaagtacttgtagttccacttatagcctctgtttggctggtgtggtacagagaagccagcttgtttacatgcttattccatgactgcttgccctaagcagaaagtgcctttcaggatctatttttggaggtttattacgtatgtctggttctcaattccaacagtttaatgaagatctaaataaaatgctaggttctaccttaactgtgtctgttactcatttgttaaagtgctttggggccataggtacgtgcctataatcccaacactttgaaaggctgaggtaggaggatcactttaacatagaagttggaggctgtagcgaaccattatcaagccactgcactccagcctgggtgactgagactttggctcttaaaaaatgctatcatatgaataacctgagaatactatatgtgtatctttaaccttgaattgtaatccataattagccataattcaggaaaataacctcaatccctagacccagtgggtgggcattttttaaaagcctaagcaagatttagtcctcctagtccacttaagccaaaattcatgtgtccttattgcagcagccattcaatgccatttttaagttttcaactaaggttgagggcttcaaaccattgaaggcataaaaaccgctaaaagtattaacctggaagtggtaatgtctatctaaagtcctggcaatttaagcctattaatctgcatacatttttaaattatgagcttagttttaagggttgtatgatgttttcatctgagaagttctgaaacgtgatttctagtcaatatcttgcagagataaataatgcaaattagctgaaaatgctataaatttccaaaggcttaaatttcatttatggcaggttgtgtagaaaatccgcagaccacactgctcttgaacctaggagctacatgcatagagaatagccacttggattacatttctaccaacatctgaatggtggtccagcttgtcctgcaaatgtagagccaaggagtgcttgcttatgcctgtttgcatggagacttaaaaacttggaaatttggaggccaggcggagtggcctgtaatataggccactatatagtaatataggcgtgagcctataatcctagcactttgggaggccaaggcatgcagatcacgagaccatcctggctaacacagcgaaaccctgtctctactaaaaatataaaaaag

SEQ ID NO: 54418 - DNA, 2685 bp, Homo sapiens
gcggccgcgcagtgtggttcagcccggactccgcggggcgagctgcccttcctcccccgacccccgcgcaagtggtgcattggcgcgcggcgccgaggggcggggcccgagccgggcgcgcgcgggcgctgctctataaataccgggccgcaccgcccgctgcttcgttcgctccgcgccgcccgcctgctacgagtagaacgctgtccgcagcttgcgcatttcgcagccgctgccgcctcgccgctgctccttcgtaaggccacttccgcacaccgacaccaacatgaacggacagctcaacggcttccacgaggcgttcatcgaggagggcacattccttttcacctcagagtcggtcggggaaggccacccagataagatttgtgaccaaatcagtgatgctgtccttgatgcccaccttcagcaggatcctgatgccaaagtagcttgtgaaactgttgctaaaactggaatgatccttcttgctggggaaattacatccagagctgctgttgactaccagaaagtggttcgtgaagctgttaaacacattggatatgatgattcttccaaaggttttgactacaagacttgtaacgtgctggtagccttggagcaacagtcaccagatattgctcaaggtgttcatcttgacagaaatgaagaagacattggtgctggagaccagggcttaatgtttggctatgccactgatgaaactgaggagtgtatgcctttaaccattgtcttggcacacaagctaaatgccaaactggcagaactacgccgtaatggcactttgccttggttacgccctgattctaaaactcaagttactgtgcagtatatgcaggatcgaggtgctgtgcttcccatcagagtccacacaattgttatatctgttcagcatgatgaagaggtttgtcttgatgaaatgagggatgccctaaaggagaaagtcatcaaagcagttgtgcctgcgaaataccttgatgaggatacaatctaccacctacagccaagtggcagatttgttattggtgggcctcagggtgatgctggtttgactggacgcaaaatcattgtggacacttatggcggttggggtgctcatggaggaggtgccttttcaggaaaggattataccaaggtcgaccgttcagctgcttatgctgctcgttgggtggcaaaatcccttgttaaaggaggtctgtgccggagggttcttgttcaggtatacactctttatataacgaacgattaaaagtcatgtaagtgggagggtatttagtagtaatctacttaactacttgttttataccaacgtattatacaagtgtatgggtctttgcaatcactgattcttacgacatttgaatccttttaggtctcttatgctattggagtttctcatccattatctatctccattttccattatggtacctctcagaagagtgagagagagctattagagattgtgaagaagaatttcgatctccgccctggggtcattgtcagaagatggtaaagcctgttgctagtcaagtattgagggtgttgggtgtgtgtgtatatacttaaggctgaggaggtgaaggtgtgaaggaagactcctcaaatgggaatatattttaattcctggaacagttttgaactgctgccttagtgaagacttagttatttgagaaatttaaaattacggtgctccatggcttaggctaaccactctagagaatgttccagatttgatatttgagctttgtgctcttctacttaagggtgttaagaaaatagagataaagtgggttgctcaaggtttgttgcaatgtaaaaaccatggtagggtgtgggcggcgggaccttggtaagtattgtgtgatctcaggtgagctttttgacaattgaaatttctcagaataatgacaagttttcgtatttgttgagccagggacggaaaaacaactatagttactaataaggactgtgcaaggagtttggacaccagggaagtaacacttttgccacaaatttttttcctagcatatcccagagaactcatttgccagagctcttgaaaatgagtcttgctgattgttttgctttattttaatttaatgctacatattaagttacggacttgtatattccagggatctggatctgaagaagccaatttatcagaggactgcagcctatggccactttggtagggacagcttcccatgggaagtgcccaaaaagcttaaatattgaaagtgttagccttttttccccagacttgttggcgtaggctacagagaagccttcaagctctgagggaaagggccctccttcctaaattttcctgtcctctttcagctcctgaccagttgcagtcactctagtcaatgacatgaattttagcttttgtgggggactgtaagttgggcttgctattctgtccctaggtgttttgttcaccattataatgaatttagtgagcataggtgatccatgtaactgcctagaaacaacactgtagtaaataatgctttgaaattgaacctttgtgccctatcacccaacgctccaaagtcataattgcattgactttccccaccagatgctgaaaatgtccttgtgatggacaataaagtaaatagcaggatacacatatagaccactgatatcggggtacgc

SEQ ID NO: 54419 - DNA, 1936 bp, Homo sapiens
gcggccgcgcagtgtggttcagcccggactccgcggggcgagctgcccttcctcccccgacccccgcgcaagtggtgcattggcgcgcggcgccgaggggcggggcccgagccgggcgcgcgcgggcgctgctctataaataccgggccgcaccgcccgctgcttcgttcgctccgcgccgcccgcctgctacgagtagaacgctgtccgcagcttgcgcatttcgcagccgctgccgcctcgccgctgctccttcgtaaggccacttccgcacaccgacaccaacatgaacggacagctcaacggcttccacgaggcgttcatcgaggagggcacattccttttcacctcagagtcggtcggggaaggccacccagataagatttgtgaccaaatcagtgatgctgtccttgatgcccaccttcagcaggatcctgatgccaaagtagcttgtgaaactgttgctaaaactggaatgatccttcttgctggggaaattacatccagagctgctgttgactaccagaaagtggttcgtgaagctgttaaacacattggatatgatgattcttccaaaggttttgactacaagacttgtaacgtgctggtagccttggagcaacagtcaccagatattgctcaaggtgttcatcttgacagaaatgaagaagacattggtgctggagaccagggcttaatgtttggctatgccactgatgaaactgaggagtgtatgcctttaaccattgtcttggcacacaagctaaatgccaaactggcagaactacgccgtaatggcactttgccttggttacgccctgattctaaaactcaagttactgtgcagtatatgcaggatcgaggtgctgtgcttcccatcagagtccacacaattgttatatctgttcagcatgatgaagaggtttgtcttgatgaaatgagggatgccctaaaggagaaagtcatcaaagcagttgtgcctgcgaaataccttgatgaggatacaatctaccacctacagccaagtggcagatttgttattggtgggcctcagggtgatgctggtttgactggacgcaaaatcattgtggacacttatggcggttggggtgctcatggaggaggtgccttttcaggaaaggattataccaaggtcgaccgttcagctgcttatgctgctcgttgggtggcaaaatcccttgttaaaggaggtctgtgccggagggttcttgttcaggtatacactctttatataacgaacgattaaaagtcatgtaagtgggagggtatttagtagtaatctacttaactacttgttttataccaacgtattatacaagtgtatgggtctttgcaatcactgattcttacgacatttgaatccttttaggtctcttatgctattggagtttctcatccattatctatctccattttccattatggtacctctcagaagagtgagagagagctattagagattgtgaagaagaatttcgatctccgccctggggtcattgtcagaagatggtaaagcctgttgctagtcaagtattgagggtgttgggtgtgtgtgtatatacttaaggctgaggaggtgaaggtgtgaaggaagactcctcaaatgggaatatattttaattcctggaacagttttgaactgctgccttagtgaagacttagttatttgagaaatttaaaattacggtgctccatggcttaggctaaccactctagagaatgttccagatttgatatttgagctttgtgctcttctacttaagggtgttaagaaaatagagataaagtgggttgctcaaggtttgttgcaatgtaaaaaccatggtagggtgtgggcggcgggaccttggtaagtattgtgtgatctcaggtggtgtgactcaggtggtgtgactcaggtggtgtgactcaggtg

SEQ ID NO: 54420 - DNA, 1091 bp, Homo sapiens
gcggccgcgcagtgtggttcagcccggactccgcggggcgagctgcccttcctcccccgacccccgcgcaagtggtgcattggcgcgcggcgccgaggggcggggcccgagccgggcgcgcgcgggcgctgctctataaataccgggccgcaccgcccgctgcttcgttcgctccgcgccgcccgcctgctacgagtagaacgctgtccgcagcttgcgcatttcgcagccgctgccgcctcgccgctgctccttcgtaaggccacttccgcacaccgacaccaacatgaacggacagctcaacggcttccacgaggcgttcatcgaggagggcacattccttttcacctcagagtcggtcggggaaggccacccagataagatttgtgaccaaatcagtgatgctgtccttgatgcccaccttcagcaggatcctgatgccaaagtagcttgtgaaactgttgctaaaactggaatgatccttcttgctggggaaattacatccagagctgctgttgactaccagaaagtggttcgtgaagctgttaaacacattggatatgatgattcttccaaaggttttgactacaagacttgtaacgtgctggtagccttggagcaacagtcaccagatattgctcaaggtgttcatcttgacagaaatgaagaagacattggtgctggagaccagggcttaatgtttggctatgccactgatgaaactgaggagtgtatgcctttaaccattgtcttggcacacaagctaaatgccaaactggcagaactacgccgtaatggcactttgccttggttacgccctgattctaaaactcaagttactgtgcagtatatgcaggatcgaggtgctgtgcttcccatcagagtccacacaattgttatatctgttcagcatgatgaagaggtttgtcttgatgaaatgagggatgccctaaaggagaaagtcatcaaagcagttgtgcctgcgaaataccttgatgaggatacaatctaccacctacagccaagtggcagatttgttattggtgggcctcaggtaatgtcattttgttgcatttttctggatttttgat

SEQ ID NO: 54421 - DNA, 872 bp, Homo sapiens
  misc_feature (47)..(47): n is a, c, g, or t
taaacgcggaaccaaacacaaaaatcaagttggaacaaccggggaancaacgctcaacggcttccacgaggcgttcatcgaggagggcacattccttttcacctcagagtcggtcggggaaggccacccagataagatttgtgaccaaatcagtgatgctgtccttgatgcccaccttcagcaggatcctgatgccaaagtagcttgtgaaactgttgctaaaactggaatgatccttcttgctggggaaattacatccagagctgctgttgactaccagaaagtggttcgtgaagctgttaaacacattggatatgatgattcttccaaaggttttgactacaagacttgtaacgtgctggtagccttggagcaacagtcaccagatattgctcaaggtgttcatcttgacagaaatgaagaagacattggtgctggagaccagggcttaatgtttggctatgccactgatgaaactgaggagtgtatgcctttaaccattgtcttggcacacaagctaaatgccaaactggcagaactacgccgtaatggcactttgccttggttacgccctgattctaaaactcaagttactgtgcagtatatgcaggatcgaggtgctgtgcttcccatcagagtccacacaattgttatatctgttcagcatgatgaagaggtttgtcttgatgaaatgagggatgccctaaaggagaaagtcatcaaagcagttgtgcctgcgaaataccttgatgaggatacaatctaccacctacagccaagtggcagatttgttattggtgggcctcagggtgatgctggtttgactggaccgtcaagggattataccaaggtcgaccgttcctgctttgctg

SEQ ID NO: 54422 - DNA, 960 bp, Homo sapiens
gcggccgcgcagtgtggttcagcccggactccgcggggcgagctgcccttcctcccccgacccccgcgcaagtggtgcattggcgcgcggcgccgaggggcggggcccgagccgggcgcgcgcgggcgctgctctataaataccgggccgcaccgcccgctgcttcgttcgctccgcgccgcccgcctgctacgagtagaacgctgtccgcagcttgcgcatttcgcagccgctgccgcctcgccgctgctccttcgtaaggccacttccgcacaccgacaccaacatgaacggacagctcaacggcttccacgaggcgttcatcgaggagggcacattccttttcacctcagagtcggtcggggaaggccacccagataagatttgtgaccaaatcagtgatgctgtccttgatgcccaccttcagcaggatcctgatgccaaagtagcttgtgaaactgttgctaaaactggaatgatccttcttgctggggaaattacatccagagctgctgttgactaccagaaagtggttcgtgaagctgttaaacacattggatatgatgattcttccaaaggttttgactacaagacttgtaacgtgctggtagccttggagcaacagtcaccagatattgctcaaggtgttcatcttgacagaaatgaagaagacattggtgctggagaccaggtatcttggtgtagaggctgttttaatctcttctaacattaaattctggagcttgatcacattggtgacttttctttctttagggcttaatgtttggctatgccactgatgaaactgaggagtgtatgcctttaaccattgtcttggcacacaagctaaatgccaaactggcagaactacgccgtaatggcactttgccttggttacgccctgattctaaaactcaaaagtaagtgatgatcataaagcttggttgtctcatttattac

SEQ ID NO: 54423 - DNA, 2981 bp, Homo sapiens
gcggccgcgcagtgtggttcagcccggactccgcggggcgagctgcccttcctcccccgacccccgcgcaagtggtgcattggcgcgcggcgccgaggggcggggcccgagccgggcgcgcgcgggcgctgctctataaataccgggccgcaccgcccgctgcttcgttcgctccgcgccgcccgcctgctacgagtagaacgctgtccgcagcttgcgcatttcgcagccgctgccgcctcgccgctgctccttcgtaaggccacttccgcacaccgacaccaacatgaacggacagctcaacggcttccacgaggcgttcatcgaggagggcacattccttttcacctcagagtcggtcggggaaggccacccagataagatttgtgaccaaatcagtgatgctgtccttgatgcccaccttcagcaggatcctgatgccaaagtagcttgtgaaactgttgctaaaactggaatgatccttcttgctggggaaattacatccagagctgctgttgactaccagaaagtggttcgtgaagctgttaaacacattggatatgatgattcttccaaaggttttgactacaagacttgtaacgtgctggtagccttggagcaacagtcaccagatattgctcaaggtgttcatcttgacagaaatgaagaagacattggtgctggagaccagggcttaatgtttggctatgccactgatgaaactgaggagtgtatgcctttaaccattgtcttggcacacaagctaaatgccaaactggcagaactacgccgtaatggcactttgccttggttacgccctgattctaaaactcaagttactgtgcagtatatgcaggatcgaggtgctgtgcttcccatcagagtccacacaattgttatatctgttcagcatgatgaagaggtttgtcttgatgaaatgagggatgccctaaaggagaaagtcatcaaagcagttgtgcctgcgaaataccttgatgaggatacaatctaccacctacagccaagtggcagatttgttattggtgggcctcagggtgatgctggtttgactggacgcaaaatcattgtggacacttatggcggttggggtgctcatggaggaggtgccttttcaggaaaggattataccaaggtcgaccgttcagctgcttatgctgctcgttgggtggcaaaatcccttgttaaaggaggtctgtgccggagggttcttgttcaggtctcttatgctattggagtttctcatccattatctatctccattttccattatggtacctctcagaagagtgagagagagctattagagattgtgaagaagaatttcgatctccgccctggggtcattgtcagggatctggatctgaagaagccaatttatcagaggactgcagcctatggccactttggtagggacagcttcccatgggaagtgcccaaaaagcttaaatattgaaagtgttagccttttttccccagacttgttggcgtaggctacagagaagccttcaagctctgagggaaagggccctccttcctaaattttcctgtcctctttcagctcctgaccagttgcagtcactctagtcaatgacatgaattttagcttttgtgggggactgtaagttgggcttgctattctgtccctaggtgttttgttcaccattataatgaatttagtgagcataggtgatccatgtaactgcctagaaacaacactgtagtaaataatgctttgaaattgaacctttgtgccctatcacccaacgctccaaagtcataattgcattgactttccccaccagatgctgaaaatgtccttgtgatgtgcacgtaaagtacttgtagttccacttatagcctctgtctggcaatgccacagccctgtcagcatgaatttgtaatgtcttgagctctattatgaatgtgaagccttccccttatcctccctgtaacttgatccatttctaattatgtagctctttgtcagggagtgttccctatccaatcaatcttgcatgtaacgcaagttcccagttggagctccagcctgacatcaaaaaaggcagttaccattaaaccatctccctggtgcttatgctcttaattgccacctctaacagcaccaaatcaaaatctctccactttcagctgtcttttggaggacgtacgtaataaggttttaatttagtaaaccaatcctatgcatggtttcagcactagccaaacctcaccaactcctagttctagaaaaacaggcacttggcagccttgtgatgtcatacagagaagtcacagggcagtacctgagggtctgtaggttgcacactttggtaccagataacttttttttttctttataagaaagcctgagtactccacactgcacaataactcctcccagggttttaactttgttttattttcaaaaccaggtccaatgagctttctgaacagctggtgtagctacagagaaaccagcttccttcagagagcagtgcttttggcggggaggaggaaatcccttcatacttgaacgttttctaattgcttatttattgtattctggggtatggcgtaagtacagagaagccatcacctcagatggcagcttttaaaagattttttttttttctctcaacaccatgattcctttaacaacatgtttccagcattcccaggtaggccaaggtgtcctacagaaaaaccttgggttagacctacagggggtctggctggtgttaacagaagggagggcagagctggtgcggctggccatggagaaagctgacttggctggtgtggtacagagaagccagcttgtttacatgcttattccatgactgcttgccctaagcagaaagtgcctttcaggatctatttttggaggtttattacgtatgtctggttctcaattccaacagtttaatgaagatctaaataaaatgctaggttctacctta

SEQ ID NO: 54424 - DNA, 3766 bp, Homo sapiens
gcggccgcgcagtgtggttcagcccggactccgcggggcgagctgcccttcctcccccgacccccgcgcaagtggtgcattggcgcgcggcgccgaggggcggggcccgagccgggcgcgcgcgggcgctgctctataaataccgggccgcaccgcccgctgcttcgttcgctccgcgccgcccgcctgctacgagtagaacgctgtccgcagcttgcgcatttcgcagccgctgccgcctcgccgctgctccttcgtaaggccacttccgcacaccgacaccaacatgaacggacagctcaacggcttccacgaggcgttcatcgaggagggcacattccttttcacctcagagtcggtcggggaaggccacccagataagatttgtgaccaaatcagtgatgctgtccttgatgcccaccttcagcaggatcctgatgccaaagtagcttgtgaaactgttgctaaaactggaatgatccttcttgctggggaaattacatccagagctgctgttgactaccagaaagtggttcgtgaagctgttaaacacattggatatgatgattcttccaaaggttttgactacaagacttgtaacgtgctggtagccttggagcaacagtcaccagatattgctcaaggtgttcatcttgacagaaatgaagaagacattggtgctggagaccagggcttaatgtttggctatgccactgatgaaactgaggagtgtatgcctttaaccattgtcttggcacacaagctaaatgccaaactggcagaactacgccgtaatggcactttgccttggttacgccctgattctaaaactcaagttactgtgcagtatatgcaggatcgaggtgctgtgcttcccatcagagtccacacaattgttatatctgttcagcatgatgaagaggtttgtcttgatgaaatgagggatgccctaaaggagaaagtcatcaaagcagttgtgcctgcgaaataccttgatgaggatacaatctaccacctacagccaagtggcagatttgttattggtgggcctcagggtgatgctggtttgactggacgcaaaatcattgtggacacttatggcggttggggtgctcatggaggaggtgccttttcaggaaaggattataccaaggtcgaccgttcagctgcttatgctgctcgttgggtggcaaaatcccttgttaaaggaggtctgtgccggagggttcttgttcaggtatacactctttatataacgaacgattaaaagtcatgtaagtgggagggtatttagtagtaatctacttaactacttgttttataccaacgtattatacaagtgtatgggtctttgcaatcactgattcttacgacatttgaatccttttaggtctcttatgctattggagtttctcatccattatctatctccattttccattatggtacctctcagaagagtgagagagagctattagagattgtgaagaagaatttcgatctccgccctggggtcattgtcagaagatggtaaagcctgttgctagtcaagtattgagggtgttgggtgtgtgtgtatatacttaaggctgaggaggtgaaggtgtgaaggaagactcctcaaatgggaatatattttaattcctggaacagttttgaactgctgccttagtgaagacttagttatttgagaaatttaaaattacggtgctccatggcttaggctaaccactctagagaatgttccagatttgatatttgagctttgtgctcttctacttaagggtgttaagaaaatagagataaagtgggttgctcaaggtttgttgcaatgtaaaaaccatggtagggtgtgggcggcgggaccttggtaagtattgtgtgatctcaggtgagctttttgacaattgaaatttctcagaataatgacaagttttcgtatttgttgagccagggacggaaaaacaactatagttactaataaggactgtgcaaggagtttggacaccagggaagtaacacttttgccacaaatttttttcctagcatatcccagagaactcatttgccagagctcttgaaaatgagtcttgctgattgttttgctttattttaatttaatgctacatattaagttacggacttgtatattccagggatctggatctgaagaagccaatttatcagaggactgcagcctatggccactttggtagggacagcttcccatgggaagtgcccaaaaagcttaaatattgaaagtgttagccttttttccccagacttgttggcgtaggctacagagaagccttcaagctctgagggaaagggccctccttcctaaattttcctgtcctctttcagctcctgaccagttgcagtcactctagtcaatgacatgaattttagcttttgtgggggactgtaagttgggcttgctattctgtccctaggtgttttgttcaccattataatgaatttagtgagcataggtgatccatgtaactgcctagaaacaacactgtagtaaataatgctttgaaattgaacctttgtgccctatcacccaacgctccaaagtcataattgcattgactttccccaccagatgctgaaaatgtccttgtgatgtgcacgtaaagtacttgtagttccacttatagcctctgtctggcaatgccacagccctgtcagcatgaatttgtaatgtcttgagctctattatgaatgtgaagccttccccttatcctccctgtaacttgatccatttctaattatgtagctctttgtcagggagtgttccctatccaatcaatcttgcatgtaacgcaagttcccagttggagctccagcctgacatcaaaaaaggcagttaccattaaaccatctccctggtgcttatgctcttaattgccacctctaacagcaccaaatcaaaatctctccactttcagctgtcttttggaggacgtacgtaataaggttttaatttagtaaaccaatcctatgcatggtttcagcactagccaaacctcaccaactcctagttctagaaaaacaggcacttggcagccttgtgatgtcatacagagaagtcacagggcagtacctgagggtctgtaggttgcacactttggtaccagataacttttttttttctttataagaaagcctgagtactccacactgcacaataactcctcccagggttttaactttgttttattttcaaaaccaggtccaatgagctttctgaacagctggtgtagctacagagaaaccagcttccttcagagagcagtgcttttggcggggaggaggaaatcccttcatacttgaacgttttctaattgcttatttattgtattctggggtatggcgtaagtacagagaagccatcacctcagatggcagcttttaaaagattttttttttttctctcaacaccatgattcctttaacaacatgtttccagcattcccaggtaggccaaggtgtcctacagaaaaaccttgggttagacctacagggggtctggctggtgttaacagaagggagggcagagctggtgcggctggccatggagaaagctgacttggctggtgtggtacagagaagccagcttgtttacatgcttattccatgactgcttgccctaagcagaaagtgcctttcaggatctatttttggaggtttattacgtatgtctggttctcaattccaacagtttaatgaagatctaaataaaatgctaggttctacctta

SEQ ID NO: 54425 - DNA, 2735 bp, Homo sapiens
  misc_feature (47)..(47): n is a, c, g, or t
taaacgcggaaccaaacacaaaaatcaagttggaacaaccggggaancaacgctcaacggcttccacgaggcgttcatcgaggagggcacattccttttcacctcagagtcggtcggggaaggccacccagataagatttgtgaccaaatcagtgatgctgtccttgatgcccaccttcagcaggatcctgatgccaaagtagcttgtgaaactgttgctaaaactggaatgatccttcttgctggggaaattacatccagagctgctgttgactaccagaaagtggttcgtgaagctgttaaacacattggatatgatgattcttccaaaggttttgactacaagacttgtaacgtgctggtagccttggagcaacagtcaccagatattgctcaaggtgttcatcttgacagaaatgaagaagacattggtgctggagaccagggcttaatgtttggctatgccactgatgaaactgaggagtgtatgcctttaaccattgtcttggcacacaagctaaatgccaaactggcagaactacgccgtaatggcactttgccttggttacgccctgattctaaaactcaagttactgtgcagtatatgcaggatcgaggtgctgtgcttcccatcagagtccacacaattgttatatctgttcagcatgatgaagaggtttgtcttgatgaaatgagggatgccctaaaggagaaagtcatcaaagcagttgtgcctgcgaaataccttgatgaggatacaatctaccacctacagccaagtggcagatttgttattggtgggcctcagggtgatgctggtttgactggacgcaaaatcattgtggacacttatggcggttggggtgctcatggaggaggtgccttttcaggaaaggattataccaaggtcgaccgttcagctgcttatgctgctcgttgggtggcaaaatcccttgttaaaggaggtctgtgccggagggttcttgttcaggtctcttatgctattggagtttctcatccattatctatctccattttccattatggtacctctcagaagagtgagagagagctattagagattgtgaagaagaatttcgatctccgccctggggtcattgtcagggatctggatctgaagaagccaatttatcagaggactgcagcctatggccactttggtagggacagcttcccatgggaagtgcccaaaaagcttaaatattgaaagtgttagccttttttccccagacttgttggcgtaggctacagagaagccttcaagctctgagggaaagggccctccttcctaaattttcctgtcctctttcagctcctgaccagttgcagtcactctagtcaatgacatgaattttagcttttgtgggggactgtaagttgggcttgctattctgtccctaggtgttttgttcaccattataatgaatttagtgagcataggtgatccatgtaactgcctagaaacaacactgtagtaaataatgctttgaaattgaacctttgtgccctatcacccaacgctccaaagtcataattgcattgactttccccaccagatgctgaaaatgtccttgtgatgtgcacgtaaagtacttgtagttccacttatagcctctgtctggcaatgccacagccctgtcagcatgaatttgtaatgtcttgagctctattatgaatgtgaagccttccccttatcctccctgtaacttgatccatttctaattatgtagctctttgtcagggagtgttccctatccaatcaatcttgcatgtaacgcaagttcccagttggagctccagcctgacatcaaaaaaggcagttaccattaaaccatctccctggtgcttatgctcttaattgccacctctaacagcaccaaatcaaaatctctccactttcagctgtcttttggaggacgtacgtaataaggttttaatttagtaaaccaatcctatgcatggtttcagcactagccaaacctcaccaactcctagttctagaaaaacaggcacttggcagccttgtgatgtcatacagagaagtcacagggcagtacctgagggtctgtaggttgcacactttggtaccagataacttttttttttctttataagaaagcctgagtactccacactgcacaataactcctcccagggttttaactttgttttattttcaaaaccaggtccaatgagctttctgaacagctggtgtagctacagagaaaccagcttccttcagagagcagtgcttttggcggggaggaggaaatcccttcatacttgaacgttttctaattgcttatttattgtattctggggtatggcgtaagtacagagaagccatcacctcagatggcagcttttaaaagattttttttttttctctcaacaccatgattcctttaacaacatgtttccagcattcccaggtaggccaaggtgtcctacagaaaaaccttgggttagacctacagggggtctggctggtgttaacagaagggagggcagagctggtgcggctggccatggagaaagctgacttggctggtgtggtacagagaagccagcttgtttacatgcttattccatgactgcttgccctaagcagaaagtgcctttcaggatctatttttggaggtttattacgtatgtctggttctcaattccaacagtttaatgaagatctaaataaaatgctaggttctacctta

SEQ ID NO: 54426 - DNA, 3064 bp, Homo sapiens
gcggccgcgcagtgtggttcagcccggactccgcggggcgagctgcccttcctcccccgacccccgcgcaagtggtgcattggcgcgcggcgccgaggggcggggcccgagccgggcgcgcgcgggcgctgctctataaataccgggccgcaccgcccgctgcttcgttcgctccgcgccgcccgcctgctacgagtagaacgctgtccgcagcttgcgcatttcgcagccgctgccgcctcgccgctgctccttcgtaaggccacttccgcacaccgacaccaacatgaacggacagctcaacggcttccacgaggcgttcatcgaggagggcacattccttttcacctcagagtcggtcggggaaggccacccagataagatttgtgaccaaatcagtgatgctgtccttgatgcccaccttcagcaggatcctgatgccaaagtagcttgtgaaactgttgctaaaactggaatgatccttcttgctggggaaattacatccagagctgctgttgactaccagaaagtggttcgtgaagctgttaaacacattggatatgatgattcttccaaaggttttgactacaagacttgtaacgtgctggtagccttggagcaacagtcaccagatattgctcaaggtgttcatcttgacagaaatgaagaagacattggtgctggagaccaggtatcttggtgtagaggctgttttaatctcttctaacattaaattctggagcttgatcacattggtgacttttctttctttagggcttaatgtttggctatgccactgatgaaactgaggagtgtatgcctttaaccattgtcttggcacacaagctaaatgccaaactggcagaactacgccgtaatggcactttgccttggttacgccctgattctaaaactcaagttactgtgcagtatatgcaggatcgaggtgctgtgcttcccatcagagtccacacaattgttatatctgttcagcatgatgaagaggtttgtcttgatgaaatgagggatgccctaaaggagaaagtcatcaaagcagttgtgcctgcgaaataccttgatgaggatacaatctaccacctacagccaagtggcagatttgttattggtgggcctcagggtgatgctggtttgactggacgcaaaatcattgtggacacttatggcggttggggtgctcatggaggaggtgccttttcaggaaaggattataccaaggtcgaccgttcagctgcttatgctgctcgttgggtggcaaaatcccttgttaaaggaggtctgtgccggagggttcttgttcaggtctcttatgctattggagtttctcatccattatctatctccattttccattatggtacctctcagaagagtgagagagagctattagagattgtgaagaagaatttcgatctccgccctggggtcattgtcagggatctggatctgaagaagccaatttatcagaggactgcagcctatggccactttggtagggacagcttcccatgggaagtgcccaaaaagcttaaatattgaaagtgttagccttttttccccagacttgttggcgtaggctacagagaagccttcaagctctgagggaaagggccctccttcctaaattttcctgtcctctttcagctcctgaccagttgcagtcactctagtcaatgacatgaattttagcttttgtgggggactgtaagttgggcttgctattctgtccctaggtgttttgttcaccattataatgaatttagtgagcataggtgatccatgtaactgcctagaaacaacactgtagtaaataatgctttgaaattgaacctttgtgccctatcacccaacgctccaaagtcataattgcattgactttccccaccagatgctgaaaatgtccttgtgatgtgcacgtaaagtacttgtagttccacttatagcctctgtctggcaatgccacagccctgtcagcatgaatttgtaatgtcttgagctctattatgaatgtgaagccttccccttatcctccctgtaacttgatccatttctaattatgtagctctttgtcagggagtgttccctatccaatcaatcttgcatgtaacgcaagttcccagttggagctccagcctgacatcaaaaaaggcagttaccattaaaccatctccctggtgcttatgctcttaattgccacctctaacagcaccaaatcaaaatctctccactttcagctgtcttttggaggacgtacgtaataaggttttaatttagtaaaccaatcctatgcatggtttcagcactagccaaacctcaccaactcctagttctagaaaaacaggcacttggcagccttgtgatgtcatacagagaagtcacagggcagtacctgagggtctgtaggttgcacactttggtaccagataacttttttttttctttataagaaagcctgagtactccacactgcacaataactcctcccagggttttaactttgttttattttcaaaaccaggtccaatgagctttctgaacagctggtgtagctacagagaaaccagcttccttcagagagcagtgcttttggcggggaggaggaaatcccttcatacttgaacgttttctaattgcttatttattgtattctggggtatggcgtaagtacagagaagccatcacctcagatggcagcttttaaaagattttttttttttctctcaacaccatgattcctttaacaacatgtttccagcattcccaggtaggccaaggtgtcctacagaaaaaccttgggttagacctacagggggtctggctggtgttaacagaagggagggcagagctggtgcggctggccatggagaaagctgacttggctggtgtggtacagagaagccagcttgtttacatgcttattccatgactgcttgccctaagcagaaagtgcctttcaggatctatttttggaggtttattacgtatgtctggttctcaattccaacagtttaatgaagatctaaataaaatgctaggttctacctta

SEQ ID NO: 54427 - DNA, 2591 bp, Homo sapiens
  misc_feature (47)..(47): n is a, c, g, or t
taaacgcggaaccaaacacaaaaatcaagttggaacaaccggggaancaacgctcaacggcttccacgaggcgttcatcgaggagggcacattccttttcacctcagagtcggtcggggaaggccacccagataagatttgtgaccaaatcagtgatgctgtccttgatgcccaccttcagcaggatcctgatgccaaagtagcttgtgaaactgttgctaaaactggaatgatccttcttgctggggaaattacatccagagctgctgttgactaccagaaagtggttcgtgaagctgttaaacacattggatatgatgattcttccaaaggttttgactacaagacttgtaacgtgctggtagccttggagcaacagtcaccagatattgctcaaggtgttcatcttgacagaaatgaagaagacattggtgctggagaccaggttactgtgcagtatatgcaggatcgaggtgctgtgcttcccatcagagtccacacaattgttatatctgttcagcatgatgaagaggtttgtcttgatgaaatgagggatgccctaaaggagaaagtcatcaaagcagttgtgcctgcgaaataccttgatgaggatacaatctaccacctacagccaagtggcagatttgttattggtgggcctcagggtgatgctggtttgactggacgcaaaatcattgtggacacttatggcggttggggtgctcatggaggaggtgccttttcaggaaaggattataccaaggtcgaccgttcagctgcttatgctgctcgttgggtggcaaaatcccttgttaaaggaggtctgtgccggagggttcttgttcaggtctcttatgctattggagtttctcatccattatctatctccattttccattatggtacctctcagaagagtgagagagagctattagagattgtgaagaagaatttcgatctccgccctggggtcattgtcagggatctggatctgaagaagccaatttatcagaggactgcagcctatggccactttggtagggacagcttcccatgggaagtgcccaaaaagcttaaatattgaaagtgttagccttttttccccagacttgttggcgtaggctacagagaagccttcaagctctgagggaaagggccctccttcctaaattttcctgtcctctttcagctcctgaccagttgcagtcactctagtcaatgacatgaattttagcttttgtgggggactgtaagttgggcttgctattctgtccctaggtgttttgttcaccattataatgaatttagtgagcataggtgatccatgtaactgcctagaaacaacactgtagtaaataatgctttgaaattgaacctttgtgccctatcacccaacgctccaaagtcataattgcattgactttccccaccagatgctgaaaatgtccttgtgatgtgcacgtaaagtacttgtagttccacttatagcctctgtctggcaatgccacagccctgtcagcatgaatttgtaatgtcttgagctctattatgaatgtgaagccttccccttatcctccctgtaacttgatccatttctaattatgtagctctttgtcagggagtgttccctatccaatcaatcttgcatgtaacgcaagttcccagttggagctccagcctgacatcaaaaaaggcagttaccattaaaccatctccctggtgcttatgctcttaattgccacctctaacagcaccaaatcaaaatctctccactttcagctgtcttttggaggacgtacgtaataaggttttaatttagtaaaccaatcctatgcatggtttcagcactagccaaacctcaccaactcctagttctagaaaaacaggcacttggcagccttgtgatgtcatacagagaagtcacagggcagtacctgagggtctgtaggttgcacactttggtaccagataacttttttttttctttataagaaagcctgagtactccacactgcacaataactcctcccagggttttaactttgttttattttcaaaaccaggtccaatgagctttctgaacagctggtgtagctacagagaaaccagcttccttcagagagcagtgcttttggcggggaggaggaaatcccttcatacttgaacgttttctaattgcttatttattgtattctggggtatggcgtaagtacagagaagccatcacctcagatggcagcttttaaaagattttttttttttctctcaacaccatgattcctttaacaacatgtttccagcattcccaggtaggccaaggtgtcctacagaaaaaccttgggttagacctacagggggtctggctggtgttaacagaagggagggcagagctggtgcggctggccatggagaaagctgacttggctggtgtggtacagagaagccagcttgtttacatgcttattccatgactgcttgccctaagcagaaagtgcctttcaggatctatttttggaggtttattacgtatgtctggttctcaattccaacagtttaatgaagatctaaataaaatgctaggttctacctta

SEQ ID NO: 54428 - DNA, 1297 bp, Homo sapiens
atttctttgtcctccgagcagggaattgtttaggctgagcaaggatgaagttcgtgggggatggggtgcagcgcgctttgacggaaggagggtccgcagcggaggagacccggcagggaggcccccccaaccctccagctctcagggcacagggctaacgtgtctcttccccctgctgggtggaagacttgagggcctgaatggtagctattgcaccttctctccctgcacgcagccaaagacaagtggaattcatggacagagaaagaaaccttccttctttccccactttcaggggaagcagcgactccgaggcgcgggccactcaattgcgtttcaaggcgcgggaggagggggtggactgaggttcctggattggctgcagtgacgcagtcatgccattaggtgtcagcaaaagctcagggcctcggcatgggatggggcggctcagcgcttagcccccttccccagccctcttttctccccgatttccagttgcctctggccctgcagggtcgcccaccgcccgcatttcttcatgtacatggttcctcctagactactagggccgccttagcttgctacccttttaggaccctggagctgtgccagggtcccctctgtccccgcgctcctgacaccccctcctcttgcagggccacctcctccccagcccctcctgcagcgtctctgctccggacctcgcctcctcctgctctccctgggcctcagcctcctgctgcttgtggttgtctgtgtgatcggatcccaaaactcccagctgcaggaggagctgcggggcctgagagagacgttcagcaacttcacagcgagcacggaggcccaggtcaagggcttgagcacccaggatcactccagcctgctgctccacgtgaagcagttcgtgtctgacctgcggagcctgagctgtcagatggcggcgctccagggcaatggctcagaaaggacctgctgcccggtcaactgggtggagcacgagcgcagctgctactggttctctcgctccgggaaggcctgggctgacgccgacaactactgccggctggaggacgcgcacctggtggtggtcacgtcctgggaggagcagaaatttgtccagcaccacataggccctgtgaacacctggatgggcctccacgaccaaaacgggccctggaagtgggtggacgggacggactacgagacgggcttcaagtgagtgcgcgccctccctcggcctgggtccggccgccttcgcgccctggggccctgggctgaggagtctggagcgacccgc

SEQ ID NO: 54429 - DNA, 1687 bp, Homo sapiens
  misc_feature (1309)..(1309): n is a, c, g, or t
  misc_feature (1316)..(1316): n is a, c, g, or t
  misc_feature (1319)..(1319): n is a, c, g, or t
  misc_feature (1322)..(1322): n is a, c, g, or t
  misc_feature (1325)..(1325): n is a, c, g, or t
  misc_feature (1328)..(1328): n is a, c, g, or t
  misc_feature (1333)..(1333): n is a, c, g, or t
  misc_feature (1341)..(1341): n is a, c, g, or t
  misc_feature (1349)..(1349): n is a, c, g, or t
acacagagacaccggggcccagggcccgcctgatggaccctgcccgctcccctcccattgtccacggctgtccgcccacccccattctccaagcttcagccccctccttagttcggcatctgcacagcactgaagaacctgggaatcagaccctgagaccctgagcaatcccaggtccagcgccagccctatcatgaccaaggagtatcaagaccttcagcatctggacaatgaggagagtgaccaccatcagctcagaaaagggccacctcctccccagcccctcctgcagcgtctctgctccggacctcgcctcctcctgctctccctgggcctcagcctcctgctgcttgtggttgtctgtgtgatcggatcccaaaactcccagctgcaggaggagctgcggggcctgagagagacgttcagcaacttcacagcgagcacggaggcccaggtcaagggcttgagcacccagggaggcaatgtgggaagaaagatgaagtcgctagagtcccagctggagaaacagcagaaggacctgagtgaagatcactccagcctgctgctccacgtgaagcagttcgtgtctgacctgcggagcctgagctgtcagatggcggcgctccagggcaatggctcagaaaggacctgctgcccggtcaactgggtggagcacgagcgcagctgctactggttctctcgctccgggaaggcctgggctgacgccgacaactactgccggctggaggacgcgcacctggtggtggtcacgtcctgggaggagcagaaatttgtccagcaccacataggccctgtgaacacctggatgggcctccacgaccaaaacgggccctggaagtgggtggacgggacggactacgagacgggcttcaagaactggaggccggagcagccggacgactggtacggccacgggctcggaggaggcgaggactgtgcccacttcaccgacgacggccgctggaacgacgacgtctgccagaggccctaccgctgggtctgcgagacagagctggacaaggccagccaggagccacctctcctttaatttatttcttcaatgcctcgacctgccgcaggggtccgggattgggaatccgcccatctgggggcctcttctgctttctcgggaattttcatctaggattttaagggaaggggaaggatagggtgatgttccgaaggtgaggagcttgaaacccgtggcgctttctgcagtttgcaggttatcattgtgaacttttttttttttaagagtaaaaagaaatatacctaaaaaaaaaaaaanaaaaaanaanaanatnaanaaacngaaataanaaaaaaanacaacacatgagccaaaagctgaattaacatatatactacatttgggcactgacagtaaaaacaattttgactttaaaaagccataggtagggccccgcatcacgggccccttggcccaaaccccccttattctacacttctttcccttttacgcccagtcttttctaaacttccagcatggttatcccctggcgcggaaaccacgtgaatcttcgttgacttaactcctctattgagccgatttacatttccggggcgcggagttaaaccagcccgccaccgtaaaatcccagatgtttcttaagctaattcgcatttgatgccaagtcctcttccc

SEQ ID NO: 54430 - DNA, 2080 bp, Homo sapiens
  misc_feature (1702)..(1702): n is a, c, g, or t
  misc_feature (1709)..(1709): n is a, c, g, or t
  misc_feature (1712)..(1712): n is a, c, g, or t
  misc_feature (1715)..(1715): n is a, c, g, or t
  misc_feature (1718)..(1718): n is a, c, g, or t
  misc_feature (1721)..(1721): n is a, c, g, or t
  misc_feature (1726)..(1726): n is a, c, g, or t
  misc_feature (1734)..(1734): n is a, c, g, or t
  misc_feature (1742)..(1742): n is a, c, g, or t
atttctttgtcctccgagcagggaattgtttaggctgagcaaggatgaagttcgtgggggatggggtgcagcgcgctttgacggaaggagggtccgcagcggaggagacccggcagggaggcccccccaaccctccagctctcagggcacagggctaacgtgtctcttccccctgctgggtggaagacttgagggcctgaatggtagctattgcaccttctctccctgcacgcagccaaagacaagtggaattcatggacagagaaagaaaccttccttctttccccactttcaggggaagcagcgactccgaggcgcgggccactcaattgcgtttcaaggcgcgggaggagggggtggactgaggttcctggattggctgcagtgacgcagtcatgccattaggtgtcagcaaaagctcagggcctcggcatgggatggggcggctcagcgcttagcccccttccccagccctcttttctccccgatttccagttgcctctggccctgcagggtcgcccaccgcccgcatttcttcatgtacatggttcctcctagactactagggccgccttagcttgctacccttttaggaccctggagctgtgccagggtcccctctgtccccgcgctcctgacaccccctcctcttgcagggccacctcctccccagcccctcctgcagcgtctctgctccggacctcgcctcctcctgctctccctgggcctcagcctcctgctgcttgtggttgtctgtgtgatcggatcccaaaactcccagctgcaggaggagctgcggggcctgagagagacgttcagcaacttcacagcgagcacggaggcccaggtcaagggcttgagcacccagggaggcaatgtgggaagaaagatgaagtcgctagagtcccagctggagaaacagcagaaggacctgagtgaagatcactccagcctgctgctccacgtgaagcagttcgtgtctgacctgcggagcctgagctgtcagatggcggcgctccagggcaatggctcagaaaggacctgctgcccggtcaactgggtggagcacgagcgcagctgctactggttctctcgctccgggaaggcctgggctgacgccgacaactactgccggctggaggacgcgcacctggtggtggtcacgtcctgggaggagcagaaatttgtccagcaccacataggccctgtgaacacctggatgggcctccacgaccaaaacgggccctggaagtgggtggacgggacggactacgagacgggcttcaagaactggaggccggagcagccggacgactggtacggccacgggctcggaggaggcgaggactgtgcccacttcaccgacgacggccgctggaacgacgacgtctgccagaggccctaccgctgggtctgcgagacagagctggacaaggccagccaggagccacctctcctttaatttatttcttcaatgcctcgacctgccgcaggggtccgggattgggaatccgcccatctgggggcctcttctgctttctcgggaattttcatctaggattttaagggaaggggaaggatagggtgatgttccgaaggtgaggagcttgaaacccgtggcgctttctgcagtttgcaggttatcattgtgaacttttttttttttaagagtaaaaagaaatatacctaaaaaaaaaaaaanaaaaaanaanaanatnaanaaacngaaataanaaaaaaanacaacacatgagccaaaagctgaattaacatatatactacatttgggcactgacagtaaaaacaattttgactttaaaaagccataggtagggccccgcatcacgggccccttggcccaaaccccccttattctacacttctttcccttttacgcccagtcttttctaaacttccagcatggttatcccctggcgcggaaaccacgtgaatcttcgttgacttaactcctctattgagccgatttacatttccggggcgcggagttaaaccagcccgccaccgtaaaatcccagatgtttcttaagctaattcgcatttgatgccaagtcctcttccc

SEQ ID NO: 54431 - DNA, 2030 bp, Homo sapiens
  misc_feature (1652)..(1652): n is a, c, g, or t
  misc_feature (1659)..(1659): n is a, c, g, or t
  misc_feature (1662)..(1662): n is a, c, g, or t
  misc_feature (1665)..(1665): n is a, c, g, or t
  misc_feature (1668)..(1668): n is a, c, g, or t
  misc_feature (1671)..(1671): n is a, c, g, or t
  misc_feature (1676)..(1676): n is a, c, g, or t
  misc_feature (1684)..(1684): n is a, c, g, or t
  misc_feature (1692)..(1692): n is a, c, g, or t
atttctttgtcctccgagcagggaattgtttaggctgagcaaggatgaagttcgtgggggatggggtgcagcgcgctttgacggaaggagggtccgcagcggaggagacccggcagggaggcccccccaaccctccagctctcagggcacagggctaacgtgtctcttccccctgctgggtggaagacttgagggcctgaatggtagctattgcaccttctctccctgcacgcagccaaagacaagtggaattcatggacagagaaagaaaccttccttctttccccactttcaggggaagcagcgactccgaggcgcgggccactcaattgcgtttcaaggcgcgggaggagggggtggactgaggttcctggattggctgcagtgacgcagtcatgccattaggtgtcagcaaaagctcagggcctcggcatgggatggggcggctcagcgcttagcccccttccccagccctcttttctccccgatttccagttgcctctggccctgcagggtcgcccaccgcccgcatttcttcatgtacatggttcctcctagactactagggccgccttagcttgctacccttttaggaccctggagctgtgccagggtcccctctgtccccgcgctcctgacaccccctcctcttgcagggccacctcctccccagcccctcctgcagcgtctctgctccggacctcgcctcctcctgctctccctgggcctcagcctcctgctgcttgtggttgtctgtgtgatcggatcccaaaactcccagctgcaggaggagctgcggggcctgagagagacgttcagcaacttcacagcgagcacggaggcccaggtcaagggcttgagcacccagggaggcaatgtgggaagaaagatgaagtcgctagagtcccagctggagaaacagcagaaggacctgagtgaagatcactccagcctgctgctccacgtgaagcagttcgtgtctgacctgcggagcctgagctgtcagatggcggcgctccagggcaatggctcagaaaggacctgctgcccggtcaactgggtggagcacgagcgcagctgctactggttctctcgctccgggaaggcctgggctgacgccgacaactactgccggctggaggacgcgcacctggtggtggtcacgtcctgggaggagcagaaatttgtccagcaccacataggccctgtgaacacctggatgggcctccacgaccaagaactggaggccggagcagccggacgactggtacggccacgggctcggaggaggcgaggactgtgcccacttcaccgacgacggccgctggaacgacgacgtctgccagaggccctaccgctgggtctgcgagacagagctggacaaggccagccaggagccacctctcctttaatttatttcttcaatgcctcgacctgccgcaggggtccgggattgggaatccgcccatctgggggcctcttctgctttctcgggaattttcatctaggattttaagggaaggggaaggatagggtgatgttccgaaggtgaggagcttgaaacccgtggcgctttctgcagtttgcaggttatcattgtgaacttttttttttttaagagtaaaaagaaatatacctaaaaaaaaaaaaanaaaaaanaanaanatnaanaaacngaaataanaaaaaaanacaacacatgagccaaaagctgaattaacatatatactacatttgggcactgacagtaaaaacaattttgactttaaaaagccataggtagggccccgcatcacgggccccttggcccaaaccccccttattctacacttctttcccttttacgcccagtcttttctaaacttccagcatggttatcccctggcgcggaaaccacgtgaatcttcgttgacttaactcctctattgagccgatttacatttccggggcgcggagttaaaccagcccgccaccgtaaaatcccagatgtttcttaagctaattcgcatttgatgccaagtcctcttccc

SEQ ID NO: 54432 - DNA, 2100 bp, Homo sapiens
  misc_feature (1722)..(1722): n is a, c, g, or t
  misc_feature (1729)..(1729): n is a, c, g, or t
  misc_feature (1732)..(1732): n is a, c, g, or t
  misc_feature (1735)..(1735): n is a, c, g, or t
  misc_feature (1738)..(1738): n is a, c, g, or t
  misc_feature (1741)..(1741): n is a, c, g, or t
  misc_feature (1746)..(1746): n is a, c, g, or t
  misc_feature (1754)..(1754): n is a, c, g, or t
  misc_feature (1762)..(1762): n is a, c, g, or t
atttctttgtcctccgagcagggaattgtttaggctgagcaaggatgaagttcgtgggggatggggtgcagcgcgctttgacggaaggagggtccgcagcggaggagacccggcagggaggcccccccaaccctccagctctcagggcacagggctaacgtgtctcttccccctgctgggtggaagacttgagggcctgaatggtagctattgcaccttctctccctgcacgcagccaaagacaagtggaattcatggacagagaaagaaaccttccttctttccccactttcaggggaagcagcgactccgaggcgcgggccactcaattgcgtttcaaggcgcgggaggagggggtggactgaggttcctggattggctgcagtgacgcagtcatgccattaggtgtcagcaaaagctcagggcctcggcatgggatggggcggctcagcgcttagcccccttccccagccctcttttctccccgatttccagttgcctctggccctgcagggtcgcccaccgcccgcatttcttcatgtacatggttcctcctagactactagggccgccttagcttgctacccttttaggaccctggagctgtgccagggtcccctctgtccccgcgctcctgacaccccctcctcttgcagggccacctcctccccagcccctcctgcagcgtctctgctccggacctcgcctcctcctgctctccctgggcctcagcctcctgctgcttgtggttgtctgtgtgatcggatcccaaaactcccagctgcaggaggagctgcggggcctgagagagacgttcagcaacttcacagcgagcacggaggcccaggtcaagggcttgagcacccagggaggcaatgtgggaagaaagatgaagtcgctagagtcccagctggagaaacagcagaaggacctgagtgaagatcactccagcctgctgctccacgtgaagcagttcgtgtctgacctgcggagcctgagctgtcagatggcggcgctccagggcaatggctcagaaaggacctgctgcccggtcaactgggtggagcacgagcgcagctgctactggttctctcgctccgggaaggcctgggctgacgccgacaactactgccggctggaggacgcgcacctggtggtggtcacgtcctgggaggagcaggtgaggacccggagggtctgggaggctggctggcctcggagagatcaccacccgccttctctctcctcagaaatttgtccagcaccacataggccctgtgaacacctggatgggcctccacgaccaagaactggaggccggagcagccggacgactggtacggccacgggctcggaggaggcgaggactgtgcccacttcaccgacgacggccgctggaacgacgacgtctgccagaggccctaccgctgggtctgcgagacagagctggacaaggccagccaggagccacctctcctttaatttatttcttcaatgcctcgacctgccgcaggggtccgggattgggaatccgcccatctgggggcctcttctgctttctcgggaattttcatctaggattttaagggaaggggaaggatagggtgatgttccgaaggtgaggagcttgaaacccgtggcgctttctgcagtttgcaggttatcattgtgaacttttttttttttaagagtaaaaagaaatatacctaaaaaaaaaaaaanaaaaaanaanaanatnaanaaacngaaataanaaaaaaanacaacacatgagccaaaagctgaattaacatatatactacatttgggcactgacagtaaaaacaattttgactttaaaaagccataggtagggccccgcatcacgggccccttggcccaaaccccccttattctacacttctttcccttttacgcccagtcttttctaaacttccagcatggttatcccctggcgcggaaaccacgtgaatcttcgttgacttaactcctctattgagccgatttacatttccggggcgcggagttaaaccagcccgccaccgtaaaatcccagatgtttcttaagctaattcgcatttgatgccaagtcctcttccc

SEQ ID NO: 54433 - DNA, 722 bp, Homo sapiens
gaagcagttcgtgtctgacctgcggagcctgagctgtcagatggcggcgctccagggcaatggtaaggaggccagcccggcccgctctctgcctccccccttctctgggcagcgcttagcccctgcgccccgtttctcccgctcaggctcagaaaggacctgctgcccggtcaactgggtggagcacgagcgcagctgctactggttctctcgctccgggaaggcctgggctgacgccgacaactactgccggctggaggacgcgcacctggtggtggtcacgtcctgggaggagcaggtgaggacccggagggtctgggaggctggctggcctcggagagatcaccacccgccttctctctcctcagaaatttgtccagcaccacataggccctgtgaacacctggatgggcctccacgaccaaaacgggccctggaagtgggtggacgggacggactacgagacgggcttcaagtgagtgcgcgccctccctcggcctgggtccggccgccttcgcgccctggggccctgggctgaggagtctggagcgacccgcctgcggatccgacctcctggggcccacagctggctctgtccccagggaactggaggccggagcagccggacgactggtacggccacgggctcggaggaggcgaggactgtgcccacttcaccgacgacggccgctggaacgacgacgtctgccagaggccctacc

SEQ ID NO: 54434 - DNA, 1299 bp, Homo sapiens
acacagagacaccggggcccagggcccgcctgatggaccctgcccgctcccctcccattgtccacggctgtccgcccacccccattctccaagcttcagccccctccttagttcggcatctgcacagcactgaagaacctgggaatcagaccctgagaccctgagcaatcccaggtccagcgccagccctatcatgaccaaggagtatcaagaccttcagcatctggacaatgaggagagtgaccaccatcagctcagaaaagggccacctcctccccagcccctcctgcagcgtctctgctccggacctcgcctcctcctgctctccctgggcctcagcctcctgctgcttgtggttgtctgtgtgatcggatcccaaaactcccagctgcaggaggagctgcggggcctgagagagacgttcagcaacttcacagcgagcacggaggcccaggtcaagggcttgagcacccagggaggcaatgtgggaagaaagatgaagtcgctagagtcccagctggagaaacagcagaaggacctgagtgaagatcactccagcctgctgctccacgtgaagcagttcgtgtctgacctgcggagcctgagctgtcagatggcggcgctccagggcaatggctcagaaaggacctgctgcccggtcaactgggtggagcacgagcgcagctgctactggttctctcgctccgggaaggcctgggctgacgccgacaactactgccggctggaggacgcgcacctggtggtggtcacgtcctgggaggagcagaaatttgtccagcaccacataggccctgtgaacacctggatgggcctccacgaccaaaacgggccctggaagtgggtggacgggacggactacgagacgggcttcaagaactggaggccggagcagccggacgactggtacggccacgggctcggaggaggcgaggactgtgcccacttcaccgacgacggccgctggaacgacgacgtctgccagaggccctaccgctgggtctgcgagacagagctggacaaggccagccaggagccacctctcctttaatttatttcttcaatgcctcgacctgccgcaggggtccgggattgggaatccgcccatctgggggcctcttctgctttctcgggaattttcatctaggattttaagggaaggggaaggatagggtgatgttccgaaggtgaggagcttgaaacccgtggcgctttctgcagttcacaatgataacctgcaaactgcagaaagcgccacgggtttcaagctcctcaccttcg

SEQ ID NO: 54435 - DNA, 1670 bp, Homo sapiens
  misc_feature (1309)..(1309): n is a, c, g, or t
  misc_feature (1316)..(1316): n is a, c, g, or t
  misc_feature (1319)..(1319): n is a, c, g, or t
  misc_feature (1322)..(1322): n is a, c, g, or t
  misc_feature (1325)..(1325): n is a, c, g, or t
  misc_feature (1328)..(1328): n is a, c, g, or t
  misc_feature (1333)..(1333): n is a, c, g, or t
  misc_feature (1341)..(1341): n is a, c, g, or t
  misc_feature (1349)..(1349): n is a, c, g, or t
acacagagacaccggggcccagggcccgcctgatggaccctgcccgctcccctcccattgtccacggctgtccgcccacccccattctccaagcttcagccccctccttagttcggcatctgcacagcactgaagaacctgggaatcagaccctgagaccctgagcaatcccaggtccagcgccagccctatcatgaccaaggagtatcaagaccttcagcatctggacaatgaggagagtgaccaccatcagctcagaaaagggccacctcctccccagcccctcctgcagcgtctctgctccggacctcgcctcctcctgctctccctgggcctcagcctcctgctgcttgtggttgtctgtgtgatcggatcccaaaactcccagctgcaggaggagctgcggggcctgagagagacgttcagcaacttcacagcgagcacggaggcccaggtcaagggcttgagcacccagggaggcaatgtgggaagaaagatgaagtcgctagagtcccagctggagaaacagcagaaggacctgagtgaagatcactccagcctgctgctccacgtgaagcagttcgtgtctgacctgcggagcctgagctgtcagatggcggcgctccagggcaatggctcagaaaggacctgctgcccggtcaactgggtggagcacgagcgcagctgctactggttctctcgctccgggaaggcctgggctgacgccgacaactactgccggctggaggacgcgcacctggtggtggtcacgtcctgggaggagcagaaatttgtccagcaccacataggccctgtgaacacctggatgggcctccacgaccaaaacgggccctggaagtgggtggacgggacggactacgagacgggcttcaagaactggaggccggagcagccggacgactggtacggccacgggctcggaggaggcgaggactgtgcccacttcaccgacgacggccgctggaacgacgacgtctgccagaggccctaccgctgggtctgcgagacagagctggacaaggccagccaggagccacctctcctttaatttatttcttcaatgcctcgacctgccgcaggggtccgggattgggaatccgcccatctgggggcctcttctgctttctcgggaattttcatctaggattttaagggaaggggaaggatagggtgatgttccgaaggtgaggagcttgaaacccgtggcgctttctgcagtttgcaggttatcattgtgaacttttttttttttaagagtaaaaagaaatatacctaaaaaaaaaaaaanaaaaaanaanaanatnaanaaacngaaataanaaaaaaanacaaaactgagccatatgctgcattaataatcatactacattgtgtgacttgacaataaataccacttttgactttaaccagacctatactggagcccgaattccgggccttttggccctagctctggtatgcccccgggccctcactcgggaacacttggtcactaactccctctcttacgccgttttccaatctcactgaccgggcctgctacacgtatcgccctttccgaacactcccgatgttctccccagcttaatcgcatttgcaacacatcccctttttccacagatgctgcattcatactcttggccccccca

SEQ ID NO: 54436 - DNA, 1594 bp, Homo sapiens
  misc_feature (1216)..(1216): n is a, c, g, or t
  misc_feature (1223)..(1223): n is a, c, g, or t
  misc_feature (1226)..(1226): n is a, c, g, or t
  misc_feature (1229)..(1229): n is a, c, g, or t
  misc_feature (1232)..(1232): n is a, c, g, or t
  misc_feature (1235)..(1235): n is a, c, g, or t
  misc_feature (1240)..(1240): n is a, c, g, or t
  misc_feature (1248)..(1248): n is a, c, g, or t
  misc_feature (1256)..(1256): n is a, c, g, or t
acacagagacaccggggcccagggcccgcctgatggaccctgcccgctcccctcccattgtccacggctgtccgcccacccccattctccaagcttcagccccctccttagttcggcatctgcacagcactgaagaacctgggaatcagaccctgagaccctgagcaatcccaggtccagcgccagccctatcatgaccaaggagtatcaagaccttcagcatctggacaatgaggagagtgaccaccatcagctcagaaaagcaacttcacagcgagcacggaggcccaggtcaagggcttgagcacccagggaggcaatgtgggaagaaagatgaagtcgctagagtcccagctggagaaacagcagaaggacctgagtgaagatcactccagcctgctgctccacgtgaagcagttcgtgtctgacctgcggagcctgagctgtcagatggcggcgctccagggcaatggctcagaaaggacctgctgcccggtcaactgggtggagcacgagcgcagctgctactggttctctcgctccgggaaggcctgggctgacgccgacaactactgccggctggaggacgcgcacctggtggtggtcacgtcctgggaggagcaggtgaggacccggagggtctgggaggctggctggcctcggagagatcaccacccgccttctctctcctcagaaatttgtccagcaccacataggccctgtgaacacctggatgggcctccacgaccaaaacgggccctggaagtgggtggacgggacggactacgagacgggcttcaagaactggaggccggagcagccggacgactggtacggccacgggctcggaggaggcgaggactgtgcccacttcaccgacgacggccgctggaacgacgacgtctgccagaggccctaccgctgggtctgcgagacagagctggacaaggccagccaggagccacctctcctttaatttatttcttcaatgcctcgacctgccgcaggggtccgggattgggaatccgcccatctgggggcctcttctgctttctcgggaattttcatctaggattttaagggaaggggaaggatagggtgatgttccgaaggtgaggagcttgaaacccgtggcgctttctgcagtttgcaggttatcattgtgaacttttttttttttaagagtaaaaagaaatatacctaaaaaaaaaaaaanaaaaaanaanaanatnaanaaacngaaataanaaaaaaanacaacacatgagccaaaagctgaattaacatatatactacatttgggcactgacagtaaaaacaattttgactttaaaaagccataggtagggccccgcatcacgggccccttggcccaaaccccccttattctacacttctttcccttttacgcccagtcttttctaaacttccagcatggttatcccctggcgcggaaaccacgtgaatcttcgttgacttaactcctctattgagccgatttacatttccggggcgcggagttaaaccagcccgccaccgtaaaatcccagatgtttcttaagctaattcgcatttgatgccaagtcctcttccc

SEQ ID NO: 54437 - DNA, 1267 bp, Homo sapiens
acacagagacaccggggcccagggcccgcctgatggaccctgcccgctcccctcccattgtccacggctgtccgcccacccccattctccaagcttcagccccctccttagttcggcatctgcacagcactgaagaacctgggaatcagaccctgagaccctgagcaatcccaggtccagcgccagccctatcatgaccaaggagtatcaagaccttcagcatctggacaatgaggagagtgaccaccatcagctcagaaaagggccacctcctccccagcccctcctgcagcgtctctgctccggacctcgcctcctcctgctctccctgggcctcagcctcctgctgcttgtggttgtctgtgtgatcggatcccaaaactcccagctgcaggaggagctgcggggcctgagagagacgttcagcaacttcacagcgagcacggaggcccaggtcaagggcttgagcacccagggaggcaatgtgggaagaaagatgaagtcgctagagtcccagctggagaaacagcagaaggacctgagtgaagatcactccagcctgctgctccacgtgaagcagttcgtgtctgacctgcggagcctgagctgtcagatggcggcgctccagggcaatggctcagaaaggacctgctgcccggtcaactgggtggagcacgagcgcagctgctactggttctctcgctccgggaaggcctgggctgacgccgacaactactgccggctggaggacgcgcacctggtggtggtcacgtcctgggaggagcagaaatttgtccagcaccacataggccctgtgaacacctggatgggcctccacgaccaaaacgggccctggaagtgggtggacgggacggactacgagacgggcttcaagaactggaggccggagcagccggacgactggtacggccacgggctcggaggaggcgaggactgtgcccacttcaccgacgacggccgctggaacgacgacgtctgccagaggccctaccgctgggtctgcgagacagagctggacaaggccagccaggagccacctctcctttaatttatttcttcaatgcctcgacctgccgcaggggtccgggattgggaatccgcccatctgggggcctcttctgctttctcgggaattttcatcttatccatatgaacaggtgcccttcatgcgtccgtttataggctctccacaagggtcgcattccactcccagagctatgaacatctgcttttctgcctcatgccg

SEQ ID NO: 54438 - DNA, 1451 bp, Homo sapiens
tcctgatatactgtctcttaaaataaaaataaaaatatttatatatagataaagagaaagtatggctacctaatgggcagtagatacagagagacagagaaaaatggggaaccttttagagcagttttcccctaacttcagttattcacatatcaccttcacattttgtgtgtgtgtgtgtgtgtgtgtgtgtgtgtgtgtgcgcgcgcgccagtgcaggaccgagattgagggaaagcatgtctcctgggtgacagagccagactcttgtctcaaaacaaacaaaaacaaacaaacaaaaaccctataaacataccaattacagtacctgcaaatgaaggttaagtgttaccaaattaataaatataattaattactgtttatttgctttagaaaataattggccatgaagccagaggaccatatctatcttgttcattgttgtattcccagcccctagcattgtgcctgagacatcacagatcccctttaaatacttgctgagtgaattcactttttaaataacagccacatttcatccttttgatctctccaaacttgatttagatgcaacttctccaggagtgcttatgttacccaaagagaaacagatgcacaaagagaaggaatgagatgctcggggatattttatcaaggaaaccagcaaaccgtctttttcctgaagaccttttaagattaggacaagcagctgtttataaaagcagaacagtgttaagatttgaactgtaaagtaggatcatgctttgaagtatattctagctaaaagcaggggataaactagataaaacttggagactctaagacctgaccctgattaagtgggcctacaagtgagaatctgaagaacagctctctggctgaacatatcccttggatgttgttattaccagctgcctctagatttgagaacagtgctgagcatgcttttaaatgatctttgaggtactttaagctagctacacctgaaagcatacctagccctcatttctgtttgcttgaacaagagcctgaaaaagaagtctaaagaactttctagtgatatccttcagtcctgttctaaaaagaacctgtgttcttcaccgagttaaggaaatttcacaactccccaggggctaatgtggagttcattttcacttactgctgaatcaactgaagttcctttcagagtcttttcctagagtggaaaagtatctgagctcttcaacctactattcattagtgctgagagacaaaaatcatgttagagtctataatgtaatggagcataaaacatttaagttatgaatctgcataaaatgtgtaaaagatgaaaaaacatactttaatgtttgtcagtacttattgatcagtgaaagaacattttcattaatgcctcagcctgtgaatggatgtcaataaagatgagtgagaaggtatttcatatacaaaaa

SEQ ID NO: 54439 - DNA, 921 bp, Homo sapiens
  misc_feature (28)..(28): n is a, c, g, or t
  misc_feature (30)..(30): n is a, c, g, or t
gaggattccggggactggagggcagccngnagccaagatgcaacttctccaggagtgcttatgttacccaaagagaaacagatgcacaaagagaaggaatgagatgctcggggatattttatcaaggaaaccagcaaaccgtctttttcctgaagaccttttaagattaggacaagcagctgtttataaaagcagaacagtgttaagatttgaactgtaaagtaggatcatgctttgaagtatattctagctaaaagcaggggataaactagataaaacttggagactctaagacctgaccctgattaagtgggcctacaagtgagaatctgaagaacagctctctggctgaacatatcccttggatgttgttattaccagctgcctctagatttgagaacagtgctgagcatgcttttaaatgatctttgaggtactttaagctagctacacctgaaagcatacctagccctcatttctgtttgcttgaacaagagcctgaaaaagaagtctaaagaactttctagtgatatccttcagtcctgttctaaaaagaacctgtgttcttcaccgagttaaggaaatttcacaactccccaggggctaatgtggagttcattttcacttactgctgaatcaactgaagttcctttcagagtcttttcctagagtggaaaagtatctgagctcttcaacctactattcattagtgctgagagacaaaaatcatgttagagtctataatgtaatggagcataaaacatttaagttatgaatctgcataaaatgtgtaaaagatgaaaaaacatactttaatgtttgtcagtacttattgatcagtgaaagaacattttcattaatgcctcagcctgtgaatggatgtcaataaagatgagtgagaaggtatttcatatacaaaaa

SEQ ID NO: 54440 - DNA, 294 bp, Homo sapiens
ccacctccaccctctttcccaaggccttgagtgacggaggggacagaatggggtcggaggtggcgaggggcctccgaaggccagccccttcctctcccttcacacccttcactccccgctcagacccaggcttctgccccacgcccctcccctggcccagccaccagctgacttcctcggccggccccctcccctccactctgggattggtgccagggtgagaaggggacactggcactgaccgtgtctgggaattcccgcccaccgaggagctgaaaggagggggggtccccg

SEQ ID NO: 54441 - DNA, 366 bp, Homo sapiens
gacaagcactgatctaggactcattaagtttctaaaacaaaggttgcaaaaagtggcaagccacaaactaaatgtggtctattacattttttgtttggtctctacactgtttaaaattcttgaattatttgccaaaattaaaaggaggaaaagttcataaaaagagattaatttattgataaattgcatgattatataaaaataggctaacatttctgtatgacaacagtggagctgagtgacactgcttcctttacaacagaatgctacatgttccctgtgacagggttcattgcagtcctcttcatttacttatgttatctacctgaccctggtacgcatttgactttctaatctctgctgtca

SEQ ID NO: 54442 - DNA, 212 bp, Homo sapiens
cattctgtgtcaaagagtcaaaacatttcatttgtgggtttgttgcatatggagggtgctaatgcccaaagcttaggcaaagctgacagtaatctcatcccctgagctgggcattcgcatcttagcagcataggaatgggcgactggctttgttaagtcaacaaaacaggcaccacaataatcgttttccagattgggttggacatggcact

SEQ ID NO: 54443 - DNA, 448 bp, Homo sapiens
aaaaaattaaaaaactgttaagagcaattctagaaagacaatgaaagaaaaacaatgtgtgaagtaatggtggctgaaatttcccacagttaaagaaagggagctctctaaactgatatcttaacatgtcgtagtaaaactttagaacattaaagatgaataagaaaaaatctttactcctattgaggaaagaaaaaaaagattacctacaaaggaacaatagtaatattggctgtaataagataacggagcagcatcttcgtagtgccaaggaaaagtaactgccaatctgaaattttatgcccagctaaactattactcaagagtgaggggaaaaagttaaaacaccagaaacaaaggactcaaagattaacaaccatgagttcttgctgaaagaacttctgaaggatgtactccaagaaaaatgaaccttaaataacaagcctcc

SEQ ID NO: 54444 - DNA, 565 bp, Homo sapiens
  misc_feature (12)..(12): n is a, c, g, or t
  misc_feature (91)..(91): n is a, c, g, or t
  misc_feature (141)..(141): n is a, c, g, or t
  misc_feature (189)..(189): n is a, c, g, or t
  misc_feature (191)..(191): n is a, c, g, or t
ctagctgtgctncataacccactgggtgtcacttctagtccctcttggtgggcggagctgagacagatatgtacatatacacatacctttnctcagctctgagatatatatatataggggttctgtgtgtgtgtgtaaatnatgtgtgtgtgtgtgtataaatgtgtgtgtatgtgtgtgtgtgtgtananatgtgtgtgtcaactgcatataggtatgcaaagatagagaagtctatgaatgaatttgagaaggaacagctagagaagaaaaggatagcaggaaggatagccagagaagaaaataagagaaaccaaggaagtagatttcaaggaggagtgaccaactgtgtcaaagacacaccgacattagacacaccgacattagacacaccgacattagacacacagacattagacacaccgacattagacacaccgacattagacacaccgacattagacacaccgacattagacacaccgacattagacacaccgacattagacacaccgacattagacacaccgacattagacacaccgacattagacacaccgacatt

SEQ ID NO: 54445 - DNA, 240 bp, Homo sapiens
ctctgactatcatttcaccaaatgtgtaaacatactttgttatctatgtggctagtagggttgccagattgagcaagtaaaattataggacacccagttaattttggattttagaaaaataacaaatcaatgtttagtatagcatatttctattattgcatgtaacatacttatgcaaaaaagttatgtgttgtttatttcaatctatatgtagctatgcatccgtatttaacctcaaaa

SEQ ID NO: 54446 - DNA, 155 bp, Homo sapiens
gccaattgtgctaccagcctcttccttgcagtcctgggcttagcattcaggaccagtagtgggaagggtcctgggcagggcttcaggggtagggagttggagggttgcagttgaaggccactggatgagtgacagacccaggcagagagaggggt

SEQ ID NO: 54447 - DNA, 495 bp, Homo sapiens
gatgtttgaaaatgctatgtttactcgttcttgggttccaataaaggagaaacagggcacaggagtcggaaggactagtggcaatagtgatgaaaggacctccttatcatgctggcaatgttaattacccaggtgtaggaagccatacactgaggcggaagatcgcaagtcagagtggccggcaggcacaacctcctggcacaccagaggcaggtcttcaatacccactggtttccccaacaggctgcgtaagggaccctgagccacagtgagttggtcaaatgctcctgacagtgtggagaaaccaacagacaaaacgtgggtgcaaaagtgatgagaccccacactttacactcgtggtgacaatgaagctattaagtaacagcttctcaacctatgctgtttcctgttggatgcacataatccatttgcactgcagacaattttaggatgtggtttacagtaaggtggatggtaccttatggcaaaaatctc

SEQ ID NO: 54448 - DNA, 2547 bp, Homo sapiens
ggggaaacggcggccagacttccccgggaaggggcgagcgagagccgggccgggccgggccgggccgcggggccgggaagcgccgagccgggcatctcctcaccaggcagcgaccgaggagcccggccgcccaccccgtgccgcccgagcccgcagccgcccgccggtccctctgggatgtccgtaggacccgggcattcaggacggtagccgagcgagcccgaggatgggagggcacccgcagctccgtctcgtcaaggcccttctccttctggggctgaaccccgtctctgcctccctccaggaccagcactgcgagagcctgtccctggccagcaacatctcaggactgcagtgcaacgcatccgtggacctcattggcacctgctggccccgcagccctgcggggcagctagtggttcggccctgccctgcctttttctatggtgtccgctacaataccacaaacaatggctaccgggagtgcctggccaatggcagctgggccgcccgcgtgaattactccgagtgccaggagatcctcaatgaggagaaaaaaagcaaggtgcactaccatgtcgcagtcatcatcaactacctgggccactgtatctccctggtggccctcctggtggcctttgtcctctttctgcggctcaggagcatccggtgcctgcgaaacatcatccactggaacctcatctccgccttcatcctgcgcaacgccacctggttcgtggtccagctaaccatgagccccgaggtccaccagagcaacgtgggctggtgcaggttggtgacagccgcctacaactacttccatgtgaccaacttcttctggatgttcggcgagggctgctacctgcacacagccatcgtgctcacctactccactgaccggctgcgcaaatggatgttcatctgcattggctggggtgtgcccttccccatcattgtggcctgggccattgggaagctgtactacgacaatgagaagtgctggtttggcaaaaggcctggggtgtacaccgactacatctaccagggccccatgatcctggtcctgctgatcaatttcatcttccttttcaacatcgtccgcatcctcatgaccaagctccgggcatccaccacgtctgagaccattcagtacaggaaggctgtgaaagccactctggtgctgctgcccctcctgggcatcacctacatgctgttcttcgtcaatcccggggaggatgaggtctcccgggtcgtcttcatctacttcaactccttcctggaatccttccagggcttctttgtgtctgtgttctactgtttcctcaatagtgaggtccgttctgccatccggaagaggtggcaccggtggcaggacaagcactcgatccgtgcccgagtggcccgtgccatgtccatccccacctccccaacccgtgtcagctttcacagcatcaagcagtccacagcagtctgagctggcaggtcatggagcagcccccaaagagctgtggctggggggatgacggccagggctccctgaccaccctgcctgtggaggtgacctgttaggtctcatgcccactcccccaggagcagctggcactgacagcctggggggggccgctctccccctgcagccgtgcaggactctagctcatgagtggaaagtcacctacaggactgggccgggcccagggcctctggcttccctgcccaatcctccctggagaagggacatgggaatgaattgaaatggggcgctggacacctacagcagcacgcatgtccctccaaggctgtcttctcccagagcacaagaaggccagcccactgggccctggggctgccctcggcaaccgtggggaggccatttgctgccctggggcatcatgggcaactcgtgacagcctctgactcaccacgatgacgcctctggacctcggtgatgccttccgacaccactgggaaccaagggccctcactcaggaaccctggagacagaagtcaggtgtcatcatcagacttgcggccacagcactagagtcacccccccaggcctccagaaccttactggcactgtggcactgccaccagcaatgccctgccttgctgccttcaccctgaacatttagtaccctgcaggccaggccagcttcccctcacttaaccaccccataccagtcacctcctgctccttttcctcttttgtgagaagatgggggctggagggggcagagtggcctgtgagcaagagcccaggggtgtcccagtcccagcctctggggcagagcttgtagccctggatggcctctggggcaggaccactagctaagcaagccaggagaagacccctgcccaagtggctcttgggacaacgtgctgcttacactccaggtgtggaaccggccgcagcccccactgacctgcccatgtccagagggactggacagccagggcagggctttggggggcactagaagatgagggtgtcggctgtgaggcgggtggctggtataaataatatttatcttttcaaccaaaaaaaat

SEQ ID NO: 54449 - DNA, 2634 bp, Homo sapiens
ggggaaacggcggccagacttccccgggaaggggcgagcgagagccgggccgggccgggccgggccgcggggccgggaagcgccgagccgggcatctcctcaccaggcagcgaccgaggagcccggccgcccaccccgtgccgcccgagcccgcagccgcccgccggtccctctgggatgtccgtaggacccgggcattcaggacggtagccgagcgagcccgaggatgggagggcacccgcagctccgtctcgtcaaggcccttctccttctggggctgaaccccgtctctgcctccctccaggaccagcactgcgagagcctgtccctggccagcaacatctcaggactgcagtgcaacgcatccgtggacctcattggcacctgctggccccgcagccctgcggggcagctagtggttcggccctgccctgcctttttctatggtgtccgctacaataccacaaacaatggctaccgggagtgcctggccaatggcagctgggccgcccgcgtgaattactccgagtgccaggagatcctcaatgaggagaaaaaaagcaaggtgcactaccatgtcgcagtcatcatcaactacctgggccactgtatctccctggtggccctcctggtggcctttgtcctctttctgcggctcaggccaggctgcacccattggggtgaccaggcagatggagccctggaggtgggggctccatggagtggtgccccatttcaggttcgaaggagcatccggtgcctgcgaaacatcatccactggaacctcatctccgccttcatcctgcgcaacgccacctggttcgtggtccagctaaccatgagccccgaggtccaccagagcaacgtgggctggtgcaggttggtgacagccgcctacaactacttccatgtgaccaacttcttctggatgttcggcgagggctgctacctgcacacagccatcgtgctcacctactccactgaccggctgcgcaaatggatgttcatctgcattggctggggtgtgcccttccccatcattgtggcctgggccattgggaagctgtactacgacaatgagaagtgctggtttggcaaaaggcctggggtgtacaccgactacatctaccagggccccatgatcctggtcctgctgatcaatttcatcttccttttcaacatcgtccgcatcctcatgaccaagctccgggcatccaccacgtctgagaccattcagtacaggaaggctgtgaaagccactctggtgctgctgcccctcctgggcatcacctacatgctgttcttcgtcaatcccggggaggatgaggtctcccgggtcgtcttcatctacttcaactccttcctggaatccttccagggcttctttgtgtctgtgttctactgtttcctcaatagtgaggtccgttctgccatccggaagaggtggcaccggtggcaggacaagcactcgatccgtgcccgagtggcccgtgccatgtccatccccacctccccaacccgtgtcagctttcacagcatcaagcagtccacagcagtctgagctggcaggtcatggagcagcccccaaagagctgtggctggggggatgacggccagggctccctgaccaccctgcctgtggaggtgacctgttaggtctcatgcccactcccccaggagcagctggcactgacagcctggggggggccgctctccccctgcagccgtgcaggactctagctcatgagtggaaagtcacctacaggactgggccgggcccagggcctctggcttccctgcccaatcctccctggagaagggacatgggaatgaattgaaatggggcgctggacacctacagcagcacgcatgtccctccaaggctgtcttctcccagagcacaagaaggccagcccactgggccctggggctgccctcggcaaccgtggggaggccatttgctgccctggggcatcatgggcaactcgtgacagcctctgactcaccacgatgacgcctctggacctcggtgatgccttccgacaccactgggaaccaagggccctcactcaggaaccctggagacagaagtcaggtgtcatcatcagacttgcggccacagcactagagtcacccccccaggcctccagaaccttactggcactgtggcactgccaccagcaatgccctgccttgctgccttcaccctgaacatttagtaccctgcaggccaggccagcttcccctcacttaaccaccccataccagtcacctcctgctccttttcctcttttgtgagaagatgggggctggagggggcagagtggcctgtgagcaagagcccaggggtgtcccagtcccagcctctggggcagagcttgtagccctggatggcctctggggcaggaccactagctaagcaagccaggagaagacccctgcccaagtggctcttgggacaacgtgctgcttacactccaggtgtggaaccggccgcagcccccactgacctgcccatgtccagagggactggacagccagggcagggctttggggggcactagaagatgagggtgtcggctgtgaggcgggtggctggtataaataatatttatcttttcaaccaaaaaaaat

SEQ ID NO: 54450 - DNA, 1273 bp, Homo sapiens
ggggaaacggcggccagacttccccgggaaggggcgagcgagagccgggccgggccgggccgggccgcggggccgggaagcgccgagccgggcatctcctcaccaggcagcgaccgaggagcccggccgcccaccccgtgccgcccgagcccgcagccgcccgccggtccctctgggatgtccgtaggacccgggcattcaggacggtagccgagcgagcccgaggatgggagggcacccgcagctccgtctcgtcaaggcccttctccttctggggctgaaccccgtctctgcctccctccaggaccagcactgcgagagcctgtccctggccagcaacatctcaggactgcagtgcaacgcatccgtggacctcattggcacctgctggccccgcagccctgcggggcagctagtggttcggccctgccctgcctttttctatggtgtccgctacaataccacaaacaatggctaccgggagtgcctggccaatggcagctgggccgcccgcgtgaattactccgagtgccaggagatcctcaatgaggaggtgaggctgagccgaacaaggctgcccatatggaggggagtccagggtccccagcagagttttgtgcctgctacttggagtcagggagccagaggctaatgtcaaggccctgctctagtgaagctgactggggagctggagctgtcaacttggaaaaggcccatgagcaggcgccctcgagggcaggctggaccaatggggcactgggcaggctctgatggtgatgagatgggtccttgttccttccttccttctccctgtgctcatcgggcagccgcttgcactgggcatgggactgtcctgggggtgcaaagggagaccagactcggtcacaggagtcccacccttttccacaacacatgcctgagagatacatccagttccagccacagggctgtatgggaaccagggacgggatggaggtagcaatgcagtttgaaaaagcccttggaaagccttttaaaatgttaaatgtttttgagcagatattgcttacacagaactcagaaggtacaaatgggaatacaatgtcccctcccaccccgtccccagccactggattccctcccagaggcaaccattttgccaatttcacaagtgtccttccagagacattctccgcatacacgagtaattttgtatacgtattcttttttgtttttacctgaatgttgcatgttatacacactgtctacaccttgcttttttcatataatcatc

SEQ ID NO: 54451 - DNA, 2427 bp, Homo sapiens
ggggaaacggcggccagacttccccgggaaggggcgagcgagagccgggccgggccgggccgggccgcggggccgggaagcgccgagccgggcatctcctcaccaggcagcgaccgaggagcccggccgcccaccccgtgccgcccgagcccgcagccgcccgccggtccctctgggatgtccgtaggacccgggcattcaggacggtagccgagcgagcccgaggatgggagggcacccgcagctccgtctcgtcaaggcccttctccttctggggctgaaccccgtctctgcctccctccaggaccagcactgcgagagcctgtccctggccagcaacatctcagacaatggctaccgggagtgcctggccaatggcagctgggccgcccgcgtgaattactccgagtgccaggagatcctcaatgaggagaaaaaaagcaaggtgcactaccatgtcgcagtcatcatcaactacctgggccactgtatctccctggtggccctcctggtggcctttgtcctctttctgcggctcaggagcatccggtgcctgcgaaacatcatccactggaacctcatctccgccttcatcctgcgcaacgccacctggttcgtggtccagctaaccatgagccccgaggtccaccagagcaacgtgggctggtgcaggttggtgacagccgcctacaactacttccatgtgaccaacttcttctggatgttcggcgagggctgctacctgcacacagccatcgtgctcacctactccactgaccggctgcgcaaatggatgttcatctgcattggctggggtgtgcccttccccatcattgtggcctgggccattgggaagctgtactacgacaatgagaagtgctggtttggcaaaaggcctggggtgtacaccgactacatctaccagggccccatgatcctggtcctgctgatcaatttcatcttccttttcaacatcgtccgcatcctcatgaccaagctccgggcatccaccacgtctgagaccattcagtacaggaaggctgtgaaagccactctggtgctgctgcccctcctgggcatcacctacatgctgttcttcgtcaatcccggggaggatgaggtctcccgggtcgtcttcatctacttcaactccttcctggaatccttccagggcttctttgtgtctgtgttctactgtttcctcaatagtgaggtccgttctgccatccggaagaggtggcaccggtggcaggacaagcactcgatccgtgcccgagtggcccgtgccatgtccatccccacctccccaacccgtgtcagctttcacagcatcaagcagtccacagcagtctgagctggcaggtcatggagcagcccccaaagagctgtggctggggggatgacggccagggctccctgaccaccctgcctgtggaggtgacctgttaggtctcatgcccactcccccaggagcagctggcactgacagcctggggggggccgctctccccctgcagccgtgcaggactctagctcatgagtggaaagtcacctacaggactgggccgggcccagggcctctggcttccctgcccaatcctccctggagaagggacatgggaatgaattgaaatggggcgctggacacctacagcagcacgcatgtccctccaaggctgtcttctcccagagcacaagaaggccagcccactgggccctggggctgccctcggcaaccgtggggaggccatttgctgccctggggcatcatgggcaactcgtgacagcctctgactcaccacgatgacgcctctggacctcggtgatgccttccgacaccactgggaaccaagggccctcactcaggaaccctggagacagaagtcaggtgtcatcatcagacttgcggccacagcactagagtcacccccccaggcctccagaaccttactggcactgtggcactgccaccagcaatgccctgccttgctgccttcaccctgaacatttagtaccctgcaggccaggccagcttcccctcacttaaccaccccataccagtcacctcctgctccttttcctcttttgtgagaagatgggggctggagggggcagagtggcctgtgagcaagagcccaggggtgtcccagtcccagcctctggggcagagcttgtagccctggatggcctctggggcaggaccactagctaagcaagccaggagaagacccctgcccaagtggctcttgggacaacgtgctgcttacactccaggtgtggaaccggccgcagcccccactgacctgcccatgtccagagggactggacagccagggcagggctttggggggcactagaagatgagggtgtcggctgtgaggcgggtggctggtataaataatatttatcttttcaaccaaaaaaaat

SEQ ID NO: 54452 - DNA, 2505 bp, Homo sapiens
ggggaaacggcggccagacttccccgggaaggggcgagcgagagccgggccgggccgggccgggccgcggggccgggaagcgccgagccgggcatctcctcaccaggcagcgaccgaggagcccggccgcccaccccgtgccgcccgagcccgcagccgcccgccggtccctctgggatgtccgtaggacccgggcattcaggacggtagccgagcgagcccgaggatgggagggcacccgcagctccgtctcgtcaaggcccttctccttctggggctgaaccccgtctctgcctccctccaggaccagcactgcgagagcctgtccctggccagcaacatctcaggactgcagtgcaacgcatccgtggacctcattggcacctgctggccccgcagccctgcggggcagctagtggttcggccctgccctgcctttttctatggtgtccgctacaataccacaaacaatggctaccgggagtgcctggccaatggcagctgggccgcccgcgtgaattactccgagtgccaggagatcctcaatgaggagaaaaaaagcaaggtgcactaccatgtcgcagtcatcatcaactacctgggccactgtatctccctggtggccctcctggtggcctttgtcctctttctgcggctcaggagcatccggtgcctgcgaaacatcatccactggaacctcatctccgccttcatcctgcgcaacgccacctggttcgtggtccagctaaccatgagccccgaggtccaccagagcaacgtgggctggtgcaggttggtgacagccgcctacaactacttccatgtgaccaacttcttctggatgttcggcgagggctgctacctgcacacagccatcgtgctcacctactccactgaccggctgcgcaaatggatgttcatctgcattggctggggtgtgcccttccccatcattgtggcctgggccattgggaagctgtactacgacaatgagaagtgctggtttggcaaaaggcctggggtgtacaccgactacatctaccagggccccatgatcctggtcctgctgatcaatttcatcttccttttcaacatcgtccgcatcctcatgaccaagctccgggcatccaccacgtctgagaccattcagtacaggaaggctgtgaaagccactctggtgctgctgcccctcctgggcatcacctacatgctgttcttcgtcaatcccggggaggatgaggtctcccgggtcgtcttcatctacttcaactccttcctggaatccttccaggtccgttctgccatccggaagaggtggcaccggtggcaggacaagcactcgatccgtgcccgagtggcccgtgccatgtccatccccacctccccaacccgtgtcagctttcacagcatcaagcagtccacagcagtctgagctggcaggtcatggagcagcccccaaagagctgtggctggggggatgacggccagggctccctgaccaccctgcctgtggaggtgacctgttaggtctcatgcccactcccccaggagcagctggcactgacagcctggggggggccgctctccccctgcagccgtgcaggactctagctcatgagtggaaagtcacctacaggactgggccgggcccagggcctctggcttccctgcccaatcctccctggagaagggacatgggaatgaattgaaatggggcgctggacacctacagcagcacgcatgtccctccaaggctgtcttctcccagagcacaagaaggccagcccactgggccctggggctgccctcggcaaccgtggggaggccatttgctgccctggggcatcatgggcaactcgtgacagcctctgactcaccacgatgacgcctctggacctcggtgatgccttccgacaccactgggaaccaagggccctcactcaggaaccctggagacagaagtcaggtgtcatcatcagacttgcggccacagcactagagtcacccccccaggcctccagaaccttactggcactgtggcactgccaccagcaatgccctgccttgctgccttcaccctgaacatttagtaccctgcaggccaggccagcttcccctcacttaaccaccccataccagtcacctcctgctccttttcctcttttgtgagaagatgggggctggagggggcagagtggcctgtgagcaagagcccaggggtgtcccagtcccagcctctggggcagagcttgtagccctggatggcctctggggcaggaccactagctaagcaagccaggagaagacccctgcccaagtggctcttgggacaacgtgctgcttacactccaggtgtggaaccggccgcagcccccactgacctgcccatgtccagagggactggacagccagggcagggctttggggggcactagaagatgagggtgtcggctgtgaggcgggtggctggtataaataatatttatcttttcaaccaaaaaaaat

SEQ ID NO: 54453 - DNA, 438 bp, Homo sapiens
tacagtttagttagggcaataaaatatatcctggacaattaactctagagtaagttaagtgtgagttgtctggcccattccccagtacataggtattcaataaatgtttctgggttagtgcaatacttaagaaatacaagcatgtgttttaggagtttaggggagaaattgctttgtttatggggaagagaggtttcagagaagttcttttggaaaaagaaaaggctagatactgacttttcttaaatgccatgaaataatttcagagtcaggcatttctgactcttaagtcagaacccaattgttaagtcagaaattggggtagagaggatagtgtgagcattgattgctaaagtaggtgctttcacgtgtgttgatggttacttgtttgttaaatgaagtaattctcaaactttaatgtgtcataccagattctta

SEQ ID NO: 54454 - DNA, 532 bp, Homo sapiens
acgccccagctcttacatgaggccgggagcacaaggtcgccccttagattgccttggaggcctgagactgggctggagagacaggatggcatagtgaaagaaggggagcaccggccaaggagaaaaggaaccctaggctgcaggcccagccctgcttcttaccgcccctgcgcctttcagtaaatcacctcacctgtcagagcttcagttttctctttttgatggaaaggaatatgccatattctctctaaattttcttttggctctggaagtctgttactctattactcttctaaatgatgactgtctcaagccccatctcaccacaagtttaggactgcagtgacagcctttgattgcctttattccttactgcttttgtcgcctgtttttaaacaatctcttttaaatattaagcatcatattgttttggcttctgttatgagaaagatgaatattatggctgttttgaagttaagattcatttggtctaggtggcccaatatcagaagtataagttaactggtattaa

SEQ ID NO: 54455 - DNA, 325 bp, Homo sapiens
cctcctaacacctgttattgtctggctttttaattatagccattctagtgggtgtaaagtgcttattgtggttttaatttgcatttctctaatgagcaatgatgagcattttttaaatgtacttgttggccatttatatatcttctttgatgtgtttattttaaatcttttgcccattgggttgtcttactgagttgtaagaattttttgtatattctggatatgaatcctttatcagatatatgatttgcaaatattttctctcagtctgtggatttcttttcattttcttaatgacgtctttttgagggtaatagctttaaat

SEQ ID NO: 54456 - DNA, 819 bp, Homo sapiens
gcctccggtacttgcaagcctcgctcagtcttaagcaagaggggatggattcgcccgcagcactgagaatccaggggcaggcgggatggcgttcaggcgctgttgctagaaatctctgtctttactctgttttgaaggcagcatggcagggtgaacacaagcacagactgaaggcagcttgccgcggttcacatcctggtcacaccacttcctgaccatgtcacgtgggcaaattatgtaacttctctgagcttgctttcctcctctgaaaatggggttaacaatgataatacccacttcataggattgttgttaagagactataaatgaggctgggtgtgatggctcacacctgtaatcccagcactttgggaggccaaggtaggaaggattgctagaggccaagagttggagaacagcctgggcagcaaagcaagaccccgttttgtacaaaaaagaaaaaaaagaaaaaactaggtgtggtggtgcacacctatagtaccagctacttggcagaccaaggcaagaggatcacatgaggccaagagtttgagacaagcctgggcaacatagtgagacccctgtctttacaaaaaatttaaaaattagccaggcatggggtcatgcaccctatgtagtctcagctactggggaggctgaggcaggaggatcgcttgagcccaggagttggaggctgcagtgagctatgattgcaccactgcacttcggcctgagcaacagagcgagaccctgtctctaaaacgaacaaagggagagaattaagtgatttcatacatttaaagcacttgggccagttag

SEQ ID NO: 54457 - DNA, 1754 bp, Homo sapiens
gaaattaagcagcatccaacacaggcctactcttacgacatgtgacttcactgttttccgtttttgttgaaagagtcattaacagttaggagttgatggcagtttcaataacaggtcattgccgagaaaaggatagcactataatatgcagaaatctacaaattctgatacttccgtggaaacactgaattctacccgccaaggcacaggagctgtgcaaatgagaatcaaaaatgccaacagccaccatgacaggctcagccaaagtaaatccatgatcctcaccgatgtcgggaaggtcactgaacctatatccagacacagaaggaatcattcacagcatatcttgaaagatgtcattcctccattggaacaactgatggttgaaaaagaaggttatctgcaaaaagctaaaattgcagatggaggaaagaaactaaggaaaaactggtctacttcctggattgttctttctagtcgaagaattgaattttacaaagaatccaagcaacaggctctgtccaatatgaaaactgggcacaaaccagaaagtgtggatttgtgtggagcacacattgaatgggccaaggaaaaatcgagcagaaagaatgtctttcagatcacaacagtatcaggaaatgagttccttctacagtcagatattgacttcatcatattggattggttccacgctatcaaaaatgcaattgacagattgccaaaggattcaagttgtccatcaagaaacctggaattattcaaaatccaaagatcctctagcactgaattgctaagtcactacgacagtgatataaaagaacagaaaccagagcacagaaaatctttaatgttcagactgcatcacagtgcttccgatacaagcgacaaaaatcgagttaaaagcagattaaagaagtttattaccccgaagaccttccctgaaaactctgcaagaaaaaggacttattaaagatcaaatttttggctctcatctgcacaaagtgtgtgaacgtgaaaattccacagttccgtggtttgtaaagcaatgcattgaagctgttgagaaaagaggtctagatgttgatggaatatatcgagttagtggcaatctggcaacaatacagaagttaagatttattgtcaaccaagaagagaagctgaatttggacgacagccagtgggaggacatccacgttgtcaccggagcactgaagatgtttttccgggagctgcctgagccgctcttcccttacagtttctttgagcagtttgtggaagcgatcaaaaagcaagacaacaacacaagaattgaagctgtaaaatctcttgtacaaaaactccctccgccaaatcgtgacaccatgaaagtcctctttggacatctaactaagatagtggccaaagcctccaagaacctcatgtccacgcaaagcttggggattgtatttggacctacccttctgcgagctgaaaatgaaacaggaaacatggcgatccacatggtctaccagaaccagatagctgagctcatgctgagtgagtacagtaagatcttcggctcagaggaagactgacagacaagacaagctactgaatacgttcacatctgtcttgatgcctaatatttttacatttctgtaaacatatttctgaaatattttttgcctttcaagcgacagatgcctcattttgtgaaaacttaatgatgattttgtgtttaagttccaaacatttgaataaaataattgacaata

SEQ ID NO: 54458 - DNA, 541 bp, Homo sapiens
agtttgtttagtgagggtcagggaatgtaatgaagtgccaaaaattccacttgacctacgtactctacagtcaacagaaaagcactccatttttgcagagctctgagttaaatgcactcctcaaagcagatcagctatcaactgggaaagcttaatgcggcacagttggactagaaggatagtggccaaagcctccaagaacctcatgtccacgcaaagcttggggattgtatttggacctacccttctgcgagctgaaaatgaaacaggaaacatggcgatccacatggtctaccagaaccagatagctgagctcatgctgagtgagtacagtaagatcttcggctcagaggaagactgacagacaagacaagctactgaatacgttcacatctgtcttgatgcctaatatttttacatttctgtaaacatatttctgaaatattttttgcctttcaagcgacagatgcctcattttgtgaaaacttaatgatgattttgtgtttaagttccaaacatttgaataaaataattgacaata

SEQ ID NO: 54459 - DNA, 1393 bp, Homo sapiens
gtgggggactgggagactcgtgctctgtaagcaagaagagaagctgaatttggacgacagccagtgggaggacatccacgttgtcaccggagcactgaagatgtttttccgggagctgcctgagccgctcttcccttacagtttctttgagcagtttgtggaagcgatcaaaaagcaagacaacaacacaagaattgaagctgtaaaatctcttgtacaaaaactccctccgccaaatcgtgacaccatgaaagtcctctttggacatctaactaagatagtggccaaagcctccaagaacctcatgtccacgcaaagcttggggattgtatttggacctacccttctgcgagctgaaaatgaaacaggaaacatggcgatccacatggtctaccagaaccagatagctgagctcatgctgagtgagtacagtaagatcttcggctcagaggaagactgacagacaagacaagctactgaatacgttcacatctgtcttgatgcctaatatttttacatttctgtaaacatatttctgaaatattttttgcctttcaagcgacagatgcctcattttgtgaaaacttaatgatgattttgtgtttaagttccaaacatttgaataaaataattgacaataaatttgcctctatgtgttctacattaacccctttggtgctatgccttctagcacttctaggagcacatcatgcatgcctcatgctattaaataatatgcaaagactagcacatattcaaaaaatggccttaatgctgctccagggaattgggtgtgtggttgtgtatgtggagatgtgagtgagtgtggttgggagtaggggtgcatgtgcacacatgtgctttcccaagatccaggctgccttaaacatgactccatactgttacttggacacggatagaacacaaagaggtaggaaggcagaagctattaatttgtaaattgaacgaaggagatcaggttcacacccaaaacatatatatttcatctttccagaacatttttgtatatataaatatagtccagctattttcaatgctatacagtgaaatttataaatataacatgttgaatggcaatttttctcaagaaaaatgacagttcaaagcatttgccattgaattttttataaatacaaatgtagtcccataaacacactatcttataaattagaagcaaaattagtgccctgcaattttgatctttatattacacaggaattgcatgactgctcatttttaatgctaacatccattttgaatcttcatcaaactgtatatcttccttttccctggctatgtcattttatgtagaatttttattatacttctgaggatgctttattggtgaattacattaaatccatctagaaag

SEQ ID NO: 54460 - DNA, 1294 bp, Homo sapiens
agtttgtttagtgagggtcagggaatgtaatgaagtgccaaaaattccacttgacctacgtactctacagtcaacagaaaagcactccatttttgcagagctctgagttaaatgcactcctcaaagcagatcagctatcaactgggaaagcttaatgcggcacagttggactagaaggatagtggccaaagcctccaagaacctcatgtccacgcaaagcttggggattgtatttggacctacccttctgcgagctgaaaatgaaacaggaaacatggcgatccacatggtctaccagaaccagatagctgagctcatgctgagtgagtacagtaagatcttcggctcagaggaagactgacagacaagacaagctactgaatacgttcacatctgtcttgatgcctaatatttttacatttctgtaaacatatttctgaaatattttttgcctttcaagcgacagatgcctcattttgtgaaaacttaatgatgattttgtgtttaagttccaaacatttgaataaaataattgacaataaatttgcctctatgtgttctacattaacccctttggtgctatgccttctagcacttctaggagcacatcatgcatgcctcatgctattaaataatatgcaaagactagcacatattcaaaaaatggccttaatgctgctccagggaattgggtgtgtggttgtgtatgtggagatgtgagtgagtgtggttgggagtaggggtgcatgtgcacacatgtgctttcccaagatccaggctgccttaaacatgactccatactgttacttggacacggatagaacacaaagaggtaggaaggcagaagctattaatttgtaaattgaacgaaggagatcaggttcacacccaaaacatatatatttcatctttccagaacatttttgtatatataaatatagtccagctattttcaatgctatacagtgaaatttataaatataacatgttgaatggcaatttttctcaagaaaaatgacagttcaaagcatttgccattgaattttttataaatacaaatgtagtcccataaacacactatcttataaattagaagcaaaattagtgccctgcaattttgatctttatattacacaggaattgcatgactgctcatttttaatgctaacatccattttgaatcttcatcaaactgtatatcttccttttccctggctatgtcattttatgtagaatttttattatacttctgaggatgctttattggtgaattacattaaatccatctagaaag

SEQ ID NO: 54461 - DNA, 675 bp, Homo sapiens
aacttcctggcttgtttctccttaagttggagtaattcagctctagccctactctgacttaatcgttctattattaaaacaataatgtatttgttatgacgtgaaaaacagtttatagagagcggttcaaaatgctcccagttcccagaaagacaattactggaatacaagaaaatatttcattttattaaactgtgttttttaaaaaaggatttttacatgtaagagatctatcttacatagtttctttacctgtctatttctttttcttttttttttttttgcagatcacaacagtatcaggaaatgagttccttctacagtcagatattgacttcatcatattggattggttccacgctatcaaaaatgcaattgacagattgccaaaggattcaagttgtccatcaagaaacctggaattattcaaaatccaaagatcctctagcactgaattgctaagtcactacgacagtgatataaaagaacagaaaccagagcacagaaaatctttaatgttcagactgcatcacagtgcttccgatacaagcgacaaaaatcgagttaaaagcagattaaagaagtttattaccccgaagaccttccctgaaaactctgcaagaaaaaggacttattaaagcgtgaaatttcacagttccgcgggttggaaagcat

SEQ ID NO: 54462 - DNA, 1886 bp, Homo sapiens
gaaattaagcagcatccaacacaggcctactcttacgacatgtgacttcactgttttccgtttttgttgaaagagtcattaacagttaggagttgatggcagtttcaataacaggtcattgccgagaaaaggatagcactataatatgcagaaatctacaaattctgatacttccgtggaaacactgaattctacccgccaaggcacaggagctgtgcaaatgagaatcaaaaatgccaacagccaccatgacaggctcagccaaagtaaatccatgatcctcaccgatgtcgggaaggtcactgaacctatatccagacacagaaggaatcattcacagcatatcttgaaagatgtcattcctccattggaacaactgatggttgaaaaagaaggttatctgcaaaaagctaaaattgcagatggaggaaagaaactaaggaaaaactggtctacttcctggattgttctttctagtcgaagaattgaattttacaaagaatccaagcaacaggctctgtccaatatgaaaactgggcacaaaccagaaagtgtggatttgtgtggagcacacattgaatgggccaaggaaaaatcgagcagaaagaatgtctttcagatcacaacagtatcaggaaatgagttccttctacagtcagatattgacttcatcatattggattggttccacgctatcaaaaatgcaattgacagattgccaaaggattcaagttgtccatcaagaaacctggaattattcaaaatccaaagatcctctagcactgaattgctaagtcactacgacagtgatataaaagaacagaaaccagagcacagaaaatctttaatgttcagactgcatcacagtgcttccgatacaagcgacaaaaatcgagttaaaagcagattaaagaagtttattaccccgaagaccttccctgaaaactctgcaagaaaaaggacttattaaagatcaaatttttggctctcatctgcacaaagtgtgtgaacgtgaaaattccacagttccgtggtttgtaaagcaatgcattgaagctgttgagaaaagaggtctagatgttgatggaatatatcgagttagtggcaatctggcaacaatacagaagttaagatttattgtcaaccaagtcgtttctggaataccagcccttctatcagaactggatggagacctgtggacacccctagtaagctgcagatttttcacagtggtcatttgacctccagagcaagccaataatttgtcacttcattaaactgaagagaagctgaatttggacgacagccagtgggaggacatccacgttgtcaccggagcactgaagatgtttttccgggagctgcctgagccgctcttcccttacagtttctttgagcagtttgtggaagcgatcaaaaagcaagacaacaacacaagaattgaagctgtaaaatctcttgtacaaaaactccctccgccaaatcgtgacaccatgaaagtcctctttggacatctaactaagatagtggccaaagcctccaagaacctcatgtccacgcaaagcttggggattgtatttggacctacccttctgcgagctgaaaatgaaacaggaaacatggcgatccacatggtctaccagaaccagatagctgagctcatgctgagtgagtacagtaagatcttcggctcagaggaagactgacagacaagacaagctactgaatacgttcacatctgtcttgatgcctaatatttttacatttctgtaaacatatttctgaaatattttttgcctttcaagcgacagatgcctcattttgtgaaaacttaatgatgattttgtgtttaagttccaaacatttgaataaaataattgacaata

SEQ ID NO: 54463 - DNA, 1373 bp, Homo sapiens
tttctagtaagattcaacattatgaaaatattttgaattaagcaatgacacatgaggctggaaaaactggtctacttcctggattgttctttctagtcgaagaattgaattttacaaagaatccaagcaacaggctctgtccaatatgaaaactgggcacaaaccagaaagtgtggatttgtgtggagcacacattgaatgggccaaggaaaaatcgagcagaaagaatgtctttcagatcacaacagtatcaggaaatgagttccttctacagtcagatattgacttcatcatattggattggttccacgctatcaaaaatgcaattgacagattgccaaaggattcaagttgtccatcaagaaacctggaattattcaaaatccaaagatcctctagcactgaattgctaagtcactacgacagtgatataaaagaacagaaaccagagcacagaaaatctttaatgttcagactgcatcacagtgcttccgatacaagcgacaaaaatcgagttaaaagcagattaaagaagtttattaccccgaagaccttccctgaaaactctgcaagaaaaaggacttattaaagatcaaatttttggctctcatctgcacaaagtgtgtgaacgtgaaaattccacagttccgtggtttgtaaagcaatgcattgaagctgttgagaaaagaggtctagatgttgatggaatatatcgagttagtggcaatctggcaacaatacagaagttaagatttattgtcaaccaagaagagaagctgaatttggacgacagccagtgggaggacatccacgttgtcaccggagcactgaagatgtttttccgggagctgcctgagccgctcttcccttacagtttctttgagcagtttgtggaagcgatcaaaaagcaagacaacaacacaagaattgaagctgtaaaatctcttgtacaaaaactccctccgccaaatcgtgacaccatgaaagtcctctttggacatctaactaagatagtggccaaagcctccaagaacctcatgtccacgcaaagcttggggattgtatttggacctacccttctgcgagctgaaaatgaaacaggaaacatggcgatccacatggtctaccagaaccagatagctgagctcatgctgagtgagtacagtaagatcttcggctcagaggaagactgacagacaagacaagctactgaatacgttcacatctgtcttgatgcctaatatttttacatttctgtaaacatatttctgaaatattttttgcctttcaagcgacagatgcctcattttgtgaaaacttaatgatgattttgtgtttaagttccaaacatttgaataaaataattgacaata

SEQ ID NO: 54464 - DNA, 1578 bp, Homo sapiens
tggagttgaagagggctgcaaggtgggaagtgaagtcagtgcctcagttgctgatcagtgtgttttttgtgtccaattcttttatcaccaaaaaagagaagaaatattgcagtgaatgaagattcctctgcattttagcactgctttttcaactgtagttggcttttgaatgaggatgacaatggaagagatgaagaatgaagctgagaccacatccatggtttctatgcccctctatgcagtcatgtatcctgtgtttaatgaggaaaaactggtctacttcctggattgttctttctagtcgaagaattgaattttacaaagaatccaagcaacaggctctgtccaatatgaaaactgggcacaaaccagaaagtgtggatttgtgtggagcacacattgaatgggccaaggaaaaatcgagcagaaagaatgtctttcagatcacaacagtatcaggaaatgagttccttctacagtcagatattgacttcatcatattggattggttccacgctatcaaaaatgcaattgacagattgccaaaggattcaagttgtccatcaagaaacctggaattattcaaaatccaaagatcctctagcactgaattgctaagtcactacgacagtgatataaaagaacagaaaccagagcacagaaaatctttaatgttcagactgcatcacagtgcttccgatacaagcgacaaaaatcgagttaaaagcagattaaagaagtttattaccccgaagaccttccctgaaaactctgcaagaaaaaggacttattaaagatcaaatttttggctctcatctgcacaaagtgtgtgaacgtgaaaattccacagttccgtggtttgtaaagcaatgcattgaagctgttgagaaaagaggtctagatgttgatggaatatatcgagttagtggcaatctggcaacaatacagaagttaagatttattgtcaaccaagaagagaagctgaatttggacgacagccagtgggaggacatccacgttgtcaccggagcactgaagatgtttttccgggagctgcctgagccgctcttcccttacagtttctttgagcagtttgtggaagcgatcaaaaagcaagacaacaacacaagaattgaagctgtaaaatctcttgtacaaaaactccctccgccaaatcgtgacaccatgaaagtcctctttggacatctaactaagatagtggccaaagcctccaagaacctcatgtccacgcaaagcttggggattgtatttggacctacccttctgcgagctgaaaatgaaacaggaaacatggcgatccacatggtctaccagaaccagatagctgagctcatgctgagtgagtacagtaagatcttcggctcagaggaagactgacagacaagacaagctactgaatacgttcacatctgtcttgatgcctaatatttttacatttctgtaaacatatttctgaaatattttttgcctttcaagcgacagatgcctcattttgtgaaaacttaatgatgattttgtgtttaagttccaaacatttgaataaaataattgacaata

SEQ ID NO: 54465 - DNA, 1422 bp, Homo sapiens
aacttcctggcttgtttctccttaagttggagtaattcagctctagccctactctgacttaatcgttctattattaaaacaataatgtatttgttatgacgtgaaaaacagtttatagagagcggttcaaaatgctcccagttcccagaaagacaattactggaatacaagaaaatatttcattttattaaactgtgttttttaaaaaaggatttttacatgtaagagatctatcttacatagtttctttacctgtctatttctttttcttttttttttttttgcagatcacaacagtatcaggaaatgagttccttctacagtcagatattgacttcatcatattggattggttccacgctatcaaaaatgcaattgacagattgccaaaggattcaagttgtccatcaagaaacctggaattattcaaaatccaaagatcctctagcactgaattgctaagtcactacgacagtgatataaaagaacagaaaccagagcacagaaaatctttaatgttcagactgcatcacagtgcttccgatacaagcgacaaaaatcgagttaaaagcagattaaagaagtttattaccccgaagaccttccctgaaaactctgcaagaaaaaggacttattaaagatcaaatttttggctctcatctgcacaaagtgtgtgaacgtgaaaattccacagttccgtggtttgtaaagcaatgcattgaagctgttgagaaaagaggtctagatgttgatggaatatatcgagttagtggcaatctggcaacaatacagaagttaagatttattgtcaaccaagaagagaagctgaatttggacgacagccagtgggaggacatccacgttgtcaccggagcactgaagatgtttttccgggagctgcctgagccgctcttcccttacagtttctttgagcagtttgtggaagcgatcaaaaagcaagacaacaacacaagaattgaagctgtaaaatctcttgtacaaaaactccctccgccaaatcgtgacaccatgaaagtcctctttggacatctaactaagatagtggccaaagcctccaagaacctcatgtccacgcaaagcttggggattgtatttggacctacccttctgcgagctgaaaatgaaacaggaaacatggcgatccacatggtctaccagaaccagatagctgagctcatgctgagtgagtacagtaagatcttcggctcagaggaagactgacagacaagacaagctactgaatacgttcacatctgtcttgatgcctaatatttttacatttctgtaaacatatttctgaaatattttttgcctttcaagcgacagatgcctcattttgtgaaaacttaatgatgattttgtgtttaagttccaaacatttgaataaaataattgacaata

SEQ ID NO: 54466 - DNA, 1374 bp, Homo sapiens
aacttcctggcttgtttctccttaagttggagtaattcagctctagccctactctgacttaatcgttctattattaaaacaataatgtatttgttatgacgtgaaaaacagtttatagagagcggttcaaaatgctcccagttcccagaaagacaattactggaatacaagaaaatatttcattttattaaactgtgttttttaaaaaaggatttttacatgtaagagatctatcttacatagtttctttacctgtctatttctttttcttttttttttttttgcagatcacaacagtatcaggaaatgagttccttctacagtcagatattgacttcatcatattggattggttccacgctatcaaaaatgcaattgacagattgccaaaggattcaagttgtccatcaagaaacctggaattattcaaaatccaaagatcctctagcactgaattgctaagtcactacgacagtgatataaaagaacagaaaccagagcacagaaaatctttaatgttcagactgcatcacagtgcttccgatacaagcgacaaaaatcgagttaaaagcagattaaagaagtttattaccccgaagaccttccctgaaaactctgcaagaaaaaggacttattaaagatcaaatttttggctctcatctgcacaaagtgtgtgaacgtgaaaattccacagttccgtggtttgtaaagcaatgcattgaagctgttgagaaaagaggtcagaagttaagatttattgtcaaccaagaagagaagctgaatttggacgacagccagtgggaggacatccacgttgtcaccggagcactgaagatgtttttccgggagctgcctgagccgctcttcccttacagtttctttgagcagtttgtggaagcgatcaaaaagcaagacaacaacacaagaattgaagctgtaaaatctcttgtacaaaaactccctccgccaaatcgtgacaccatgaaagtcctctttggacatctaactaagatagtggccaaagcctccaagaacctcatgtccacgcaaagcttggggattgtatttggacctacccttctgcgagctgaaaatgaaacaggaaacatggcgatccacatggtctaccagaaccagatagctgagctcatgctgagtgagtacagtaagatcttcggctcagaggaagactgacagacaagacaagctactgaatacgttcacatctgtcttgatgcctaatatttttacatttctgtaaacatatttctgaaatattttttgcctttcaagcgacagatgcctcattttgtgaaaacttaatgatgattttgtgtttaagttccaaacatttgaataaaataattgacaata

SEQ ID NO: 54467 - DNA, 2507 bp, Homo sapiens
gaaattaagcagcatccaacacaggcctactcttacgacatgtgacttcactgttttccgtttttgttgaaagagtcattaacagttaggagttgatggcagtttcaataacaggtcattgccgagaaaaggatagcactataatatgcagaaatctacaaattctgatacttccgtggaaacactgaattctacccgccaaggcacaggagctgtgcaaatgagaatcaaaaatgccaacagccaccatgacaggctcagccaaagtaaatccatgatcctcaccgatgtcgggaaggtcactgaacctatatccagacacagaaggaatcattcacagcatatcttgaaagatgtcattcctccattggaacaactgatggttgaaaaagaaggttatctgcaaaaagctaaaattgcagatggaggaaagaaactaaggaaaaactggtctacttcctggattgttctttctagtcgaagaattgaattttacaaagaatccaagcaacaggctctgtccaatatgaaaactgggcacaaaccagaaagtgtggatttgtgtggagcacacattgaatgggccaaggaaaaatcgagcagaaagaatgtctttcagatcacaacagtatcaggaaatgagttccttctacagtcagatattgacttcatcatattggattggttccacgctatcaaaaatgcaattgacagattgccaaaggattcaagttgtccatcaagaaacctggaattattcaaaatccaaagatcctctagcactgaattgctaagtcactacgacagtgatataaaagaacagaaaccagagcacagaaaatctttaatgttcagactgcatcacagtgcttccgatacaagcgacaaaaatcgagttaaaagcagattaaagaagtttattaccccgaagaccttccctgaaaactctgcaagaaaaaggacttattaaagatcaaatttttggctctcatctgcacaaagtgtgtgaacgtgaaaattccacagttccgtggtttgtaaagcaatgcattgaagctgttgagaaaagaggtctagatgttgatggaatatatcgagttagtggcaatctggcaacaatacagaagttaagatttattgtcaaccaagaagagaagctgaatttggacgacagccagtgggaggacatccacgttgtcaccggagcactgaagatgtttttccgggagctgcctgagccgctcttcccttacagtttctttgagcagtttgtggaagcgatcaaaaagcaagacaacaacacaagaattgaagctgtaaaatctcttgtacaaaaactccctccgccaaatcgtgacaccatgaaagtcctctttggacatctaactaagatagtggccaaagcctccaagaacctcatgtccacgcaaagcttggggattgtatttggacctacccttctgcgagctgaaaatgaaacaggaaacatggcgatccacatggtctaccagaaccagatagctgagctcatgctgagtgagtacagtaagatcttcggctcagaggaagactgacagacaagacaagctactgaatacgttcacatctgtcttgatgcctaatatttttacatttctgtaaacatatttctgaaatattttttgcctttcaagcgacagatgcctcattttgtgaaaacttaatgatgattttgtgtttaagttccaaacatttgaataaaataattgacaataaatttgcctctatgtgttctacattaacccctttggtgctatgccttctagcacttctaggagcacatcatgcatgcctcatgctattaaataatatgcaaagactagcacatattcaaaaaatggccttaatgctgctccagggaattgggtgtgtggttgtgtatgtggagatgtgagtgagtgtggttgggagtaggggtgcatgtgcacacatgtgctttcccaagatccaggctgccttaaacatgactccatactgttacttggacacggatagaacacaaagaggtaggaaggcagaagctattaatttgtaaattgaacgaaggagatcaggttcacacccaaaacatatatatttcatctttccagaacatttttgtatatataaatatagtccagctattttcaatgctatacagtgaaatttataaatataacatgttgaatggcaatttttctcaagaaaaatgacagttcaaagcatttgccattgaattttttataaatacaaatgtagtcccataaacacactatcttataaattagaagcaaaattagtgccctgcaattttgatctttatattacacaggaattgcatgactgctcatttttaatgctaacatccattttgaatcttcatcaaactgtatatcttccttttccctggctatgtcattttatgtagaatttttattatacttctgaggatgctttattggtgaattacattaaatccatctagaaag

SEQ ID NO: 54468 - DNA, 1826 bp, Homo sapiens
gaaattaagcagcatccaacacaggcctactcttacgacatgtgacttcactgttttccgtttttgttgaaagagtcattaacagttaggagttgatggcagtttcaataacaggtcattgccgagaaaaggatagcactataatatgcagaaatctacaaattctgatacttccgtggaaacactgaattctacccgccaaggcacaggagctgtgcaaatgagaatcaaaaatgccaacagccaccatgacaggctcagccaaagtaaatccatgatcctcaccgatgtcgggaaggtcactgaacctatatccagacacagaaggaatcattcacagcatatcttgaaagatgtcattcctccattggaacaactgatggttgaaaaagaaggttatctgcaaaaagctaaaattgcagatggaggaaagaaactaaggaaaaactggtctacttcctggattgttctttctagtcgaagaattgaattttacaaagaatccaagcaacaggctctgtccaatatgaaaactgggcacaaaccagaaagtgtggatttgtgtggagcacacattgaatgggccaaggaaaaatcgagcagaaagaatgtctttcagatcacaacagtatcaggaaatgagttccttctacagtcagatattgacttcatcatattggattggttccacgctatcaaaaatgcaattgacagattgccaaaggattcaagttgtccatcaagaaacctggaattattcaaaatccaaagatcctctagcactgaattgctaagtcactacgacagtgatataaaagaacagaaaccagagcacagaaaatctttaatgttcagactgcatcacagtgcttccgatacaagcgacaaaaatcgagttaaaagcagattaaagaagtttattaccccgaagaccttccctgaaaactctgcaagaaaaaggacttattaaagatcaaatttttggctctcatctgcacaaagtgtgtgaacgtgaaaattccacagttccgtggtttgtaaagcaatgcattgaagctgttgagaaaagaggtctagatgttgatggaatatatcgagttagtggcaatctggcaacaatacagaagttaagatttattgtcaaccaagaagagaagctgaatttggacgacagccagtgggaggacatccacgttgtcaccggagcactgaagatgtttttccgggagctgcctgagccgctcttcccttacagtttctttgagcagtttgtggaagcgatcaaaaagcaagacaacaacacaagaattgaagctgtaaaatctcttgtacaaaaactccctccgccaaatcgtgacaccatgaaagtcctctttggacatctaactaagtaagttgtaaggatttctggatgtgtcattttatagtcatttcctaaatgggcaatattgaatttcacatctctaaggcaagagtttccaaatgcgtacatctcgtattttcccttgtagctgaactaggtctttctgcagaagctggagaatgtgttagggataggaaggacaatctacaaaaggaacttctgaaataacttatttttcaaggccctttcaactagtatatgtttgctgattgcttgtcagaaccatcgcctggaccctgggatgggtcatcttgactttgttatctaacataatgaaagaacatgaaatgattcagacatggattcaaaactcagccccaccatgtaccacgtgctggggccacaaataagttacttaaaccctctgcaaccaatttcctcatctgtaaaatgttggctcaga

SEQ ID NO: 54469 - DNA, 1192 bp, Homo sapiens
gaaattaagcagcatccaacacaggcctactcttacgacatgtgacttcactgttttccgtttttgttgaaagagtcattaacagttaggagttgatggcagtttcaataacaggtcattgccgagaaaaggatagcactataatatgcagaaatctacaaattctgatacttccgtggaaacactgaattctacccgccaaggcacaggagctgtgcaaatgagaatcaaaaatgccaacagccaccatgacaggctcagccaaagtaaatccatgatcctcaccgatgtcgggaaggtcactgaacctatatccagacacagaaggaatcattcacagcatatcttgaaagatgtcattcctccattggaacaactgatggttgaaaaagaaggttatctgcaaaaagctaaaattgcagatggaggaaagaaactaaggaaaaactggtctacttcctggattgttctttctagtcgaagaattgaattttacaaagaatccaagcaacaggctctgtccaatatgaaaactgggcacaaaccagaaagtgtggatttgtgtggagcacacattgaatgggccaaggaaaaatcgagcagaaagaatgtctttcagatcacaacagtatcaggaaatgagttccttctacagtcagatattgacttcatcatattggattggttccacgctatcaaaaatgcaattgacagattgccaaaggattcaagttgtccatcaagaaacctggaattattcaaaatccaaagatcctctagcactgaattgctaagtcactacgacagtgatataaaagaacagaaaccagagcacagaaaatctttaatgttcagactgcatcacagtgcttccgatacaagcgacaaaaatcgagttaaaagcagattaaagaagtttattaccccgaagaccttccctgaaaactctgcaagaaaaaggacttattaaagatcaaatttttggctctcatctgcacaaagtgtgtgaacgtgaaaattccacagttccgtggtttgtaaagcaatgcattgaagctgttgagaaaagaggtgggtgactgaatgtgcagcagttccccccattactgcaccctctacacaaccaatactcaagttagcagtgccacctgatttgtctgagaagccatgcaattaaaacttgacttgtgtt

SEQ ID NO: 54470 - DNA, 1505 bp, Homo sapiens
gaaattaagcagcatccaacacaggcctactcttacgacatgtgacttcactgttttccgtttttgttgaaagagtcattaacagttaggagttgatggcagtttcaataacaggtcattgccgagaaaaggatagcactataatatgcagaaatctacaaattctgatacttccgtggaaacactgaattctacccgccaaggcacaggagctgtgcaaatgagaatcaaaaatgccaacagccaccatgacaggctcagccaaagtaaatccatgatcctcaccgatgtcgggaaggtcactgaacctatatccagacacagaaggaatcattcacagcatatcttgaaagatgtcattcctccattggaacaactgatggttgaaaaagaaggttatctgcaaaaagctaaaattgcagatggaggaaagaaactaaggaaaaactggtctacttcctggattgttctttctagtcgaagaattgaattttacaaagaatccaagcaacaggctctgtccaatatgaaaactgggcacaaaccagaaagtgtggatttgtgtggagcacacattgaatgggccaaggaaaaatcgagcagaaagaatgtctttcagatcacaacagtatcaggaaatgagttccttctacagtcagatattgacttcatcatattggattggttccacgctatcaaaaatgcaattgacagattgccaaaggattcaagttgtccatcaagaaacctggaattattcaaaatccaaagatcctctagcactgaattgctaagtcactacgacagtgatataaaagaacagaaaccagagcacagaaaatctttaagtgagtattttctttgacttgctcattttaagtttgtctaaatgcagtgcttatgaaatataaatgcattgaaatgagatttaagccaaactcatcatactcatggaagattcgtagccatttcctggccagggatttgtgcactggagggcagtctgggcactttgctcacatcattgttggtaatgccttttgagaaaataattgttccagggtcatggtctctgcttacagcaaacctctgaatctctgagtaatagccatggtgttcagatcagtgattgattttgagagtgggaaatgtcaagcatctccaaccctggtatcctgactattttatttgcatacattaaagggtatgagtgaccaccagtgtggtctaacttaagtcaacaggctatgccactttccacaccttcagaccaccagaaacacttagaaacgtgctttccagagaggctgatagaaaatatgggatgtgaacttcagatgttctccaaggtcacacctagttctaatattctaagaacttaaatttagagtaaaaagaatggtctcactacttacacagtgatcttgagtatctttcttaaccattccccagactgcttcttcctcaatgaaaaggggttattaaaatatgcaacacatatctca

SEQ ID NO: 54471 - DNA, 303 bp, Homo sapiens
tttccctaaccttcctttttatttttttttccagaaaagcaagacaacaacacaagaattgaagctgtaaaatctcttgtacaaaaactccctccgccaaatcgtgacaccatgaaagtcctctttggacatctaactaagtaagttgtaaggatttctggatgtgtcattttatagtcatttcctaaatgggcaatattgaatttcacatctctaaggcaagagtttccaaatgcgtacatctcgtattttcccttgtagctgaactaggtctttctgcagaagctggagaatgtgttaggg

SEQ ID NO: 54472 - DNA, 590 bp, Homo sapiens
ctcccgtgcggtccgtcggtggcctagagatgctgctgccgcggttgcagttgtcgcgcacgcctctgcccgccagcccgctccaccgccgtagcgcccgagtgtcggggggcgcacccgagtcgggccatgaggccgggaaccgcgctacaggccgtgctgctggccgtgctgctggtggggctgcgggccgcgacgggtcgcctgctgagtggtgagtgcgcgcgctggggcgggggctggtgccggggtgggctcactgcaccccagctgctgctgaccctcttctgggtcgccacgtatgggactagaaggccgtcccatgccccactcccagacgcagcccttcggagtctcttgcgttctgggggcagtcgcacggcgtctgagacccacgccagttcccggagctgcgcagttccctgcgcgtcctggaacgctcgaagcccgttcccagtccagagttatgggggtgggttggagaatgtaggagaggtggggcagtgggcaaacctgccccagtgggtgccccttcggcccgctcctttacacgcatcgaatcagtccttgggaccacccccgcggggcag

SEQ ID NO: 54473 - DNA, 1759 bp, Homo sapiens
ctcccgtgcggtccgtcggtggcctagagatgctgctgccgcggttgcagttgtcgcgcacgcctctgcccgccagcccgctccaccgccgtagcgcccgagtgtcggggggcgcacccgagtcgggccatgaggccgggaaccgcgctacaggccgtgctgctggccgtgctgctggtggggctgcgggccgcgacgggtcgcctgctgagtgggcagccagtctgccggggagggacacagaggccttgttataaagtcatttacttccatgatacttctcgaagactgaactttgaggaagccaaagaagcctgcaggagggatggaggccagctagtcagcatcgagtctgaagatgaacagaaactgatagaaaagttcattgaaaacctcttgccatctgatggtgacttctggattgggctcaggaggcgtgaggagaaacaaagcaatagcacagcctgccaggacctttatgcttggactgatggcagcatatcacaatttaggaactggtatgtggatgagccgtcctgcggcagcgaggtctgcgtggtcatgtaccatcagccatcggcacccgctggcatcggaggcccctacatgttccagtggaatgatgaccggtgcaacatgaagaacaatttcatttgcaaatattctgatgagaaaccagcagttccttctagagaagctgaaggtgaggaaacagagctgacaacacctgtacttccagaagaaacacaggaagaagatgccaaaaaaacatttaaagaaagtagagaagctgccttgaatctggcctacatcctaatccccagcattccccttctcctcctccttgtggtcaccacagttgtatgttgggtttggatctgtagaaaaagaaaacgggagcagccagaccctagcacaaagaagcaacacaccatctggccctctcctcaccagggaaacagcccggacctagaggtctacaatgtcataagaaaacaaagcgaagctgacttagctgagacccggccagacctgaagaatatttcattccgagtgtgttcgggagaagccactcccgatgacatgtcttgtgactatgacaacatggctgtgaacccatcagaaagtgggtttgtgactctggtgagcgtggagagtggatttgtgaccaatgacatttatgagttctccccagaccaaatggggaggagtaaggagtctggatgggtggaaaatgaaatatatggttattaggacatataaaaaactgaaactgacaacaatggaaaagaaatgataagcaaaatcctcttattttctataaggaaaatacacagaaggtctatgaacaagcttagatcaggtcctgtggatgagcatgtggtccccacgacctcctgttggacccccacgttttggctgtatcctttatcccagccagtcatccagctcgaccttatgagaaggtaccttgcccaggtctggcacatagtagagtctcaataaatgtcacttggttggttgtatctaacttttaagggacagagctttacctggcagtgataaagatgggctgtggagcttggaaaaccacctctgttttccttgctctatacagcagcacatattatcatacagacagaaaatccagaatcttttcaaagcccacatatggtagcacaggttggcctgtgcatcggcaattctcatatctgtttttttcaaagaataaaatcaaataaagagcaggaaacagagt

SEQ ID NO: 54474 - DNA, 1681 bp, Homo sapiens
ctcccgtgcggtccgtcggtggcctagagatgctgctgccgcggttgcagttgtcgcgcacgcctctgcccgccagcccgctccaccgccgtagcgcccgagtgtcggggggcgcacccgagtcgggccatgaggccgggaaccgcgctacaggccgtgctgctggccgtgctgctggtggggctgcgggccgcgacgggtcgcctgctgagtgggcagccagtctgccggggagggacacagaggccttgttataaagtcatttacttccatgatacttctcgaagactgaactttgaggaagccaaagaagcctgcaggagggatggaggccagctagtcagcatcgagtctgaagatgaacagaaactgatagaaaagttcattgaaaacctcttgccatctgatggtgacttctggattgggctcaggaggcgtgaggagaaacaaagcaatagcacagcctgccaggacctttatgcttggactgatggcagcatatcacaatttaggaactggtatgtggatgagccgtcctgcggcagcgaggtctgcgtggtcatgtaccatcagccatcggcacccgctggcatcggaggcccctacatgttccagtggaatgatgaccggtgcaacatgaagaacaatttcatttgcaaatattctgatgagaaaccagcagttccttctagagaagctgaaggtgaggaaacagagctgacaacacctgtacttccagaagaaacacaggaagaagatgccaaaaaaacatttaaagaaagtagagaagctgccttgaatctggcctacatcctaatccccagcattccccttctcctcctccttgtggtcaccacagttgtatgttgggtttggatctgtagaaaaagaaaacgggagcagccagaccctagcacaaagaagcaacacaccatctggccctctcctcaccagggaaacagcccggacctagaggtctacaatgtcataagaaaacaaagcgaagctgacttagctgagacccggccagacctgaagaatatttcattccgagtgtgttcgggagaagccactcccgatgacatgtcttgtgactatgacaacatggctgtgaacccatcagaaagtgggtttgtgactctggtgagcgtggaaaatgaaatatatggttattaggacatataaaaaactgaaactgacaacaatggaaaagaaatgataagcaaaatcctcttattttctataaggaaaatacacagaaggtctatgaacaagcttagatcaggtcctgtggatgagcatgtggtccccacgacctcctgttggacccccacgttttggctgtatcctttatcccagccagtcatccagctcgaccttatgagaaggtaccttgcccaggtctggcacatagtagagtctcaataaatgtcacttggttggttgtatctaacttttaagggacagagctttacctggcagtgataaagatgggctgtggagcttggaaaaccacctctgttttccttgctctatacagcagcacatattatcatacagacagaaaatccagaatcttttcaaagcccacatatggtagcacaggttggcctgtgcatcggcaattctcatatctgtttttttcaaagaataaaatcaaataaagagcaggaaacagagt

SEQ ID NO: 54475 - DNA, 1783 bp, Homo sapiens
ctcccgtgcggtccgtcggtggcctagagatgctgctgccgcggttgcagttgtcgcgcacgcctctgcccgccagcccgctccaccgccgtagcgcccgagtgtcggggggcgcacccgagtcgggccatgaggccgggaaccgcgctacaggccgtgctgctggccgtgctgctggtggggctgcgggccgcgacgggtcgcctgctgagtgcctcggatttggacctcagaggagggcagccagtctgccggggagggacacagaggccttgttataaagtcatttacttccatgatacttctcgaagactgaactttgaggaagccaaagaagcctgcaggagggatggaggccagctagtcagcatcgagtctgaagatgaacagaaactgatagaaaagttcattgaaaacctcttgccatctgatggtgacttctggattgggctcaggaggcgtgaggagaaacaaagcaatagcacagcctgccaggacctttatgcttggactgatggcagcatatcacaatttaggaactggtatgtggatgagccgtcctgcggcagcgaggtctgcgtggtcatgtaccatcagccatcggcacccgctggcatcggaggcccctacatgttccagtggaatgatgaccggtgcaacatgaagaacaatttcatttgcaaatattctgatgagaaaccagcagttccttctagagaagctgaaggtgaggaaacagagctgacaacacctgtacttccagaagaaacacaggaagaagatgccaaaaaaacatttaaagaaagtagagaagctgccttgaatctggcctacatcctaatccccagcattccccttctcctcctccttgtggtcaccacagttgtatgttgggtttggatctgtagaaaaagaaaacgggagcagccagaccctagcacaaagaagcaacacaccatctggccctctcctcaccagggaaacagcccggacctagaggtctacaatgtcataagaaaacaaagcgaagctgacttagctgagacccggccagacctgaagaatatttcattccgagtgtgttcgggagaagccactcccgatgacatgtcttgtgactatgacaacatggctgtgaacccatcagaaagtgggtttgtgactctggtgagcgtggagagtggatttgtgaccaatgacatttatgagttctccccagaccaaatggggaggagtaaggagtctggatgggtggaaaatgaaatatatggttattaggacatataaaaaactgaaactgacaacaatggaaaagaaatgataagcaaaatcctcttattttctataaggaaaatacacagaaggtctatgaacaagcttagatcaggtcctgtggatgagcatgtggtccccacgacctcctgttggacccccacgttttggctgtatcctttatcccagccagtcatccagctcgaccttatgagaaggtaccttgcccaggtctggcacatagtagagtctcaataaatgtcacttggttggttgtatctaacttttaagggacagagctttacctggcagtgataaagatgggctgtggagcttggaaaaccacctctgttttccttgctctatacagcagcacatattatcatacagacagaaaatccagaatcttttcaaagcccacatatggtagcacaggttggcctgtgcatcggcaattctcatatctgtttttttcaaagaataaaatcaaataaagagcaggaaacagagt

SEQ ID NO: 54476 - DNA, 1533 bp, Homo sapiens
ggtcgagcgcccggtatgagagcgcttagagatcgggaaagaactccagttagtgtgggacgagccccacctgactccggggaatgactctctgcttccttcctcctgttgtgtcactgcagcctcggatttggacctcagaggagggcagccagtctgccggggagggacacagaggccttgttataaagtcatttacttccatgatacttctcgaagactgaactttgaggaagccaaagaagcctgcaggagggatggaggccagctagtcagcatcgagtctgaagatgaacagaaactgatagaaaagttcattgaaaacctcttgccatctgatggtgacttctggattgggctcaggaggcgtgaggagaaacaaagcaatagcacagcctgccaggacctttatgcttggactgatggcagcatatcacaatttagagaaaccagcagttccttctagagaagctgaaggtgaggaaacagagctgacaacacctgtacttccagaagaaacacaggaagaagatgccaaaaaaacatttaaagaaagtagagaagctgccttgaatctggcctacatcctaatccccagcattccccttctcctcctccttgtggtcaccacagttgtatgttgggtttggatctgtagaaaaagaaaacgggagcagccagaccctagcacaaagaagcaacacaccatctggccctctcctcaccagggaaacagcccggacctagaggtctacaatgtcataagaaaacaaagcgaagctgacttagctgagacccggccagacctgaagaatatttcattccgagtgtgttcgggagaagccactcccgatgacatgtcttgtgactatgacaacatggctgtgaacccatcagaaagtgggtttgtgactctggtgagcgtggagagtggatttgtgaccaatgacatttatgagttctccccagaccaaatggggaggagtaaggagtctggatgggtggaaaatgaaatatatggttattaggacatataaaaaactgaaactgacaacaatggaaaagaaatgataagcaaaatcctcttattttctataaggaaaatacacagaaggtctatgaacaagcttagatcaggtcctgtggatgagcatgtggtccccacgacctcctgttggacccccacgttttggctgtatcctttatcccagccagtcatccagctcgaccttatgagaaggtaccttgcccaggtctggcacatagtagagtctcaataaatgtcacttggttggttgtatctaacttttaagggacagagctttacctggcagtgataaagatgggctgtggagcttggaaaaccacctctgttttccttgctctatacagcagcacatattatcatacagacagaaaatccagaatcttttcaaagcccacatatggtagcacaggttggcctgtgcatcggcaattctcatatctgtttttttcaaagaataaaatcaaataaagagcaggaaacagagt

SEQ ID NO: 54477 - DNA, 1652 bp, Homo sapiens
ctcccgtgcggtccgtcggtggcctagagatgctgctgccgcggttgcagttgtcgcgcacgcctctgcccgccagcccgctccaccgccgtagcgcccgagtgtcggggggcgcacccgagtcgggccatgaggccgggaaccgcgctacaggccgtgctgctggccgtgctgctggtggggctgcgggccgcgacgggtcgcctgctgagtgggcagccagtctgccggggagggacacagaggccttgttataaagtcatttacttccatgatacttctcgaagactgaactttgaggaagccaaagaagcctgcaggagggatggaggccagctagtcagcatcgagtctgaagatgaacagaaactgatagaaaagttcattgaaaacctcttgccatctgatggtgacttctggattgggctcaggaggcgtgaggagaaacaaagcaatagcacagcctgccaggacctttatgcttggactgatggcagcatatcacaatttaggaactggtatgtggatgagccgtcctgcggcagcgaggtctgcgtggtcatgtaccatcagccatcggcacccgctggcatcggaggcccctacatgttccagtggaatgatgaccggtgcaacatgaagaacaatttcatttgcaaatattctgatgagaaaccagcagttccttctagagaagctgaaggtgaggaaacagagctgacaacacctgtacttccagaagaaacacaggaagaagatgccaaaaaaacatttaaagaaagtagagaagctgccttgaatctggcctacatcctaatccccagcattccccttctcctcctccttgtggtcaccacagttgtatgttgggtttggatctgtagaaaaagaaaacgggagcagccagaccctagcacaaagaagcaacacaccatctggccctctcctcaccagggaaacagcccggacctagaggtctacaatgtcataagaaaacaaagcgaagctgacttagctgagacccggccagacctgaagaatatttcattccgagtgtgttcgggagaagccactcccgatgacatgtcttgtgactatgacaacatggctgtgaacccatcagaaagtgggtttgtgactctggtgagcgtggagagtggatttgtgaccaatgacatttatgagttctccccagaccaaatggggaggagtaaggagtctggatgggtggaaaatgaaatatatggttattaggacatataaaaaactgaaactgacaacaatggaaaagaaatgataagcaaaatcctcttattttctataaggaaaatacacagaaggtctatgaacaagcttagatcaggtcctgtggatgagcatgtggtccccacgacctcctgttggacccccacgttttggctgtatcctttatcccagccagtcatcctggcagtgataaagatgggctgtggagcttggaaaaccacctctgttttccttgctctatacagcagcacatattatcatacagacagaaaatccagaatcttttcaaagcccacatatggtagcacaggttggcctgtgcatcggcaattctcatatctgtttttttcaaagaataaaatcaaataaagagcaggaaacagagt

SEQ ID NO: 54478 - DNA, 3697 bp, Homo sapiens
  misc_feature (172)..(172): n is a, c, g, or t
aaagaaggaagaggtttattcagctgggagcatcagcagacttgcgtcaagagccgagctccctgaaaaagacattcttggcctttttaaaggcttacaactttaaggggtccacgtgaaagggtcgtgataaatcgagcaagctcggggaacgtgaccgggggctgcatgngtcagctaacagaacagaaagttttgcagtgctttctcatacaatgtctggaatttacagataacacaagtagtttaggtcaggggttgatattattatcacttttttttaactaccagggccaggtggtggcgccaaggtcttctggctatttctcttacttctgtttttttctaactttttgccttctctctttcctcctgtcttgtaaaccaggcaaggtggtaggaggagggcagcaggagtagtagtggtcttattccttaggggaggcattgagggaaggctgggagtggggggtcgagacttccttgctattctgggccataacattccacataatattataatagaatataattaatacaataatagttccccaccccacaccgggattcccagggcccactgccccactcctcctcctcaggctggccctcagctcagtgctcagccctgctgcacagcctctcctcctcctcctcaggctgcccctcagctcggagctcagccctgctgtgtggctctagcctggcgccctctgggcgttgacttcttctctgtggtctgggaggagatgtcgaggcccccgagggaggcggtggtgaaatcttggcttgcagcctccagcccgcccagagccagagtcaggcacgaggctagggcaactccgccccacccctcccccggggactggccctgcgttggacatttcttaacagcagggccaccaggcagagcgggacagccaggaggaagggcagcttggcagagcctcaggatggacccccttggggacacgctgcggcgactgcgggaggccttccacgcggggcgcacgcggccagctgagttccgggctgcgcagctccaaggcctgggccgcttcctgcaagaaaacaagcagcttctgcacgacgcactggcccaggacctgcacaagtcagccttcgagtcggaggtgtctgaggttgccatcagccagggcgaggtcaccctggccctcaggaacctccgggcctggatgaaggacgagcgtgtgcccaagaacctggccacgcagctggactccgccttcatccggaaggagccctttggcctggtcctcatcattgcgccctggaactatccgctgaacctgacgctggtgcccctcgtgggagccctcgctgcagggaactgtgtggtgctgaagccatcggagattagcaagaacgtcgagaagatcctggccgaggtgctgccccaatacgtggaccagagctgctttgctgtggtgctgggcgggccccaggagacggggcagctgctagagcacaggttcgactacatcttcttcacagggagccctcgtgtgggcaagattgttatgactgctgccgccaagcacctgacacctgtcaccctggagctggggggcaagaacccttgctacgtggacgacaactgcgacccccagaccgtggccaaccgcgtggcctggttccgctacttcaacgccggccagacctgcgtggcccccgactacgtcctatgcagccctgagatgcaggagaggctgctgcctgccctgcagagcaccatcacccgtttctatggcgacgacccccagagctccccaaacctgggccgcatcatcaaccagaaacagttccagcggctgcgggcattgctgggctgcggccgtgtggccattgggggccagagcgatgagagcgatcgctacatcgcccccacggtgctggtggatgtgcaggagatggagcctgtgatgcaggaggagatcttcgggcccatcctgcccatcgtgaacgtgcagagcttggacgaggccatcgagttcatcaaccggcgggagaagcccctggccctgtacgccttctccaacagcagccaggtggtcaagcgggtgctgacccagaccagcagcgggggcttctgtgggaacgacggcttcatgcacatgaccctggccagcctgccttttggaggagtgggtgccagtgggatgggccggtaccatggcaagttctccttcgacaccttctcccaccatcgcgcctgcctcctgcgcagcccggggatggagaagctcaacgccctccgctacccgccgcaatcgccgcgccgcctgaggatgctgctggtggccatggaggcccaaggctgcagctgcacactgctctgagcccttccccaggcccaggctgtagaccaccatgacagctgtcgcctgcggctggtggagacggggcctgggctcccgggcccgaggaggaaaaggattgccaaggctccagggcacccctcaaagcagcgcctgcctcctccctcctgggtcttccctctccctgcctcagcctcctccctcagccgctcccaaccatgagagccgaggtgggaggcatgggaaacagtgcagtgactcaccccctgcccccgcaccaaccacccatattcaggagaagaggacagacacggcacctctgagtcacccctctcctgtggagcgggcgtccgaggggccctggcatctgactcaggccacaccatggaatcactgcatccaaggccattcctgccctctctgagtctcagtttttccatttgttcagtggagagaattaaccattgatacctcctggctgggtgaggcggctcacacctgtaatcccagcactttgggaggccgaggcaggcggatcacctgaaatcaggagttcaagatcagcctggctaacatggcgaaaccccgtctctactaaaaatacaaaaattagcctggcgtggtggcgcatgcctgtaatcccagctactcaggaggctaaggcaggagaatcgcttgaacccgggaggtggaggttgccgtgagctgagattgcgtcactgaactccggcctgggtgacagaaggaggctctgccttaaaaaaaaaaaaaaaaaaaacctcctgggactgttgcaaggatgaaatgaaggattgagggattgagggattgctgagctggagctccaggtgtcctatctttctcagtggggtggcacggagcggggccgcctccctcttctctccaggcaggtggggctgtggttatgcgatagggtctcccttccctccagcccatgccagaggagcttgtaactctttatcctcatggtgcccactacgagtcatactcttccccatgctgctcatcctcctgggccccatccactcagccaaagcagaatgcagggtttcctgcctgacaacccttctcacctcccaagtcccacttttgaacaagctgatgattctgaaactggcccaatttcctaacaagccggatgcttgagaaacctacatttggacaatgagaggctgctcctgcggcctgcgggccacctcctcttccttggctcctgctttctttttagactatatcaacctacaactttagtcgggaagagggacaggggtggacctgagtttcgtctcctgtctctctggctgatgtcacctgaataaagccttcttccctggcaa

SEQ ID NO: 54479 - DNA, 5297 bp, Homo sapiens
  misc_feature (172)..(172): n is a, c, g, or t
  misc_feature (1578)..(1578): n is a, c, g, or t
aaagaaggaagaggtttattcagctgggagcatcagcagacttgcgtcaagagccgagctccctgaaaaagacattcttggcctttttaaaggcttacaactttaaggggtccacgtgaaagggtcgtgataaatcgagcaagctcggggaacgtgaccgggggctgcatgngtcagctaacagaacagaaagttttgcagtgctttctcatacaatgtctggaatttacagataacacaagtagtttaggtcaggggttgatattattatcacttttttttaactaccagggccaggtggtggcgccaaggtcttctggctatttctcttacttctgtttttttctaactttttgccttctctctttcctcctgtcttgtaaaccaggcaaggtggtaggaggagggcagcaggagtagtagtggtcttattccttaggggaggcattgagggaaggctgggagtggggggtcgagacttccttgctattctgggccataacattccacataatattataatagaatataattaatacaataatagttccccaccccacaccgggattcccagggcccactgccccactcctcctcctcaggctggccctcagctcagtgctcagccctgctgcacagcctctcctcctcctcctcaggctgcccctcagctcggagctcagccctgctgtgtggctctagcctggcgccctctgggcgttgacttcttctctgtggtctgggaggagatgtcgaggcccccgagggaggcggtggtgaaatcttggcttgcagcctccagcccgcccagagccagagtcaggcacgaggctagggcaactccgccccacccctcccccggggactggccctgcgttggacatttcttaacagcagggccaccaggcagagcgggacagccaggaggaagggcagcttggcagagcctcaggtagagtatcccggggaggctggggctgtagtgggccagcagtcgggccagagtccagctcagcaactccgggttacaggcagcccaggcgggcctagccaccggcagctgcactcagaggccactgtgtcctggctgagctcatctgcctgcctgctgggggagaaagcggaaggaggagaggcagatctggggagtggcagcgaggtcccgggcacccccctggccagcaggcacccttccgttgtccgagctgggttgccaccgcctccttttcctgggattcccggacaccctccaagggaaccaagggaacagctctgggtccagctgccccaggaaggactgtgcgccccttccccacaggggtcaagtatcccttccagcaacagccgtttcctgggcaccagcctgcatgcccagtgctgatgcagggatgtggccatgaatgactctgggaaagaatcattcttagcaatggactttgtcagggtccaagaaaggagtggccagccagccccgccccgcctgcaggaggcacttctcatcccgggaactgtgccccatcagggagccgaggctgttcagcctctttgtgacccggggctgggttggcccgagccacnaatgaggggatacgctggtccctggctccccaagggaggggctgctgagctttgggaggcctcatgaaaatccagcttaaggccatcaaaagacaaaatgacaacacatttagttatagatcaaattggcttctattcatgattcgtgaatccggacagcctccattctacaaaatggagtgagagctcccaccaggcagtggcagagcagggggttcataaggcagaaaggaggaaacagaaaaataggaaacaccaaaccgcctaataccggatcgctgcagactgcttttttctaagcggactgcttttttctaaggggtaaggcagaggggacctgatgatgccggctcaggtggactggaatctcctgcttcccggagaaactggtctgtggttttgggctctgtctgcttccttaaagcttcggtttgatgatgtggcatttggcatgagtgcctccattttggtttggtctggtctgttggggcctagtacaggagctcagttcaaaatcacagcctctcatcatgtttgtttaatgaagctacactgcaggagatcagaatcggagaccctgcggtattgggcctgtgggtcccctgaagttggcctagtgatccccgccttctggctgccctgatgggggtcccccaggccctctacccaccatgttcagtccctctgtcaccacatccctgtcctcagttgggtctcagggtgatgtccttgtctccccaacacccaccttggatcaaggccccttcaggcccctgccccaggggtctcctccctgagccctcctctggtacatccgtcctccatggatactgagcacttcccggggtcccagtgcttgaattctcccgacagtggtatgggtgccacaggcagtgcccaattttacagatgggaaacgtgaatacaaagaggtcaagcaacctgcccaaggtctccccactcacacatgtggttgctgcagtttaaacccaggtcattgggcccccagaccatgccatgctgggaggatgctcttagaaggcccatggtgtagatgaggaaactgaggcaggaagaatgagagaacgggcagagcctccgtttccctggaatccaacccacttgataggccagggtgtgaacgagcagggagtccctgcccagggacggtccctgctgtgaggttgggggcagcggctcggccagccattcactccctgtgatatgtcagccccgttcctccccactctgttcccggagcctgtgggcacccacagcgagcacccaggctggcatagtgcccagcacatgggcacctgagtattgtttttagaggcccgtggccttgagaggaagtggctggtcctgccctggcccccaggccagaggaaacagccgctatcttcatcaccaaatgatgtggcaactcccccccaccccagaagctgcaggtctgggccaaatgcacctcaacctgtgatggggggccacgccccagagacccttgggcccatcagcccctggacctcagtggctcagccgcaggaggcaagaggcagtctcagaccccacaacctaagcagtgtggggagtggcagcaatagtgaggagggaggccgaggaaatggaatccaaacagcaagagacctcccctcaccggtcacccctcccacagctggcctaccggagtccacccagccttgggtctgccgtccaggccccagcccagtgtcccttcccccaaggacttggctgcccatccccaggggactgtgagggaggtgggagctgaggtggatagccttctgctcttctggatttgggttttccaatgtgaggagctgggtggtatcaggcaagctctggccctctctgagcctcagcctccatctccttcagtggggtgaatagtggtccctcagtgggcggccgtggtggtgaaatgagcgagggcaggcatggggatcacactccttacaacctcacactgtgggatgagtgccgcgggggtgggcttgggggaccccagcccagtgcctgattcaggagttccctattctgtgtgtccacaatggctgcccagcaccctcgggagataacaggcccaggatccccccaatctcaggcagaaggcggccttggcttctccgcttgccagggtcctgccctgggcactccctgggggcctcagtccagagtgagtgacccgtaggggcaatgccagggctggttgccctgtgggagagatgtgtcctgtggccctggtgagttggtttcagcgttgctaggagggttgctggaatgttccctgcagaactccatcccccacagagctcccggcccacagtccaccattcacgttacgtgccttgcatttttgtggtttctgcagagattcttacaaagggtgagagaggcacaggcgtggtttgcctttgaccactggcagaagtctgaaggtgagagtagaatggagaaggacccaggagagtgcggagttgagggagataaatatttgcaggctacttagcaaaacacccagagctgacctttgtcgagtactttctgtgggcacaacagcaaatgttttatgcagcgtgatgtcatttaatcctcacaatgacaccaggtgccattagcatccccatttcacagatgaggaaaccgaggcagagaaggtgagtgatttgcccaaggtcccacaaccagtaagaggcagagcccggagacaggcctgatggtggctcgagaggctcgttcttggctcctgggtctcagtcctgctcccgtgacgagccatcccctatggggaccatggtgcctgtcctgtgtgcgggccactgcccagcttctcccaatcagagcaggaagatggtgggttcagcctggccccacaatcactccagctgagggctggcctggggctcctgaccaggctctcagtagcacactggtccagcagggccatcctgcagaccggagcaggtcccgccctcaaggtggccacttaacaatcacccacagccttgcgctcaccgatgctgggccctgggctcagaaccgactgtgtggtctcatcattagctggcaggtgccatcattacaccggtaacatgagaggcttcaagcactaggtctcaaataagtaggcacagaggggcctgcctcccagtctaatgagggggaaataagggagatgtggacagggttgggaggtgggtagagtgtaaccagacatttatcacatggcacaactcagaacgctggggagcagagtcaaggggccactgtgacagtggatgagggcataatctgggtgggctgcctggaggaagcatcagccaagctgagatctggaggaaagggactcggagagggaaggaggaaagggtcaccacgggtccttggcaccaggccgaggaacgagtgcgtcagagtgctcctccgatgaacttcaagtaaacaggcagggctcgggggaatgtctaggcccctaccctgcctgccagctctggctggcaccagcacggaggcaggaacgccctctcccttcggctctgattccacctcctgccttcccatcccagctgcaggagcggggccctacaaaggcagcagtagcccagaacattcaacctggtccctccctctggacctggtcacccccctgtccccaccctcagcaggcagcatctgcccagcgtcacgtgcaccctctc

SEQ ID NO: 54480 - DNA, 773 bp, Homo sapiens
tctgcaagcccctgtgggtgcaggcaggtcaggggtgcccagaccctggggcggctgggtggtgcccatgaaggaggggcagccctggccacccagttcatgccaccccatctggcaggatggacccccttggggacacgctgcggcgactgcgggaggccttccacgcggggcgcacgcggccagctgagttccgggctgcgcagctccaaggcctgggccgcttcctgcaagatcagccttcgagtcggaggtgtctgaggttgccatcagccagggcgaggtcaccctggccctcaggaacctccgggcctggatgaaggacgagcgtgtgcccaagaacctggccacgcagctggactccgccttcatccggaaggagccctttggcctggtcctcatcattgcgccctggaactatccgctgaacctgacgctggtgcccctcgtgggagccctcgctgcagggaactgtgtggtgctgaagccatcggagattagcaagaacgtcgagaagatcctggccgaggtgctgccccaatacgtggaccagagctgctttgctgtggtgctgggcgggccccaggagacggggcagctgctagagcacaggttcgactacatcttcttcacagctcttccttggctcctgctttctttttagactatatcaacctacaactttagtcgggaagagggacaggggtggacctgagtttcgtctcctgtctctctggctgatgtcacctgaataaagccttcttccctggcaa

SEQ ID NO: 54481 - DNA, 3586 bp, Homo sapiens
  misc_feature (172)..(172): n is a, c, g, or t
aaagaaggaagaggtttattcagctgggagcatcagcagacttgcgtcaagagccgagctccctgaaaaagacattcttggcctttttaaaggcttacaactttaaggggtccacgtgaaagggtcgtgataaatcgagcaagctcggggaacgtgaccgggggctgcatgngtcagctaacagaacagaaagttttgcagtgctttctcatacaatgtctggaatttacagataacacaagtagtttaggtcaggggttgatattattatcacttttttttaactaccagggccaggtggtggcgccaaggtcttctggctatttctcttacttctgtttttttctaactttttgccttctctctttcctcctgtcttgtaaaccaggcaaggtggtaggaggagggcagcaggagtagtagtggtcttattccttaggggaggcattgagggaaggctgggagtggggggtcgagacttccttgctattctgggccataacattccacataatattataatagaatataattaatacaataatagttccccaccccacaccgggattcccagggcccactgccccactcctcctcctcaggctggccctcagctcagtgctcagccctgctgcacagcctctcctcctcctcctcaggctgcccctcagctcggagctcagccctgctgtgtggctctagcctggcgccctctgggcgttgacttcttctctgtggtctgggaggagatgtcgaggcccccgagggaggcggtggtgaaatcttggcttgcagcctccagcccgcccagagccagagtcaggcacgaggctagggcaactccgccccacccctcccccggggactggccctgcgttggacatttcttaacagcagggccaccaggcagagcgggacagccaggaggaagggcagcttggcagagcctcaggatggacccccttggggacacgctgcggcgactgcgggaggccttccacgcggggcgcacgcggccagctgagttccgggctgcgcagctccaaggcctgggccgcttcctgcaagaaaacaagcagcttctgcacgacgcactggcccaggacctgcacaaggccacgcagctggactccgccttcatccggaaggagccctttggcctggtcctcatcattgcgccctggaactatccgctgaacctgacgctggtgcccctcgtgggagccctcgctgcagggaactgtgtggtgctgaagccatcggagattagcaagaacgtcgagaagatcctggccgaggtgctgccccaatacgtggaccagagctgctttgctgtggtgctgggcgggccccaggagacggggcagctgctagagcacaggttcgactacatcttcttcacagggagccctcgtgtgggcaagattgttatgactgctgccgccaagcacctgacacctgtcaccctggagctggggggcaagaacccttgctacgtggacgacaactgcgacccccagaccgtggccaaccgcgtggcctggttccgctacttcaacgccggccagacctgcgtggcccccgactacgtcctatgcagccctgagatgcaggagaggctgctgcctgccctgcagagcaccatcacccgtttctatggcgacgacccccagagctccccaaacctgggccgcatcatcaaccagaaacagttccagcggctgcgggcattgctgggctgcggccgtgtggccattgggggccagagcgatgagagcgatcgctacatcgcccccacggtgctggtggatgtgcaggagatggagcctgtgatgcaggaggagatcttcgggcccatcctgcccatcgtgaacgtgcagagcttggacgaggccatcgagttcatcaaccggcgggagaagcccctggccctgtacgccttctccaacagcagccaggtggtcaagcgggtgctgacccagaccagcagcgggggcttctgtgggaacgacggcttcatgcacatgaccctggccagcctgccttttggaggagtgggtgccagtgggatgggccggtaccatggcaagttctccttcgacaccttctcccaccatcgcgcctgcctcctgcgcagcccggggatggagaagctcaacgccctccgctacccgccgcaatcgccgcgccgcctgaggatgctgctggtggccatggaggcccaaggctgcagctgcacactgctctgagcccttccccaggcccaggctgtagaccaccatgacagctgtcgcctgcggctggtggagacggggcctgggctcccgggcccgaggaggaaaaggattgccaaggctccagggcacccctcaaagcagcgcctgcctcctccctcctgggtcttccctctccctgcctcagcctcctccctcagccgctcccaaccatgagagccgaggtgggaggcatgggaaacagtgcagtgactcaccccctgcccccgcaccaaccacccatattcaggagaagaggacagacacggcacctctgagtcacccctctcctgtggagcgggcgtccgaggggccctggcatctgactcaggccacaccatggaatcactgcatccaaggccattcctgccctctctgagtctcagtttttccatttgttcagtggagagaattaaccattgatacctcctggctgggtgaggcggctcacacctgtaatcccagcactttgggaggccgaggcaggcggatcacctgaaatcaggagttcaagatcagcctggctaacatggcgaaaccccgtctctactaaaaatacaaaaattagcctggcgtggtggcgcatgcctgtaatcccagctactcaggaggctaaggcaggagaatcgcttgaacccgggaggtggaggttgccgtgagctgagattgcgtcactgaactccggcctgggtgacagaaggaggctctgccttaaaaaaaaaaaaaaaaaaaacctcctgggactgttgcaaggatgaaatgaaggattgagggattgagggattgctgagctggagctccaggtgtcctatctttctcagtggggtggcacggagcggggccgcctccctcttctctccaggcaggtggggctgtggttatgcgatagggtctcccttccctccagcccatgccagaggagcttgtaactctttatcctcatggtgcccactacgagtcatactcttccccatgctgctcatcctcctgggccccatccactcagccaaagcagaatgcagggtttcctgcctgacaacccttctcacctcccaagtcccacttttgaacaagctgatgattctgaaactggcccaatttcctaacaagccggatgcttgagaaacctacatttggacaatgagaggctgctcctgcggcctgcgggccacctcctcttccttggctcctgctttctttttagactatatcaacctacaactttagtcgggaagagggacaggggtggacctgagtttcgtctcctgtctctctggctgatgtcacctgaataaagccttcttccctggcaa

SEQ ID NO: 54482 - DNA, 2736 bp, Homo sapiens
acacagaggacaggggctctgcagtccttcacccccaccctaactatctaatcacgggccaccggtgtgggcatggtccagaagacctcaccgccctcccaggatggacccccttggggacacgctgcggcgactgcgggaggccttccacgcggggcgcacgcggccagctgagttccgggctgcgcagctccaaggcctgggccgcttcctgcaagaaaacaagcagcttctgcacgacgcactggcccaggacctgcacaaggccacgcagctggactccgccttcatccggaaggagccctttggcctggtcctcatcattgcgccctggaactatccgctgaacctgacgctggtgcccctcgtgggagccctcgctgcagggaactgtgtggtgctgaagccatcggagattagcaagaacgtcgagaagatcctggccgaggtgctgccccaatacgtggaccagagctgctttgctgtggtgctgggcgggccccaggagacggggcagctgctagagcacaggttcgactacatcttcttcacagggagccctcgtgtgggcaagattgttatgactgctgccgccaagcacctgacacctgtcaccctggagctggggggcaagaacccttgctacgtggacgacaactgcgacccccagaccgtggccaaccgcgtggcctggttccgctacttcaacgccggccagacctgcgtggcccccgactacgtcctatgcagccctgagatgcaggagaggctgctgcctgccctgcagagcaccatcacccgtttctatggcgacgacccccagagctccccaaacctgggccgcatcatcaaccagaaacagttccagcggctgcgggcattgctgggctgcggccgtgtggccattgggggccagagcgatgagagcgatcgctacatcgcccccacggtgctggtggatgtgcaggagatggagcctgtgatgcaggaggagatcttcgggcccatcctgcccatcgtgaacgtgcagagcttggacgaggccatcgagttcatcaaccggcgggagaagcccctggccctgtacgccttctccaacagcagccaggtggtcaagcgggtgctgacccagaccagcagcgggggcttctgtgggaacgacggcttcatgcacatgaccctggccagcctgccttttggaggagtgggtgccagtgggatgggccggtaccatggcaagttctccttcgacaccttctcccaccatcgcgcctgcctcctgcgcagcccggggatggagaagctcaacgccctccgctacccgccgcaatcgccgcgccgcctgaggatgctgctggtggccatggaggcccaaggctgcagctgcacactgctctgagcccttccccaggcccaggctgtagaccaccatgacagctgtcgcctgcggctggtggagacggggcctgggctcccgggcccgaggaggaaaaggattgccaaggctccagggcacccctcaaagcagcgcctgcctcctccctcctgggtcttccctctccctgcctcagcctcctccctcagccgctcccaaccatgagagccgaggtgggaggcatgggaaacagtgcagtgactcaccccctgcccccgcaccaaccacccatattcaggagaagaggacagacacggcacctctgagtcacccctctcctgtggagcgggcgtccgaggggccctggcatctgactcaggccacaccatggaatcactgcatccaaggccattcctgccctctctgagtctcagtttttccatttgttcagtggagagaattaaccattgatacctcctggctgggtgaggcggctcacacctgtaatcccagcactttgggaggccgaggcaggcggatcacctgaaatcaggagttcaagatcagcctggctaacatggcgaaaccccgtctctactaaaaatacaaaaattagcctggcgtggtggcgcatgcctgtaatcccagctactcaggaggctaaggcaggagaatcgcttgaacccgggaggtggaggttgccgtgagctgagattgcgtcactgaactccggcctgggtgacagaaggaggctctgccttaaaaaaaaaaaaaaaaaaaacctcctgggactgttgcaaggatgaaatgaaggattgagggattgagggattgctgagctggagctccaggtgtcctatctttctcagtggggtggcacggagcggggccgcctccctcttctctccaggcaggtggggctgtggttatgcgatagggtctcccttccctccagcccatgccagaggagcttgtaactctttatcctcatggtgcccactacgagtcatactcttccccatgctgctcatcctcctgggccccatccactcagccaaagcagaatgcagggtttcctgcctgacaacccttctcacctcccaagtcccacttttgaacaagctgatgattctgaaactggcccaatttcctaacaagccggatgcttgagaaacctacatttggacaatgagaggctgctcctgcggcctgcgggccacctcctcttccttggctcctgctttctttttagactatatcaacctacaactttagtcgggaagagggacaggggtggacctgagtttcgtctcctgtctctctggctgatgtcacctgaataaagccttcttccctggcaa

SEQ ID NO: 54483 - DNA, 4341 bp, Homo sapiens
  misc_feature (172)..(172): n is a, c, g, or t
aaagaaggaagaggtttattcagctgggagcatcagcagacttgcgtcaagagccgagctccctgaaaaagacattcttggcctttttaaaggcttacaactttaaggggtccacgtgaaagggtcgtgataaatcgagcaagctcggggaacgtgaccgggggctgcatgngtcagctaacagaacagaaagttttgcagtgctttctcatacaatgtctggaatttacagataacacaagtagtttaggtcaggggttgatattattatcacttttttttaactaccagggccaggtggtggcgccaaggtcttctggctatttctcttacttctgtttttttctaactttttgccttctctctttcctcctgtcttgtaaaccaggcaaggtggtaggaggagggcagcaggagtagtagtggtcttattccttaggggaggcattgagggaaggctgggagtggggggtcgagacttccttgctattctgggccataacattccacataatattataatagaatataattaatacaataatagttccccaccccacaccgggattcccagggcccactgccccactcctcctcctcaggctggccctcagctcagtgctcagccctgctgcacagcctctcctcctcctcctcaggctgcccctcagctcggagctcagccctgctgtgtggctctagcctggcgccctctgggcgttgacttcttctctgtggtctgggaggagatgtcgaggcccccgagggaggcggtggtgaaatcttggcttgcagcctccagcccgcccagagccagagtcaggcacgaggctagggcaactccgccccacccctcccccggggactggccctgcgttggacatttcttaacagcagggccaccaggcagagcgggacagccaggaggaagggcagcttggcagagcctcaggatggacccccttggggacacgctgcggcgactgcgggaggccttccacgcggggcgcacgcggccagctgagttccgggctgcgcagctccaaggcctgggccgcttcctgcaagaaaacaagcagcttctgcacgacgcactggcccaggacctgcacaagtcagccttcgagtcggaggtgtctgaggttgccatcagccagggcgaggtcaccctggccctcaggaacctccgggcctggatgaaggacgagcgtgtgcccaagaacctggccacgcagctggactccgccttcatccggaaggagccctttggcctggtcctcatcattgcgccctggaactatccgctgaacctgacgctggtgcccctcgtgggagccctcgctgcagggaactgtgtggtgctgaagccatcggagattagcaagaacgtcgagaagatcctggccgaggtgctgccccaatacgtggaccagagctgctttgctgtggtgctgggcgggccccaggagacggggcagctgctagagcacaggttcgactacatcttcttcacagggagccctcgtgtgggcaagattgttatgactgctgccgccaagcacctgacacctgtcaccctggagctggggggcaagaacccttgctacgtggacgacaactgcgacccccagaccgtggccaaccgcgtggcctggttccgctacttcaacgccggccagacctgcgtggcccccgactacgtcctatgcagccctgagatgcaggagaggctgctgcctgccctgcagagcaccatcacccgtttctatggcgacgacccccagagctccccaaacctgggccgcatcatcaaccagaaacagttccagcggctgcgggcattgctgggctgcggccgtgtggccattgggggccagagcgatgagagcgatcgctacatcgcccccacggtgctggtggatgtgcaggagatggagcctgtgatgcaggaggagatcttcgggcccatcctgcccatcgtgaacgtgcagagcttggacgaggccatcgagttcatcaaccggcgggagaagcccctggccctgtacgccttctccaacagcagccaggtggtcaagcgggtgctgacccagaccagcagcgggggcttctgtgggaacgacggcttcatgcacatgaccctggccagcctgccttttggaggagtgggtgccagtgggatgggccggtaccatggcaagttctccttcgacaccttctcccaccatcgcgcctgcctcctgcgcagcccggggatggagaagctcaacgccctccgctacccgccgcaatcgccgcgccgcctgaggatgctgctggtggccatggaggcccaaggctgcagctgcacactgctctgagcccttccccaggcccaggctgtagaccaccatgacagctgtcgcctgcggctggtggagacggggcctgggctcccgggcccgaggaggaaaaggattgccaaggctccagggcacccctcaaagcagcgcctgcctcctccctcctgggtcttccctctccctgcctcagcctcctccctcagccgctcccaaccatgagagccgaggtgggaggcatgggaaacagtgcagtgactcaccccctgcccccgcaccaaccacccatattcaggagaagaggacagacacggcacctctgagtcacccctctcctgtggagcgggcgtccgaggggccctggcatctgactcaggccacaccatggaatcactgcatccaaggccattcctgccctctctgagtctcagtttttccatttgttcagtggagagaattaaccattgatacctcctggctgggtgaggcggctcacacctgtaatcccagcactttgggaggccgaggcaggcggatcacctgaaatcaggagttcaagatcagcctggctaacatggcgaaaccccgtctctactaaaaatacaaaaattagcctggcgtggtggcgcatgcctgtaatcccagctactcaggaggctaaggcaggagaatcgcttgaacccgggaggtggaggttgccgtgagctgagattgcgtcactgaactccggcctgggtgacagaaggaggctctgccttaaaaaaaaaaaaaaaaaaaacctcctgggactgttgcaaggatgaaatgaaggattgagggattgagggattgctgagctggagctccaggtgtcctatctttctcagtggggtggcacggagcggggccgcctccctcttctctccaggcaggtggggctgtggttatgcgatagggtctcccttccctccagcccatgccagaggagcttgtaactctttatcctcatggtgcccactacgagtcatactcttccccatgctgctcatcctcctgggccccatccactcagccaaagcagaatgcagggtttcctgcctgacaacccttctcacctcccaagtcccacttttgaacaagctgatgattctgaaactggcccaatttcctaacaagccggatgcttgagaaacctacatttggacaatgagaggctgctcctgcggcctgcgggccacctcctcttccttggctcctgctttctttttagactatatcaacctacaactttagtcgggaagagggacaggggtggacctgagtttcgtctcctgtctctctggctgatgtcacctgaataaagccttcttccctggcaaaaaaaaaaaaacaacaatcaaccacataagaaatacaatagacaaaaaaaaacaaacaaataataaaacaaaaaaaaaacagacggcgccccaccccaaaataagcctccaccctgaggcccacacatctcgacactccaccgatattagtcagacaaaaatggggagcgcgaccccctaaaagcgcagcgcgacgcaacacaaatacgcacaccggacaccgcggccccgccggagatcgacacaacagcgcctacctaccgtgacgggtgagaacaaaccagcggccaaccacgggcgggcaaccacaggagagaagaaacaagcccccatctcacacgctcgcgatggacgagtgacgcccacatgtgtcggcggacgcaacacgatccacaccaaggaggcggacgcagaaacgaagcaaccgaccgcagaggagaaaaacaacaaacacagagcaactcaccagagcgacgggcaccccagggcggcatccaaaaccaacaaacgcccacgccgagcaacagcaccgacagccgcgcggggacaaaacaacaaggatgacaccacaacgaaggagaagcatgcaagactgaggaaggaaaaccacactcaaccgcgcgaggcaggaaaacgcatagcaa

SEQ ID NO: 54484 - DNA, 2654 bp, Homo sapiens
acacagaggacaggggctctgcagtccttcacccccaccctaactatctaatcacgggccaccggtgtgggcatggtccagaagacctcaccgccctcccaggatggacccccttggggacacgctgcggcgactgcgggaggccttccacgcggggcgcacgcggccagctgagttccgggctgcgcagctccaaggcctgggccgcttcctgcaagaaaacaagcagcttctgcacgacgcactggcccaggacctgcacaaggccacgcagctggactccgccttcatccggaaggagccctttggcctggtcctcatcattgcgccctggaactatccgctgaacctgacgctggtgcccctcgtgggagccctcgctgcagggaactgtgtggtgctgaagccatcggagattagcaagaacgtcgagaagatcctggccgaggtgctgccccaatacgtggaccagggagccctcgtgtgggcaagattgttatgactgctgccgccaagcacctgacacctgtcaccctggagctggggggcaagaacccttgctacgtggacgacaactgcgacccccagaccgtggccaaccgcgtggcctggttccgctacttcaacgccggccagacctgcgtggcccccgactacgtcctatgcagccctgagatgcaggagaggctgctgcctgccctgcagagcaccatcacccgtttctatggcgacgacccccagagctccccaaacctgggccgcatcatcaaccagaaacagttccagcggctgcgggcattgctgggctgcggccgtgtggccattgggggccagagcgatgagagcgatcgctacatcgcccccacggtgctggtggatgtgcaggagatggagcctgtgatgcaggaggagatcttcgggcccatcctgcccatcgtgaacgtgcagagcttggacgaggccatcgagttcatcaaccggcgggagaagcccctggccctgtacgccttctccaacagcagccaggtggtcaagcgggtgctgacccagaccagcagcgggggcttctgtgggaacgacggcttcatgcacatgaccctggccagcctgccttttggaggagtgggtgccagtgggatgggccggtaccatggcaagttctccttcgacaccttctcccaccatcgcgcctgcctcctgcgcagcccggggatggagaagctcaacgccctccgctacccgccgcaatcgccgcgccgcctgaggatgctgctggtggccatggaggcccaaggctgcagctgcacactgctctgagcccttccccaggcccaggctgtagaccaccatgacagctgtcgcctgcggctggtggagacggggcctgggctcccgggcccgaggaggaaaaggattgccaaggctccagggcacccctcaaagcagcgcctgcctcctccctcctgggtcttccctctccctgcctcagcctcctccctcagccgctcccaaccatgagagccgaggtgggaggcatgggaaacagtgcagtgactcaccccctgcccccgcaccaaccacccatattcaggagaagaggacagacacggcacctctgagtcacccctctcctgtggagcgggcgtccgaggggccctggcatctgactcaggccacaccatggaatcactgcatccaaggccattcctgccctctctgagtctcagtttttccatttgttcagtggagagaattaaccattgatacctcctggctgggtgaggcggctcacacctgtaatcccagcactttgggaggccgaggcaggcggatcacctgaaatcaggagttcaagatcagcctggctaacatggcgaaaccccgtctctactaaaaatacaaaaattagcctggcgtggtggcgcatgcctgtaatcccagctactcaggaggctaaggcaggagaatcgcttgaacccgggaggtggaggttgccgtgagctgagattgcgtcactgaactccggcctgggtgacagaaggaggctctgccttaaaaaaaaaaaaaaaaaaaacctcctgggactgttgcaaggatgaaatgaaggattgagggattgagggattgctgagctggagctccaggtgtcctatctttctcagtggggtggcacggagcggggccgcctccctcttctctccaggcaggtggggctgtggttatgcgatagggtctcccttccctccagcccatgccagaggagcttgtaactctttatcctcatggtgcccactacgagtcatactcttccccatgctgctcatcctcctgggccccatccactcagccaaagcagaatgcagggtttcctgcctgacaacccttctcacctcccaagtcccacttttgaacaagctgatgattctgaaactggcccaatttcctaacaagccggatgcttgagaaacctacatttggacaatgagaggctgctcctgcggcctgcgggccacctcctcttccttggctcctgctttctttttagactatatcaacctacaactttagtcgggaagagggacaggggtggacctgagtttcgtctcctgtctctctggctgatgtcacctgaataaagccttcttccctggcaa

SEQ ID NO: 54485 - DNA, 2782 bp, Homo sapiens
  misc_feature (172)..(172): n is a, c, g, or t
aaagaaggaagaggtttattcagctgggagcatcagcagacttgcgtcaagagccgagctccctgaaaaagacattcttggcctttttaaaggcttacaactttaaggggtccacgtgaaagggtcgtgataaatcgagcaagctcggggaacgtgaccgggggctgcatgngtcagctaacagaacagaaagttttgcagtgctttctcatacaatgtctggaatttacagataacacaagtagtttaggtcaggggttgatattattatcacttttttttaactaccagggccaggtggtggcgccaaggtcttctggctatttctcttacttctgtttttttctaactttttgccttctctctttcctcctgtcttgtaaaccaggcaaggtggtaggaggagggcagcaggagtagtagtggtcttattccttaggggaggcattgagggaaggctgggagtggggggtcgagacttccttgctattctgggccataacattccacataatattataatagaatataattaatacaataatagttccccaccccacaccgggattcccagggcccactgccccactcctcctcctcaggctggccctcagctcagtgctcagccctgctgcacagcctctcctcctcctcctcaggctgcccctcagctcggagctcagccctgctgtgtggctctagcctggcgccctctgggcgttgacttcttctctgtggtctgggaggagatgtcgaggcccccgagggaggcggtggtgaaatcttggcttgcagcctccagcccgcccagagccagagtcaggcacgaggctagggcaactccgccccacccctcccccggggactggccctgcgttggacatttcttaacagcagggccaccaggcagagcgggacagccaggaggaagggcagcttggcagagcctcaggatggacccccttggggacacgctgcggcgactgcgggaggccttccacgcggggcgcacgcggccagctgagttccgggctgcgcagctccaaggcctgggccgcttcctgcaagaaaacaagcagcttctgcacgacgcactggcccaggacctgcacaagtcagccttcgagtcggaggtgtctgaggttgccatcagccagggcgaggtcaccctggccctcaggaacctccgggcctggatgaaggacgagcgtgtgcccaagaacctggccacgcagctggactccgccttcatccggaaggagccctttggcctggtcctcatcattgcgccctggaactatccgctgaacctgacgctggtgcccctcgtgggagccctcgctgcagggaactgtgtggtgctgaagccatcggagattagcaagaacgtcgagaagatcctggccgaggtgctgccccaatacgtggaccagagctgctttgctgtggtgctgggcgggccccaggagacggggcagctgctagagcacaggttcgactacatcttcttcacagggagccctcgtgtgggcaagattgttatgactgctgccgccaagcacccctcaaagcagcgcctgcctcctccctcctgggtcttccctctccctgcctcagcctcctccctcagccgctcccaaccatgagagccgaggtgggaggcatgggaaacagtgcagtgactcaccccctgcccccgcaccaaccacccatattcaggagaagaggacagacacggcacctctgagtcacccctctcctgtggagcgggcgtccgaggggccctggcatctgactcaggccacaccatggaatcactgcatccaaggccattcctgccctctctgagtctcagtttttccatttgttcagtggagagaattaaccattgatacctcctggctgggtgaggcggctcacacctgtaatcccagcactttgggaggccgaggcaggcggatcacctgaaatcaggagttcaagatcagcctggctaacatggcgaaaccccgtctctactaaaaatacaaaaattagcctggcgtggtggcgcatgcctgtaatcccagctactcaggaggctaaggcaggagaatcgcttgaacccgggaggtggaggttgccgtgagctgagattgcgtcactgaactccggcctgggtgacagaaggaggctctgccttaaaaaaaaaaaaaaaaaaaacctcctgggactgttgcaaggatgaaatgaaggattgagggattgagggattgctgagctggagctccaggtgtcctatctttctcagtggggtggcacggagcggggccgcctccctcttctctccaggcaggtggggctgtggttatgcgatagggtctcccttccctccagcccatgccagaggagcttgtaactctttatcctcatggtgcccactacgagtcatactcttccccatgctgctcatcctcctgggccccatccactcagccaaagcagaatgcagggtttcctgcctgacaacccttctcacctcccaagtcccacttttgaacaagctgatgattctgaaactggcccaatttcctaacaagccggatgcttgagaaacctacatttggacaatgagaggctgctcctgcggcctgcgggccacctcctcttccttggctcctgctttctttttagactatatcaacctacaactttagtcgggaagagggacaggggtggacctgagtttcgtctcctgtctctctggctgatgtcacctgaataaagccttcttccctggcaa

SEQ ID NO: 54486 - DNA, 2552 bp, Homo sapiens
  misc_feature (172)..(172): n is a, c, g, or t
aaagaaggaagaggtttattcagctgggagcatcagcagacttgcgtcaagagccgagctccctgaaaaagacattcttggcctttttaaaggcttacaactttaaggggtccacgtgaaagggtcgtgataaatcgagcaagctcggggaacgtgaccgggggctgcatgngtcagctaacagaacagaaagttttgcagtgctttctcatacaatgtctggaatttacagataacacaagtagtttaggtcaggggttgatattattatcacttttttttaactaccagggccaggtggtggcgccaaggtcttctggctatttctcttacttctgtttttttctaactttttgccttctctctttcctcctgtcttgtaaaccaggcaaggtggtaggaggagggcagcaggagtagtagtggtcttattccttaggggaggcattgagggaaggctgggagtggggggtcgagacttccttgctattctgggccataacattccacataatattataatagaatataattaatacaataatagttccccaccccacaccgggattcccagggcccactgccccactcctcctcctcaggctggccctcagctcagtgctcagccctgctgcacagcctctcctcctcctcctcaggctgcccctcagctcggagctcagccctgctgtgtggctctagcctggcgccctctgggcgttgacttcttctctgtggtctgggaggagatgtcgaggcccccgagggaggcggtggtgaaatcttggcttgcagcctccagcccgcccagagccagagtcaggcacgaggctagggcaactccgccccacccctcccccggggactggccctgcgttggacatttcttaacagcagggccaccaggcagagcgggacagccaggaggaagggcagcttggcagagcctcaggatggacccccttggggacacgctgcggcgactgcgggaggccttccacgcggggcgcacgcggccagctgagttccgggctgcgcagctccaaggcctgggccgcttcctgcaagaaaacaagcagcttctgcacgacgcactggcccaggacctgcacaagtcagccttcgagtcggaggtgtctgaggttgccatcagccagggcgaggtcaccctggccctcaggaacctccgggcctggatgaaggacgagcgtgtgcccaagaacctggccacgcagctggactccgccttcatccggaaggagccctttggcctggtcctcatcattgcgccctggaactatccgctgaacctgacgctggtgcccctcgtgggagccctcgctgcagggaactgtgtggtgctgaagccatcggagattagcaagaacgtcgagaagatcctggccgaggtgctgccccaatacgtggaccagagctgctttgctgtggtgctgggcgggccccaggagacggggcagctgctagagcacaggttcgactacatcttcttcacagggagccctcgtgtgggcaagattgttatgactgctgccgccaagcacctgacacctgtcaccctggagctggggggcaagaacccttgctacgtggacgacaactgcgacccccagaccgtggccaaccgcgtggcctggttccgctacttcaacgccggccagacctgcgtggcccccgactacgtcctatgcagccctgagatgcaggagaggctgctgcctgccctgcagagcaccatcacccgtttctatggcgacgacccccagagctccccaaacctgggccgcatcatcaaccagaaacagttccagcggctgcgggcattgctgggctgcggccgtgtggccattgggggccagagcgatgagagcgatcgctacatcgcccccacggtgctggtggatgtgcaggagatggagcctgtgatgcaggaggagatcttcgggcccatcctgcccatcgtgaacgtgcagagcttggacgaggccatcgagttcatcaaccggcgggagaagcccctggccctgtacgccttctccaacagcagccaggtggtcaagcgggtgctgacccagaccagcagcgggggcttctgtgggaacgacggcttcatgcacatgaccctggccagcctgccttttggaggagtgggtgccagtgggatgggccggtaccatggcaagttctccttcgacaccttctcccaccatcgcgcctgcctcctgcgcagcccggggatggagaagctcaacgccctccgctacccgccgcaatcgccgcgccgcctgaggatgctgctggtggccatggaggcccaaggctgcagctgcacactgctctgagcccttccccaggcccaggctgtagaccaccatgacagctgtcgcctgcggctggtggagacggggcctgggctcccgggcccgaggggacacgttgcagctccggcaccctcaagaggctgcttcttcctctggttttctctcctgcttagctctccttagcgtccaacatgggagccaggtggtgcttgg

SEQ ID NO: 54487 - DNA, 1800 bp, Homo sapiens
acttgttcagtgtcattttaatattttgaacatattaacttttaaagtacttgtctgcgacttccaacatttgtatcaattcttagatctgttttgattgcttgttttgtctggctgtgtcacactttcttgtctggacacccagtaatcttttattgtgtgctggacattactgatgctgttgtgacagtctggattttgtcttccttgaggagtgtcaagtcttgtgctggcaggcagttaatttactcacagttctgcttgatcctgttgtgccagtgggatgggccggtaccatggcaagttctccttcgacaccttctcccaccatcgcgcctgcctcctgcgcagcccggggatggagaagctcaacgccctccgctacccgccgcaatcgccgcgccgcctgaggatgctgctggtggccatggaggcccaaggctgcagctgcacactgctctgagcccttccccaggcccaggctgtagaccaccatgacagctgtcgcctgcggctggtggagacggggcctgggctcccgggcccgaggaggaaaaggattgccaaggctccagggcacccctcaaagcagcgcctgcctcctccctcctgggtcttccctctccctgcctcagcctcctccctcagccgctcccaaccatgagagccgaggtgggaggcatgggaaacagtgcagtgactcaccccctgcccccgcaccaaccacccatattcaggagaagaggacagacacggcacctctgagtcacccctctcctgtggagcgggcgtccgaggggccctggcatctgactcaggccacaccatggaatcactgcatccaaggccattcctgccctctctgagtctcagtttttccatttgttcagtggagagaattaaccattgatacctcctggctgggtgaggcggctcacacctgtaatcccagcactttgggaggccgaggcaggcggatcacctgaaatcaggagttcaagatcagcctggctaacatggcgaaaccccgtctctactaaaaatacaaaaattagcctggcgtggtggcgcatgcctgtaatcccagctactcaggaggctaaggcaggagaatcgcttgaacccgggaggtggaggttgccgtgagctgagattgcgtcactgaactccggcctgggtgacagaaggaggctctgccttaaaaaaaaaaaaaaaaaaaacctcctgggactgttgcaaggatgaaatgaaggattgagggattgagggattgctgagctggagctccaggtgtcctatctttctcagtggggtggcacggagcggggccgcctccctcttctctccaggcaggtggggctgtggttatgcgatagggtctcccttccctccagcccatgccagaggagcttgtaactctttatcctcatggtgcccactacgagtcatactcttccccatgctgctcatcctcctgggccccatccactcagccaaagcagaatgcagggtttcctgcctgacaacccttctcacctcccaagtcccacttttgaacaagctgatgattctgaaactggcccaatttcctaacaagccggatgcttgagaaacctacatttggacaatgagaggctgctcctgcggcctgcgggccacctcctcttccttggctcctgctttctttttagactatatcaacctacaactttagtcgggaagagggacaggggtggacctgagtttcgtctcctgtctctctggctgatgtcacctgaataaagccttcttccctggcaa

SEQ ID NO: 54488 - DNA, 1061 bp, Homo sapiens
gcccagcaaaggcaaaggagccctggaaggaaccacagagcccaggaagcactgtgccaggatggggcaggggtgagagtagagaaggcacagtggctcctgccggctttaatcctgccctctctgagtctcagtttttccatttgttcagtggagagaattaaccattgatacctcctggctgggtgaggcggctcacacctgtaatcccagcactttgggaggccgaggcaggcggatcacctgaaatcaggagttcaagatcagcctggctaacatggcgaaaccccgtctctactaaaaatacaaaaattagcctggcgtggtggcgcatgcctgtaatcccagctactcaggaggctaaggcaggagaatcgcttgaacccgggaggtggaggttgccgtgagctgagattgcgtcactgaactccggcctgggtgacagaaggaggctctgccttaaaaaaaaaaaaaaaaaaaacctcctgggactgttgcaaggatgaaatgaaggattgagggattgagggattgctgagctggagctccaggtgtcctatctttctcagtggggtggcacggagcggggccgcctccctcttctctccaggcaggtggggctgtggttatgcgatagggtctcccttccctccagcccatgccagaggagcttgtaactctttatcctcatggtgcccactacgagtcatactcttccccatgctgctcatcctcctgggccccatccactcagccaaagcagaatgcagggtttcctgcctgacaacccttctcacctcccaagtcccacttttgaacaagctgatgattctgaaactggcccaatttcctaacaagccggatgcttgagaaacctacatttggacaatgagaggctgctcctgcggcctgcgggccacctcctcttccttggctcctgctttctttttagactatatcaacctacaactttagtcgggaagagggacaggggtggacctgagtttcgtctcctgtctctctggctgatgtcacctgaataaagccttcttccctggcaa

SEQ ID NO: 54489 - DNA, 1486 bp, Homo sapiens
tctgcaagcccctgtgggtgcaggcaggtcaggggtgcccagaccctggggcggctgggtggtgcccatgaaggaggggcagccctggccacccagttcatgccaccccatctggcaggatggacccccttggggacacgctgcggcgactgcgggaggccttccacgcggggcgcacgcggccagctgagttccgggctgcgcagctccaaggcctgggccgcttcctgcaagaaaacaagcagcttctgcacgacgcactggcccaggacctgcacaaggtgggctggggttgggggtatgagagggtgcactggggcaggggggcatggagggcagctgggacagcaggggatgaagacacctgcgccctccatgaagcggggctaaaagcagctcctcccctaggccagagccacccttgcacattcatccagtcacttatttctgtattcatgcagcaactatttgctgagcacctactatgtgccaggtactgttctaggctctggggatatagcagagaataaaacacagttcccatgcctacgaagatgaccttctatcggagacaataaaacagcaaataaataattgcacagcaaggccgggcatggtggctcacacctgtagtcccagcactttgggaggccgaggtgggcggatcgcttgaggccaggagttcaagaccatcctggccaacatggcgaaaccccgtctctactaacaatacaaaaattagctggcgtggtggcgcatgcctgtaatcccagctactcaggaggctaaggcaggagaatcgcttgaacccgggaggtggaggttgccgtgagctgagattgcgtcactgaactccggcctgggtgacagaaggaggctctgccttaaaaaaaaaaaaaaaaaaaacctcctgggactgttgcaaggatgaaatgaaggattgagggattgagggattgctgagctggagctccaggtgtcctatctttctcagtggggtggcacggagcggggccgcctccctcttctctccaggcaggtggggctgtggttatgcgatagggtctcccttccctccagcccatgccagaggagcttgtaactctttatcctcatggtgcccactacgagtcatactcttccccatgctgctcatcctcctgggccccatccactcagccaaagcagaatgcagggtttcctgcctgacaacccttctcacctcccaagtcccacttttgaacaagctgatgattctgaaactggcccaatttcctaacaagccggatgcttgagaaacctacatttggacaatgagaggctgctcctgcggcctgcgggccacctcctcttccttggctcctgctttctttttagactatatcaacctacaactttagtcgggaagagggacaggggtggacctgagtttcgtctcctgtctctctggctgatgtcacctgaataaagccttcttccctggcaa

SEQ ID NO: 54490 - DNA, 1431 bp, Homo sapiens
tctgcaagcccctgtgggtgcaggcaggtcaggggtgcccagaccctggggcggctgggtggtgcccatgaaggaggggcagccctggccacccagttcatgccaccccatctggcaggatggacccccttggggacacgctgcggcgactgcgggaggccttccacgcggggcgcacgcggccagctgagttccgggctgcgcagctccaaggcctgggccgcttcctgcaagaaaacaagcagcttctgcacgacgcactggcccaggacctgcacaaggtgggctggggttgggggtatgagagggtgcactggggcaggggggcatggagggcagctgggacagcaggggatgaagacacctgcgccctccatgaagcggggctaaaagcagctcctcccctaggccagagccacccttgcacattcatccagtcacttatttctgtattcatgcagcaactatttgctgagcacctactatgtgccaggtactgttctaggctctggggatatagcagagaataaaacacagttcccatgcctacgaagatgaccttctatcggagacaataaaacagcaaataaataattgcacagcaaggccgggcatggtggctcacacctgtagtcccagcactttgggaggccgaggtgggcggatcgcttgaggccaggagttcaagaccatcctggccaacatggcgaaaccccgtctctactaacaatacaaaaattagctggcgtggtggcgcatgcctgtaatcccagctactcaggaggctaaggcaggagaatcgcttgaacccgggaggtggaggttgccgtgagctgagattgcgtcactgaactccggcctgggtgacagaaggaggctctgccttaaaaaaaaaaaaaaattgctgagctggagctccaggtgtcctatctttctcagtggggtggcacggagcggggccgcctccctcttctctccaggcaggtggggctgtggttatgcgatagggtctcccttccctccagcccatgccagaggagcttgtaactctttatcctcatggtgcccactacgagtcatactcttccccatgctgctcatcctcctgggccccatccactcagccaaagcagaatgcagggtttcctgcctgacaacccttctcacctcccaagtcccacttttgaacaagctgatgattctgaaactggcccaatttcctaacaagccggatgcttgagaaacctacatttggacaatgagaggctgctcctgcggcctgcgggccacctcctcttccttggctcctgctttctttttagactatatcaacctacaactttagtcgggaagagggacaggggtggacctgagtttcgtctcctgtctctctggctgatgtcacctgaataaagccttcttccctggcaa

SEQ ID NO: 54491 - DNA, 243 bp, Homo sapiens
tgtcttggcagtgtaaaggaacaagatggatggaaaaggtgtatagtggcagggtgtgcctttgtttccttattgaacagggcaccttgccatttgcagtatatggaaaattgaagaaatacagtctacttccgcaaaaggcacatacaaagggctctgtttagaccagagatcagcaaactatggtccgtgggccaaatacagcccagcacctgttttttgtttgttattttaagtgtataa

SEQ ID NO: 54492 - DNA, 742 bp, Homo sapiens
tgggaaaaggagagtttggcttaagtacaggatgccagcaggggaccaggagagaaagctagaaaggaagagaggatcacactgcaggcagccacgggaactagcctctaccttagaggatgaagaggagccactgaaggtctttgagcaaatcaatgttacaatatcactgagttgggaggctttatatacacttggagccttatcaataatttatcttttcagtttacaagcactctcaagtatgtatttaatcattctttaatgctttattaatggctcatctccttattagagcagtcaagccctggatgagacacatcatgtcccacatttgaccacacacacagtaggctagcttgaaattcagacttaaagctgcatggcttttaacagcctgtcacacacctccttcaactactaacaacagagaaaatatgaaaaactttaatttcctctgtcttcatccccagtgtctatttacaggcgctgatgaagaaaagaagtggcaggaagcatgagccagaaaaaaaaaaaaaaaggcctgaatcaagaagtatctggattcctcctgaaaaagtgagcataaaccatactgctagattttggaaatattcactaaagctaaaacatggctcgctattcttcaattattttaaccctcctcttcaagaaggaaatcattactataacttaagcttctagatttgtaccagtttttagctgctctgtaagtttgttt

SEQ ID NO: 54493 - DNA, 180 bp, Homo sapiens
cagcagcagaggaaaataatttattctttcttttcatctctttgtaagagcaaagaagactttcccaaaagcctccagcggattttctcacatctcgaattggtcagaactctatcacatgcctagatcaagcactggcaaggggaagggagccccatgatccattagtgtttcacccgt

SEQ ID NO: 54494 - DNA, 425 bp, Homo sapiens
  misc_feature (14)..(14): n is a, c, g, or t
  misc_feature (22)..(22): n is a, c, g, or t
  misc_feature (54)..(54): n is a, c, g, or t
taacggactcaacntatagggnaattttggccctcgaggcccaagaatttcggncacgaggagagagattcaataccctgtctctacaaaaaatacgtttgtttgtttgcttgtttgtttgtttgtttgtttgtttataaagatagttataaaactccacataaacttggaggttaagtaacaaactgagaacacttctataccaaccacctacatacacacacacacacacacacacacacacacatatacacacacacacacaaagttagccgggtgtgttagtgtgtgccagtggtcccagctcctcgggaggctgaagtgggaggatcctctgagcctgggagatcgaggttgcagtgagccatgatcatgtcactgcactccagcttgggtgacacagagagatcttgtcttaaaaaaaa

SEQ ID NO: 54495 - DNA, 383 bp, Homo sapiens
gcgattctcatgtctcagcctcatgagtaactgggattacaggtgcatgccaccatgcccaactaatttttgtatttttagtagagatggggtttcacctcgctggccaggctggtctcaaacccttgacttcaagtgatccacccacctcaacctcccaaagtgctgggatgacgggcatgagccaccatgcccagccgcatttgtttttataatacaggattcccaaaggagcactttaaagtctcttgcatgtaaaacagtaagcatcttgagaatacaaatgatgcaacctgattttatttaagtgctttttataattgttttaaatccacctagagtatacagaatgtgaatatcaagaaacccataaccgtgacttt

SEQ ID NO: 54496 - DNA, 6320 bp, Homo sapiens
  misc_feature (2261)..(2261): n is a, c, g, or t
  misc_feature (3413)..(3413): n is a, c, g, or t
  misc_feature (3438)..(3438): n is a, c, g, or t
  misc_feature (5246)..(5246): n is a, c, g, or t
  misc_feature (5390)..(5390): n is a, c, g, or t
  misc_feature (6246)..(6246): n is a, c, g, or t
  misc_feature (6262)..(6262): n is a, c, g, or t
  misc_feature (6266)..(6266): n is a, c, g, or t
  misc_feature (6271)..(6271): n is a, c, g, or t
ggatcgtggggaggtctggagtttgcagagcccacagcttcctttgcttttattaaagaatgggcaaggaccaggcttatagtaggtgctgacgttccgagtagaaactccttaatgagtgaatgcatgagtgaaggaatgaaggcagctggtttctgaacctggatgtagccatttgacaaactgcgcgcagtggctgagggggaaagccccgccccgcggagccccgcccccaggccgcacgccctcgcgtctcctagcaaccgccaaacgtagctgagtggctgggcctgcggccctccctgcaccggcggacgctcctctcagtcttggagtctcttcgcccaggtggctgtggatccggtacgggagttgccgccgcggtccaactccccgctgccgcccagcgcatccgctcgcaggagcgccggcggccagcagtgcgctctgcagcatgtcgctacatgcctgggagtgggaagaggaccccgcaagcatagagcccatctcctccatcactagcttttaccagtccacgagcgagtgtgacgtggaggaacacctgaaggccaaggccagggcccaggagtctgactctgaccgcccgtgcagcagcatcgagtcctcatctgagcctgccagcactttcagctccgacgtgccccacgtggtcccctgcaaattcaccatctcactggccttccctgtgaatatgggtcagaagggaaaatatgcaagtttgattgaaaaatataagaaacaccctaaaacagacagttctgttacaaagatgcgtcgtttttaccacattgagtatttccttctgccggacgatgaagaacctaaaaaagttgacatattgctatttccaatggtggccaaagtattcctggagtcaggagtaaagactgtgaagccgtggcacgaaggtgacaaagcctgggtgtcgtgggagcagacttttaatatcactgtgacaaaggaattattaaagaaaataaatttccacaaaatcaccttgaggctctggaacactaaagacaagatgtcaagaaaagtcagatattaccgattaaagactgccggcttcacagacgacgtgggagcttttcataagtcagaagtgagacatttggttttaaatcagagaaaattatctgaacagggcattgagaataccaacattgtcagagaagagtcgaaccaggaacatccgccaggaaaacaagaaaaaacagaaaaacacccaaagtctttgcaaggttctcaccaagcagagcccgaaacttcttccaagaacagtgaggaatatgagaagtccctcaaaatggacgattcttccacgattcaatggagtgtttcaagaacaccaaccatttctttggcaggagcaagcatgatggagatcaaggaattaattgagagtgaatcacttagcagcttaacaaacatattagacagacaaaggtctcaaattaaagggaaagattcagagggaagaaggaaaatccagaggagacataagaagcccctggcagaagaagaggcagaccccacgctgacaggccccaggaagcagagcgctttctccatccagctggccgtcatgccgctccttgccggtacccactgcttgccctgttcccagcagctcctgcttgtcttgtggccagaacggccataagcggatgctcctaatgacaaccctgctgcgtgccacctcatttcatcctcacagccacctcaggaaactcaggggaattggcttcatagtacagggggaaacaaaggcccagagagggtagctaccttgcctgagatcacacagctaggaaatgtgaagcctggacttgaacccagctctgtttgattccaaaatccaaggaagcctatgggaatattaaatgtcatcattgtgtttgttaagaagatgctgcttttaataaatgctttcctacagatttttacaaaaacatctagtaaagggaatgaggaaagggaaccctttttgactgagcccctctgggtgcaggcacttcccgtgtgacacatcacttacttctcagaccaaattctgacccactcagccaacctgtggtgtggtggtggctgtggtggttatcatagttaccatttttttcagtgaggaaaagaactcaaagaggttaagtaactttcctaatcccacacagctcagtggccaaacagggatttaattattttgctttataagatctaccacaatttatgaactggacttnatacatactggtaaatcataactaaatattatatcaatatgttttgatgattgaaagctcagcatatattttggtaaaattatgttgctttgttccaaaaaagagtaatatggggtgaactccccccctttttttttctttttagagaaaattcagactttgttcgtttttttgccatcacgtgtcttgtgcgccctctcctggctactctgcagaagcgcgtgcgttggtcttttctgagctggaaccagcattcatagagaagggggcaaaaaccccgtaagtcagagcctccagttcagttccacaggtgccagtcgtcatcctcctctcgcgctcttgggttggtgtcaattcagtttgagaaagtgctattaacttttcagtttgcactttttttttttttgagatagggtcttgctctctcacccaggctggagtgtaagtgacatgatcatagctcactccagcctgaagcaagcctcccgcctctgccacccgcatagctaagactacaggtgcacaccaccacacctggctattttttttattttctgtagagacaaggtcttgctatgttgcccaggctggtctcaaactcctggtcacaagtaatcctcctgcttcagcctctcagagttctagaattacaggcatgagctgccgcatttggcagtttgcagttttaaatgactttttgaaaatgatacttcacctacagcttgtccttcctgatcaccttcactttctcgtagcatcagaacctcttgagaggcaacagtgacagagagtaaactttcagagggtcttaccccaccccacgctccagcctgaccctccagcatacctattgcacacagtagctttgagcgaacgcctttgctagctgcttccttcgtcctacagtcccaaggaggaacccatgatcctcctgggggagcgtaccatgggacctgccccgctttggattttactgtgagaggaaaaagaagttcaaccatttgggcctgcctggcatgactgtttccagcagaatgaagccaggacatggtcccctctctcttttttttttttcgagatggagtcttgctctgtcgcccaggctggagtgcagtggcgcgatctcggctcactacagcctctgcccccccnggtttaagcaattctcctgcctcancctctagagtagctgggattacaggcgcatgccaccatgccaggctaatttttgtattttttgtagagatggggtttcacaattttggccaggctggtcttgaactcctgacctcgtgattgtcttacatgtccgtgtgaagagaccaaacaggctttgtgtaagtaacaaggctgtttatttcacctgggtgcaggcaggctgagtctgaaaagagagtcagcaaagggtggtgggattatcattagttcttacaggttttgggataggcagtggagttaagagcaatgttttgggggcagggggtggatctcacaaagtacattctcaagggtggggagaattacaaaaaaaccttcttaagggtgggggagattataaagaaccttcttaagtgtgggggagattacaaagtacattgatagttagggtggggcagaaacaaatcacaatggtggaatgtcatcagttaaggctattttcacttcttttgtggatcttcagttgcttcaggccatctggatgtatacatgcaggtcactggggatatgatggcttagcttgggctcagaggcctgacagtgatccacctgcctcagcctcccaaagtgctgggattacaggcgtgagctaccgcactggacctagcctcccctctctataacctgccccgtcatgtacaatgctgtacagtgcaggggttcacatgtaagaactttggtgaccaaaacactttgatcatggctcagccacttaccagcaagttacctactttctctgagtctcactttcctcctctgtgaaatgggggtgattactcctacctcagagcgttgttttaaggatcacaggagctgacgtgtgtaaactgcttagcacagtgggacccagggggtgcaggtgtggaggcagcagctgtcctgaggccatgtgtgtgggccgctccattatacccatgacatagcctatggtcatcgacagagaacgggtcagctcagcaggccagttgtatgtctggttttgccagaaactaatagcataagattatttactgtaagcccagcataattatttttggtaatcatcttcaatttcaaattaggccatagatcatgtatgtataccttattagtaaatattggttggctagtaacccagtaagattctagaaagattctgtgtctgggaatgagctcttattttaaaaggatagtattgcatagcggaggggccccacttagcccaacagaactggtttggatgctggttctacaacgtattttctaagagaccttggatgattgcgtcagaactctgggcctcatttcccccatctgtaatgtggagatgacagcaaccacacaaggttaaggatgaaatgacattagcgcagtttgggacgggctgttggaggagcacaaacattcccttacaccattccactcttaaccagggctcttaactcagggggcttgtgtctgctggggacacttggctgtgtgtggaggcattttggttggcacgactgagagtgggatgccactggcatctagtaagatactgttaaacatgccataatgcacaggactgtcccctgagcaaagaatggtctgccccaactgtcagcagtgtggaggctgtgagcccgcagcctggaattctgttctggtgtatgtctccctgactctgatgatttgagcactttttttttatttttatttttgcaatggggattccttctaccttgagtagtcttttttttttttttgagacggagttttgctcttgttgcccaggctggagtacantggcgcgatctcagctcaccgcaacctccgcctcccgggttcaagcgattctcctgcattagccttcctgagtagttgggaatacaggcatgcgctaccacgtccggctgattttgtatttttggtagagacgaggtttctccnttttggtcaggctggtctcaaactcccgacttcaggtgatccgcctgcctcggcctgccaaactgctgggattataggcgtgagccaccgtacccggcctacccttgggtagtctttcatgtgaaaaggctcacaaaattatagaacacaggcgtaatgggtgacagcttttatgaatcagctttgttaaagaggatcctgcgggagcatgagggctacccccaggagctgtgcacgcctctgttcacagcctgtgcagatggctgtgcacacctggcccgggacttgttttagaagtgcctactctttctgaatgtgagcgacttggcttttacatgccctagaaatacatttacaggcatgttgaaaggaatagactgatctttttgagcaccatctcatatatcatctttcttaatcctttaaacccaaggaaggtggtgtctatccccatttcgaagatgaaattgagccttggagactctagcttatcacatgacaaagagtcagatctgggattcaaacccaggtcaatcctgcctccaaaacttgaggtgattttttttgtttatttgttttgttttttccttacctagtacatctctgactggtgaaatacatggataccttttatagaaaaagcattctgggctgggtgtggtggctcacgcctgtaatccctacactttgggaggccgaggcgggtggatcacgaggtcaggagatcgagaacagcctggctaacacggtgaaaccccgtctttactaacaatacaaaaaattagccaggcatgttgtcgggcacctgtagtcccagctacttgggaggctgaggcaggagaatggcgtgaacccnggaggcgtagctagcngtgngccangaccgtgccactgtactccagcctgggcagcagagcaagactctgtctc

SEQ ID NO: 54497 - DNA, 6023 bp, Homo sapiens
  misc_feature (1964)..(1964): n is a, c, g, or t
  misc_feature (3116)..(3116): n is a, c, g, or t
  misc_feature (3141)..(3141): n is a, c, g, or t
  misc_feature (4949)..(4949): n is a, c, g, or t
  misc_feature (5093)..(5093): n is a, c, g, or t
  misc_feature (5949)..(5949): n is a, c, g, or t
  misc_feature (5965)..(5965): n is a, c, g, or t
  misc_feature (5969)..(5969): n is a, c, g, or t
  misc_feature (5974)..(5974): n is a, c, g, or t
acaagtagtacttcacatcttgatagaccttgctttgttttgttttcatctgcttacttgaactagcccaccattatgatttcaacttctcctggtattctgtcgatggtgtaagtttcttgtatgggttggaaccccgagagcgcaccaacagacaacacgaggcggtgtggagcaacatgctgtttcaatgaacgccttggtgcaggccggctgaggcctaaaatggcgtcagccccaagtgaggacggggcaaaggttttatagtctcctgtaaacaggaagtgtcctagtctggcgtaactgctacgctgtacccggatggcctctttctcatcttcatgtcttccggccagggtaggtgtattccagccggctctcctcctgcttctgctattttgctggtgcacgctgctgacgtcagaagggaaaatatgcaagtttgattgaaaaatataagaaacaccctaaaacagacagttctgttacaaagatgcgtcgtttttaccacattgagtatttccttctgccggacgatgaagaacctaaaaaagttgacatattgctatttccaatggtggccaaagtattcctggagtcaggagtaaagactgtgaagccgtggcacgaaggtgacaaagcctgggtgtcgtgggagcagacttttaatatcactgtgacaaaggaattattaaagaaaataaatttccacaaaatcaccttgaggctctggaacactaaagacaagatgtcaagaaaagtcagatattaccgattaaagactgccggcttcacagacgacgtgggagcttttcataagtcagaagtgagacatttggttttaaatcagagaaaattatctgaacagggcattgagaataccaacattgtcagagaagagtcgaaccaggaacatccgccaggaaaacaagaaaaaacagaaaaacacccaaagtctttgcaaggttctcaccaagcagagcccgaaacttcttccaagaacagtgaggaatatgagaagtccctcaaaatggacgattcttccacgattcaatggagtgtttcaagaacaccaaccatttctttggcaggagcaagcatgatggagatcaaggaattaattgagagtgaatcacttagcagcttaacaaacatattagacagacaaaggtctcaaattaaagggaaagattcagagggaagaaggaaaatccagaggagacataagaagcccctggcagaagaagaggcagaccccacgctgacaggccccaggaagcagagcgctttctccatccagctggccgtcatgccgctccttgccggtacccactgcttgccctgttcccagcagctcctgcttgtcttgtggccagaacggccataagcggatgctcctaatgacaaccctgctgcgtgccacctcatttcatcctcacagccacctcaggaaactcaggggaattggcttcatagtacagggggaaacaaaggcccagagagggtagctaccttgcctgagatcacacagctaggaaatgtgaagcctggacttgaacccagctctgtttgattccaaaatccaaggaagcctatgggaatattaaatgtcatcattgtgtttgttaagaagatgctgcttttaataaatgctttcctacagatttttacaaaaacatctagtaaagggaatgaggaaagggaaccctttttgactgagcccctctgggtgcaggcacttcccgtgtgacacatcacttacttctcagaccaaattctgacccactcagccaacctgtggtgtggtggtggctgtggtggttatcatagttaccatttttttcagtgaggaaaagaactcaaagaggttaagtaactttcctaatcccacacagctcagtggccaaacagggatttaattattttgctttataagatctaccacaatttatgaactggacttnatacatactggtaaatcataactaaatattatatcaatatgttttgatgattgaaagctcagcatatattttggtaaaattatgttgctttgttccaaaaaagagtaatatggggtgaactccccccctttttttttctttttagagaaaattcagactttgttcgtttttttgccatcacgtgtcttgtgcgccctctcctggctactctgcagaagcgcgtgcgttggtcttttctgagctggaaccagcattcatagagaagggggcaaaaaccccgtaagtcagagcctccagttcagttccacaggtgccagtcgtcatcctcctctcgcgctcttgggttggtgtcaattcagtttgagaaagtgctattaacttttcagtttgcactttttttttttttgagatagggtcttgctctctcacccaggctggagtgtaagtgacatgatcatagctcactccagcctgaagcaagcctcccgcctctgccacccgcatagctaagactacaggtgcacaccaccacacctggctattttttttattttctgtagagacaaggtcttgctatgttgcccaggctggtctcaaactcctggtcacaagtaatcctcctgcttcagcctctcagagttctagaattacaggcatgagctgccgcatttggcagtttgcagttttaaatgactttttgaaaatgatacttcacctacagcttgtccttcctgatcaccttcactttctcgtagcatcagaacctcttgagaggcaacagtgacagagagtaaactttcagagggtcttaccccaccccacgctccagcctgaccctccagcatacctattgcacacagtagctttgagcgaacgcctttgctagctgcttccttcgtcctacagtcccaaggaggaacccatgatcctcctgggggagcgtaccatgggacctgccccgctttggattttactgtgagaggaaaaagaagttcaaccatttgggcctgcctggcatgactgtttccagcagaatgaagccaggacatggtcccctctctcttttttttttttcgagatggagtcttgctctgtcgcccaggctggagtgcagtggcgcgatctcggctcactacagcctctgcccccccnggtttaagcaattctcctgcctcancctctagagtagctgggattacaggcgcatgccaccatgccaggctaatttttgtattttttgtagagatggggtttcacaattttggccaggctggtcttgaactcctgacctcgtgattgtcttacatgtccgtgtgaagagaccaaacaggctttgtgtaagtaacaaggctgtttatttcacctgggtgcaggcaggctgagtctgaaaagagagtcagcaaagggtggtgggattatcattagttcttacaggttttgggataggcagtggagttaagagcaatgttttgggggcagggggtggatctcacaaagtacattctcaagggtggggagaattacaaaaaaaccttcttaagggtgggggagattataaagaaccttcttaagtgtgggggagattacaaagtacattgatagttagggtggggcagaaacaaatcacaatggtggaatgtcatcagttaaggctattttcacttcttttgtggatcttcagttgcttcaggccatctggatgtatacatgcaggtcactggggatatgatggcttagcttgggctcagaggcctgacagtgatccacctgcctcagcctcccaaagtgctgggattacaggcgtgagctaccgcactggacctagcctcccctctctataacctgccccgtcatgtacaatgctgtacagtgcaggggttcacatgtaagaactttggtgaccaaaacactttgatcatggctcagccacttaccagcaagttacctactttctctgagtctcactttcctcctctgtgaaatgggggtgattactcctacctcagagcgttgttttaaggatcacaggagctgacgtgtgtaaactgcttagcacagtgggacccagggggtgcaggtgtggaggcagcagctgtcctgaggccatgtgtgtgggccgctccattatacccatgacatagcctatggtcatcgacagagaacgggtcagctcagcaggccagttgtatgtctggttttgccagaaactaatagcataagattatttactgtaagcccagcataattatttttggtaatcatcttcaatttcaaattaggccatagatcatgtatgtataccttattagtaaatattggttggctagtaacccagtaagattctagaaagattctgtgtctgggaatgagctcttattttaaaaggatagtattgcatagcggaggggccccacttagcccaacagaactggtttggatgctggttctacaacgtattttctaagagaccttggatgattgcgtcagaactctgggcctcatttcccccatctgtaatgtggagatgacagcaaccacacaaggttaaggatgaaatgacattagcgcagtttgggacgggctgttggaggagcacaaacattcccttacaccattccactcttaaccagggctcttaactcagggggcttgtgtctgctggggacacttggctgtgtgtggaggcattttggttggcacgactgagagtgggatgccactggcatctagtaagatactgttaaacatgccataatgcacaggactgtcccctgagcaaagaatggtctgccccaactgtcagcagtgtggaggctgtgagcccgcagcctggaattctgttctggtgtatgtctccctgactctgatgatttgagcactttttttttatttttatttttgcaatggggattccttctaccttgagtagtcttttttttttttttgagacggagttttgctcttgttgcccaggctggagtacantggcgcgatctcagctcaccgcaacctccgcctcccgggttcaagcgattctcctgcattagccttcctgagtagttgggaatacaggcatgcgctaccacgtccggctgattttgtatttttggtagagacgaggtttctccnttttggtcaggctggtctcaaactcccgacttcaggtgatccgcctgcctcggcctgccaaactgctgggattataggcgtgagccaccgtacccggcctacccttgggtagtctttcatgtgaaaaggctcacaaaattatagaacacaggcgtaatgggtgacagcttttatgaatcagctttgttaaagaggatcctgcgggagcatgagggctacccccaggagctgtgcacgcctctgttcacagcctgtgcagatggctgtgcacacctggcccgggacttgttttagaagtgcctactctttctgaatgtgagcgacttggcttttacatgccctagaaatacatttacaggcatgttgaaaggaatagactgatctttttgagcaccatctcatatatcatctttcttaatcctttaaacccaaggaaggtggtgtctatccccatttcgaagatgaaattgagccttggagactctagcttatcacatgacaaagagtcagatctgggattcaaacccaggtcaatcctgcctccaaaacttgaggtgattttttttgtttatttgttttgttttttccttacctagtacatctctgactggtgaaatacatggataccttttatagaaaaagcattctgggctgggtgtggtggctcacgcctgtaatccctacactttgggaggccgaggcgggtggatcacgaggtcaggagatcgagaacagcctggctaacacggtgaaaccccgtctttactaacaatacaaaaaattagccaggcatgttgtcgggcacctgtagtcccagctacttgggaggctgaggcaggagaatggcgtgaacccnggaggcgtagctagcngtgngccangaccgtgccactgtactccagcctgggcagcagagcaagactctgtctc

SEQ ID NO: 54498 - DNA, 5130 bp, Homo sapiens
  misc_feature (1071)..(1071): n is a, c, g, or t
  misc_feature (2223)..(2223): n is a, c, g, or t
  misc_feature (2248)..(2248): n is a, c, g, or t
  misc_feature (4056)..(4056): n is a, c, g, or t
  misc_feature (4200)..(4200): n is a, c, g, or t
  misc_feature (5056)..(5056): n is a, c, g, or t
  misc_feature (5072)..(5072): n is a, c, g, or t
  misc_feature (5076)..(5076): n is a, c, g, or t
  misc_feature (5081)..(5081): n is a, c, g, or t
ggatcgtggggaggtctggagtttgcagagcccacagcttcctttgcttttattaaagaatgggcaaggaccaggcttatagtaggtgctgacgttccgagtagaaactccttaatgagtgaatgcatgagtgaaggaatgaaggcagctggtttctgaacctggatgtagccatttgacaaactgcgcgcagtggctgagggggaaagccccgccccgcggagccccgcccccaggccgcacgccctcgcgtctcctagcaaccgccaaacgtagctgagtggctgggcctgcggccctccctgcaccggcggacgctcctctcagtcttggagtctcttcgcccaggtggctgtggatccggtacgggagttgccgccgcggtccaactccccgctgccgcccagcgcatccgctcgcagctccttgccggtacccactgcttgccctgttcccagcagctcctgcttgtcttgtggccagaacggccataagcggatgctcctaatgacaaccctgctgcgtgccacctcatttcatcctcacagccacctcaggaaactcaggggaattggcttcatagtacagggggaaacaaaggcccagagagggtagctaccttgcctgagatcacacagctaggaaatgtgaagcctggacttgaacccagctctgtttgattccaaaatccaaggaagcctatgggaatattaaatgtcatcattgtgtttgttaagaagatgctgcttttaataaatgctttcctacagatttttacaaaaacatctagtaaagggaatgaggaaagggaaccctttttgactgagcccctctgggtgcaggcacttcccgtgtgacacatcacttacttctcagaccaaattctgacccactcagccaacctgtggtgtggtggtggctgtggtggttatcatagttaccatttttttcagtgaggaaaagaactcaaagaggttaagtaactttcctaatcccacacagctcagtggccaaacagggatttaattattttgctttataagatctaccacaatttatgaactggacttnatacatactggtaaatcataactaaatattatatcaatatgttttgatgattgaaagctcagcatatattttggtaaaattatgttgctttgttccaaaaaagagtaatatggggtgaactccccccctttttttttctttttagagaaaattcagactttgttcgtttttttgccatcacgtgtcttgtgcgccctctcctggctactctgcagaagcgcgtgcgttggtcttttctgagctggaaccagcattcatagagaagggggcaaaaaccccgtaagtcagagcctccagttcagttccacaggtgccagtcgtcatcctcctctcgcgctcttgggttggtgtcaattcagtttgagaaagtgctattaacttttcagtttgcactttttttttttttgagatagggtcttgctctctcacccaggctggagtgtaagtgacatgatcatagctcactccagcctgaagcaagcctcccgcctctgccacccgcatagctaagactacaggtgcacaccaccacacctggctattttttttattttctgtagagacaaggtcttgctatgttgcccaggctggtctcaaactcctggtcacaagtaatcctcctgcttcagcctctcagagttctagaattacaggcatgagctgccgcatttggcagtttgcagttttaaatgactttttgaaaatgatacttcacctacagcttgtccttcctgatcaccttcactttctcgtagcatcagaacctcttgagaggcaacagtgacagagagtaaactttcagagggtcttaccccaccccacgctccagcctgaccctccagcatacctattgcacacagtagctttgagcgaacgcctttgctagctgcttccttcgtcctacagtcccaaggaggaacccatgatcctcctgggggagcgtaccatgggacctgccccgctttggattttactgtgagaggaaaaagaagttcaaccatttgggcctgcctggcatgactgtttccagcagaatgaagccaggacatggtcccctctctcttttttttttttcgagatggagtcttgctctgtcgcccaggctggagtgcagtggcgcgatctcggctcactacagcctctgcccccccnggtttaagcaattctcctgcctcancctctagagtagctgggattacaggcgcatgccaccatgccaggctaatttttgtattttttgtagagatggggtttcacaattttggccaggctggtcttgaactcctgacctcgtgattgtcttacatgtccgtgtgaagagaccaaacaggctttgtgtaagtaacaaggctgtttatttcacctgggtgcaggcaggctgagtctgaaaagagagtcagcaaagggtggtgggattatcattagttcttacaggttttgggataggcagtggagttaagagcaatgttttgggggcagggggtggatctcacaaagtacattctcaagggtggggagaattacaaaaaaaccttcttaagggtgggggagattataaagaaccttcttaagtgtgggggagattacaaagtacattgatagttagggtggggcagaaacaaatcacaatggtggaatgtcatcagttaaggctattttcacttcttttgtggatcttcagttgcttcaggccatctggatgtatacatgcaggtcactggggatatgatggcttagcttgggctcagaggcctgacagtgatccacctgcctcagcctcccaaagtgctgggattacaggcgtgagctaccgcactggacctagcctcccctctctataacctgccccgtcatgtacaatgctgtacagtgcaggggttcacatgtaagaactttggtgaccaaaacactttgatcatggctcagccacttaccagcaagttacctactttctctgagtctcactttcctcctctgtgaaatgggggtgattactcctacctcagagcgttgttttaaggatcacaggagctgacgtgtgtaaactgcttagcacagtgggacccagggggtgcaggtgtggaggcagcagctgtcctgaggccatgtgtgtgggccgctccattatacccatgacatagcctatggtcatcgacagagaacgggtcagctcagcaggccagttgtatgtctggttttgccagaaactaatagcataagattatttactgtaagcccagcataattatttttggtaatcatcttcaatttcaaattaggccatagatcatgtatgtataccttattagtaaatattggttggctagtaacccagtaagattctagaaagattctgtgtctgggaatgagctcttattttaaaaggatagtattgcatagcggaggggccccacttagcccaacagaactggtttggatgctggttctacaacgtattttctaagagaccttggatgattgcgtcagaactctgggcctcatttcccccatctgtaatgtggagatgacagcaaccacacaaggttaaggatgaaatgacattagcgcagtttgggacgggctgttggaggagcacaaacattcccttacaccattccactcttaaccagggctcttaactcagggggcttgtgtctgctggggacacttggctgtgtgtggaggcattttggttggcacgactgagagtgggatgccactggcatctagtaagatactgttaaacatgccataatgcacaggactgtcccctgagcaaagaatggtctgccccaactgtcagcagtgtggaggctgtgagcccgcagcctggaattctgttctggtgtatgtctccctgactctgatgatttgagcactttttttttatttttatttttgcaatggggattccttctaccttgagtagtcttttttttttttttgagacggagttttgctcttgttgcccaggctggagtacantggcgcgatctcagctcaccgcaacctccgcctcccgggttcaagcgattctcctgcattagccttcctgagtagttgggaatacaggcatgcgctaccacgtccggctgattttgtatttttggtagagacgaggtttctccnttttggtcaggctggtctcaaactcccgacttcaggtgatccgcctgcctcggcctgccaaactgctgggattataggcgtgagccaccgtacccggcctacccttgggtagtctttcatgtgaaaaggctcacaaaattatagaacacaggcgtaatgggtgacagcttttatgaatcagctttgttaaagaggatcctgcgggagcatgagggctacccccaggagctgtgcacgcctctgttcacagcctgtgcagatggctgtgcacacctggcccgggacttgttttagaagtgcctactctttctgaatgtgagcgacttggcttttacatgccctagaaatacatttacaggcatgttgaaaggaatagactgatctttttgagcaccatctcatatatcatctttcttaatcctttaaacccaaggaaggtggtgtctatccccatttcgaagatgaaattgagccttggagactctagcttatcacatgacaaagagtcagatctgggattcaaacccaggtcaatcctgcctccaaaacttgaggtgattttttttgtttatttgttttgttttttccttacctagtacatctctgactggtgaaatacatggataccttttatagaaaaagcattctgggctgggtgtggtggctcacgcctgtaatccctacactttgggaggccgaggcgggtggatcacgaggtcaggagatcgagaacagcctggctaacacggtgaaaccccgtctttactaacaatacaaaaaattagccaggcatgttgtcgggcacctgtagtcccagctacttgggaggctgaggcaggagaatggcgtgaacccnggaggcgtagctagcngtgngccangaccgtgccactgtactccagcctgggcagcagagcaagactctgtctc

SEQ ID NO: 54499 - DNA, 357 bp, Homo sapiens
ggtatgaattttatcataaattaagtaactctacattccattaactctctttttaaatagttcaaatgggggggacagtaattttttttaatacttatgaagtgttacctcaaaataatattgcccatggatatcaaatcagtctgaatgaacataactgaaaaatattcagaatgcttgaaatgacttagaagtaatctttaagagctaaccctaggggcccagtcctcctttcatagaggtgagctccttagctgaaatacatctctaaaagaccttctgtgaaaagtgagaggtgcaaaagttcctgaatgaccaaataccctgctgccaaaacgaaaagcaatttcatttaaa

SEQ ID NO: 54500 - DNA, 458 bp, Homo sapiens
acattgtggcaggacaaagatgtattaaaaaattaacggacaatcagacctcaaccatgatcagagcgactgctaggtcggcgcccgatcggcaagaagagattagcaaattgatgcgaagtgcaagtttcaacacagatccatacgtccgtgaatttggaatcatggtcaaagatgagatgacagacgtgactgggcgggtgctgcagccgccctccatcctctacgggggcaggaataaagctattgcgacccctgtccagggcgtctgggacatgcggaacaagcagttccacacgggcatcgagatcaaggtgtgggccattgcgtgcttcgccccccagcgccagtgcacggaagtccatctgaagtccttcacagagcagctcagaaagatctcgagagacgccggcatgcccatccagggccagccgtgcttctgcaaatacgcgcagggg

SEQ ID NO: 54501 - DNA, 252 bp, Homo sapiens
ctcctattcacccatgtaccccaaaagtccctgaataagaatcatgtttttggggcagaatacaaaccactgccccaaaatggcttctttctccaaacagtcccagatgaaaggcacataattcatgtcttaaggctacttttccagcccctttaatactctgggatctatgtgtttcccacattccaagttatctttcacaagccttttaagaacaacatgcacaaaataaatggacaagaactacaaagt

SEQ ID NO: 54502 - DNA, 590 bp, Homo sapiens
aaactggcttgccttcatcatctctgcagggatcagtaaagattagaaatggattatttaccttgttatacaaatacacctcctccctacacccaagaattgagaggaagatgagctgttcctgtgttaacgcctgaatcaatcccattatctgcatttctgtgtgtggttagcgctccagcagcctaaggcgggagctggaaatgacagccttggagacgaggaaggctccagggaggacggagaggaacacctgctgaagaataagacgggcggcaccagccgggctgatttggggaacggaaggtaacagaggtgatgcttctatcgctttacaggtctggaaagacggatgcctcaccaactgggtttctgatccgagaaaaattgaaagacaaacatggctgggggaagcaaaacgctgacacacaattcaggtggcccagcagtgctgacctgcaatccaccccaccccaaggcagccctttcaatccaaagtggacagagtgggccttatcccagaatcactcaggaagcttcttcaaacatatgactgccacacccgcccccaaggttcagaaacatcttcg

SEQ ID NO: 54503 - DNA, 152 bp, Homo sapiens
tcgtccaagtaatgaaggctataaaacatcttcagtaagtccccagattgtggattttgcggttgtttgtgatctgcacgtcttaactacctctgagtcttagtaatctgtcactgtccagcctagctcatgtgccccctttcctgctctag

SEQ ID NO: 54504 - DNA, 163 bp, Homo sapiens
gaaataagaaacagcttgtatataactaatgctttgagggagaaattcaaatggctatgaaaaaatatttataattcaatgataataaaaatcttacacgttaaaacttgagaatgtagttaaagcaatacttggacataaacttagcacatattagtaaaga

SEQ ID NO: 54505 - DNA, 830 bp, Homo sapiens
cccttagtgggtggggggggcgattgaattcccacagtgagtccagcccaccgaagctcagaggattcctaaccttcctcttcagagagcctcagaagtacaatgctgattatgatctgtcagctcagcaaggggcagacaccctggccttcatgtctctcctggaggagaagttgatcccggtgctggtacatactttttggatagacaccaagaactacgtagaagtgacccggaagtggtatgcagaggctatgccctttcccctcaacttcttcctgcctggccgcatgcagcggcagtacatggaacggctacagctgctgactggggagcacaggcctgaggacgaggaagagctggagaaggagctgtaccgagaggctcgggagtgtctgaccctgctctctcagcgcctgggctctcaaaagttcttctttggagatgcgtgagtctgactccaagagggtaatgggtggcttggaagaagatacaggttcagatggagcagctggagctggggctggggctggggctggctcaggctctggataggaggtccctgagacagatactggccctggtgacagtggggctgtgcgtggggccagagccttctcagaggtacaaaagggtagggtgggagggcagccaggcacaggaagggcctgaagagctgtggggcactgagtgtgccctttatgcagccctgggatagagccctattcagggccaggctggcgccacctggggatctctccccataccaggtctagaactgtgtgtcctgtccttccctggtggccgcctgctgcccagagcccacctcc

SEQ ID NO: 54506 - DNA, 378 bp, Homo sapiens
ctgaattggaggtggggatgaagtcaacagttctgcccatatcaatgaaagaaggttctgagtgaaatgcagggttgaacaagcagaaaagcatcccagtgctctttaaatgtggttgcacagtagggatccttctctaggagataatgagaagatgttgtcagatctgctttgaatcagatgtttatttacttttattctttcttaaggaatttatgaaatcactgcactctcatcaatttgctctccttctctaaactcctaatgatatttctcatgacagattaaaaacagaattttggaagccctagtcacatgccaaataaggtttcttacctgagagagttatccgcagtttcagatgccaaagggaaactc

SEQ ID NO: 54507 - DNA, 178 bp, Homo sapiens
aagtgagattttgagaagttaagtgatttctggaaggttattcaactaatagagtggcagaggtgggaatccaggtggctggttttagagcttgagtcctggccctgtgctatattggggagctgatgtatttaaaaaaatagcagggaatttcagcctttcctgttgagcctcttgg

SEQ ID NO: 54508 - DNA, 615 bp, Homo sapiens
gttcagtattttttcccttacacgattgcttggcaaaccccccaaactgtgtgtttcctctgctgtcacaccacaataacagtcatcaacacagaagatgacttaatgtgaccaaatgttgggggagttttccctgcaccccaagcagcagacactggctgggtgtcctctaactcagttccgatgctctctacctggggacagcgtcagatccacagactgagggctcagtcccacaagaccgctccctccttcccaccagcgcaggtccaggcctctagaacttctgacctactggcttccaattagggttcccacaacctcctctttgggtttgattaatttcctagagcggctcacagaactcagggaaacacttgtgtttaggggtttattacgagggattttctttaaaggagacaggtaaacagccagatgaagagatacagagggtgaggtctggaagggtcccaagcgcaggagcttctgtcctcatggaggtggcgcggcgcctcccggcgtgtggatgagttcttaccttcctattgggccctgtgtgtttagcaatccagaagctctctgaacccagtccttttaggtttttatggaggcttc

SEQ ID NO: 54509 - DNA, 725 bp, Homo sapiens
atggaccagaggggttacctgtgctctaacacagggcaggtgcagaagtgtgggctgcaaaaccagactgaagcacagcccaggaagacttggaatgctgccactgactccctggggtgcaaggcttgggcaggtggtgctatctattaagcatgcctccaagagctgaatctagaaaccagaagtataagcatgtattcttctagatcagtagtcaagttagaaaaactaaatgcccatcaatccctggggtgaagcataaaaaatgcagaataaggtcaagtcttacagacagcagcagaggaccggcggagaagaagtaagtgacaagagggaagagcccaggccacccacccagttcacagatccagactttctgaatggaaaacgcctgaccaaagccctcacacagccagcttcagagtgggaacctgggccccgcactgcccaaggcccctcggatgcaatggtcgagagaatgcaagcctctgaaattcctgcctagggctcctctgaagacccaggaactcccaagaacctggtgaaacacctcttagaggtcagccggcaagtgcgggccaccccgaatccaccccgggtccatcccttgtgccaacacatggcattccgtgggcagatcctgctctccactggggtgctctggtctggggccccagcatgattttccccagtagataaccagccccacaagaatggctttatac

SEQ ID NO: 54510 - DNA, 383 bp, Homo sapiens
ttttgtgtgctctctttataaaatcatttacattttttgtaggttgtttgcaagaaacatttagtgaaacatttgaaaatccattttattggtttgcttttcaaatatctgtagccttgtttcttaagtagaacccccgtctttttctttgtctttttctctttgttgatgcatcatcatcagttgttcagctgtttctgctccctcattttttcccttgttccagtgagactcaaagaaccatgaacttttgtgcccctttgtcttccctttcttttttcttttttaacaactaaggggtaatcacagaacaaccaaccattgtaaagtacaattgtaaagtggcatttagtacattcatgatgttgtacaactaccccttc

SEQ ID NO: 54511 - DNA, 402 bp, Homo sapiens
aaagaattgaagccccttcttaccacattgacctcatcttacgccattgtcttttctcacttctatgctgtagccacaccagctgtttctattcctgaaaccgggtctctgtaattgctgttccctttgactggagtgcttttcccccatggtcttctcatggctggcgtcttctctgcaggtctttgctgattctacctcttcaaagaggctttcgctggttgtccttactcataacgtagatcccactcctccaccgtcattccctgtatcattaccctgcttcatgtttcccccaagtgttgatgggtgtctgagatctgatgcttatttgtatgtttgcccactgatggcagggacctttcctttctggttcaccatcctattcccagtgcctggaac

SEQ ID NO: 54512 - DNA, 431 bp, Homo sapiens
tggggttggcttcagagagcactaggcaccatagaaatggcagcttcacagcttccttccttactccagccaggcaccgctgccttggcccaggcctgtggaatgttccagaagctaaaatgccctttgtctgggccttacccttccctggaacacaatggcttgtgcttgaagggctcggggtttgtgattcctcaagtaagccaaagaatcaacagcttccggggctgcccctcagcggctcctatccacggttatttttagtcgcatttaatttggcagccaggagcacttttgatttcacaatgattagttagagcttgtgtgtgcgctgtttttcttcttaccacccgcctgtctcccccaaggggactgggtgttgttttgacttttatgtgttacaataaaaactttcattgtagcaaaatgtt

SEQ ID NO: 54513 - DNA, 365 bp, Homo sapiens
tgtatactcatgctatatatgcacttatgcacaaatgcctggttgccattgtgtctgcctgtattcttggtcacatttggataccattttgttctaaaggcaaaaatatttagcagtttctaaatgaggattacatcctggtttttcaatatattcatggagggtttaagaacattgtagcaaccttcctggcaaattaaaatggcgggaaagattgagctttaaagtccgtggatttgtaggccaccagaaagctatctttattgttgacaatatataaaaactgaggtgaccccacatcatacagcccttgattattgagtgggccaaaagtaggaggaaaaagcttcattttaatgcaactt

SEQ ID NO: 54514 - DNA, 265 bp, Homo sapiens
aaatatctggagcaaaccctaatgttatattggcttcatgatacatacattagcagaatgtatgagttttcactgtggaacctaaattaaaggatattgaaaatgttggtctagtccaactagttttattcttaagcactttaaccatcttctgtagtagtggttctcaaacttcagtgtgaggagcttgttaaaaatgaaagctgcagggtcacacacactaagattcattagtttgagagcatgagtgatggaaatgagtagt

SEQ ID NO: 54515 - DNA, 528 bp, Homo sapiens
attcgcggccgcgtcgacttttttttttttggattatgatttttgtttatttttcctgtttatccatatattatttttcaacaatgagtattgattacttatataataattttaaggctgtacacattgcagacagcaccccactgtttgaaaaactcctcctcagtagaacatggcagaccttcatcttccttccctgaaccttttccaaccttaggcttgccattctccaccagtgctaatgtcatgtctcttgaaatctgtattgaagtcagtatttcattcttgccagtttccactgtgtgtttaaatttggagtctggtgtctagcattagctggggttggggcttccactcctctcagcattggtaagcctcctcacccaccccatcccatgtccaagatcacccagttacacacttaccatctacccagttcattcacatcatcagtcccagagctgcagagatgctctttttcgtcgacgcggccgcgaatttagtagttgtagtcgacccgggaattct

SEQ ID NO: 54516 - DNA, 7133 bp, Homo sapiens
attcgcggccgcgtcgacttttttttttttggattatgatttttgtttatttttcctgtttatccatatattatttttcaacaatgagtattgattacttatataataattttaaggctgtacacattgcagacagcaccccactgtttgaaaaactcctcctcagtagaacatggcagaccttcatcttccttccctgaaccttttccaaccttaggcttgccattctccaccagtgctaatgtcatgtctcttgaaatctgtattgaagtcagtatttcattcttgccagtttccactgtgtgtttaaatttggagtctggtgtctagcattagctggggttggggcttccactcctctcagcattggtaagcctcctcacccaccccatcccatgtccaagatcacccagttacacacttaccatctacccagttcattcacatcatcagtcccagagctgcagagatgctctttttctacctcctacttctctggctcttagagaggcagcatgggataatggggcaagcgaatagggccttaaagtagagggacaagggttctcttccctatctgccacttattagctatgtgacctcgtgtaagtctcttttctttttgagacagggtctccctctgtcacctaggctggagtacagtggtatgatcatagctcactgcagcctcgaactcctgggctcaagctatccttccaccttagccttctgagcagcagggactacaggcacatgccaccatgtccggctgatttatttatttttatttgggaagatgggggtctcactatgtcgcccaggctggtcatgaactcctggtctcaagcaaccctccaaccttggactcccaaagtgctgggattacaggtgtgagccctggccttgcctcaatttcctcatctgtaaaacggggttagtgaaactcacatcctatcagtggttttgaggatgggccgactcttgtattgcctgctctagtacaatcagcagctaaggcggctcactttccggccgtgctacaataggtaagaactaggatgctttagacgtgtgactgggcagtgggagcccctcacatgatcccgagatgccagacagtgtctctccgcacagggcgtgtgctggtccagaggcccgtttttccagtcgccccacaccccgggtccgcgatcacgctccccccacccatagccgagcctgacgcggcggtggctcatgcgcctttccgtcccagcctttagccacggaccacacgtcccatctcaggcgccccgcccctcccccgccccccgcccccggcgcgcctccccaggctgccggctccggtgtctgagcggccgcgcccgcgagccgtgagcgatgattggctgcgccacggcggcgggcggtccgtgggcgcacacaccctccccgcgcagccaatgggcgtgcgcacgtcactgatccggaggcccgcgggccggcagcccctcaataagccacattgttgcatgaaactccggcgcaggagtcccgggctgccgctggcaacatcgtgtcacccagctaagaaaatccgcgggcccgagccacgcgcctgtgaatcggagaggtcccactgcccgagtggagccgggctgagattcttctcaagttgagcctcagtgatcctgtggccgaagttagcgccttgacgtgggacaaccggacacgtcgccaggagagaactgaggcgccttctagcagttgtgacgccaaaatcacgtctccggagacccgcgccctccgccagccgggcgcaccctcgccggtagccttctttgtgcgccgtccggactcccagctcccggcccggcagccgagccccagcacaaagcagtcggaccgcgccgcccgcctcccctctcgcgtctccgcctcggtttcccaactctgcgccgtcgggccgcggcaggatgattgcctcgcatctgcttgcctacttcttcacggagctcaaccatgaccaagtgcagaaggttgaccagtatctctaccacatgcgcctctctgatgagaccctcttggagatctctaagcggttccgcaaggagatggagaaagggcttggagccaccactcaccctactgcagcagtgaagatgctgcccacctttgtgaggtccactccagatgggacagaacacggagagttcctggctctggatcttggagggaccaacttccgtgtgctttgggtgaaagtaacggacaatgggctccagaaggtggagatggagaatcagatctatgccatccctgaggacatcatgcgaggcagtggcacccagctgtttgaccacattgccgaatgcctggctaacttcatggataagctacaaatcaaagacaagaagctcccactgggttttaccttctcgttcccctgccaccagactaaactagacgagagtttcctggtctcatggaccaagggattcaagtccagtggagtggaaggcagagacgttgtggctctgatccggaaggccatccagaggagaggggactttgatatcgacattgtggctgtggtgaatgacacagttgggaccatgatgacctgtggttatgatgaccacaactgtgagattggtctcattgtgggcacgggcagcaacgcctgctacatggaagagatgcgccacatcgacatggtggaaggcgatgaggggcggatgtgtatcaatatggagtggggggccttcggggacgatggctcgctcaacgacattcgcactgagtttgaccaggagattgacatgggctcactgaacccgggaaagcaactgtttgagaagatgatcagtgggatgtacatgggggagctggtgaggcttatcctggtgaagatggccaaggaggagctgctctttggggggaagctcagcccagagcttctcaacaccggtcgctttgagaccaaagacatctcagacattgaaggggagaaggatggcatccggaaggcccgtgaggtcctgatgcggttgggcctggacccgactcaggaggactgcgtggccactcaccggatctgccagatcgtgtccacacgctccgccagcctgtgcgcagccaccctggccgccgtgctgcagcgcatcaaggagaacaaaggcgaggagcggctgcgctctactattggggtcgacggttccgtctacaagaaacacccccattttgccaagcgtctacataagaccgtgcggcggctggtgcccggctgcgatgtccgcttcctccgctccgaggatggcagtggcaaaggtgcagccatggtgacagcagtggcttaccggctggccgatcaacaccgtgcccgccagaagacattagagcatctgcagctgagccatgaccagctgctggaggtcaagaggaggatgaaggtagaaatggagcgaggtctgagcaaggagactcatgccagtgcccccgtcaagatgctgcccacctacgtgtgtgctaccccggacggcacagagaaaggggacttcttggccttggaccttggaggaacaaatttccgggtcctgctggtccgtgttcggaatgggaagtggggtggagtggagatgcacaacaagatctacgccatcccgcaggaggtcatgcacggcaccggggacgagctctttgaccacattgtccagtgcatcgcggacttcctcgagtacatgggcatgaagggcgtgtccctgcctctgggttttaccttctccttcccctgccagcagaacagcctggacgagagcatcctcctcaagtggacaaaaggcttcaaggcatctggctgcgagggcgaggacgtggtgaccctgctgaaggaagcgatccaccggcgagaggagtttgacctggatgtggttgctgtggtgaacgacacagtcggaactatgatgacctgtggctttgaagaccctcactgtgaagttggcctcattgttggcacgggcagcaatgcctgctacatggaggagatgcgcaacgtggaactggtggaaggagaagaggggcggatgtgtgtgaacatggaatggggggccttcggggacaatggatgcctagatgacttccgcacagaatttgatgtggctgtggatgagctttcactcaaccccggcaagcagaggttcgagaaaatgatcagtggaatgtacctgggtgagattgtccgtaacattctcatcgatttcaccaagcgtggactgctcttccgaggccgcatctcagagcggctcaagacaaggggcatctttgaaaccaagttcttgtctcagattgagagtgactgcctggccctgctgcaagtccgagccatcctgcaacacttagggcttgagagcacctgtgacgacagcatcattgttaaggaggtgtgcactgtggtggcccggcgggcagcccagctctgtggcgcaggcatggccgctgtggtggacaggatacgagaaaaccgtgggctggacgctctcaaagtgacagtgggtgtggatgggaccctctacaagctacatcctcactttgccaaagtcatgcatgagacagtgaaggacctggctccgaaatgtgatgtgtctttcctgcagtcagaggatggcagcgggaagggggcggcgctcatcactgctgtggcctgccgcatccgtgaggctggacagcgatagaacccctgaaatcggaagggacttcctctttctctccttcttccctgttttaaattataagatgtcatccccttgtgtcagagacagaccccttggcttttgcttggcagagaggaccccactggactgggttttgtctctgcatctcattgtagagcttggtggctgagcttggccctattaagataaatagagttccaaataaggatttgttcacatgcatcataaccattcccattggttctcctaaaacatgaaaattatctcccttagtaatcccccttgccaaattccatgtccctgtataattctacaggatggggacactaatgaagatacggttgcttcaccttggagcctgaacatgacatttctaagtggggtgcatcccccagcactgatgttgttactgattctcctgtcagagatctgggaggtctccactgaggatgtgagcctgattatcctataggcagacgtggggagggtggaggggtgacagtggaggaaaatccatggatatccacgcagcagcccctctttaacctcatctacaagcatttgccctgtggattccagcatttgccattcctggaatcaaggaatcctgagtctgggcaatgaaaccaaagccaggagttgacgcatcctgcagttgggccagctgtcgcatctcagcggggcgcacatgttatccacaagcaatggacctttggggaagggggagtttttagtttgttttacaaatttttcctgcaaaagtggaatcactgtattttcattttaatttatatttgaaattttatttagttcttgaagtagatctgcttcttcatcttgacatgtaatggtcagttgtacgtaatgtatttatatgttaatttgttatgtatatagatgtgcaagtcttgtcagaattggcctcagtgtagttaaagggcagaaggggaagatactgactagtcatagaaatacctcattcgcctgtgggaagagaagggaagcctcttcagggtgagtgaatggcaaagcggttgcttctggctcctccttcccctgtggtcttggaagtgtgtggaaggcagggacagagatggaggccgagccaatagactgaagagaccacagcaattggctcctccatctagagattttcttggcagtattccatgggatgttaagcaaaggaaaccaaaggaatcgtttcaaatggactcatggcttagaaatctttattcttagggcagtcagtagtattctaaagctttctgacaagataaaggaagtcaccaaaatttctttttttaaattgtatctaatcctcaacaacaaaccaaaacagaacaattaaacagccaaataaaacctcagggacaacatttttggtgtatttgagccctcccagcaagtttcaccttgggtttgtattttaaatgttttacaagaattgtccatgtgcttccctaggctgagctggcattggtctgctgacctgtttttgtgtttttcttttttttatacacaacatttatttcaaactattgggagggatgagagtggcttaaaaacttccatccctacttttcaagagtgcagttgattctgaatctgaaagcccgcctctgtcctaaaatacaaacaagcacagacattaaacctggatactatatgataaagagggatgtaactattgaattggatacaaggatcagaatggaaagaaactcacgatgaaattgaacctggtttttgtatatttatcaaacttgtgctgagaatagtgtctgattatacgacttttaagcaaagttgggtgtaattaggtgaaaacagcccaggtcctcccgggagcacagaggggctaggggctggtccttctcgtttgctctagtcttgctttgctgtctggtgtagctcctctgctgctcccatctgcactaattgacccaaaacgtgggtatttcctgctacacaaaagccaaaaggtttcatgtagattttagttcactaaagggtgcccacaaaatagagattaattttaacttaaattttaagcttgaagattaggtactatctgtgaagttacacttttttttttttttttaaaggtagagatgtgtgtgtgtgtaggtattaaagatgtgttgttggtttccaaaaaggaacactggaaaataaattttgaatgtttatgttctcagaatcaggttgacagtcccttgctgacatggctttgctttgtgtaaatacagtggatctcaatcttcggggtgtgatgaatagcgaatcatctcaaatccttgagcactcagtctagtgaagatgttgtcattatgtacaatacataactagtttaattaactatgtgatgttaactattattaataaattttaacattttccaaaataaaaaaaaaagtgatt

SEQ ID NO: 54517 - DNA, 6668 bp, Homo sapiens
ctcacaatgcaggcgctccagctctgacacgtgcacttctttattggaaaagaataaagcagtcactgatgtggcaggggcaggacacgagcagctgccgtcctcctcccagcgtgcctggcatggtcgcaggggagcgggtgcctggagtcccggtgacaccacggggcacactgagggagctgaggagccggggccgcgcagcctcctggatgctcagcggatcgtgtacttgtcccacttcttttcagggtcgtagggttcccagcggctggcgggaaagatgtgcttgttcttctcgtaccagctcctcagcaccaccttgcctgcatgggactcatccttctccacagtggcgtcactgagcaaccgcacatcgtcatgaacatcaaagttgaagagtggtccactcttcccccgtgccttggtgacgatgaagtcgtagaagctgtgatggtgagggatgatcaagtcctccttgatgtacatgagctgctccacccctgcggacctcagctcactgaagtctttccgaaggatctcgagcgccttctgcaggaactgctgcatggtgttgccctttctcatcttgactgtccgccggtgcccagagccatcccagtagctgaaggtgatctcgatctcctcactcttgatcttctcctgcttggcttcccactcctgccgcagctcttcccgaagccgattctcctcctcctcacggtctcgatcaggcaagaagcttgtgtcaacgtctgggttcttccccagttttctcttcttcgtggtgatctcttccctttccatctcctcctcatacatggccgcctcctcttcctcctcgcctccctcttcttcctcctccagggtgaaggacaggctggagatcttccgcttggcttccttcttacgctccttctctcgaagcttctccagcttcatctgcagctccttggactgctccttcttggccagctgcttctcccgctccttcaccagagcctcctgcttggccttcatgtcattcagggtcacgagacccacggtgctggacttgagctctgcctcccgggctgccgctggcaacatcgtgtcacccagctaagaaaatccgcgggcccgagccacgcgcctgtgaatcggagaggtcccactgcccgagtggagccgggctgagattcttctcaagttgagcctcagtgatcctgtggccgaagttagcgccttgacgtgggacaaccggacacgtcgccaggagagaactgaggcgccttctagcagttgtgacgccaaaatcacgtctccggagacccgcgccctccgccagccgggcgcaccctcgccggtagccttctttgtgcgccgtccggactcccagctcccggcccggcagccgagccccagcacaaagcagtcggaccgcgccgcccgcctcccctctcgcgtctccgcctcggtttcccaactctgcgccgtcgggccgcggcaggatgattgcctcgcatctgcttgcctacttcttcacggagctcaaccatgaccaagtgcagaaggttgaccagtatctctaccacatgcgcctctctgatgagaccctcttggagatctctaagcggttccgcaaggagatggagaaagggcttggagccaccactcaccctactgcagcagtgaagatgctgcccacctttgtgaggtccactccagatgggacagaacacggagagttcctggctctggatcttggagggaccaacttccgtgtgctttgggtgaaagtaacggacaatgggctccagaaggtggagatggagaatcagatctatgccatccctgaggacatcatgcgaggcagtggcacccagctgtttgaccacattgccgaatgcctggctaacttcatggataagctacaaatcaaagacaagaagctcccactgggttttaccttctcgttcccctgccaccagactaaactagacgagagtttcctggtctcatggaccaagggattcaagtccagtggagtggaaggcagagacgttgtggctctgatccggaaggccatccagaggagaggggactttgatatcgacattgtggctgtggtgaatgacacagttgggaccatgatgacctgtggttatgatgaccacaactgtgagattggtctcattgtgggcacgggcagcaacgcctgctacatggaagagatgcgccacatcgacatggtggaaggcgatgaggggcggatgtgtatcaatatggagtggggggccttcggggacgatggctcgctcaacgacattcgcactgagtttgaccaggagattgacatgggctcactgaacccgggaaagcaactgtttgagaagatgatcagtgggatgtacatgggggagctggtgaggcttatcctggtgaagatggccaaggaggagctgctctttggggggaagctcagcccagagcttctcaacaccggtcgctttgagaccaaagacatctcagacattgaaggggagaaggatggcatccggaaggcccgtgaggtcctgatgcggttgggcctggacccgactcaggaggactgcgtggccactcaccggatctgccagatcgtgtccacacgctccgccagcctgtgcgcagccaccctggccgccgtgctgcagcgcatcaaggagaacaaaggcgaggagcggctgcgctctactattggggtcgacggttccgtctacaagaaacacccccattttgccaagcgtctacataagaccgtgcggcggctggtgcccggctgcgatgtccgcttcctccgctccgaggatggcagtggcaaaggtgcagccatggtgacagcagtggcttaccggctggccgatcaacaccgtgcccgccagaagacattagagcatctgcagctgagccatgaccagctgctggaggtcaagaggaggatgaaggtagaaatggagcgaggtctgagcaaggagactcatgccagtgcccccgtcaagatgctgcccacctacgtgtgtgctaccccggacggcacagagaaaggggacttcttggccttggaccttggaggaacaaatttccgggtcctgctggtccgtgttcggaatgggaagtggggtggagtggagatgcacaacaagatctacgccatcccgcaggaggtcatgcacggcaccggggacgagctctttgaccacattgtccagtgcatcgcggacttcctcgagtacatgggcatgaagggcgtgtccctgcctctgggttttaccttctccttcccctgccagcagaacagcctggacgagagcatcctcctcaagtggacaaaaggcttcaaggcatctggctgcgagggcgaggacgtggtgaccctgctgaaggaagcgatccaccggcgagaggagtttgacctggatgtggttgctgtggtgaacgacacagtcggaactatgatgacctgtggctttgaagaccctcactgtgaagttggcctcattgttggcacgggcagcaatgcctgctacatggaggagatgcgcaacgtggaactggtggaaggagaagaggggcggatgtgtgtgaacatggaatggggggccttcggggacaatggatgcctagatgacttccgcacagaatttgatgtggctgtggatgagctttcactcaaccccggcaagcagaggttcgagaaaatgatcagtggaatgtacctgggtgagattgtccgtaacattctcatcgatttcaccaagcgtggactgctcttccgaggccgcatctcagagcggctcaagacaaggggcatctttgaaaccaagttcttgtctcagattgagagtgactgcctggccctgctgcaagtccgagccatcctgcaacacttagggcttgagagcacctgtgacgacagcatcattgttaaggaggtgtgcactgtggtggcccggcgggcagcccagctctgtggcgcaggcatggccgctgtggtggacaggatacgagaaaaccgtgggctggacgctctcaaagtgacagtgggtgtggatgggaccctctacaagctacatcctcactttgccaaagtcatgcatgagacagtgaaggacctggctccgaaatgtgatgtgtctttcctgcagtcagaggatggcagcgggaagggggcggcgctcatcactgctgtggcctgccgcatccgtgaggctggacagcgatagaacccctgaaatcggaagggacttcctctttctctccttcttccctgttttaaattataagatgtcatccccttgtgtcagagacagaccccttggcttttgcttggcagagaggaccccactggactgggttttgtctctgcatctcattgtagagcttggtggctgagcttggccctattaagataaatagagttccaaataaggatttgttcacatgcatcataaccattcccattggttctcctaaaacatgaaaattatctcccttagtaatcccccttgccaaattccatgtccctgtataattctacaggatggggacactaatgaagatacggttgcttcaccttggagcctgaacatgacatttctaagtggggtgcatcccccagcactgatgttgttactgattctcctgtcagagatctgggaggtctccactgaggatgtgagcctgattatcctataggcagacgtggggagggtggaggggtgacagtggaggaaaatccatggatatccacgcagcagcccctctttaacctcatctacaagcatttgccctgtggattccagcatttgccattcctggaatcaaggaatcctgagtctgggcaatgaaaccaaagccaggagttgacgcatcctgcagttgggccagctgtcgcatctcagcggggcgcacatgttatccacaagcaatggacctttggggaagggggagtttttagtttgttttacaaatttttcctgcaaaagtggaatcactgtattttcattttaatttatatttgaaattttatttagttcttgaagtagatctgcttcttcatcttgacatgtaatggtcagttgtacgtaatgtatttatatgttaatttgttatgtatatagatgtgcaagtcttgtcagaattggcctcagtgtagttaaagggcagaaggggaagatactgactagtcatagaaatacctcattcgcctgtgggaagagaagggaagcctcttcagggtgagtgaatggcaaagcggttgcttctggctcctccttcccctgtggtcttggaagtgtgtggaaggcagggacagagatggaggccgagccaatagactgaagagaccacagcaattggctcctccatctagagattttcttggcagtattccatgggatgttaagcaaaggaaaccaaaggaatcgtttcaaatggactcatggcttagaaatctttattcttagggcagtcagtagtattctaaagctttctgacaagataaaggaagtcaccaaaatttctttttttaaattgtatctaatcctcaacaacaaaccaaaacagaacaattaaacagccaaataaaacctcagggacaacatttttggtgtatttgagccctcccagcaagtttcaccttgggtttgtattttaaatgttttacaagaattgtccatgtgcttccctaggctgagctggcattggtctgctgacctgtttttgtgtttttcttttttttatacacaacatttatttcaaactattgggagggatgagagtggcttaaaaacttccatccctacttttcaagagtgcagttgattctgaatctgaaagcccgcctctgtcctaaaatacaaacaagcacagacattaaacctggatactatatgataaagagggatgtaactattgaattggatacaaggatcagaatggaaagaaactcacgatgaaattgaacctggtttttgtatatttatcaaacttgtgctgagaatagtgtctgattatacgacttttaagcaaagttgggtgtaattaggtgaaaacagcccaggtcctcccgggagcacagaggggctaggggctggtccttctcgtttgctctagtcttgctttgctgtctggtgtagctcctctgctgctcccatctgcactaattgacccaaaacgtgggtatttcctgctacacaaaagccaaaaggtttcatgtagattttagttcactaaagggtgcccacaaaatagagattaattttaacttaaattttaagcttgaagattaggtactatctgtgaagttacacttttttttttttttttaaaggtagagatgtgtgtgtgtgtaggtattaaagatgtgttgttggtttccaaaaaggaacactggaaaataaattttgaatgtttatgttctcagaatcaggttgacagtcccttgctgacatggctttgctttgtgtaaatacagtggatctcaatcttcggggtgtgatgaatagcgaatcatctcaaatccttgagcactcagtctagtgaagatgttgtcattatgtacaatacataactagtttaattaactatgtgatgttaactattattaataaattttaacattttccaaaataaaaaaaaaagtgatt

SEQ ID NO: 54518 - DNA, 7839 bp, Homo sapiens
attcgcggccgcgtcgacttttttttttttggattatgatttttgtttatttttcctgtttatccatatattatttttcaacaatgagtattgattacttatataataattttaaggctgtacacattgcagacagcaccccactgtttgaaaaactcctcctcagtagaacatggcagaccttcatcttccttccctgaaccttttccaaccttaggcttgccattctccaccagtgctaatgtcatgtctcttgaaatctgtattgaagtcagtatttcattcttgccagtttccactgtgtgtttaaatttggagtctggtgtctagcattagctggggttggggcttccactcctctcagcattggtaagcctcctcacccaccccatcccatgtccaagatcacccagttacacacttaccatctacccagttcattcacatcatcagtcccagagctgcagagatgctctttttctacctcctacttctctggctcttagagaggcagcatgggataatggggcaagcgaatagggccttaaagtagagggacaagggttctcttccctatctgccacttattagctatgtgacctcgtgtaagtctcttttctttttgagacagggtctccctctgtcacctaggctggagtacagtggtatgatcatagctcactgcagcctcgaactcctgggctcaagctatccttccaccttagccttctgagcagcagggactacaggcacatgccaccatgtccggctgatttatttatttttatttgggaagatgggggtctcactatgtcgcccaggctggtcatgaactcctggtctcaagcaaccctccaaccttggactcccaaagtgctgggattacaggtgtgagccctggccttgcctcaatttcctcatctgtaaaacggggttagtgaaactcacatcctatcagtggttttgaggatgggccgactcttgtattgcctgctctagtacaatcagcagctaaggcggctcactttccggccgtgctacaataggtaagaactaggatgctttagacgtgtgactgggcagtgggagcccctcacatgatcccgagatgccagacagtgtctctccgcacagggcgtgtgctggtccagaggcccgtttttccagtcgccccacaccccgggtccgcgatcacgctccccccacccatagccgagcctgacgcggcggtggctcatgcgcctttccgtcccagcctttagccacggaccacacgtcccatctcaggcgccccgcccctcccccgccccccgcccccggcgcgcctccccaggctgccggctccggtgtctgagcggccgcgcccgcgagccgtgagcgatgattggctgcgccacggcggcgggcggtccgtgggcgcacacaccctccccgcgcagccaatgggcgtgcgcacgtcactgatccggaggcccgcgggccggcagcccctcaataagccacattgttgcatgaaactccggcgcaggagtcccgggctgccgctggcaacatcgtgtcacccagctaagaaaatccgcgggcccgagccacgcgcctgtgaatcggagaggtcccactgcccgagtggagccgggctgagattcttctcaagttgagcctcagtgatcctgtggccgaagttagcgccttgacgtgggacaaccggacacgtcgccaggagagaactgaggcgccttctagcagttgtgacgccaaaatcacgtctccggagacccgcgccctccgccagccgggcgcaccctcgccggtagccttctttgtgcgccgtccggactcccagctcccggcccggcagccgagccccagcacaaagcagtcggaccgcgccgcccgcctcccctctcgcgtctccgcctcggtttcccaactctgcgccgtcgggccgcggcaggatgattgcctcgcatctgcttgcctacttcttcacggagctcaaccatgaccaagtgcagaaggttgaccagtatctctaccacatgcgcctctctgatgagaccctcttggagatctctaagcggttccgcaaggagatggagaaagggcttggagccaccactcaccctactgcagcagtgaagatgctgcccacctttgtgaggtccactccagatgggacagaacacggagagttcctggctctggatcttggagggaccaacttccgtgtgctttgggtgaaagtaacggacaatgggctccagaaggtggagatggagaatcagatctatgccatccctgaggacatcatgcgaggcagtggcacccagctgtttgaccacattgccgaatgcctggctaacttcatggataagctacaaatcaaagacaagaagctcccactgggttttaccttctcgttcccctgccaccagactaaactagacgagagtttcctggtctcatggaccaagggattcaagtccagtggagtggaaggcagagacgttgtggctctgatccggaaggccatccagaggagaggggactttgatatcgacattgtggctgtggtgaatgacacagttgggaccatgatgacctgtggttatgatgaccacaactgtgagattggtctcattgtgggcacgggcagcaacgcctgctacatggaagagatgcgccacatcgacatggtggaaggcgatgaggggcggatgtgtatcaatatggagtggggggccttcggggacgatggctcgctcaacgacattcgcactgagtttgaccaggagattgacatgggctcactgaacccgggaaagcaactgtttgagaagatgatcagtgggatgtacatgggggagctggtgaggcttatcctggtgaagatggccaaggaggagctgctctttggggggaagctcagcccagagcttctcaacaccggtcgctttgagaccaaagacatctcagacattgaaggggagaaggatggcatccggaaggcccgtgaggtcctgatgcggttgggcctggacccgactcaggaggactgcgtggccactcaccggatctgccagatcgtgtccacacgctccgccagcctgtgcgcagccaccctggccgccgtgctgcagcgcatcaaggagaacaaaggcgaggagcggctgcgctctactattggggtcgacggttccgtctacaagaaacacccccattttgccaagcgtctacataagaccgtgcggcggctggtgcccggctgcgatgtccgcttcctccgctccgaggatggcagtggcaaaggtgcagccatggtgacagcagtggcttaccggctggccgatcaacaccgtgcccgccagaagacattagagcatctgcagctgagccatgaccagctgctggaggtcaagaggaggatgaaggtagaaatggagcgaggtctgagcaaggagactcatgccagtgcccccgtcaagatgctgcccacctacgtgtgtgctaccccggacggcacagagaaaggggacttcttggccttggaccttggaggaacaaatttccgggtcctgctggtccgtgttcggaatgggaagtggggtggagtggagatgcacaacaagatctacgccatcccgcaggaggtcatgcacggcaccggggacgagctctttgaccacattgtccagtgcatcgcggacttcctcgagtacatgggcatgaagggcgtgtccctgcctctgggttttaccttctccttcccctgccagcagaacagcctggacgagagcatcctcctcaagtggacaaaaggcttcaaggcatctggctgcgagggcgaggacgtggtgaccctgctgaaggaagcgatccaccggcgagaggtaggagacacatggcacgaggtctgatgtgtcagctcctcaatgattggcctggtctgtgtgttcagaaagtgaaggcaacagtaagtgtggctgcatgggttgggaggaagattaactcaagcgtcgttcagcagtttagtgtgcactgtgtgtcaagcaatgctctcagcactggcggttcaggagtgaccacaacaaagctttgttctataaagtccatgacctagtggcaggtgctgttaagagctgtgaaaacacacacacacacacacacacacacacacacacacacacagtaaaggaataaaagaatggccactccataagcaaagcagccatgagggctgctggttgcacatttttatggttatttcttgattatatgctaaacaaggggtgtattattcatgccttccctttttagaccatatagagtttaaaaaaaaaaaagaaagaaaaggagtgaagtggggtgaggagagcagatggagcaagtgtgctggaaaggggcactgttgaaagaggacaacttgggagggtctcaccaaagaggtgacatttaagcacagacctgaatggaatgagagggtcagccatggtgtatgatatatattttatatacctgtaaatctcccatgcaattgtctgaaaggagaatattggggttcacctgtgaactgggcatctgcttcttccctctcaggagtttgacctggatgtggttgctgtggtgaacgacacagtcggaactatgatgacctgtggctttgaagaccctcactgtgaagttggcctcattgttggcacgggcagcaatgcctgctacatggaggagatgcgcaacgtggaactggtggaaggagaagaggggcggatgtgtgtgaacatggaatggggggccttcggggacaatggatgcctagatgacttccgcacagaatttgatgtggctgtggatgagctttcactcaaccccggcaagcagaggttcgagaaaatgatcagtggaatgtacctgggtgagattgtccgtaacattctcatcgatttcaccaagcgtggactgctcttccgaggccgcatctcagagcggctcaagacaaggggcatctttgaaaccaagttcttgtctcagattgagagtgactgcctggccctgctgcaagtccgagccatcctgcaacacttagggcttgagagcacctgtgacgacagcatcattgttaaggaggtgtgcactgtggtggcccggcgggcagcccagctctgtggcgcaggcatggccgctgtggtggacaggatacgagaaaaccgtgggctggacgctctcaaagtgacagtgggtgtggatgggaccctctacaagctacatcctcactttgccaaagtcatgcatgagacagtgaaggacctggctccgaaatgtgatgtgtctttcctgcagtcagaggatggcagcgggaagggggcggcgctcatcactgctgtggcctgccgcatccgtgaggctggacagcgatagaacccctgaaatcggaagggacttcctctttctctccttcttccctgttttaaattataagatgtcatccccttgtgtcagagacagaccccttggcttttgcttggcagagaggaccccactggactgggttttgtctctgcatctcattgtagagcttggtggctgagcttggccctattaagataaatagagttccaaataaggatttgttcacatgcatcataaccattcccattggttctcctaaaacatgaaaattatctcccttagtaatcccccttgccaaattccatgtccctgtataattctacaggatggggacactaatgaagatacggttgcttcaccttggagcctgaacatgacatttctaagtggggtgcatcccccagcactgatgttgttactgattctcctgtcagagatctgggaggtctccactgaggatgtgagcctgattatcctataggcagacgtggggagggtggaggggtgacagtggaggaaaatccatggatatccacgcagcagcccctctttaacctcatctacaagcatttgccctgtggattccagcatttgccattcctggaatcaaggaatcctgagtctgggcaatgaaaccaaagccaggagttgacgcatcctgcagttgggccagctgtcgcatctcagcggggcgcacatgttatccacaagcaatggacctttggggaagggggagtttttagtttgttttacaaatttttcctgcaaaagtggaatcactgtattttcattttaatttatatttgaaattttatttagttcttgaagtagatctgcttcttcatcttgacatgtaatggtcagttgtacgtaatgtatttatatgttaatttgttatgtatatagatgtgcaagtcttgtcagaattggcctcagtgtagttaaagggcagaaggggaagatactgactagtcatagaaatacctcattcgcctgtgggaagagaagggaagcctcttcagggtgagtgaatggcaaagcggttgcttctggctcctccttcccctgtggtcttggaagtgtgtggaaggcagggacagagatggaggccgagccaatagactgaagagaccacagcaattggctcctccatctagagattttcttggcagtattccatgggatgttaagcaaaggaaaccaaaggaatcgtttcaaatggactcatggcttagaaatctttattcttagggcagtcagtagtattctaaagctttctgacaagataaaggaagtcaccaaaatttctttttttaaattgtatctaatcctcaacaacaaaccaaaacagaacaattaaacagccaaataaaacctcagggacaacatttttggtgtatttgagccctcccagcaagtttcaccttgggtttgtattttaaatgttttacaagaattgtccatgtgcttccctaggctgagctggcattggtctgctgacctgtttttgtgtttttcttttttttatacacaacatttatttcaaactattgggagggatgagagtggcttaaaaacttccatccctacttttcaagagtgcagttgattctgaatctgaaagcccgcctctgtcctaaaatacaaacaagcacagacattaaacctggatactatatgataaagagggatgtaactattgaattggatacaaggatcagaatggaaagaaactcacgatgaaattgaacctggtttttgtatatttatcaaacttgtgctgagaatagtgtctgattatacgacttttaagcaaagttgggtgtaattaggtgaaaacagcccaggtcctcccgggagcacagaggggctaggggctggtccttctcgtttgctctagtcttgctttgctgtctggtgtagctcctctgctgctcccatctgcactaattgacccaaaacgtgggtatttcctgctacacaaaagccaaaaggtttcatgtagattttagttcactaaagggtgcccacaaaatagagattaattttaacttaaattttaagcttgaagattaggtactatctgtgaagttacacttttttttttttttttaaaggtagagatgtgtgtgtgtgtaggtattaaagatgtgttgttggtttccaaaaaggaacactggaaaataaattttgaatgtttatgttctcagaatcaggttgacagtcccttgctgacatggctttgctttgtgtaaatacagtggatctcaatcttcggggtgtgatgaatagcgaatcatctcaaatccttgagcactcagtctagtgaagatgttgtcattatgtacaatacataactagtttaattaactatgtgatgttaactattattaataaattttaacattttccaaaataaaaaaaaaagtgatt

SEQ ID NO: 54519 - DNA, 6422 bp, Homo sapiens
attcgcggccgcgtcgacttttttttttttggattatgatttttgtttatttttcctgtttatccatatattatttttcaacaatgagtattgattacttatataataattttaaggctgtacacattgcagacagcaccccactgtttgaaaaactcctcctcagtagaacatggcagaccttcatcttccttccctgaaccttttccaaccttaggcttgccattctccaccagtgctaatgtcatgtctcttgaaatctgtattgaagtcagtatttcattcttgccagtttccactgtgtgtttaaatttggagtctggtgtctagcattagctggggttggggcttccactcctctcagcattggtaagcctcctcacccaccccatcccatgtccaagatcacccagttacacacttaccatctacccagttcattcacatcatcagtcccagagctgcagagatgctctttttctacctcctacttctctggctcttagagaggcagcatgggataatggggcaagcgaatagggccttaaagtagagggacaagggttctcttccctatctgccacttattagctatgtgacctcgtgtaagtctcttttctttttgagacagggtctccctctgtcacctaggctggagtacagtggtatgatcatagctcactgcagcctcgaactcctgggctcaagctatccttccaccttagccttctgagcagcagggactacaggcacatgccaccatgtccggctgatttatttatttttatttgggaagatgggggtctcactatgtcgcccaggctggtcatgaactcctggtctcaagcaaccctccaaccttggactcccaaagtgctgggattacaggtgtgagccctggccttgcctcaatttcctcatctgtaaaacggggttagtgaaactcacatcctatcagtggttttgaggatgggccgactcttgtattgcctgctctagtacaatcagcagctaaggcggctcactttccggccgtgctacaataggtaagaactaggatgctttagacgtgtgactgggcagtgggagcccctcacatgatcccgagatgccagacagtgtctctccgcacagggcgtgtgctggtccagaggcccgtttttccagtcgccccacaccccgggtccgcgatcacgctccccccacccatagccgagcctgacgcggcggtggctcatgcgcctttccgtcccagcctttagccacggaccacacgtcccatctcaggcgccccgcccctcccccgccccccgcccccggcgcgcctccccaggctgccggctccggtgtctgagcggccgcgcccgcgagccgtgagcgatgattggctgcgccacggcggcgggcggtccgtgggcgcacacaccctccccgcgcagccaatgggcgtgcgcacgtcactgatccggaggcccgcgggccggcagcccctcaataagccacattgttgcatgaaactccggcgcaggagtcccgggctgccgctggcaacatcgtgtcacccagctaagaaaatccgcgggcccgagccacgcgcctgtgaatcggagaggtcccactgcccgagtggagccgggctgagattcttctcaagttgagcctcagtgatcctgtggccgaagttagcgccttgacgtgggacaaccggacacgtcgccaggagagaactgaggcgccttctagcagttgtgacgccaaaatcacgtctccggagacccgcgccctccgccagccgggcgcaccctcgccggtagccttctttgtgcgccgtccggactcccagctcccggcccggcagccgagccccagcacaaagcagtcggaccgcgccgcccgcctcccctctcgcgtctccgcctcggtttcccaactctgcgccgtcgggccgcggcaggatgattgcctcgcatctgcttgcctacttcttcacggagctcaaccatgaccaagtgcagaaggttgaccagtatctctaccacatgcgcctctctgatgagaccctcttggagatctctaagcggttccgcaaggagatggagaaagggcttggagccaccactcaccctactgcagcagtgaagatgctgcccacctttgtgaggtccactccagatgggacagaacacggagagttcctggctctggatcttggagggaccaacttccgtgtgctttgggtgaaagtaacggacaatgggctccagaaggtggagatggagaatcagatctatgccatccctgaggacatcatgcgaggcagtggcacccagctgtttgaccacattgccgaatgcctggctaacttcatggataagctacaaatcaaagacaagaagctcccactgggttttaccttctcgttcccctgccaccagactaaactagacgagagtttcctggtctcatggaccaagggattcaagtccagtggagtggaaggcagagacgttgtggctctgatccggaaggccatccagaggagaggggactttgatatcgacattgtggctgtggtgaatgacacagttgggaccatgatgacctgtggttatgatgaccacaactgtgagattggtctcattgtgggcacgggcagcaacgcctgctacatggaagagatgcgccacatcgacatggtggaaggcgatgaggggcggatgtgtatcaatatggagtggggggccttcggggacgatggctcgctcaacgacattcgcactgagtttgaccaggagattgacatgggctcactgaacccgggaaagcaactgtttgagaagatgatcagtgggatgtacatgggggagctggtgaggcttatcctggtgaagatggccaaggaggagctgctctttggggggaagctcagcccagagcttctcaacaccggtcgctttgagaccaaagacatctcagacattgaaggggagaaggatggcatccggaaggcccgtgaggtcctgatgcggttgggcctggacccgactcaggaggactgcgtggccactcaccggatctgccagatcgtgtccacacgctccgccagcctgtgcgcagccaccctggccgccgtgctgcagcgcatcaaggagaacaaaggcgaggagcggctgcgctctactattggggtcgacggttccgtctacaagaaacacccccattttgccaagcgtctacataagaccgtgcggcggctggtgcccggctgcgatgtccgcttcctccgctccgaggatggcagtggcaaaggtgcagccatggtgacagcagtggcttaccggctggccgatcaacaccgtgcccgccagaagacattagagcatctgcagctgagccatgaccagctgctggaggtcaagaggaggatgaaggtagaaatggagcgaggtctgagcaaggagactcatgccagtgcccccgtcaagatgctgcccacctacgtgtgtgctaccccggacggcacagagaaaggggacttcttggccttggaccttggaggaacaaatttccgggtcctgctggtccgtgttcggaatgggaagtggggtggagtggagatgcacaacaagatctacgccatcccgcaggaggtcatgcacggcaccggggacgagctctttgaccacattgtccagtgcatcgcggacttcctcgagtacatgggcatgaagggcgtgtccctgcctctgggttttaccttctccttcccctgccagcagaacagcctggacgagagcatcctcctcaagtggacaaaaggcttcaaggcatctggctgcgagggcgaggacgtggtgaccctgctgaaggaagcgatccaccggcgagaggagtttgacctggatgtggttgctgtggtgaacgacacagtcggaactatgatgacctgtggctttgaagaccctcactgtgaagttggcctcattgttggcacgggcagcaatgcctgctacatggaggagatgcgcaacgtggaactggtggaaggagaagaggggcggatgtgtgtgaacatggaatggggggccttcggggacaatggatgcctagatgacttccgcacagaatttgatgtggctgtggatgagctttcactcaaccccggcaagcagaggttcgagaaaatgatcagtggaatgtacctgggtgagattgtccgtaacattctcatcgatttcaccaagcgtggactgctcttccgaggccgcatctcagagcggctcaagacaaggggcatctttgaaaccaagttcttgtctcagattgagagtgactgcctggccctgctgcaagtccgagccatcctgcaacacttagggcttgagagcacctgtgacgacagcatcattgttaaggaggtgtgcactgtggtggcccggcgggcagcccagctctgtggcgcaggcatggccgctgtggtggacaggatacgagaaaaccgtgggctggacgctctcaaagtgacagtgggtgtggatgggaccctctacaagctacatcctcactttgccaaagtcatgcatgagacagtgaaggacctggctccgaaatgtgatgtgtctttcctgcagtcagaggatggcagcgggaagggggcggcgctcatcactgctgtggcctgccgcatccgtgaggctggacagcgatagaacccctgaaatcggaagggacttcctctttctctccttcttccctgttttaaattataagatgtcatccccttgtgtcagagacagaccccttggcttttgcttggcagagaggaccccactggactgggttttgtctctgcatctcattgtagagcttggtggctgagcttggccctattaagataaatagagttccaaataaggatttgttcacatgcatcataaccattcccattggttctcctaaaacatgaaaattatctcccttagtaatcccccttgccaaattccatgtccctgtataattctacaggatggggacactaatgaagatacggttgcttcaccttggagcctgaacatgacatttctaagtggggtgcatcccccagcactgatgttgttactgattctcctgtcagagatctgggaggtctccactgaggatgtgagcctgattatcctataggcagacgtggggagggtggaggggtgacagtggaggaaaatccatggatatccacgcagcagcccctctttaacctcatctacaagcatttgccctgtggattccagcatttgccattcctggaatcaaggaatcctgagtctgggcaatgaaaccaaagccaggagttgacgcatcctgcagttgggccagctgtcgcatctcagcggggcgcacatgttatccacaagcaatggacctttggggaagggggagtttttagtttgttttacaaatttttcctgcaaaagtggaatcactgtattttcattttaatttatatttgaaattttatttagttcttgaagtagatctgcttcttcatcttgacatgtaatggtcagttgtacgtaatgtatttatatgttaatttgttatgtatatagatgtgcaagtcttgtcagaattggcctcagtgtagttaaagggcagaaggggaagatactgactagtcatagaaatacctcattcgcctgtgggaagagaagggaagcctcttcagggtgagtgaatggcaaagcggttgcttctggctcctccttcccctgtggtcttggaagtgtgtggaaggcagggacagagatggaggccgagccaatagactgaagagaccacagcaattggctcctccatctagagattttcttggcagtattccatgggatgttaagcaaaggaaaccaaaggaatcgtttcaaatggactcatggcttagaaatctttattcttagggcagtcagtagtattctaaagctttctgacaagataaaggaagtcaccaaaatttctttttttaaattgtatctaatcctcaacaacaaaccaaaacagaacaattaaacagccaaataaaacctcagggacaacatttttggtgtatttgagccctcccagcaagtttcaccttgggtttgtattttaaatgttttacaagaattgtccatgtgcttccctaggctgagctggcattggtctgctgacctgtttttgtgtttttcttttttttatacacaacatttatttcaaactattgggagggatgagagtggcttaaaaacttccatccctacttttcaagagtgcagttgattctatatcaaaaaagaaatcctatgtcatagggggcacgctttcacgctcgtgaaccctgcatcctaaaagaaatggagtcatgtaacttttgcattgcattcaaggatcag

SEQ ID NO: 54520 - DNA, 2830 bp, Homo sapiens
cctgtactgccctggggagtatagggatgactgcctggccctgctgcaagtccgagccatcctgcaacacttagggcttgagagcacctgtgacgacagcatcattgttaaggaggtgtgcactgtggtggcccggcgggcagcccagctctgtggcgcaggcatggccgctgtggtggacaggatacgagaaaaccgtgggctggacgctctcaaagtgacagtgggtgtggatgggaccctctacaagctacatcctcactttgccaaagtcatgcatgagacagtgaaggacctggctccgaaatgtgatgtgtctttcctgcagtcagaggatggcagcgggaagggggcggcgctcatcactgctgtggcctgccgcatccgtgaggctggacagcgatagaacccctgaaatcggaagggacttcctctttctctccttcttccctgttttaaattataagatgtcatccccttgtgtcagagacagaccccttggcttttgcttggcagagaggaccccactggactgggttttgtctctgcatctcattgtagagcttggtggctgagcttggccctattaagataaatagagttccaaataaggatttgttcacatgcatcataaccattcccattggttctcctaaaacatgaaaattatctcccttagtaatcccccttgccaaattccatgtccctgtataattctacaggatggggacactaatgaagatacggttgcttcaccttggagcctgaacatgacatttctaagtggggtgcatcccccagcactgatgttgttactgattctcctgtcagagatctgggaggtctccactgaggatgtgagcctgattatcctataggcagacgtggggagggtggaggggtgacagtggaggaaaatccatggatatccacgcagcagcccctctttaacctcatctacaagcatttgccctgtggattccagcatttgccattcctggaatcaaggaatcctgagtctgggcaatgaaaccaaagccaggagttgacgcatcctgcagttgggccagctgtcgcatctcagcggggcgcacatgttatccacaagcaatggacctttggggaagggggagtttttagtttgttttacaaatttttcctgcaaaagtggaatcactgtattttcattttaatttatatttgaaattttatttagttcttgaagtagatctgcttcttcatcttgacatgtaatggtcagttgtacgtaatgtatttatatgttaatttgttatgtatatagatgtgcaagtcttgtcagaattggcctcagtgtagttaaagggcagaaggggaagatactgactagtcatagaaatacctcattcgcctgtgggaagagaagggaagcctcttcagggtgagtgaatggcaaagcggttgcttctggctcctccttcccctgtggtcttggaagtgtgtggaaggcagggacagagatggaggccgagccaatagactgaagagaccacagcaattggctcctccatctagagattttcttggcagtattccatgggatgttaagcaaaggaaaccaaaggaatcgtttcaaatggactcatggcttagaaatctttattcttagggcagtcagtagtattctaaagctttctgacaagataaaggaagtcaccaaaatttctttttttaaattgtatctaatcctcaacaacaaaccaaaacagaacaattaaacagccaaataaaacctcagggacaacatttttggtgtatttgagccctcccagcaagtttcaccttgggtttgtattttaaatgttttacaagaattgtccatgtgcttccctaggctgagctggcattggtctgctgacctgtttttgtgtttttcttttttttatacacaacatttatttcaaactattgggagggatgagagtggcttaaaaacttccatccctacttttcaagagtgcagttgattctgaatctgaaagcccgcctctgtcctaaaatacaaacaagcacagacattaaacctggatactatatgataaagagggatgtaactattgaattggatacaaggatcagaatggaaagaaactcacgatgaaattgaacctggtttttgtatatttatcaaacttgtgctgagaatagtgtctgattatacgacttttaagcaaagttgggtgtaattaggtgaaaacagcccaggtcctcccgggagcacagaggggctaggggctggtccttctcgtttgctctagtcttgctttgctgtctggtgtagctcctctgctgctcccatctgcactaattgacccaaaacgtgggtatttcctgctacacaaaagccaaaaggtttcatgtagattttagttcactaaagggtgcccacaaaatagagattaattttaacttaaattttaagcttgaagattaggtactatctgtgaagttacacttttttttttttttttaaaggtagagatgtgtgtgtgtgtaggtattaaagatgtgttgttggtttccaaaaaggaacactggaaaataaattttgaatgtttatgttctcagaatcaggttgacagtcccttgctgacatggctttgctttgtgtaaatacagtggatctcaatcttcggggtgtgatgaatagcgaatcatctcaaatccttgagcactcagtctagtgaagatgttgtcattatgtacaatacataactagtttaattaactatgtgatgttaactattattaataaattttaacattttccaaaataaaaaaaaaagtgatt

SEQ ID NO: 54521 - DNA, 1237 bp, Homo sapiens
catgcagaagggggtggagaaagaagactcatggcttagaaatctttattcttagggcagtcagtagtattctaaagctttctgacaagataaaggaagtcaccaaaatttctttttttaaattgtatctaatcctcaacaacaaaccaaaacagaacaattaaacagccaaataaaacctcagggacaacatttttggtgtatttgagccctcccagcaagtttcaccttgggtttgtattttaaatgttttacaagaattgtccatgtgcttccctaggctgagctggcattggtctgctgacctgtttttgtgtttttcttttttttatacacaacatttatttcaaactattgggagggatgagagtggcttaaaaacttccatccctacttttcaagagtgcagttgattctgaatctgaaagcccgcctctgtcctaaaatacaaacaagcacagacattaaacctggatactatatgataaagagggatgtaactattgaattggatacaaggatcagaatggaaagaaactcacgatgaaattgaacctggtttttgtatatttatcaaacttgtgctgagaatagtgtctgattatacgacttttaagcaaagttgggtgtaattaggtgaaaacagcccaggtcctcccgggagcacagaggggctaggggctggtccttctcgtttgctctagtcttgctttgctgtctggtgtagctcctctgctgctcccatctgcactaattgacccaaaacgtgggtatttcctgctacacaaaagccaaaaggtttcatgtagattttagttcactaaagggtgcccacaaaatagagattaattttaacttaaattttaagcttgaagattaggtactatctgtgaagttacacttttttttttttttttaaaggtagagatgtgtgtgtgtgtaggtattaaagatgtgttgttggtttccaaaaaggaacactggaaaataaattttgaatgtttatgttctcagaatcaggttgacagtcccttgctgacatggctttgctttgtgtaaatacagtggatctcaatcttcggggtgtgatgaatagcgaatcatctcaaatccttgagcactcagtctagtgaagatgttgtcattatgtacaatacataactagtttaattaactatgtgatgttaactattattaataaattttaacattttccaaaataaaaaaaaaagtgatt

SEQ ID NO: 54522 - DNA, 2616 bp, Homo sapiens
attcgcggccgcgtcgacttttttttttttggattatgatttttgtttatttttcctgtttatccatatattatttttcaacaatgagtattgattacttatataataattttaaggctgtacacattgcagacagcaccccactgtttgaaaaactcctcctcagtagaacatggcagaccttcatcttccttccctgaaccttttccaaccttaggcttgccattctccaccagtgctaatgtcatgtctcttgaaatctgtattgaagtcagtatttcattcttgccagtttccactgtgtgtttaaatttggagtctggtgtctagcattagctggggttggggcttccactcctctcagcattggtaagcctcctcacccaccccatcccatgtccaagatcacccagttacacacttaccatctacccagttcattcacatcatcagtcccagagctgcagagatgctctttttctacctcctacttctctggctcttagagaggcagcatgggataatggggcaagcgaatagggccttaaagtagagggacaagggttctcttccctatctgccacttattagctatgtgacctcgtgtaagtctcttttctttttgagacagggtctccctctgtcacctaggctggagtacagtggtatgatcatagctcactgcagcctcgaactcctgggctcaagctatccttccaccttagccttctgagcagcagggactacaggcacatgccaccatgtccggctgatttatttatttttatttgggaagatgggggtctcactatgtcgcccaggctggtcatgaactcctggtctcaagcaaccctccaaccttggactcccaaagtgctgggattacaggtgtgagccctggccttgcctcaatttcctcatctgtaaaacggggttagtgaaactcacatcctatcagtggttttgaggatgggccgactcttgtattgcctgctctagtacaatcagcagctaaggcggctcactttccggccgtgctacaataggtaagaactaggatgctttagacgtgtgactgggcagtgggagcccctcacatgatcccgagatgccagacagtgtctctccgcacagggcgtgtgctggtccagaggcccgtttttccagtcgccccacaccccgggtccgcgatcacgctccccccacccatagccgagcctgacgcggcggtggctcatgcgcctttccgtcccagcctttagccacggaccacacgtcccatctcaggcgccccgcccctcccccgccccccgcccccggcgcgcctccccaggctgccggctccggtgtctgagcggccgcgcccgcgagccgtgagcgatgattggctgcgccacggcggcgggcggtccgtgggcgcacacaccctccccgcgcagccaatgggcgtgcgcacgtcactgatccggaggcccgcgggccggcagcccctcaataagccacattgttgcatgaaactccggcgcaggagtcccgggctgccgctggcaacatcgtgtcacccagctaagaaaatccgcgggcccgagccacgcgcctgtgaatcggagaggtcccactgcccgagtggagccgggctgagattcttctcaagttgagcctcagtgatcctgtggccgaagttagcgccttgacgtgggacaaccggacacgtcgccaggagagaactgaggcgccttctagcagttgtgacgccaaaatcacgtctccggagacccgcgccctccgccagccgggcgcaccctcgccggtagccttctttgtgcgccgtccggactcccagctcccggcccggcagccgagccccagcacaaagcagtcggaccgcgccgcccgcctcccctctcgcgtctccgcctcggtttcccaactctgcgccgtcgggccgcggcaggatgattgcctcgcatctgcttgcctacttcttcacggagctcaaccatgaccaagtgcagaaggtaagtcagcgcgggcggggcggcaggctgggctctggcaaagtggtctggcctccatcagtctcttcctcgaccctgcggggacccgcttcctccctactcggggcctgggagcggaaaaagtttgggcagccgggacactcctgggcgccaggagccacgtccgctaagcacagccggcgagtgcgcgcgggcggggagccgaggtcgcgctccgccgggcgccctccctccctgagctccggcacgcgctcacgctctctcccccagtccctttttccctgttactggaggggcgggtcaccccgcaggtagtcagggattgctgcgcccacgtgggagggagcccccttctgcagcgcgagttccggcgagagcacgtggagagaatcgtggctgcgggaggctgctccgctgccgcgtggggccgccgggggccgtccgcgctcgcggaccgcgtgtaggagacgagcggttcccttctccttccccgcggccctgcgggggtgggctcgaggagaagctgacccgggaaggagtaggaaaggggcagaggaactccgcccgccgcgccccctccccggaactgtggcgcccg

SEQ ID NO: 54523 - DNA, 2537 bp, Homo sapiens
attcgcggccgcgtcgacttttttttttttggattatgatttttgtttatttttcctgtttatccatatattatttttcaacaatgagtattgattacttatataataattttaaggctgtacacattgcagacagcaccccactgtttgaaaaactcctcctcagtagaacatggcagaccttcatcttccttccctgaaccttttccaaccttaggcttgccattctccaccagtgctaatgtcatgtctcttgaaatctgtattgaagtcagtatttcattcttgccagtttccactgtgtgtttaaatttggagtctggtgtctagcattagctggggttggggcttccactcctctcagcattggtaagcctcctcacccaccccatcccatgtccaagatcacccagttacacacttaccatctacccagttcattcacatcatcagtcccagagctgcagagatgctctttttctacctcctacttctctggctcttagagaggcagcatgggataatggggcaagcgaatagggccttaaagtagagggacaagggttctcttccctatctgccacttattagctatgtgacctcgtgtaagtctcttttctttttgagacagggtctccctctgtcacctaggctggagtacagtggtatgatcatagctcactgcagcctcgaactcctgggctcaagctatccttccaccttagccttctgagcagcagggactacaggcacatgccaccatgtccggctgatttatttatttttatttgggaagatgggggtctcactatgtcgcccaggctggtcatgaactcctggtctcaagcaaccctccaaccttggactcccaaagtgctgggattacaggtgtgagccctggccttgcctcaatttcctcatctgtaaaacggggttagtgaaactcacatcctatcagtggttttgaggatgggccgactcttgtattgcctgctctagtacaatcagcagctaaggcggctcactttccggccgtgctacaataggtaagaactaggatgctttagacgtgtgactgggcagtgggagcccctcacatgatcccgagatgccagacagtgtctctccgcacagggcgtgtgctggtccagaggcccgtttttccagtcgccccacaccccgggtccgcgatcacgctccccccacccatagccgagcctgacgcggcggtggctcatgcgcctttccgtcccagcctttagccacggaccacacgtcccatctcaggcgccccgcccctcccccgccccccgcccccggcgcgcctccccaggctgccggctccggtgtctgagcggccgcgcccgcgagccgtgagcgatgattggctgcgccacggcggcgggcggtccgtgggcgcacacaccctccccgcgcagccaatgggcgtgcgcacgtcactgatccggaggcccgcgggccggcagcccctcaataagccacattgttgcatgaaactccggcgcaggagtcccgggctgccgctggcaacatcgtgtcacccagctaagaaaatccgcgggcccgagccacgcgcctgtgaatcggagaggtcccactgcccgagtggagccgggctgagattcttctcaagttgagcctcagtgatcctgtggccgaagttagcgccttgacgtgggacaaccggacacgtcgccaggagagaactgaggcgccttctagcagttgtgacgccaaaatcacgtctccggagacccgcgccctccgccagccgggcgcaccctcgccggtagccttctttgtgcgccgtccggactcccagctcccggcccggcagccgagccccagcacaaagcagtcggaccgcgccgcccgcctcccctctcgcgtctccgcctcggtttcccaactctgcgccgtcgggccgcggcaggatgattgcctcgcatctgcttgcctacttcttcacggagctcaaccatgaccaagtgcagaaggtaagtcagcgcgggcggggcggcaggctgggctctggcaaagtggtctggcctccatcagtctcttcctcgaccctgcggggacccgcttcctccctactcggggcctgggagcggaaaaaccgaggtcgcgctccgccgggcgccctccctccctgagctccggcacgcgctcacgctctctcccccagtccctttttccctgttactggaggggcgggtcaccccgcaggtagtcagggattgctgcgcccacgtgggagggagcccccttctgcagcgcgagttccggcgagagcacgtggagagaatcgtggctgcgggaggctgctccgctgccgcgtggggccgccgggggccgtccgcgctcgcggaccgcgtgtaggagacgagcggttcccttctccttccccgcggccctgcgggggtgggctcgaggagaagctgacccgggaaggagtaggaaaggggcagaggaactccgcccgccgcgccccctccccggaactgtggcgcccg

SEQ ID NO: 54524 - DNA, 1308 bp, Homo sapiens
attcgcggccgcgtcgacttttttttttttggattatgatttttgtttatttttcctgtttatccatatattatttttcaacaatgagtattgattacttatataataattttaaggctgtacacattgcagacagcaccccactgtttgaaaaactcctcctcagtagaacatggcagaccttcatcttccttccctgaaccttttccaaccttaggcttgccattctccaccagtgctaatgtcatgtctcttgaaatctgtattgaagtcagtatttcattcttgccagtttccactgtgtgtttaaatttggagtctggtgtctagcattagctggggttggggcttccactcctctcagcattggtaagcctcctcacccaccccatcccatgtccaagatcacccagttacacacttaccatctacccagttcattcacatcatcagtcccagagctgcagagatgctctttttctacctcctacttctctggctcttagagaggcagcatgggataatggggcaagcgaatagggccttaaagtagagggacaagggttctcttccctatctgccacttattagctatgtgacctcgtgtaagtctcttttctttttgagacagggtctccctctgtcacctaggctggagtacagtggtatgatcatagctcactgcagcctcgaactcctgggctcaagctatccttccaccttagccttctgagcagcagggactacaggcacatgccaccatgtccggctgatttatttatttttatttgggaagatgggggtctcactatgtcgcccaggctggtcatgaactcctggtctcaagcaaccctccaaccttggactcccaaagtgctgggattacaggtgtgagccctggccttgcctcaatttcctcatctgtaaaacggggttagtgaaactcacatcctatcagtggttttgaggatgggccgactcttgtattgcctgctctagtacaatcagcagctaaggcggctcactttccggccgtgctacaataggtaagaactaggatgctttagacgtgtgactgggcagtgggagcccctcacatgatcccgagatgccagacagtgtctctccgcacagggcgtgtgctggtccagaggcccgtttttccagtcgccccacaccccgggtccgcgatcacgctccccccacccatagccgagcctgacgcggcggtggctcatgcgcctttccgtcccagcctttagccacggaccaccctcggccgatttaaacccagcatcgtactagcgg

SEQ ID NO: 54525 - DNA, 7079 bp, Homo sapiens
attcgcggccgcgtcgacttttttttttttggattatgatttttgtttatttttcctgtttatccatatattatttttcaacaatgagtattgattacttatataataattttaaggctgtacacattgcagacagcaccccactgtttgaaaaactcctcctcagtagaacatggcagaccttcatcttccttccctgaaccttttccaaccttaggcttgccattctccaccagtgctaatgtcatgtctcttgaaatctgtattgaagtcagtatttcattcttgccagtttccactgtgtgtttaaatttggagtctggtgtctagcattagctggggttggggcttccactcctctcagcattggtaagcctcctcacccaccccatcccatgtccaagatcacccagttacacacttaccatctacccagttcattcacatcatcagtcccagagctgcagagatgctctttttctacctcctacttctctggctcttagagaggcagcatgggataatggggcaagcgaatagggccttaaagtagagggacaagggttctcttccctatctgccacttattagctatgtgacctcgtgtaagtctcttttctttttgagacagggtctccctctgtcacctaggctggagtacagtggtatgatcatagctcactgcagcctcgaactcctgggctcaagctatccttccaccttagccttctgagcagcagggactacaggcacatgccaccatgtccggctgatttatttatttttatttgggaagatgggggtctcactatgtcgcccaggctggtcatgaactcctggtctcaagcaaccctccaaccttggactcccaaagtgctgggattacaggtgtgagccctggccttgcctcaatttcctcatctgtaaaacggggttagtgaaactcacatcctatcagtggttttgaggatgggccgactcttgtattgcctgctctagtacaatcagcagctaaggcggctcactttccggccgtgctacaataggtaagaactaggatgctttagacgtgtgactgggcagtgggagcccctcacatgatcccgagatgccagacagtgtctctccgcacagggcgtgtgctggtccagaggcccgtttttccagtcgccccacaccccgggtccgcgatcacgctccccccacccatagccgagcctgacgcggcggtggctcatgcgcctttccgtcccagcctttagccacggaccacacgtcccatctcaggcgccccgcccctcccccgccccccgcccccggcgcgcctccccaggctgccggctccggtgtctgagcggccgcgcccgcgagccgtgagcgatgattggctgcgccacggcggcgggcggtccgtgggcgcacacaccctccccgcgcagccaatgggcgtgcgcacgtcactgatccggaggcccgcgggccggcagcccctcaataagccacattgttgcatgaaactccggcgcaggagtcccgggctgccgctggcaacatcgtgtcacccagctaagaaaatccgcgggcccgagccacgcgcctgtgaatcggagaggtcccactgcccgagtggagccgggctgagattcttctcaagttgagcctcagtgatcctgtggccgaagttagcgccttgacgtgggacaaccggacacgtcgccaggagagaactgaggcgccttctagcagttgtgacgccaaaatcacgtctccggagacccgcgccctccgccagccgggcgcaccctcgccggtagccttctttgtgcgccgtccggactcccagctcccggcccggcagccgagccccagcacaaagcagtcggaccgcgccgcccgcctcccctctcgcgtctccgcctcggtttcccaactctgcgccgtcgggccgcggcaggatgattgcctcgcatctgcttgcctacttcttcacggagctcaaccatgaccaagtgcagaaggttgaccagtatctctaccacatgcgcctctctgatgagaccctcttggagatctctaagcggttccgcaaggagatggagaaagggcttggagccaccactcaccctactgcagcagtgaagatgctgcccacctttgtgaggtccactccagatgggacagaacacggagagttcctggctctggatcttggagggaccaacttccgtgtgctttgggtgaaagtaacggacaatgggctccagaaggtggagatggagaatcagatctatgccatccctgaggacatcatgcgaggcagtggcacccagctgtttgaccacattgccgaatgcctggctaacttcatggataagctacaaatcaaagacaagaagctcccactgggttttaccttctcgttcccctgccaccagactaaactagacgagagtttcctggtctcatggaccaagggattcaagtccagtggagtggaaggcagagacgttgtggctctgatccggaaggccatccagaggagaggggactttgatatcgacattgtggctgtggtgaatgacacagttgggaccatgatgacctgtggttatgatgaccacaactgtgagattggtctcattgtgggcacgggcagcaacgcctgctacatggaagagatgcgccacatcgacatggtggaaggcgatgaggggcggatgtgtatcaatatggagtggggggccttcggggacgatggctcgctcaacgacattcgcactgagtttgaccaggagattgacatgggctcactgaacccgggaaagcaactgtttgagaagatgatcagtgggatgtacatgggggagctggtgaggcttatcctggtgaagatggccaaggaggagctgctctttggggggaagctcagcccagagcttctcaacaccggtcgctttgagaccaaagacatctcagacattgaaggggagaaggatggcatccggaaggcccgtgaggtcctgatgcggttgggcctggacccgactcaggaggactgcgtggccactcaccggatctgccagatcgtgtccacacgctccgccagcctgtgcgcagccaccctggccgccgtgctgcagcgcatcaaggagaacaaaggcgaggagcggctgcgctctactattggggtcgacggttccgtctacaagaaacacccccattttgccaagcgtctacataagaccgtgcggcggctggtgcccggctgcgatgtccgcttcctccgctccgaggatggcagtggcaaaggtgcagccatggtgacagcagtggcttaccggctggccgatcaacaccgtgcccgccagaagacattagagcatctgcagctgagccatgaccagctgctggaggtcaagaggaggatgaaggtagaaatggagcgaggtctgagcaaggagactcatgccagtgcccccgtcaagatgctgcccacctacgtgtgtgctaccccggacggcacagagaaaggggacttcttggccttggaccttggaggaacaaatttccgggtcctgctggtccgtgttcggaatgggaagtggggtggagtggagatgcacaacaagatctacgccatcccgcaggaggtcatgcacggcaccggggacgagctctttgaccacattgtccagtgcatcgcggacttcctcgagtacatgggcatgaagggcgtgtccctgcctctgggttttaccttctccttcccctgccagcagaacagcctggacgagagcatcctcctcaagtggacaaaaggcttcaaggcatctggctgcgagggcgaggacgtggtgaccctgctgaaggaagcgatccaccggcgagaggagtttgacctggatgtggttgctgtggtgaacgacacagtcggaactatgatgacctgtggctttgaagaccctcactgtgaagttggcctcattgttggcacgggcagcaatgcctgctacatggaggagatgcgcaacgtggaactggtggaaggagaagaggggcggatgtgtgtgaacatggaatggggggccttcggggacaatggatgcctagatgacttccgcacagaatttgatgtggctgtggatgagctttcactcaaccccggcaagcagaggttcgagaaaatgatcagtggaatgtacctgggtgagattgtccgtaacattctcatcgatttcaccaagcgtggactgctcttccgaggccgcatctcagagcggctcaagacaaggggcatctttgaaaccaagttcttgtctcagattgagagtgactgcctggccctgctgcaagtccgagccatcctgcaacacttagggcttgagagcacctgtgacgacagcatcattgttaaggaggtgtgcactgtggtggcccggcgggcagcccagctctgtggcgcaggcatggccgctgtggtggacaggatacgagaaaaccgtgggctggacgctctcaaagtgacagtgggtgtggatgggaccctctacaagctacatcctcactttgccaaagtcatgcatgagacagtgaaggacctggctccgaaatgtgatgtgtctttcctgcagtcagaggatggcagcgggaagggggcggcgctcatcactgctgtggcctgccgcatccgtgaggctggacagcgatagaacccctgaaatcggaagggacttcctctttctctccttcttccctgttttaaattataagatgtcatccccttgtgtcagagacagaccccttggcttttgcttggcagagaggaccccactggactgggttttgtctctgcatctcattgtagagcttggtggctgagcttggccctattaagataaatagagttccaaataaggatttgttcacatgcatcataaccattcccattggttctcctaaaacatgaaaattatctcccttagtaatcccccttgccaaattccatgtccctgtataattctacaggatggggacactaatgaagatacggttgcttcaccttggagcctgaacatgacatttctaagtggggtgcatcccccagcactgatgttgttactgattctcctgtcagagatctgggaggtctccactgaggatgtgagcctgattatcctataggcagacgtggggagggtggaggggtgacagtggaggaaaatccatggatatccacgcagcagcccctctttaacctcatctacaagcatttgccctgtggattccagcatttgccattcctggaatcaaggaatcctgagtctgggcaatgaaaccaaagccaggagttgacgcatcctgcagttgggccagctgtcgcatctcagcggggcgcacatgttatccacaagcaatggacctttggggaagggggagtttttagtttgttttacaaatttttcctgcaaaagtggaatcactgtattttcattttaatttatatttgaaattttatttagttcttgaagtagatctgcttcttcatcttgacatgtaatggtcagttgtacgtaatgtatttatatgttaatttgttatgtatatagatgtgcaagtcttgtcagaattggcctcagtgtagttaaagggcagaaggggaagatactgactagtcatagaaatacctcattcgcctgtgggaagagaagggaagcctcttcagggtgagtgaatggcaaagcggttgcttctggctcctccttcccctgtggtcttggaagtgtgtggaaggcagggacagagatggaggccgagccaatagactgaagagaccacagcaattggctcctccatctagagattttcttggcagtattccatgggatgttaagcaaaggaaaccaaaggaatcgtttcaaatggactcatggcttagaaatctttattcttagggcagtcagtagtattctaaagctttctgacaagataaaggaagtcaccaaaatttctttttttaaattgtatctaatcctcaacaacaaaccaaaacagaacaattaaacagccaaataaaacctcagggacaacatttttggtgtatttgagccctcccagcaagtttcaccttgggtttgtattttaaatgttttacaagaattgtccatgtgcttccctaggctgagctggcattggtctgctgacctgtttttgtgtttttcttttttttatacacaacatttatttcaaactattgggagggatgagagtggcttaaaaacttccatccctacttttcaagagtgcagttgattctgaatctgaaagcccgcctctgtcctaaaatacaaacaagcacagacattaaacctggatactatatgataaagagggatgtaactattgaattggatacaaggatcagaatggaaagaaactcacgatgaaattgaacctggtttttgtatatttatcaaacttgtgctgagaatagtgtctgattatacgacttttaagcaaagttgggtgtaattagctcgtttgctctagtcttgctttgctgtctggtgtagctcctctgctgctcccatctgcactaattgacccaaaacgtgggtatttcctgctacacaaaagccaaaaggtttcatgtagattttagttcactaaagggtgcccacaaaatagagattaattttaacttaaattttaagcttgaagattaggtactatctgtgaagttacacttttttttttttttttaaaggtagagatgtgtgtgtgtgtaggtattaaagatgtgttgttggtttccaaaaaggaacactggaaaataaattttgaatgtttatgttctcagaatcaggttgacagtcccttgctgacatggctttgctttgtgtaaatacagtggatctcaatcttcggggtgtgatgaatagcgaatcatctcaaatccttgagcactcagtctagtgaagatgttgtcattatgtacaatacataactagtttaattaactatgtgatgttaactattattaataaattttaacattttccaaaataaaaaaaaaagtgatt

SEQ ID NO: 54526 - DNA, 6976 bp, Homo sapiens
attcgcggccgcgtcgacttttttttttttggattatgatttttgtttatttttcctgtttatccatatattatttttcaacaatgagtattgattacttatataataattttaaggctgtacacattgcagacagcaccccactgtttgaaaaactcctcctcagtagaacatggcagaccttcatcttccttccctgaaccttttccaaccttaggcttgccattctccaccagtgctaatgtcatgtctcttgaaatctgtattgaagtcagtatttcattcttgccagtttccactgtgtgtttaaatttggagtctggtgtctagcattagctggggttggggcttccactcctctcagcattggtaagcctcctcacccaccccatcccatgtccaagatcacccagttacacacttaccatctacccagttcattcacatcatcagtcccagagctgcagagatgctctttttctacctcctacttctctggctcttagagaggcagcatgggataatggggcaagcgaatagggccttaaagtagagggacaagggttctcttccctatctgccacttattagctatgtgacctcgtgtaagtctcttttctttttgagacagggtctccctctgtcacctaggctggagtacagtggtatgatcatagctcactgcagcctcgaactcctgggctcaagctatccttccaccttagccttctgagcagcagggactacaggcacatgccaccatgtccggctgatttatttatttttatttgggaagatgggggtctcactatgtcgcccaggctggtcatgaactcctggtctcaagcaaccctccaaccttggactcccaaagtgctgggattacaggtgtgagccctggccttgcctcaatttcctcatctgtaaaacggggttagtgaaactcacatcctatcagtggttttgaggatgggccgactcttgtattgcctgctctagtacaatcagcagctaaggcggctcactttccggccgtgctacaataggtaagaactaggatgctttagacgtgtgactgggcagtgggagcccctcacatgatcccgagatgccagacagtgtctctccgcacagggcgtgtgctggtccagaggcccgtttttccagtcgccccacaccccgggtccgcgatcacgctccccccacccatagccgagcctgacgcggcggtggctcatgcgcctttccgtcccagcctttagccacggaccacacgtcccatctcaggcgccccgcccctcccccgccccccgcccccggcgcgcctccccaggctgccggctccggtgtctgagcggccgcgcccgcgagccgtgagcgatgattggctgcgccacggcggcgggcggtccgtgggcgcacacaccctccccgcgcagccaatgggcgtgcgcacgtcactgatccggaggcccgcgggccggcagcccctcaataagccacattgttgcatgaaactccggcgcaggagtcccgggctgccgctggcaacatcgtgtcacccagctaagaaaatccgcgggcccgagccacgcgcctgtgaatcggagaggtcccactgcccgagtggagccgggctgagattcttctcaagttgagcctcagtgatcctgtggccgaagttagcgccttgacgtgggacaaccggacacgtcgccaggagagaactgaggcgccttctagcagttgtgacgccaaaatcacgtctccggagacccgcgccctccgccagccgggcgcaccctcgccggtagccttctttgtgcgccgtccggactcccagctcccggcccggcagccgagccccagcacaaagcagtcggaccgcgccgcccgcctcccctctcgcgtctccgcctcggtttcccaactctgcgccgtcgggccgcggcaggatgattgcctcgcatctgcttgcctacttcttcacggagctcaaccatgaccaagtgcagaaggttgaccagtatctctaccacatgcgcctctctgatgagaccctcttggagatctctaagcggttccgcaaggagatggagaaagggcttggagccaccactcaccctactgcagcagtgaagatgctgcccacctttgtgaggtccactccagatgggacagaacacggagagttcctggctctggatcttggagggaccaacttccgtgtgctttgggtgaaagtaacggacaatgggctccagaaggtggagatggagaatcagatctatgccatccctgaggacatcatgcgaggcagtggcacccagctgtttgaccacattgccgaatgcctggctaacttcatggataagctacaaatcaaagacaagaagctcccactgggttttaccttctcgttcccctgccaccagactaaactagacgagagtttcctggtctcatggaccaagggattcaagtccagtggagtggaaggcagagacgttgtggctctgatccggaaggccatccagaggagaggggactttgatatcgacattgtggctgtggtgaatgacacagttgggaccatgatgacctgtggttatgatgaccacaactgtgagattggtctcattgtgggcacgggcagcaacgcctgctacatggaagagatgcgccacatcgacatggtggaaggcgatgaggggcggatgtgtatcaatatggagtggggggccttcggggacgatggctcgctcaacgacattcgcactgagtttgaccaggagattgacatgggctcactgaacccgggaaagcaactgtttgagaagatgatcagtgggatgtacatgggggagctggtgaggcttatcctggtgaagatggccaaggaggagctgctctttggggggaagctcagcccagagcttctcaacaccggtcgctttgagaccaaagacatctcagacattgaaggggagaaggatggcatccggaaggcccgtgaggtcctgatgcggttgggcctggacccgactcaggaggactgcgtggccactcaccggatctgccagatcgtgtccacacgctccgccagcctgtgcgcagccaccctggccgccgtgctgcagcgcatcaaggagaacaaaggcgaggagcggctgcgctctactattggggtcgacggttccgtctacaagaaacacccccattttgccaagcgtctacataagaccgtgcggcggctggtgcccggctgcgatgtccgcttcctccgctccgaggatggcagtggcaaaggtgcagccatggtgacagcagtggcttaccggctggccgatcaacaccgtgcccgccagaagacattagagcatctgcagctgagccatgaccagctgctggaggtcaagaggaggatgaaggtagaaatggagcgaggtctgagcaaggagactcatgccagtgcccccgtcaagatgctgcccacctacgtgtgtgctaccccggacggcacagagaaaggggacttcttggccttggaccttggaggaacaaatttccgggtcctgctggtccgtgttcggaatgggaagtggggtggagtggagatgcacaacaagatctacgccatcccgcaggaggtcatgcacggcaccggggacgagctctttgaccacattgtccagtgcatcgcggacttcctcgagtacatgggcatgaagggcgtgtccctgcctctgggttttaccttctccttcccctgccagcagaacagcctggacgagagcatcctcctcaagtggacaaaaggcttcaaggcatctggctgcgagggcgaggacgtggtgaccctgctgaaggaagcgatccaccggcgagaggagtttgacctggatgtggttgctgtggtgaacgacacagtcggaactatgatgacctgtggctttgaagaccctcactgtgaagttggcctcattgttggcacgggcagcaatgcctgctacatggaggagatgcgcaacgtggaactggtggaaggagaagaggggcggatgtgtgtgaacatggaatggggggccttcggggacaatggatgcctagatgacttccgcacagaatttgatgtggctgtggatgagctttcactcaaccccggcaagcagaggttcgagaaaatgatcagtggaatgtacctgggtgagattgtccgtaacattctcatcgatttcaccaagcgtggactgctcttccgaggccgcatctcagagcggctcaagacaaggggcatctttgaaaccaagttcttgtctcagattgagagtgactgcctggccctgctgcaagtccgagccatcctgcaacacttagggcttgagagcacctgtgacgacagcatcattgttaaggaggtgtgcactgtggtggcccggcgggcagcccagctctgtggcgcaggcatggccgctgtggtggacaggatacgagaaaaccgtgggctggacgctctcaaagtgacagtgggtgtggatgggaccctctacaagctacatcctcactttgccaaagtcatgcatgagacagtgaaggacctggctccgaaatgtgatgtgtctttcctgcagtcagaggatggcagcgggaagggggcggcgctcatcactgctgtggcctgccgcatccgtgaggctggacagcgatagaacccctgaaatcggaagggacttcctctttctctccttcttccctgttttaaattataagatgtcatccccttgtgtcagagacagaccccttggcttttgcttggcagagaggaccccactggactgggttttgtctctgcatctcattgtagagcttggtggctgagcttggccctattaagataaatagagttccaaataaggatttgttcacatgcatcataaccattcccattggttctcctaaaacatgaaaattatctcccttagtaatcccccttgccaaattccatgtccctgtataattctacaggatggggacactaatgaagatacggttgcttcaccttggagcctgaacatgacatttctaagtggggtgcatcccccagcactgatgttgttactgattctcctgtcagagatctgggaggtctccactgaggatgtgagcctgattatcctataggcagacgtggggagggtggaggggtgacagtggaggaaaatccatggatatccacgcagcagcccctctttaacctcatctacaagcatttgccctgtggattccagcatttgccattcctggaatcaaggaatcctgagtctgggcaatgaaaccaaagccaggagttgacgcatcctgcagttgggccagctgtcgcatctcagcggggcgcacatgttatccacaagcaatggacctttggggaagggggagtttttagtttgttttacaaatttttcctgcaaaagtggaatcactgtattttcattttaatttatatttgaaattttatttagttcttgaagtagatctgcttcttcatcttgacatgtaatggtcagttgtacgtaatgtatttatatgttaatttgttatgtatatagatgtgcaagtcttgtcagaattggcctcagtgtagttaaagggcagaaggggaagatactgactagtcatagaaatacctcattcgcctgtgggaagagaagggaagcctcttcagggtgagtgaatggcaaagcggttgcttctggctcctccttcccctgtggtcttggaagtgtgtggaaggcagggacagagatggaggccgagccaatagactgaagagaccacagcaattggctcctccatctagagattttcttggcagtattccatgggatgttaagcaaaggaaaccaaaggaatcgtttcaaatggactcatggcttagaaatctttattcttagggcagtcagtagtattctaaagctttctgacaagataaaggaagtcaccaaaatttctttttttaaattgtatctaatcctcaacaacaaaccaaaacagaacaattaaacagccaaataaaacctcagggacaacatttttggtgtatttgagccctcccagcaagtttcaccttgggtttgtattttaaatgttttacaagaattgtccatgtgcttccctaggctgagctggcattggtctgctgacctgtttttgtgtttttcttttttttatacacaacatttatttcaaactattgggagggatgagagtggcttaaaaacttccatccctacttttcaagagtgcagttgattctgaatctgaaagcccgcctctgtcctaaaatacaaacaagcacagacattaaacctggatactatatgataaagagggatgtaactattgaattggatacaaggatcagaatggaaagaaactcacgatgaaattgaacctggtttttgtatatttatcaaacttgtgctgagaatagtgtctgattatacgacttttaagcaaagttgggtgtaattaggtgaaaacagcccaggtcctcccgggagcacagaggggctaggggctggtccttctcgtttgctctagtcttgctttgctgtctggtgtagctcctctgctgctcccatctgcactaattgacccaaaacgtgggtatttcctgctacacaaaagccaaaaggtttcatgtagattttagttcactaaagggtgcccacaaaatagagattaattttaacttaaattttaagcttgaagattaggtactatctgtgaagttacacttttttttttttttttaaaggtagagatgtgtgtgtgtgtaggtattaaagatgtgttgttggtttccaaaaaggaacactggaaaataaattttgaatgtttatgttctcagaatcaggttgacagtcccttgctgacatgtccctattaagcctagttgtactgcaccagccaatcc

SEQ ID NO: 54527 - DNA, 3688 bp, Homo sapiens
aggtgactctcaggatcttagggctactccacacacagtaaaggaataaaagaatggccactccataagcaaagcagccatgagggctgctggttgcacatttttatggttatttcttgattatatgctaaacaaggggtgtattattcatgccttccctttttagaccatatagagtttaaaaaaaaaaaagaaagaaaaggagtgaagtggggtgaggagagcagatggagcaagtgtgctggaaaggggcactgttgaaagaggacaacttgggagggtctcaccaaagaggtgacatttaagcacagacctgaatggaatgagagggtcagccatggtgtatgatatatattttatatacctgtaaatctcccatgcaattgtctgaaaggagaatattggggttcacctgtgaactgggcatctgcttcttccctctcaggagtttgacctggatgtggttgctgtggtgaacgacacagtcggaactatgatgacctgtggctttgaagaccctcactgtgaagttggcctcattgttggcacgggcagcaatgcctgctacatggaggagatgcgcaacgtggaactggtggaaggagaagaggggcggatgtgtgtgaacatggaatggggggccttcggggacaatggatgcctagatgacttccgcacagaatttgatgtggctgtggatgagctttcactcaaccccggcaagcagaggttcgagaaaatgatcagtggaatgtacctgggtgagattgtccgtaacattctcatcgatttcaccaagcgtggactgctcttccgaggccgcatctcagagcggctcaagacaaggggcatctttgaaaccaagttcttgtctcagattgagagtgactgcctggccctgctgcaagtccgagccatcctgcaacacttagggcttgagagcacctgtgacgacagcatcattgttaaggaggtgtgcactgtggtggcccggcgggcagcccagctctgtggcgcaggcatggccgctgtggtggacaggatacgagaaaaccgtgggctggacgctctcaaagtgacagtgggtgtggatgggaccctctacaagctacatcctcactttgccaaagtcatgcatgagacagtgaaggacctggctccgaaatgtgatgtgtctttcctgcagtcagaggatggcagcgggaagggggcggcgctcatcactgctgtggcctgccgcatccgtgaggctggacagcgatagaacccctgaaatcggaagggacttcctctttctctccttcttccctgttttaaattataagatgtcatccccttgtgtcagagacagaccccttggcttttgcttggcagagaggaccccactggactgggttttgtctctgcatctcattgtagagcttggtggctgagcttggccctattaagataaatagagttccaaataaggatttgttcacatgcatcataaccattcccattggttctcctaaaacatgaaaattatctcccttagtaatcccccttgccaaattccatgtccctgtataattctacaggatggggacactaatgaagatacggttgcttcaccttggagcctgaacatgacatttctaagtggggtgcatcccccagcactgatgttgttactgattctcctgtcagagatctgggaggtctccactgaggatgtgagcctgattatcctataggcagacgtggggagggtggaggggtgacagtggaggaaaatccatggatatccacgcagcagcccctctttaacctcatctacaagcatttgccctgtggattccagcatttgccattcctggaatcaaggaatcctgagtctgggcaatgaaaccaaagccaggagttgacgcatcctgcagttgggccagctgtcgcatctcagcggggcgcacatgttatccacaagcaatggacctttggggaagggggagtttttagtttgttttacaaatttttcctgcaaaagtggaatcactgtattttcattttaatttatatttgaaattttatttagttcttgaagtagatctgcttcttcatcttgacatgtaatggtcagttgtacgtaatgtatttatatgttaatttgttatgtatatagatgtgcaagtcttgtcagaattggcctcagtgtagttaaagggcagaaggggaagatactgactagtcatagaaatacctcattcgcctgtgggaagagaagggaagcctcttcagggtgagtgaatggcaaagcggttgcttctggctcctccttcccctgtggtcttggaagtgtgtggaaggcagggacagagatggaggccgagccaatagactgaagagaccacagcaattggctcctccatctagagattttcttggcagtattccatgggatgttaagcaaaggaaaccaaaggaatcgtttcaaatggactcatggcttagaaatctttattcttagggcagtcagtagtattctaaagctttctgacaagataaaggaagtcaccaaaatttctttttttaaattgtatctaatcctcaacaacaaaccaaaacagaacaattaaacagccaaataaaacctcagggacaacatttttggtgtatttgagccctcccagcaagtttcaccttgggtttgtattttaaatgttttacaagaattgtccatgtgcttccctaggctgagctggcattggtctgctgacctgtttttgtgtttttcttttttttatacacaacatttatttcaaactattgggagggatgagagtggcttaaaaacttccatccctacttttcaagagtgcagttgattctgaatctgaaagcccgcctctgtcctaaaatacaaacaagcacagacattaaacctggatactatatgataaagagggatgtaactattgaattggatacaaggatcagaatggaaagaaactcacgatgaaattgaacctggtttttgtatatttatcaaacttgtgctgagaatagtgtctgattatacgacttttaagcaaagttgggtgtaattaggtgaaaacagcccaggtcctcccgggagcacagaggggctaggggctggtccttctcgtttgctctagtcttgctttgctgtctggtgtagctcctctgctgctcccatctgcactaattgacccaaaacgtgggtatttcctgctacacaaaagccaaaaggtttcatgtagattttagttcactaaagggtgcccacaaaatagagattaattttaacttaaattttaagcttgaagattaggtactatctgtgaagttacacttttttttttttttttaaaggtagagatgtgtgtgtgtgtaggtattaaagatgtgttgttggtttccaaaaaggaacactggaaaataaattttgaatgtttatgttctcagaatcaggttgacagtcccttgctgacatggctttgctttgtgtaaatacagtggatctcaatcttcggggtgtgatgaatagcgaatcatctcaaatccttgagcactcagtctagtgaagatgttgtcattatgtacaatacataactagtttaattaactatgtgatgttaactattattaataaattttaacattttccaaaataaaaaaaaaagtgatt

SEQ ID NO: 54528 - DNA, 4913 bp, Homo sapiens
attcgcggccgcgtcgacttttttttttttggattatgatttttgtttatttttcctgtttatccatatattatttttcaacaatgagtattgattacttatataataattttaaggctgtacacattgcagacagcaccccactgtttgaaaaactcctcctcagtagaacatggcagaccttcatcttccttccctgaaccttttccaaccttaggcttgccattctccaccagtgctaatgtcatgtctcttgaaatctgtattgaagtcagtatttcattcttgccagtttccactgtgtgtttaaatttggagtctggtgtctagcattagctggggttggggcttccactcctctcagcattggtaagcctcctcacccaccccatcccatgtccaagatcacccagttacacacttaccatctacccagttcattcacatcatcagtcccagagctgcagagatgctctttttctacctcctacttctctggctcttagagaggcagcatgggataatggggcaagcgaatagggccttaaagtagagggacaagggttctcttccctatctgccacttattagctatgtgacctcgtgtaagtctcttttctttttgagacagggtctccctctgtcacctaggctggagtacagtggtatgatcatagctcactgcagcctcgaactcctgggctcaagctatccttccaccttagccttctgagcagcagggactacaggcacatgccaccatgtccggctgatttatttatttttatttgggaagatgggggtctcactatgtcgcccaggctggtcatgaactcctggtctcaagcaaccctccaaccttggactcccaaagtgctgggattacaggtgtgagccctggccttgcctcaatttcctcatctgtaaaacggggttagtgaaactcacatcctatcagtggttttgaggatgggccgactcttgtattgcctgctctagtacaatcagcagctaaggcggctcactttccggccgtgctacaataggtaagaactaggatgctttagacgtgtgactgggcagtgggagcccctcacatgatcccgagatgccagacagtgtctctccgcacagggcgtgtgctggtccagaggcccgtttttccagtcgccccacaccccgggtccgcgatcacgctccccccacccatagccgagcctgacgcggcggtggctcatgcgcctttccgtcccagcctttagccacggaccacacgtcccatctcaggcgccccgcccctcccccgccccccgcccccggcgcgcctccccaggctgccggctccggtgtctgagcggccgcgcccgcgagccgtgagcgatgattggctgcgccacggcggcgggcggtccgtgggcgcacacaccctccccgcgcagccaatgggcgtgcgcacgtcactgatccggaggcccgcgggccggcagcccctcaataagccacattgttgcatgaaactccggcgcaggagtcccgggctgccgctggcaacatcgtgtcacccagctaagaaaatccgcgggcccgagccacgcgcctgtgaatcggagaggtcccactgcccgagtggagccgggctgagattcttctcaagttgagcctcagtgatcctgtggccgaagttagcgccttgacgtgggacaaccggacacgtcgccaggagagaactgaggcgccttctagcagttgtgacgccaaaatcacgtctccggagacccgcgccctccgccagccgggcgcaccctcgccggtagccttctttgtgcgccgtccggactcccagctcccggcccggcagccgagccccagcacaaagcagtcggaccgcgccgcccgcctcccctctcgcgtctccgcctcggtttcccaactctgcgccgtcgggccgcggcaggatgattgcctcgcatctgcttgcctacttcttcacggagctcaaccatgaccaagtgcagaaggttgaccagtatctctaccacatgcgcctctctgatgagaccctcttggagatctctaagcggttccgcaaggagatggagaaagggcttggagccaccactcaccctactgcagcagtgaagatgctgcccacctttgtgaggtccactccagatgggacagaacacggagagttcctggctctggatcttggagggaccaacttccgtgtgctttgggtgaaagtaacggacaatgggctccagaaggtggagatggagaatcagatctatgccatccctgaggacatcatgcgaggcagtggcacccagctgtttgaccacattgccgaatgcctggctaacttcatggataagctacaaatcaaagacaagaagctcccactgggttttaccttctcgttcccctgccaccagactaaactagacgagagtttcctggtctcatggaccaagggattcaagtccagtggagtggaaggcagagacgttgtggctctgatccggaaggccatccagaggagaggggactttgatatcgacattgtggctgtggtgaatgacacagttgggaccatgatgacctgtggttatgatgaccacaactgtgagattggtctcattgtgggcacgggcagcaacgcctgctacatggaagagatgcgccacatcgacatggtggaaggcgatgaggggcggatgtgtatcaatatggagtggggggccttcggggacgatggctcgctcaacgacattcgcactgagtttgaccaggagattgacatgggctcactgaacccgggaaagcaactgtttgagaagatgatcagtgggatgtacatgggggagctggtgaggcttatcctggtgaagatggccaaggaggagctgctctttggggggaagctcagcccagagcttctcaacaccggtcgctttgagaccaaagacatctcagacattgaaggggagaaggatggcatccggaaggcccgtgaggtcctgatgcggttgggcctggacccgactcaggaggactgcgtggccactcaccggatctgccagatcgtgtccacacgctccgccagcctgtgcgcagccaccctggccgccgtgctgcagcgcatcaaggagaacaaaggcgaggagcggctgcgctctactattggggtcgacggttccgtctacaagaaacacccccattttgccaagcgtctacataagaccgtgcggcggctggtgcccggctgcgatgtccgcttcctccgctccgaggatggcagtggcaaaggtgcagccatggtgacagcagtggcttaccggctggccgatcaacaccgtgcccgccagaagacattagagcatctgcagctgagccatgaccagctgctggaggtcaagaggaggatgaaggtagaaatggagcgaggtctgagcaaggagactcatgccagtgcccccgtcaagatgctgcccacctacgtgtgtgctaccccggacggcacagagaaaggggacttcttggccttggaccttggaggaacaaatttccgggtcctgctggtccgtgttcggaatgggaagtggggtggagtggagatgcacaacaagatctacgccatcccgcaggaggtcatgcacggcaccggggacgagctctttgaccacattgtccagtgcatcgcggacttcctcgagtacatgggcatgaagggcgtgtccctgcctctgggttttaccttctccttcccctgccagcagaacagcctggacgagagcatcctcctcaagtggacaaaaggcttcaaggcatctggctgcgagggcgaggacgtggtgaccctgctgaaggaagcgatccaccggcgagaggagtttgacctggatgtggttgctgtggtgaacgacacagtcggaactatgatgacctgtggctttgaagaccctcactgtgaagttggcctcattgttggcacgggcagcaatgcctgctacatggaggagatgcgcaacgtggaactggtggaaggagaagaggggcggatgtgtgtgaacatggaatggggggccttcggggacaatggatgcctagatgacttccgcacagaatttgatgtggctgtggatgagctttcactcaaccccggcaagcagaggttcgagaaaatgatcagtggaatgtacctgggtgagattgtccgtaacattctcatcgatttcaccaagcgtggactgctcttccgaggccgcatctcagagcggctcaagacaaggggcatctttgaaaccaagttcttgtctcagattgagagtgactgcctggccctgctgcaagtccgagccatcctgcaacacttagggcttgagagcacctgtgacgacagcatcattgttaaggaggtgtgcactgtggtggcccggcgggcagcccagctctgtggcgcaggcatggccgctgtggtggacaggatacgagaaaaccgtgggctggacgctctcaaagtgacagtgggtgtggatgggaccctctacaagctacatcctcactttgccaaagtcatgcatgagacagtgaaggacctggctccgaaatgtgatgtgtctttcctgcagtcagaggatggcagcgggaagggggcggcgctcatcactgctgtggcctgccgcatccgtgaggctggacagcgatagaacccctgaaatcggaagggacttcctctttctctccttcttccctgttttaaattataagatgtcatccccttgtgtcagagacagaccccttggcttttgcttggcagagaggaccccactggactgggttttgtctctgcatctcattgtagagcttggtggctgagcttggccctattaagataaatagagttccaaata

SEQ ID NO: 54529 - DNA, 147 bp, Homo sapiens
cagtgatacgaacatttcttgggggttcacaagcatcaattgccaagactggttcagaaggatggctaggttttccaactccagcagcattttctgcatacaccctgaattcataaataagtccagcactgattgttgtgactttga

SEQ ID NO: 54530 - DNA, 308 bp, Homo sapiens
ctttgcagttgctctcccctcagcctggaacactgccattgcctttgccagtgggtacctccttgtcttacaggtctgagttcagatgtgctctttgtggccctccatgaccatcacctatatttagtacaagtctacccttcccccaatgcagtcgtatcttcctccttgtcttccctgtgcataccactatttgaaatcacctcgctcattatttacttatttattgtctggtttcccacaaataaaataagcaccatgagagcagggtccttggctgtctgattcagtataatattcttagaatc

SEQ ID NO: 54531 - DNA, 446 bp, Homo sapiens
tcacttatatgtggaattttgaaaacatgaactcatagaaaccaagagttgaagagtagttaccaggagtcagaagtgggagaaaagggaagctgttggtcaaactgtataaacttacagttataagatgactaaattcagagaccttttgtacagcatgatgactacagttaataataatatattgcatacctgatatttaccaagagagtagatcctaaatattctcaccacaaacgaaaggtaagtatgtgaggtaacaggtatattagttagcttgattgtggtagtcatttcaccatgtgcacatagatcaaaacatcacgttgtacatcttgaatatatttaattttatttgtcagttatgtatcaataaagctgaagaaaagagtagtacttgattgcatgtactgaacaatcaggcctgttaataatttaatattgtt

SEQ ID NO: 54532 - DNA, 490 bp, Homo sapiens
agggatggggcgtgtgagggcactggaggtgtggatagcagttggatgcccagctgggggtaggcagtctggagggtcctgaatttgggagctcagatgtgtgggccacccggacatgctggagaagggcatttggggaaaacggctctgaggggtggacacctgccctctggcctcaccagctgtggacaggtgtgtgctgattgtgtttctggtcttttaaggacatcgtgctgggctgcagatgttgctgttttttaattgaaactttattgcccgctggacatggtggctcatgccccctaatccccacctaaccctaatcctaatcacagcactttgggaggctgtggtgggaggatcacttaagcctaggaggttaagactggagtgctgtacaatcgcaccactgcattccacagcctgggcaacagagggggaccctgtctcaaaacttgttccctctgcccaacttttcctaacagtgagt

SEQ ID NO: 54533 - DNA, 340 bp, Homo sapiens
tctcccaagctctgaagcaggttctctactgtctcatggtgccactctatgactgagccgcagtgagggaaatgaaaagagaaccacctggttagggttagatattgtgctgcaggcaggtgacaagaagtctgcccttcacccagaataattcaagcaaaacattagctcagaagaataaagggcccagagatggggtctttagggagttatttctctgatgatccatgtaccctcacaagtaagttcccagacaaaacttctcccaaccccatcgtatctatctctctttctttaaatcacttttcgttgtaaccatctgggaaataaaagtgacaat

SEQ ID NO: 54534 - DNA, 394 bp, Homo sapiens
tcacccaagctggaatactgtggcataatcccagctcattgcagccttgacctcctgggctcagatgatctccccgtctcagcctcccaggtagctgggaccacaggcacacacctagctaaatttttggagatacaggttttgccatattgcccaggctggtctcaaactcctgaattcaagagatcttcccaactcggcttcccaaagtgctggggttacaggcatgagccaccatgcccagccaggaaatatcttttaaattgtataggaacttcaagaaacataagccagaccaaacaagacttaatgaaaagaactccctaaaagagtattatctgagatattaacataacactaaagtttattgtcttctaactccaggaactcctca

SEQ ID NO: 54535 - DNA, 338 bp, Homo sapiens
agtagctcatgctcctgggggaaccagagccaagatgcggactgtgagcgtagagaggagggatggagtctagagaggtgtagaaagtgggattgacagcaaatggagtttttgtgcagttggcatggggcgggggacagtacggtagctagagaaggcatctataatgtggggggacttttacctgaggccaaaggaatgaatcttatggtgaaatctgaggtgccgtgcaaggggattttggggaaccctgctttataccatatgagtttctgatctactgtcctatcagaaagggcttatcctcccgtctctcagtactcttagctctgggcaca

SEQ ID NO: 54536 - DNA, 450 bp, Homo sapiens
tgtttttatctctttgagggctttgttctaatatattaaagttctcctttgttcttcgtattatttttcctttcaaagtcaattgttctgtttatttctcttgctttttctcttcaatgctattgatttttcttaagtggtaatccttcgttgcccatttttatttataaatgaatggctgataaatagctagaaaggaatccttccctagctttagtagttctgttttctgacagagcttgcataggagagtctgctatgatccctgtgcagatgggtggggcatgttagagtcatttcctgtggagtgtctaggcagggaggagtgaagctgggaaatcctactattactagagttagggcaaggacacttcagtgtatggtcatggtttatttgtttgtttgtttgtttttgagatagagccttgctctgtctcccaagctggagtg

SEQ ID NO: 54537 - DNA, 385 bp, Homo sapiens
ggctgtgatgtagaaatcacacatcaccatcacttctagttgtatctcattggccagaacctactcacatgactacactgagctgtagaagatgctgagaaaggtaatctttagctgggtgggcatgtgtcaacctaaactggggggatggttgttttactagaggacaaacaaaatagatactgggtggatagggaggggcacattttctgccacaaacattaaggaattttttaaaaaaaaaactactactctcatcataagaaatgagtggcttttttctgaacttcctttcagttctccatatatattcgtaacttgtacacttgttattacagtgttggcatttgtttacacagccttctctgagcttgaatgtatttgt

SEQ ID NO: 54538 - DNA, 622 bp, Homo sapiens
catgcatggcatggagtgagtctttgcctcccctgtgcaatccttcttccccaacctgccagctttcctcttatcctgaccacagttcaccaccatcccttttccccaatctcagctgcctggtcagcacctctttcgaacattctgagccccaactttgcagtaaggtggtagaaaatggaaatccagagagctgcaaaaagatttttttttaatgtaatgaatggggagtagttttgtgaacacactcgtattcacctcttctttcctctgggaggcctgcctgccttcccctcccccccaaccttgatccctgtctgctggaaaaggcgcgattgcttctcttcctcttctgcccaagaccaagactctaggtctgatatcctttttagccacacacacacaccccccacacacgaagtcttcttaatcttcttgaatttaccagttactctggacacttcttgccataaccccatttcacagacaaaggcttaggagggaaaaagaaccaaactgtttctgtgtttgtcatgttaatgatgtccatccccacacacccagttcccatccctgatgcttcttgtgcctgtatcttgaaccttcagaatgaaaaaaaaaa

SEQ ID NO: 54539 - DNA, 543 bp, Homo sapiens
ctccgtctcaaaaaacaacaacaacaacaacaaaaaaaaaacacacaaaacagtgacttaattataattcaaaataattattagaccaagattttcactatttttaaccctaataacaaggttctagtcttcatttctctcctagttgaatgactttgggcaaatcttttcatatctagtggctgttttctcctttgtaatgaagatatgtcaaagtttatgagtacaggcttatcttgttttattgtgctttgctttattgtgctttgcagatattgcattttttttacaaattgcaggtttgtagcaacccagaatcaagtaagtctgtcagtgccgtttcccaacagcatatgcttacttcatgtctttgtgtcacattttggtaattcttgcaatattttaaactttttcattattattattatctactatggtgatctgtgatcagtgatctttgatgttactatgataattgtcataggatgtcaaaagccgcacccatgtaaaatggcaaatataatcaataaatgtgtgtgttct

SEQ ID NO: 54540 - DNA, 89 bp, Homo sapiens
ttcttcattttgtataccgtcatgacactgagtttcatataaatggtttgaactcattacttttccatgtgtttgttgtccacaaatgc

SEQ ID NO: 54541 - DNA, 922 bp, Homo sapiens
gggctaaaggattgtgggtctgtgctccatttgatagtaatctctttcccttagatgggaagagacagaaatgatcctcatagaatatttatagtccaaattctgtcaacagtgtaagcagtcataagatttatagatcttttagttagatattattgatttggttttcctttactttctagctcctgtgacttctagaagtacatctacttggagaatacccagcaggaagagacgtaagagcaattaaaaactcttaatgtaacaaatgtctttctttgctgcaaaagctacattcactttttatgttatattctttaaaataaaaaattaatttgttgggattttagatgatttgcattttacattttcaattagatgagttgggctggtataaaacataagcctcaaaatgttcaaaggcacaagtgcaatgtaagtttatttttcactcacataaataggataaagtagttcctgagtagagggggtgcccacacagtcattcagggcccagctgatgggggctctgacatctttaagatgttgcttccatggttcccttggataagaaactgagatggaagcagaagtatgtgcaaactaataatgaaagcctaagaagcgtaagaaacaacgtcgtcctaggattgtattcagaaaagattgaacattatgtatgttccttttatttgattatgcatgaatgagataggagaaaacaatggaaggatccacactgatctgttgacttcactagctgggagaccagagacagaatagggtaggaaaagagagctttggggttatatacatttgcattcattggtcttcttatgacaagcctatattgctttcttaatttgaaaccacccaatgaaatggatgatttataataaatacatatttttcccaaagttaa

SEQ ID NO: 54542 - DNA, 1900 bp, Homo sapiens
ctgaggcccacgcagggcctagggtgggaagatggcaggtgggggcggcgacctgagcaccaggaggctgaatgaatgtatttcaccagtagcaaatgagatgaaccatcttcctgcacacagccacgatttgcaaaggatgttcacggaagaccagggtgtagatgacaggctgctctatgacattgtattcaagcacttcaaaagaaataaggtggagatttcaaatgcaataaaaaagacatttccattcctcgagggcctccgtgatcgtgatctcatcacaaataaaatgtttgaagattctcaagattcttgtagaaacctggtccctgtacagagagtggtgtacaatgttcttagtgaactggagaagacatttaacctgccagttctggaagcactgttcagcgatgtcaacatgcaggaataccccgatttaattcacatttataaaggctttgaaaatgtaatccatgacaaattgcctctccaagaaagtgaagaagaagagagggaggagaggtctggcctccaactaagtcttgaacaaggaactggtgaaaactcttttcgaagcctgacttggccaccttcgggttccccatctcatgctggtacaaccccacctgaaaatggactctcagagcacccctgtgaaacagaacagataaatgcaaagagaaaagatacaaccagtgacaaagatgattcgctaggaagccaacaaacaaatgaacaatgtgctcaaaaggctgagccaacagagtcctgcgaacaaattgctgtccaagtgaataatggggatgctggaagggagatgccctgcccgttgccctgtgatgaagaaagcccagaggcagagctacacaaccatggaatccaaattaattcctgttctgtgcgactggtggatataaaaaaggaaaagccattttctaattcaaaagttgagtgccaagcccaagcaagaactcatcataaccaggcatctgacataatagtcatcagcagtgaggactctgaaggatccactgacgttgatgagcccttagaagtcttcatctcagcaccgagaagtgagcctgtgatcaataatgacaaccctttagaatcaaatgatgaaaaggagggccaagaagccacttgctcacgaccccagattgtaccagagcccatggatttcagaaaattatctacattcagagaaagttttaagaaaagagtgataggacaagaccacgacttttcagaatccagtgaggaggaggcgcccgcagaagcctcaagcggggcactgagaagcaagcatggtgagaaggctcctgtgacttctagaagtacatctacttggagaatacccagcaggaagagacgtttcagcagtagtgacttttcagacctgagtaatggagaagagcttcaggaaacctgcagctcatccctaagaagagggtcaggtaaagaagattaggatgccaagacttggcctgcagaatgtcaggaatgtgaattaaaagctgctgtttccagacgctttttattctgagcaccttcactaccttgtatccagttcatctgggaactcctttttgcattttagaaaatggaaagaggcaggaaattatgataaactcatgtttaacagaaagagtttcactgactaaatgtatgtaattatattttgttgttgtagaagaaataaatagcaaatttgtggtattcttttttttaaacctgctctcattcctattaacactaagatcttagatttttatagtgataaatgggttgacatcattgtcgtttgtaattgtaaagcctcaaaagacaactgttcctactatgtaattatagacagaaataaaaacttcagatcaaacactctcaaacgttagta

SEQ ID NO: 54543 - DNA, 605 bp, Homo sapiens
ccctttatttcaagatgaaattctcagggttatttatgaacagaagggaaaaatacagtgaggaaccacaaaagaaaaagagatttcagatgtagagcccatcccttaatttagctgtggggagtgggtagtcactaatgttggggggaaggagaatctttgaaggggagtgggcacaaataaaaatgtttacaaatcacaatttaggatcacagccacaagaacctgaaaataagaagtgctcctgtgtcatgtgttttccaaaaggtgtgccaagaagccaagaagcaaggactgaaagtagtcaagcatctgacatgatggataccatggatgttgaaaacaattctactttggaaaaacacagtgggaaaagaaacggagtcttgctccgtggcccagactgaaagtgcagtggtgtcatcacagctcactgcaatctccttccaggttcaagcaattgtcctgcctcagactcccaagtagcagggactacaggaaaaaagagaaggcatagatctaaagtaaatggtctccaaagagggagaaagaaagacagacctagaaaacatttaactcttaataacaaagtccaaaagaaaaga

SEQ ID NO: 54544 - DNA, 2062 bp, Homo sapiens
ctgaggcccacgcagggcctagggtgggaagatggcaggtgggggcggcgacctgagcaccaggaggctgaatgaatgtatttcaccagtagcaaatgagatgaaccatcttcctgcacacagccacgatttgcaaaggatgttcacggaagaccagggtgtagatgacaggctgctctatgacattgtattcaagcacttcaaaagaaataaggtggagatttcaaatgcaataaaaaagacatttccattcctcgagggcctccgtgatcgtgatctcatcacaaataaaatgtttgaagattctcaagattcttgtagaaacctggtccctgtacagagagtggtgtacaatgttcttagtgaactggagaagacatttaacctgccagttctggaagcactgttcagcgatgtcaacatgcaggaataccccgatttaattcacatttataaaggctttgaaaatgtaatccatgacaaattgcctctccaagaaagtgaagaagaagagagggaggagaggtctggcctccaactaagtcttgaacaaggaactggtgaaaactcttttcgaagcctgacttggccaccttcgggttccccatctcatgctggtacaaccccacctgaaaatggactctcagagcacccctgtgaaacagaacagataaatgcaaagagaaaagatacaaccagtgacaaagatgattcgctaggaagccaacaaacaaatgaacaatgtgctcaaaaggctgagccaacagagtcctgcgaacaaattgctgtccaagtgaataatggggatgctggaagggagatgccctgcccgttgccctgtgatgaagaaagcccagaggcagagctacacaaccatggaatccaaattaattcctgttctgtgcgactggtggatataaaaaaggaaaagccattttctaattcaaaagttgagtgccaagcccaagcaagaactcatcataaccaggcatctgacataatagtcatcagcagtgaggactctgaaggatccactgacgttgatgagcccttagaagtcttcatctcagcaccgagaagtgagcctgtgatcaataatgacaaccctttagaatcaaatgatgaaaaggagggccaagaagccacttgctcacgaccccagattgtaccagagcccatggatttcagaaaattatctacattcagagaaagttttaagaaaagagtgataggacaagaccacgacttttcagaatccagtgaggaggaggcgcccgcagaagcctcaagcggggcactgagaagcaagcatggtgagaaggctcctgtgacttctagaagtacatctacttggagaatacccagcaggaagagacgtaagagcaattaaaaactcttaatgtaacaaatgtctttctttgctgcaaaagctacattcactttttatgttatattctttaaaataaaaaattaatttgttgggattttagatgatttgcattttacattttcaattagatgagttgggctggtataaaacataagcctcaaaatgttcaaaggcacaagtgcaatgtaagtttatttttcactcacataaataggataaagtagttcctgagtagagggggtgcccacacagtcattcagggcccagctgatgggggctctgacatctttaagatgttgcttccatggttcccttggataagaaactgagatggaagcagaagtatgtgcaaactaataatgaaagcctaagaagcgtaagaaacaacgtcgtcctaggattgtattcagaaaagattgaacattatgtatgttccttttatttgattatgcatgaatgagataggagaaaacaatggaaggatccacactgatctgttgacttcactagctgggagaccagagacagaatagggtaggaaaagagagctttggggttatatacatttgcattcattggtcttcttatgacaagcctatattgctttcttaatttgaaaccacccaatgaaatggatgatttataataaatacatatttttcccaaagttaa

SEQ ID NO: 54545 - DNA, 1798 bp, Homo sapiens
ctgaggcccacgcagggcctagggtgggaagatggcaggtgggggcggcgacctgagcaccaggaggctgaatgaatgtatttcaccagtagcaaatgagatgaaccatcttcctgcacacagccacgatttgcaaaggatgttcacggaagaccagggtgtagatgacaggctgctctatgacattgtattcaagcacttcaaaagaaataaggtggagatttcaaatgcaataaaaaagacatttccattcctcgagggcctccgtgatcgtgatctcatcacaaataaaatgtttgaagattctcaagattcttgtagaaacctggtccctgtacagagagtggtgtacaatgttcttagtgaactggagaagacatttaacctgccagttctggaagcactgttcagcgatgtcaacatgcaggaataccccgatttaattcacatttataaaggctttgaaaatgtaatccatgacaaattgcctctccaagaaagtgaagaagaagagagggaggagaggtctggcctccaactaagtcttgaacaaggaactggtgaaaactcttttcgaagcctgacttggccaccttcgggttccccatctcatgctggtacaaccccacctgaaaatggactctcagagcacccctgtgaaacagaacagataaatgcaaagagaaaagatacaaccagtgacaaagatgattcgctaggaagccaacaaacaaatgaacaatgtgctcaaaaggctgagccaacagagtcctgcgaacaaattgctgtccaagtgaataatggggatgctggaagggagatgccctgcccgttgccctgtgatgaagaaagcccagaggcagagctacacaaccatggaatccaaattaattcctgttctgtgcgactggtggatataaaaaaggaaaagccattttctaattcaaaagttgagtgccaagcccaagcaagaactcatcataaccaggcatctgacataatagtcatcagcagtgaggactctgaaggatccactgacgttgatgagcccttagaagtcttcatctcagcaccgagaagtgagcctgtgatcaataatgacaaccctttagaatcaaatgatgaaaaggagggccaagaagccacttgctcacgaccccagattgtaccagagcccatggatttcagaaaattatctacattcagagaaagttttaagaaaagagtgataggacaagaccacgacttttcagaatccagtgaggaggaggcgcccgcagaagcctcaagcggggcactgagaagcaagcatggtgagaaggctcctgtgacttctagaagtacatctacttggagaatacccagcaggaagagacgtttcagcagtagtgacttttcagacctgagtaatggagaagagcttcaggaaacctgcagctcatccctaagaagagggtcaggtgtgccaagaagccaagaagcaaggactgaaagtagtcaagcatctgacatgatggataccatggatgttgaaaacaattctactttggaaaaacacagtgggaaaagaaacggagtcttgctccgtggcccagactgaaagtgcagtggtgtcatcacagctcactgcaatctccttccaggttcaagcaattgtcctgcctcagactcccaagtagcagggactacaggaaaaaagagaaggcatagatctaaagtaaatggtctccaaagagggagaaagaaagacagacctagaaaacatttaactcttaataacaaagtccaaaagaaaaga

SEQ ID NO: 54546 - DNA, 2069 bp, Homo sapiens
ctgaggcccacgcagggcctagggtgggaagatggcaggtgggggcggcgacctgagcaccaggaggctgaatgaatgtatttcaccagtagcaaatgagatgaaccatcttcctgcacacagccacgatttgcaaaggatgttcacggaagaccagggtgtagatgacaggctgctctatgacattgtattcaagcacttcaaaagaaataaggtggagatttcaaatgcaataaaaaagacatttccattcctcgagggcctccgtgatcgtgatctcatcacaaataaaatgtttgaagattctcaagattcttgtagaaacctggtccctgtacagagagtggtgtacaatgttcttagtgaactggagaagacatttaacctgccagttctggaagcactgttcagcgatgtcaacatgcaggaataccccgatttaattcacatttataaaggctttgaaaatgtaatccatgacaaattgcctctccaagaaagtgaagaagaagagagggaggagaggtctggcctccaactaagtcttgaacaaggaactggtgaaaactcttttcgaagcctgacttggccaccttcgggttccccatctcatgctggtacaaccccacctgaaaatggactctcagagcacccctgtgaaacagaacagataaatgcaaagagaaaagatacaaccagtgacaaagatgattcgctaggaagccaacaaacaaatgaacaatgtgctcaaaaggctgagccaacagagtcctgcgaacaaattgctgtccaagtgaataatggggatgctggaagggagatgccctgcccgttgccctgtgatgaagaaagcccagaggcagagctacacaaccatggaatccaaattaattcctgttctgtgcgactggtggatataaaaaaggaaaagccattttctaattcaaaagttgagtgccaagcccaagcaagaactcatcataaccaggcatctgacataatagtcatcagcagtgaggactctgaaggatccactgacgttgatgagcccttagaagtcttcatctcagcaccgagaagtgagcctgtgatcaataatgacaaccctttagaatcaaatgatgaaaaggagggccaagaagccacttgctcacgaccccagattgtaccagagcccatggatttcagaaaattatctacattcagagaaagttttaagaaaagagtgataggacaagaccacgacttttcagaatccagtgaggaggaggcgcccgcagaagcctcaagcggggcactgagaagcaagcatggtgagaaggctcctgtgacttctagaagtacatctacttggagaatacccagcaggaagagacgtaagagcaattaaaaactcttaatgtaacaaatgtctttctttgctgcaaaagctacattcactttttatgttatattctttaaaataaaaaattaatttgttgggattttagatgatttgcattttacattttcaattagatgagttgggctggtataaaacataagcctcaaaatgttcaaaggcacaagtgcaatgtaagtttatttttcactcacataaataggataaagtagttcctgagtagagggggtgcccacacagtcattcagggcccagctgatgggggctctgacatctttaagatgttgcttccatggttcccttggataagaaactgagatggaagcagaagtatgtgcaaactaataatgaaagcctaagaagcgtaagaaacaacgtcgtcctaggattgtattcagaaaagattgaacattatgtatgttccttttatttgattatgcatgaatgagataggagaaaacaatggaaggatccacactgatctgttgacttcactagctgggagaccagagacagaatagggtaggaaaagagagctttggggttatatacatttgcattcattggtcttcttatgacaagcctatattgctttcttaatttgaaaccacccaatgaaatggatgatgttgtgaggggtggggggggtgggggggttaaaaaaaaa

SEQ ID NO: 54547 - DNA, 835 bp, Homo sapiens
  misc_feature (7)..(7): n is a, c, g, or t
ttttcgnacccacgcgtccgaccaggcctctgacataatagtcatcagcagtgaggactctgaaggatccactgacgttgatgagcccttagaagtcttcatctcagcaccgagaagtgagcctgtgatcaataatgacaaccctttagaatcaaatgatgaaaaggagggccaagaagccacttgctcacgaccccagattgtaccagagcccatggatttcagaaaattatctacattcagagaaagttttaagaaaagagtgataggacaagaccacgacttttcagaatccagtgaggaggaggcgcccgcagaagcctcaagcggggcactgagaagcaagcatggtgagaaggctcctgtgacttctagaagtacatctacttggagaatacccagcaggaagagacgtttcagcagtagtgacttttcagacctgagtaatggagaagagcttcaggaaacctgcagctcatccctaagaagagggtcaggtgtgccaagaagccaagaagcaaggactgaaagtagtcaagcatctgacatgatggataccatggatgttgaaaacaattctactttggaaaaacacagtgggaaaagaaacggagtcttgctccgtggcccagactgaaagtgcagtggtgtcatcacagctcactgcaatctccttccaggttcaagcaattgtcctgcctcagactcccaagtagcagggactacaggaaaaaagagaaggcatagatctaaagtaaatggtctccaaagagggagaaagaaagacagacctagaaaacatttaactcttaataacaaagtccaaaagaaaaga

SEQ ID NO: 54548 - DNA, 1816 bp, Homo sapiens
ctgaggcccacgcagggcctagggtgggaagatggcaggtgggggcggcgacctgagcaccaggaggctgaatgaatgtatttcaccagtagcaaatgagatgaaccatcttcctgcacacagccacgatttgcaaaggatgttcacggaagaccagggtgtagatgacaggctgctctatgacattgtattcaagcacttcaaaagaaataaggtggagatttcaaatgcaataaaaaagacatttccattcctcgagggcctccgtgatcgtgatctcatcacaaataaaatgtttgaagattctcaagattcttgtagaaacctggtccctgtacagagagtggtgtacaatgttcttagtgaactggagaagacatttaacctgccagttctggaagcactgttcagcgatgtcaacatgcaggaataccccgatttaattcacatttataaaggctttgaaaatgtaatccatgacaaattgcctctccaagaaagtgaagaagaagagagggaggagaggtctggcctccaactaagtcttgaacaaggaactggtgaaaactcttttcgaagcctgacttggccaccttcgggttccccatctcatgctggtacaaccccacctgaaaatggactctcagagcacccctgtgaaacagaacagataaatgcaaagagaaaagatacaaccagtgacaaagatgattcgctaggaagccaacaaacaaatgaacaatgtgctcaaaaggctgagccaacaggcccagaggcagagctacacaaccatggaatccaaattaattcctgttctgtgcgactggtggatataaaaaaggaaaagccattttctaattcaaaagttgagtgccaagcccaagcaagaactcatcataaccaggcatctgacataatagtcatcagcagtgaggactctgaaggatccactgacgttgatgagcccttagaagtcttcatctcagcaccgagaagtgagcctgtgatcaataatgacaaccctttagaatcaaatgatgaaaaggagggccaagaagccacttgctcacgaccccagattgtaccagagcccatggatttcagaaaattatctacattcagagaaagttttaagaaaagagtgataggacaagaccacgacttttcagaatccagtgaggaggaggcgcccgcagaagcctcaagcggggcactgagaagcaagcatggtgagaaggctcctgtgacttctagaagtacatctacttggagaatacccagcaggaagagacgtttcagcagtagtgacttttcagacctgagtaatggagaagagcttcaggaaacctgcagctcatccctaagaagagggtcaggtaaagaagattaggatgccaagacttggcctgcagaatgtcaggaatgtgaattaaaagctgctgtttccagacgctttttattctgagcaccttcactaccttgtatccagttcatctgggaactcctttttgcattttagaaaatggaaagaggcaggaaattatgataaactcatgtttaacagaaagagtttcactgactaaatgtatgtaattatattttgttgttgtagaagaaataaatagcaaatttgtggtattcttttttttaaacctgctctcattcctattaacactaagatcttagatttttatagtgataaatgggttgacatcattgtcgtttgtaattgtaaagcctcaaaagacaactgttcctactatgtaattatagacagaaataaaaacttcagatcaaacactctcaaacgttagta

SEQ ID NO: 54549 - DNA, 1858 bp, Homo sapiens
ctgaggcccacgcagggcctagggtgggaagatggcaggtgggggcggcgacctgagcaccaggaggctgaatgaatgtatttcaccagtagcaaatgagatgaaccatcttcctgcacacagccacgatttgcaaaggatgttcacggaagaccagggtgtagatgacaggctgctctatgacattgtattcaagcacttcaaaagaaataaggtggagatttcaaatgcaataaaaaagacatttccattcctcgagggcctccgtgatcgtgatctcatcacaaataaaatgtttgaagattctcaagattcttgtagaaacctggtccctgtacagagagtggtgtacaatgttcttagtgaactggagaagacatttaacctgccagttctggaagcactgttcagcgatgtcaacatgcaggaataccccgatttaattcacatttataaaggctttgaaaatgtaatccatgacaaattgcctctccaagaaagtgaagaagaagagagggaggagaggtctggcctccaactaagtcttgaacaaggaactggtgaaaactcttttcgaagcctgacttggccaccttcgggttccccatctcatgctggtacaaccccacctgaaaatggactctcagagcacccctgtgaaacagaacagataaatgcaaagagaaaagatacaaccagtgacaaagatgattcgctaggaagccaacaaacaaatgaacaatgtgctcaaaaggctgagccaacagagtcctgcgaacaaattgctgtccaagtgaataatggggatgctggaagggagatgccctgcccgttgccctgtgatgaagaaagcccagaggcagagctacacaaccatggaatccaaattaattcctgttctgtgcgactggtggatataaaaaaggaaaagccattttctaattcaaaagttgagtgccaagcccaagcaagaactcatcataaccaggcatctgacataatagtcatcagcagtgaggactctgaaggatccactgacgttgatgagcccttagaagtcttcatctcagcaccgagaagtgagcctgtgatcaataatgacaaccctttagaatcaaatgatgaaaaggagggccaagaagccacttgctcacgaccccagattgtaccagagcccatggatttcagaaaattatctacattcagagaaagttttaagaaaagagtgataggacaagaccacgacttttcagaatccagtgaggaggaggcgcccgcagaagcctcaagcggggcactgagaagcaagcatggtgagaaggctcctgtgacttctagaagtacatctacttggagaatacccagcaggaagagacgtttcagcagtagtgacttttcagacctgagtaatggagaagagcttcaggaaacctgcagctcatccctaagaagagggtcaggatcacagccacaagaacctgaaaataagaagtgctcctgtgtcatgtgttttccaaaaggtgtgccaagaagccaagaagcaaggactgaaagtagtcaagcatctgacatgatggataccatggatgttgaaaacaattctactttggaaaaacacagtgggaaaagaaacggagtcttgctccgtggcccagactgaaagtgcagtggtgtcatcacagctcactgcaatctccttccaggttcaagcaattgtcctgcctcagactcccaagtagcagggactacaggaaaaaagagaaggcatagatctaaagtaaatggtctccaaagagggagaaagaaagacagacctagaaaacatttaactcttaataacaaagtccaaaagaaaaga

SEQ ID NO: 54550 - DNA, 922 bp, Homo sapiens
  misc_feature (64)..(64): n is a, c, g, or t
ttctacttcaatagttgagtgcccagaccacgcaagatctcatcatatccaggcatgtgacatnatagtcatcagcagtgaggactctgaaggatccactgacgttgatgagcccttagaagtcttcatctcagcaccgagaagtgagcctgtgatcaataatgacaaccctttagaatcaaatgatgaaaaggagggccaagaagccacttgctcacgaccccagattgtaccagagcccatggatttcagaaaattatctacattcagagaaagttttaagaaaagagtgataggacaagaccacgacttttcagaatccagtgaggaggaggcgcccgcagaagcctcaagcggggcactgagaagcaagcatggtgagaaggctcctgtgacttctagaagtacatctacttggagaatacccagcaggaagagacgtttcagcagtagtgacttttcagacctgagtaatggagaagagcttcaggaaacctgcagctcatccctaagaagagggtcaggatcacagccacaagaacctgaaaataagaagtgctcctgtgtcatgtgttttccaaaaggtgtgccaagaagccaagaagcaaggactgaaagtagtcaagcatctgacatgatggataccatggatgttgaaaacaattctactttggaaaaacacagtgggaaaagaaacggagtcttgctccgtggcccagactgaaagtgcagtggtgtcatcacagctcactgcaatctccttccaggttcaagcaattgtcctgcctcagactcccaagtagcagggactacaggaaaaaagagaaggcatagatctaaagtaaatggtctccaaagagggagaaagaaagacagacctagaaaacatttaactcttaataacaaagtccaaaagaaaaga

SEQ ID NO: 54551 - DNA, 2331 bp, Homo sapiens
gtcacttatgaaacacaggtccttgttgctgcagagaagcagttgttttgctggaaggagggagtgcgcgggctgccccgggctcctccctgccgcctcctctcagtggatggttccaggcaccctgtctggggcagggagggcacaggcctgcacatcgaaggtggggtgggaccaggctgcccctcgccccagcatccaagtcctcccttgggcgcccgtggccctgcagactctcagggctaaggtcctctgttgctttttggttccaccttagaagaggctccgcttgactaagagtagcttgaaggaggcaccatgcaggagctgcatctgctctggtgggcgcttctcctgggcctggctcaggcctgccctgagccctgcgactgtggggaaaagtatggcttccagatcgccgactgtgcctaccgcgacctagaatccgtgccgcctggcttcccggccaatgtgactacactgagcctgtcagccaaccggctgccaggcttgccggagggtgccttcagggaggtgcccctgctgcagtcgctgtggctggcacacaatgagatccgcacggtggccgccggagccctggcctctctgagccatctcaagagcctggacctcagccacaatctcatctctgactttgcctggagcgacctgcacaacctcagtgccctccaattgctcaagatggacagcaacgagctgaccttcatcccccgcgacgccttccgcagcctccgtgctctgcgctcgctgcaactcaaccacaaccgcttgcacacattggccgagggcaccttcaccccgctcaccgcgctgtcccacctgcagatcaacgagaaccccttcgactgcacctgcggcatcgtgtggctcaagacatgggccctgaccacggccgtgtccatcccggagcaggacaacatcgcctgcacctcaccccatgtgctcaagggtacaccgctgagccgcctgccgccactgccatgctcggcgccctcagtgcagctcagctaccaacccagccaggatggtgccgagctgcggcctggttttgtgctggcactgcactgtgatgtggacgggcagccggcccctcagcttcactggcacatccagatacccagtggcattgtggagatcaccagccccaacgtgggcactgatgggcgtgccctgcctggcacccctgtggccagctcccagccgcgcttccaggcctttgccaatggcagcctgcttatccccgactttggcaagctggaggaaggcacctacagctgcctggccaccaatgagctgggcagtgctgagagctcagtggacgtggcactggccacgcccggtgagggtggtgaggacacactggggcgcaggttccatggcaaagcggttgagggaaagggctgctatacggttgacaacgaggtgcagccatcagggccggaggacaatgtggtcatcatctacctcagccgtgctgggaaccctgaggctgcagtcgcagaaggggtccctgggcagctgcccccaggcctgctcctgctgggccaaagcctcctcctcttcttcttcctcacctccttctagccccacccagggcttccctaactcctccccttgcccctaccaatgcccctttaagtgctgcaggggtctggggttggcaactcctgaggcctgcatgggtgacttcacattttcctacctctccttctaatctcttctagagcacctgctatccccaacttctagacctgctccaaactagtgactaggatagaatttgatcccctaactcactgtctgcggtgctcattgctgctaacagcattgcctgtgctctcctctcaggggcagcatgctaacggggcgacgtcctaatccaactgggagaagcctcagtggtggaattccaggcactgtgactgtcaagctggcaagggccaggattgggggaatggagctggggcttagctgggaggtggtctgaagcagacagggaatgggagaggaggatgggaagtagacagtggctggtatggctctgaggctccctggggcctgctcaagctcctcctgctccttgctgttttctgatgatttgggggcttgggagtccctttgtcctcatctgagactgaaatgtggggatccaggatggccttccttcctcttacccttcctccctcagcctgcaacctctatcctggaacctgtcctccctttctccccaactatgcatctgttgtctgctcctctgcaaaggccagccagcttgggagcagcagagaaataaacagcatttctgatgcc

SEQ ID NO: 54552 - DNA, 2140 bp, Homo sapiens
agatttcaagtcataaagtcagctaggaacaggccgaggcagggagaactctccactcggaggaggagctggggtcctcttccatcccgtcttcatcctgcctggctgcgtgacctcgggaggcaccatgcaggagctgcatctgctctggtgggcgcttctcctgggcctggctcaggcctgccctgagccctgcgactgtggggaaaagtatggcttccagatcgccgactgtgcctaccgcgacctagaatccgtgccgcctggcttcccggccaatgtgactacactgagcctgtcagccaaccggctgccaggcttgccggagggtgccttcagggaggtgcccctgctgcagtcgctgtggctggcacacaatgagatccgcacggtggccgccggagccctggcctctctgagccatctcaagagcctggacctcagccacaatctcatctctgactttgcctggagcgacctgcacaacctcagtgccctccaattgctcaagatggacagcaacgagctgaccttcatcccccgcgacgccttccgcagcctccgtgctctgcgctcgctgcaactcaaccacaaccgcttgcacacattggccgagggcaccttcaccccgctcaccgcgctgtcccacctgcagatcaacgagaaccccttcgactgcacctgcggcatcgtgtggctcaagacatgggccctgaccacggccgtgtccatcccggagcaggacaacatcgcctgcacctcaccccatgtgctcaagggtacaccgctgagccgcctgccgccactgccatgctcggcgccctcagtgcagctcagctaccaacccagccaggatggtgccgagctgcggcctggttttgtgctggcactgcactgtgatgtggacgggcagccggcccctcagcttcactggcacatccagatacccagtggcattgtggagatcaccagccccaacgtgggcactgatgggcgtgccctgcctggcacccctgtggccagctcccagccgcgcttccaggcctttgccaatggcagcctgcttatccccgactttggcaagctggaggaaggcacctacagctgcctggccaccaatgagctgggcagtgctgagagctcagtggacgtggcactggccacgcccggtgagggtggtgaggacacactggggcgcaggttccatggcaaagcggttgagggaaagggctgctatacggttgacaacgaggtgcagccatcagggccggaggacaatgtggtcatcatctacctcagccgtgctgggaaccctgaggctgcagtcgcagaaggggtccctgggcagctgcccccaggcctgctcctgctgggccaaagcctcctcctcttcttcttcctcacctccttctagccccacccagggcttccctaactcctccccttgcccctaccaatgcccctttaagtgctgcaggggtctggggttggcaactcctgaggcctgcatgggtgacttcacattttcctacctctccttctaatctcttctagagcacctgctatccccaacttctagacctgctccaaactagtgactaggatagaatttgatcccctaactcactgtctgcggtgctcattgctgctaacagcattgcctgtgctctcctctcaggggcagcatgctaacggggcgacgtcctaatccaactgggagaagcctcagtggtggaattccaggcactgtgactgtcaagctggcaagggccaggattgggggaatggagctggggcttagctgggaggtggtctgaagcagacagggaatgggagaggaggatgggaagtagacagtggctggtatggctctgaggctccctggggcctgctcaagctcctcctgctccttgctgttttctgatgatttgggggcttgggagtccctttgtcctcatctgagactgaaatgtggggatccaggatggccttccttcctcttacccttcctccctcagcctgcaacctctatcctggaacctgtcctccctttctccccaactatgcatctgttgtctgctcctctgcaaaggccagccagcttgggagcagcagagaaataaacagcatttctgatgcc

SEQ ID NO: 54553 - DNA, 522 bp, Homo sapiens
aagctttaggctcgtgccgaattcggcacgagaacagcattgcctgtgctctcctctcaggggcagcatgctaacggggcgacgtcctaatccaactgggagaagcctcagtggtggaattccaggcactgtgactgtcaagctggcaagggccaggattgggggaatggagctggggcttagctgggaggtggtctgaagcagacagggaatgggagaggaggatgggaagtagacagtggctggtatggctctgaggctccctggggcctgctcaagctcctcctgctccttgctgttttctgatgatttgggggcttgggagtccctttgtcctcatctgagactgaaatgtggggatccaggatggccttccttcctcttacccttcctccctcagcctgcaacctctatcctggaacctgtcctccctttctccccaactatgcatctgttgtctgctcctctgcaaaggccagccagcttgggagcagcagagaaataaacagcatttctgatgcc

SEQ ID NO: 54554 - DNA, 231 bp, Homo sapiens
agattcggcacgaggggtaatctccaatgccactcactctatgaagtcttccacaatccttcctgagaaaaataaaaggtcttatcccttctgttcccccagcatttcacctgcaacctctatcctggaacctgtcctccctttctccccaactatgcatctgttgtctgctcctctgcaaaggccagccagcttgggagcagcagagaaataaacagcatttctgatgcc

SEQ ID NO: 54555 - DNA, 231 bp, Homo sapiens
  misc_feature (142)..(142): n is a, c, g, or t
agtgagacacgtgggactatctttgtatcataaaggaaaggtaccgaaaacagttgacatcacaactccaggcgggacaaacactgacgtctttgggtctaactgctcaattaaccagcaggaactgacctgctgtttgcantttaccccaactatgcatctgttgtctgctcctctgcaaaggccagccagcttgggagcagcagagaaataaacagcatttctgatgcc

SEQ ID NO: 54556 - DNA, 2075 bp, Homo sapiens
  misc_feature (2)..(2): n is a, c, g, or t
  misc_feature (4)..(4): n is a, c, g, or t
  misc_feature (13)..(13): n is a, c, g, or t
gncntttcggccnttatggccgggggcctccgctggactaagagtagcttgaaggaggcaccatgcaggagctgcatctgctctggtgggcgcttctcctgggcctggctcaggcctgccctgagccctgcgactgtggggaaaagtatggcttccagatcgccgactgtgcctaccgcgacctagaatccgtgccgcctggcttcccggccaatgtgactacactgagcctgtcagccaaccggctgccaggcttgccggagggtgccttcagggaggtgcccctgctgcagtcgctgtggctggcacacaatgagatccgcacggtggccgccggagccctggcctctctgagccatctcaagagcctggacctcagccacaatctcatctctgactttgcctggagcgacctgcacaacctcagtgccctccaattgctcaagatggacagcaacgagctgaccttcatcccccgcgacgccttccgcagcctccgtgctctgcgctcgctgcaactcaaccacaaccgcttgcacacattggccgagggcaccttcaccccgctcaccgcgctgtcccacctgcagatcaacgagaaccccttcgactgcacctgcggcatcgtgtggctcaagacatgggccctgaccacggccgtgtccatcccggagcaggacaacatcgcctgcacctcaccccatgtgctcaagggtacaccgctgagccgcctgccgccactgccatgctcggcgccctcagtgcagctcagctaccaacccagccaggatggtgccgagctgcggcctggttttgtgctggcactgcactgtgatgtggacgggcagccggcccctcagcttcactggcacatccagatacccagtggcattgtggagatcaccagccccaacgtgggcactgatgggcgtgccctgcctggcacccctgtggccagctcccagccgcgcttccaggcctttgccaatggcagcctgcttatccccgactttggcaagctggaggaaggcacctacagctgcctggccaccaatgagctgggcagtgctgagagctcagtggacgtggcactggccacgcccggtgagggtggtgaggacacactggggcgcaggttccatggcaaagcggttgagggaaagggctgctatacggttgacaacgaggtgcagccatcagggccggaggacaatgtggtcatcatctacctcagccgtgctgggaaccctgaggctgcagtcgcagaaggggtccctgggcagctgcccccaggcctgctcctgctgggccaaagcctcctcctcttcttcttcctcacctccttctagccccacccagggcttccctaactcctccccttgcccctaccaatgcccctttaagtgctgcaggggtctggggttggcaactcctgaggcctgcatgggtgacttcacattttcctacctctccttctaatctcttctagagcacctgctatccccaacttctagacctgctccaaactagtgactaggatagaatttgatcccctaactcactgtctgcggtgctcattgctgctaacagcattgcctgtgctctcctctcaggggcagcatgctaacggggcgacgtcctaatccaactgggagaagcctcagtggtggaattccaggcactgtgactgtcaagctggcaagggccaggattgggggaatggagctggggcttagctgggaggtggtctgaagcagacagggaatgggagaggaggatgggaagtagacagtggctggtatggctctgaggctccctggggcctgctcaagctcctcctgctccttgctgttttctgatgatttgggggcttgggagtccctttgtcctcatctgagactgaaatgtggggatccaggatggccttccttcctcttacccttcctccctcagcctgcaacctctatcctggaacctgtcctccctttctccccaactatgcatctgttgtctgctcctctgcaaaggccagccagcttgggagcagcagagaaataaacagcatttctgatgcc

SEQ ID NO: 54557 - DNA, 1794 bp, Homo sapiens
gtcacttatgaaacacaggtccttgttgctgcagagaagcagttgttttgctggaaggagggagtgcgcgggctgccccgggctcctccctgccgcctcctctcagtggatggttccaggcaccctgtctggggcagggagggcacaggcctgcacatcgaaggtggggtgggaccaggctgcccctcgccccagcatccaagtcctcccttgggcgcccgtggccctgcagactctcagggctaaggtcctctgttgctttttggttccaccttagaagaggctccgcttgactaagagtagcttgaaggaggcaccatgcaggagctgcatctgctctggtgggcgcttctcctgggcctggctcaggcctgccctgagccctgcgactgtggggaaaagtatggcttccagatcgccgactgtgcctaccgcgacctagaatccgtgccgcctggcttcccggccaatgtgactacactgagcctgtcagccaaccggctgccaggcttgccggagggtgccttcagggaggtgcccctgctgcagtcgctgtggctggcacacaatgagatccgcacggtggccgccggagccctggcctctctgagccatctcaagagcctggacctcagccacaatctcatctctgactttgcctggagcgacctgcacaacctcagtgccctccaattgctcaagatggacagcaacgagctgaccttcatcccccgcgacgccttccgcagcctccgtgctctgcgctcgctgcaactcaaccacaaccgcttgcacacattggccgagggcaccttcaccccgctcaccgcgctgtcccacctgcagatcaacgagaaccccttcgactgcacctgcggcatcgtgtggctcaagacatgggccctgaccacggccgtgtccatcccggagcaggacaacatcgcctgcacctcaccccatgtgctcaagggtacaccgctgagccgcctgccgccactgccatgctcggcgccctcagtgcagctcagctaccaacccagccaggatggtgccgagctgcggcctggttttgtgctggcactgcactgtgatgtggacgggcagccggcccctcagcttcactggcacatccagatacccagtggcattgtggagatcaccagccccaacgtgggcactgatgggcgtgccctgcctggcacccctgtggccagctcccagccgcgcttccaggcctttgccaatggcagcctgcttatccccgactttggcaagctggaggaaggcacctacagctgcctggccaccaatgagctgggcagtgctgagagctcagtggacgtggcactggccacgcccggtgagggtggtgaggacacactggggcgcaggttccatggcaaagcggttgagggaaagggctgctatacggttgacaacgaggtgcagccatcagggccggaggacaatgtggtcatcatctacctcagccgtgctgggaaccctgaggctgcagtcgcagaaggggtccctgggcagctgcccccaggcctgctcctgctgggccaaagcctcctcctcttcttcttcctcctccctcctctgtgctgtcctcctctgtgctgtcccagcacagaggaggtctggggcattggatcaggtggcatgtgggtgtctacacatcgagaagcacacagggatgagccactaggtatcccatgctggaggcttgtggaaggctgtgctcatctcccatgtttcccctcctctgtgcctcctctgtggtacctcaga

SEQ ID NO: 54558 - DNA, 1123 bp, Homo sapiens
gtcacttatgaaacacaggtccttgttgctgcagagaagcagttgttttgctggaaggagggagtgcgcgggctgccccgggctcctccctgccgcctcctctcagtggatggttccaggcaccctgtctggggcagggagggcacaggcctgcacatcgaaggtggggtgggaccaggctgcccctcgccccagcatccaagtcctcccttgggcgcccgtggccctgcagactctcagggctaaggtcctctgttgctttttggttccaccttagaagaggctccgcttgactaagagtagcttgaaggaggcaccatgcaggagctgcatctgctctggtgggcgcttctcctgggcctggctcaggcctgccctgagccctgcgactgtggggaaaagtatggcttccagatcgccgactgtgcctaccgcgacctagaatccgtgccgcctggcttcccggccaatgtgactacactgagcctgtcagccaaccggctgccaggcttgccggagggtgccttcagggaggtgcccctgctgcagtcgctgtggctggcacacaatgagatccgcacggtggccgccggagccctggcctctctgagccatctcaagagcctggacctcagccacaatctcatctctgactttgcctggagcgacctgcacaacctcagtgccctccaattgctcaagatggacagcaacgagctgaccttcatcccccgcgacgccttccgcagcctccgtgctctgcgctcgctgcaactcaaccacaaccgcttgcacacattggccgagggcaccttcaccccgctcaccgcgctgtcccacctgcagatcaacgagaaccccttcgactgcacctgcggcatcgtgtggctcaagacatgggccctgaccacggccgtgtccatcccggagcaggacaacatcgcctgcacctcaccccatgtgctcaagggtacaccgctgagccgcctgccgccactgccatgctcggcgccctcagtgcagctcagctaccaacccagccaggatggtgccgagcggaccggtccgctcggacgagactgcacggattgttttaagaaaatggcagacaaaccagacatgg

SEQ ID NO: 54559 - DNA, 766 bp, Homo sapiens
gtcacttatgaaacacaggtccttgttgctgcagagaagcagttgttttgctggaaggagggagtgcgcgggctgccccgggctcctccctgccgcctcctctcagtggatggttccaggcaccctgtctggggcagggagggcacaggcctgcacatcgaaggtggggtgggaccaggctgcccctcgccccagcatccaagtcctcccttgggcgcccgtggccctgcagactctcagggctaaggtcctctgttgctttttggttccaccttagaagaggctccgcttgactaagagtagcttgaaggaggcaccatgcaggagctgcatctgctctggtgggcgcttctcctgggcctggctcaggcctgccctgagccctgcgactgtggggaaaagtatggcttccagatcgccgactgtgcctaccgcgacctagaatccgtgccgcctggcttcccggccaatgtgactacactgagcctgtcagccaaccggctgccaggcttgccggagggtgccttcagggaggtgcccctgctgcagtcgctgtggctggcacacaatgagatccgcacggtggccgccggagccctggcctctctgagccatctcaagagcctggacctcagccacaatctcatctctgactttgcctggagcgacctgcacaacctcagtgccctccaattgctcaagatggacagcaacgagctgaccttcatcccccgcgacgcagagcagaaggtcgacgcagagcaga

SEQ ID NO: 54560 - DNA, 807 bp, Homo sapiens
atagtgtgccaggcactgttcagtatactggggatagagcagggggaaaaaaatgacaaaaacccctacccttaagaggttcacagtatagcatggggaattagaaataagcatctgtctcttctctggtctttaagcacctcacaggcactggccatgtctgctcatctgtttattcccatcatctaacagagtgctcaacacatttgcttgatgaatacgttttgagcactgggagatgatcacagaagagctaagaagtgatagcagttgtatttagtggagaacagtattcacaccttgttgtctagattgccttgaaatcaggctctgtatgatatcttttttttttctcttagaaaaaactgttaacctatttagagtaattttattaaggagctttttatttttttatttttttttttgagacagggtcccaccctgttccccaggctggagtgcagtggttcaacaaccacagctcacttcagccttgacctcccgggctcccacctcagtctcctgagtagctgggaacacaggtacgtgccaccctgcccagctaattttttattttttgtagagatggggttccactgtgttgcacaggctggtctcaaacttctgggctcagtcaatcctcccgccttggcctcccaaagtgttaggattacaggcgtgagccattgtacctttaaaagaaaaaaagaaagattttttttattttaaattaaaaattatgacattgcatatcactgtgagtgtatttaatgttactgaattgtacactttaaaatgattaagatg

SEQ ID NO: 54561 - DNA, 448 bp, Homo sapiens
gccttgtttatctcttcgagagagtctcgcctcacccagatagcctcaactcctaggtcagcctcccagagcagttttggttggttggttggttttaagagatgttactgttgccagacgtggtcttgaactcctggctcaagcaaactcccaacttgagctcccaaaatgctgggaacacaggtacgtgccaccctgcccagctaattttttattttttgtagagatggggttccactgtgttgcacaggctggtctcaaacttctgggctcagtcaatcctcccgccttggcctcccaaagtgttaggattacaggcgtgagccattgtacctttaaaagaaaaaaagaaagattttttttattttaaattaaaaattatgacattgcatatcactgtgagtgtatttaatgttactgaattgtacactttaaaatgattaagatg

SEQ ID NO: 54562 - DNA, 246 bp, Homo sapiens
tttttttggcagtatgagttaagtagtttatttaacatttggagtcagatatacctgggtctgaattttagtgtacttaacaataagattgagttaataattgtgtttatctcagaaagatctgtgataaggaccaagtaagataatgtacataaagctcttagcacaaaacataacacatcacactcaatagattttccctgtaaaaaaattcaacagttgattaaagactagaaccatttcact

SEQ ID NO: 54563 - DNA, 394 bp, Homo sapiens
gagtgcctggtctacgggtgtttacaatcatcaccgggcacccacaagagaccctgaacttagaatatttccgcggtaggagttccgcctcgtccttccaggggatactgacgactcgctgggttctcgccttccaagtgctggaggggggaagtagggccacccggggtagaaacctaacgccagaaaccttccagcgccttatcagttggtggaattttcgtggcagacagtcgcgctctacctaagtcgtagaagaaaagacaccttgtgggggacttggcgtcggaagccttgagttcaaatcgtagccctaggtccccagccttgcccttcctggcttgctgcgaggatgaaatgagatttttgtacgtgaaaatgctttctaacccct

SEQ ID NO: 54564 - DNA, 100 bp, Homo sapiens
  misc_feature (79)..(79): n is a, c, g, or t
agcttctgctaatcaagaatatactatgaaaatcatcagagacctagcaactgttgagcttggttttggctgtcaggcnctgttctgctgatggattgag

SEQ ID NO: 54565 - DNA, 355 bp, Homo sapiens
actattgcataccatattttgaatattcttttaagtaacttttcaaaaggccacaacatgctgacttctaaaatattagtacgtaatgtcattttaattggaaaatatctccaaaccagcaagttattttatttcatttactatgatttatctgcaattaaaatagaatatgttttacaaaatcataatgatccaaatatgtcccgctacaggagttcgagaccaacttgggcaacataatgagaccctctctatacaaaaaattgaaacattagctgggcttggtggcatgtgcctgtggttccagctactcaagaggctgaggtgggagggttgcttgagcccaggaactcga

SEQ ID NO: 54566 - DNA, 1026 bp, Homo sapiens
ttcgggatacatcttggagctgctcagtctttgggtctgagcagcctttatgagcggtaacacttaccgcgaaggtctgcagcttcactcctgaagccagcgagaacacgaacccaccagatgggacgaacaactccggacgtgaggcctttaagagctgtaacactcactgggaaggtctgcagcttcactcctgaagtcagcgagaccacgaacccaccagaaggaagaaactccagatgcatctgaacatctgaaggcacaaactccagacacggcatctttaagaactctaacactcaccttgagggtccgcggcttcattcttgaagtcagggagaccaagaacccaccaattgcggacacaagaggaagtaatttgaaggcaagatgggagggacagatgaactggataaaggggtacaaaagtggggcagggtggtaaagtgggcagagggaacagcacgcgtaaaaggcctagatgagagaaactcacagagaggaacagtatggtgcaagtgtagagagtggtgccagtgaggctgggcaggtaagcaaggacccacctcaggcaggtctttcggccatagcgatgatttgggattttgtaccaagtgcaatgggaaagctattaaaggttgtttaaggatttgggattggcatttctttttaaaggccactctggcagcttgatgcagaaaagttctaaattctcaacttgcaacctaaagggatctcctttctttgcttttaattttgacctcaattgctctgccaaaactcattgcatacaccataattcttgctttgtatttacttgcattgttactttatgtgctgccttcctttactagttattcatagacttgactcactgatgcaccctaccccaactgtaaccttttcctgtgggcagaaaagatttctcagtcattgttgtgtgcctacagcatggagcagatacacttggctaatctgttaaaccagattgcgctaaaagtcccatcatagtttgctgctttcccc

SEQ ID NO: 54567 - DNA, 589 bp, Homo sapiens
cacacataaactagaaaacctagaagagatggataaaatcttggaaaaatacaatcctcctggcttaaatctggaagaattagataccttgagcagaccaataacaagcagattaaaatggtaactaaaaagactgaaatggtaactaaaaaattgtcaacaaaaaaaagtccaggaccagatggattcacagcagaattctatcagacattcaaagaattggtaccaatccttttgacactattccacaagacagagaaagaaggaaccctccctaattcatcaccctaataccagaaccaggaaagaacataaccaaaaaaagaaaactacagactgatatcgccgatgcacatagatgctaaaattcttaacaaaatactagctaaccgaatccaacaacatatcgaaaagataatccaccatgatcaagtgggtttcataccaggcatgcagggatgctttaacatatgcaagtcaataaatgtgatatgttacataaacagaattaaaaacaaaaaaatcacatgatcatctcaatagatgcaaaaaatgcattagacaaaatccagcatcgctttttgattaa

SEQ ID NO: 54568 - DNA, 2000 bp, Homo sapiens
agggcgctgctgctgccaccgctgctgccactgcagtgctcgagccccgtgcaggggagcttgcgggaggatcgaccgacagacggacgcacgccgaggcactgcgcccccagccccgcgccggtgccaccgcagcccgaccccggccgccagtccagccgcccctcgcccggtgcctaggtgcccggccccacaccgccagctgctcggcgcccgggtccgccatgcgctccgccgctgtcctggctcttctgctctgcgccgggcaagtcactgcgctccctgtgaacagccctatgaataaaggggataccgaggtgatgaaatgcatcgttgaggtcatctccgacacactttccaagcccagccccatgcctgtcagccaggaatgttttgagacactccgaggagatgaacggatcctttccattctgagacatcagaatttactgaaggagctccaagacctcgctctccaaggcgccaaggagagggcacatcagcagaagaaacacagcggttttgaagatgaactctcagaggttcttgagaaccagagcagccaggccgagctgaaagaggcggtggaagagccatcatccaaggatgttatggagaaaagagaggattccaaggaggcagagaaaagtggtgaagccacagacggagccaggccccaggccctcccggagcccatgcaggagtccaaggctgaggggaacaatcaggcccctggggaggaagaggaggaggaggaggaggccaccaacacccaccctccagccagcctccccagccagaaatacccaggcccacaggccgagggggacagtgagggcctctctcagggtctggtggacagagagaagggcctgagtgcagagccagggtggcaggcaaagagagaagaggaggaggaggaggaggaggaggctgaggctggagaggaggctgtccccgaggaagaaggccccactgtagtgctgaacccccacccgagccttggctacaaggagatccggaaaggcgagagtcggtcggaggctctggctgtggatggagctgggaagcctggggctgaggaggctcaggaccccgaagggaagggagaacaggagcactcccagcagaaagaggaggaggaggagatggcagtggtcccgcaaggcctcttccggggtgggaagagcggagagctggagcaggaggaggagcggctctccaaggagtgggaggactccaaacgctggagcaagatggaccagctggccaaggagctgacggctgagaagcggctggaggggcaggaggaggaggaggacaaccgggacagttccatgaagctctccttccgggcccgggcctacggcttcaggggccctgggccgcagctgcgacgaggctggaggccatcctcccgggaggacagccttgaggcgggcctgcccctccaggtccgaggctaccccgaggagaagaaagaggaggagggcagcgcaaaccgcagaccagaggaccaggagctggagagcctgtcggccattgaggcagagctggagaaagtggcccaccagctgcaggcactacggcggggctgagacaccggctggcagggctggccccagggcaccctgtggccctggctctgctgtccccttggcaggtcctggccagatggcccggacgctgcttccggtagggaggcagcctccagcctgcccaagcccaggccaccctatcgccccctacgcgccttgtctcctactcctgactcctacctgccctggaacatcctttgcagggcagccccacaactttaaacattgacgattccttctctgaacacaggcagctttctagaagtttcccttcctccatcctatccactgggcacaactgcaataacttctgaccttttggtgaaagctgagaactcctgactgtaacatattctgtatgaactttatctaaagaaaaataaatctgttctgggctctttc

SEQ ID NO: 54569 - DNA, 773 bp, Homo sapiens
  misc_feature (761)..(761): n is a, c, g, or t
caggcaaccagtcaagtttttactaactgctggatagagccagcagcatttcggttgggctttaaaagaaacattggaaaccgatgagtggaaaaatgaagacagggttgtccaggtgtggtagacagtgtgaacacaggcatggagatgggaacctgttgtatttaaagagaccccactcatcctcaggggttgccaccctttggctaaggtctggctgctggggcagtggctgacttctctgatgtagtaggaaactgacacataccttggaaaggaggtaatttcaaaagtgttatctgaagacccaatcttgctgccaccaccctggttttgagtttccagagtaaattccttgtgctcagctgaaaatattgatggtaatctctttctcggctgttctctggaaaccacccatgatgactcttcttcattgcagatgaacggatcctttccattctgagacatcagaatttactgaaggagctccaagacctcgctctccaaggtattttccagccactgcacttgactctgggtaaattccagtaactgagagtcagaaaatctggtggaagattcagcaagttcctctctgggactgtcatttccttttaattataaagcggaaaagcaggatccgccgtgccacctggctcaatctgttattgatattgttaaagaaatcaaggcccagagaggttgagtgacttgtccaaggtcacacagtgaatagagacatgccaggtgaaatggaactngatcctctagat

SEQ ID NO: 54570 - DNA, 1760 bp, Homo sapiens
gtgaccccagcactctcttcttcttcccagtcactgcgctccctgtgaacagccctatgaataaaggggataccgaggtgatgaaatgcatcgttgaggtcatctccgacacactttccaagcccagccccatgcctgtcagccaggaatgttttgagacactccgaggagatgaacggatcctttccattctgagacatcagaatttactgaaggagctccaagacctcgctctccaaggcgccaaggagagggcacatcagcagaagaaacacagcggttttgaagatgaactctcagaggttcttgagaaccagagcagccaggccgagctgaaagaggcggtggaagagccatcatccaaggatgttatggagaaaagagaggattccaaggaggcagagaaaagtggtgaagccacagacggagccaggccccaggccctcccggagcccatgcaggagtccaaggctgaggggaacaatcaggcccctggggaggaagaggaggaggaggaggaggccaccaacacccaccctccagccagcctccccagccagaaatacccaggcccacaggccgagggggacagtgagggcctctctcagggtctggtggacagagagaagggcctgagtgcagagccagggtggcaggcaaagagagaagaggaggaggaggaggaggaggaggctgaggctggagaggaggctgtccccgaggaagaaggccccactgtagtgctgaacccccacccgagccttggctacaaggagatccggaaaggcgagagtcggtcggaggctctggctgtggatggagctgggaagcctggggctgaggaggctcaggaccccgaagggaagggagaacaggagcactcccagcagaaagaggaggaggaggagatggcagtggtcccgcaaggcctcttccggggtgggaagagcggagagctggagcaggaggaggagcggctctccaaggagtgggaggactccaaacgctggagcaagatggaccagctggccaaggagctgacggctgagaagcggctggaggggcaggaggaggaggaggacaaccgggacagttccatgaagctctccttccgggcccgggcctacggcttcaggggccctgggccgcagctgcgacgaggctggaggccatcctcccgggaggacagccttgaggcgggcctgcccctccaggtccgaggctaccccgaggagaagaaagaggaggagggcagcgcaaaccgcagaccagaggaccaggagctggagagcctgtcggccattgaggcagagctggagaaagtggcccaccagctgcaggcactacggcggggctgagacaccggctggcagggctggccccagggcaccctgtggccctggctctgctgtccccttggcaggtcctggccagatggcccggacgctgcttccggtagggaggcagcctccagcctgcccaagcccaggccaccctatcgccccctacgcgccttgtctcctactcctgactcctacctgccctggaacatcctttgcagggcagccccacaactttaaacattgacgattccttctctgaacacaggcagctttctagaagtttcccttcctccatcctatccactgggcacaactgcaataacttctgaccttttggtgaaagctgagaactcctgactgtaacatattctgtatgaactttatctaaagaaaaataaatctgttctgggctctttc

SEQ ID NO: 54571 - DNA, 2028 bp, Homo sapiens
caggcaaccagtcaagtttttactaactgctggatagagccagcagcatttcggttgggctttaaaagaaacattggaaaccgatgagtggaaaaatgaagacagggttgtccaggtgtggtagacagtgtgaacacaggcatggagatgggaacctgttgtatttaaagagaccccactcatcctcaggggttgccaccctttggctaaggtctggctgctggggcagtggctgacttctctgatgtagtaggaaactgacacataccttggaaaggaggtaatttcaaaagtgttatctgaagacccaatcttgctgccaccaccctggttttgagtttccagagtaaattccttgtgctcagctgaaaatattgatggtaatctctttctcggctgttctctggaaaccacccatgatgactcttcttcattgcagatgaacggatcctttccattctgagacatcagaatttactgaaggagctccaagacctcgctctccaaggcgccaaggagagggcacatcagcagaagaaacacagcggttttgaagatgaactctcagaggttcttgagaaccagagcagccaggccgagctgaaagaggcggtggaagagccatcatccaaggatgttatggagaaaagagaggattccaaggaggcagagaaaagtggtgaagccacagacggagccaggccccaggccctcccggagcccatgcaggagtccaaggctgaggggaacaatcaggcccctggggaggaagaggaggaggaggaggaggccaccaacacccaccctccagccagcctccccagccagaaatacccaggcccacaggccgagggggacagtgagggcctctctcagggtctggtggacagagagaagggcctgagtgcagagccagggtggcaggcaaagagagaagaggaggaggaggaggaggaggaggctgaggctggagaggaggctgtccccgaggaagaaggccccactgtagtgctgaacccccacccgagccttggctacaaggagatccggaaaggcgagagtcggtcggaggctctggctgtggatggagctgggaagcctggggctgaggaggctcaggaccccgaagggaagggagaacaggagcactcccagcagaaagaggaggaggaggagatggcagtggtcccgcaaggcctcttccggggtgggaagagcggagagctggagcaggaggaggagcggctctccaaggagtgggaggactccaaacgctggagcaagatggaccagctggccaaggagctgacggctgagaagcggctggaggggcaggaggaggaggaggacaaccgggacagttccatgaagctctccttccgggcccgggcctacggcttcaggggccctgggccgcagctgcgacgaggctggaggccatcctcccgggaggacagccttgaggcgggcctgcccctccaggtccgaggctaccccgaggagaagaaagaggaggagggcagcgcaaaccgcagaccagaggaccaggagctggagagcctgtcggccattgaggcagagctggagaaagtggcccaccagctgcaggcactacggcggggctgagacaccggctggcagggctggccccagggcaccctgtggccctggctctgctgtccccttggcaggtcctggccagatggcccggacgctgcttccggtagggaggcagcctccagcctgcccaagcccaggccaccctatcgccccctacgcgccttgtctcctactcctgactcctacctgccctggaacatcctttgcagggcagccccacaactttaaacattgacgattccttctctgaacacaggcagctttctagaagtttcccttcctccatcctatccactgggcacaactgcaataacttctgaccttttggtgaaagctgagaactcctgactgtaacatattctgtatgaactttatctaaagaaaaataaatctgttctgggctctttc

SEQ ID NO: 54572 - DNA, 2068 bp, Homo sapiens
  misc_feature (2068)..(2068): n is a, c, g, or t
agggcgctgctgctgccaccgctgctgccactgcagtgctcgagccccgtgcaggggagcttgcgggaggatcgaccgacagacggacgcacgccgaggcactgcgcccccagccccgcgccggtgccaccgcagcccgaccccggccgccagtccagccgcccctcgcccggtgcctaggtgcccggccccacaccgccagctgctcggcgcccgggtccgccatgcgctccgccgctgtcctggctcttctgctctgcgccgggcaagtcactgcgctccctgtgaacagccctatgaataaaggggataccgaggtgatgaaatgcatcgttgaggtcatctccgacacactttccaagcccagccccatgcctgtcagccaggaatgttttgagacactccgaggagatgaacggatcctttccattctgagacatcagaatttactgaaggagctccaagacctcgctctccaaggcgccaaggagagggcacatcagcagaagaaacacagcggttttgaagatgaactctcagaggttcttgagaaccagagcagccaggccgagctgaaagaggcggtggaagagccatcatccaaggatgttatggagaaaagagaggattccaaggaggcagagaaaagtggtgaagccacagacggagccaggccccaggccctcccggagcccatgcaggagtccaaggctgaggggaacaatcaggcccctggggaggaagaggaggaggaggaggaggccaccaacacccaccctccagccagcctccccagccagaaatacccaggcccacaggccgagggggacagtgagggcctctctcagggtctggtggacagagagaagggcctgagtgcagagccagggtggcaggcaaagagagaagaggaggaggaggaggaggaggaggctgaggctggagaggaggctgtccccgaggaagaaggccccactgtagtgctgaacccccacccgagccttggctacaaggagatccggaaaggcgagagtcggtcggaggctctggctgtggatggagctgggaagcctggggctgaggaggctcaggaccccgaagggaagggagaacaggagcactcccagcagaaagaggaggaggaggagatggcagtggtcccgcaaggcctcttccggggtgggaagagcggagagctggagcaggaggaggagcggctctccaaggagtgggaggactccaaacgctggagcaagatggaccagctggccaaggagctgacggctgagaagcggctggaggggcaggaggaggaggaggacaaccgggacagttccatgaagctctccttccgggcccgggcctacggcttcaggggccctgggccgcagctgcgacgaggctggaggccatcctcccgggaggacagccttgaggcgggcctgcccctccaggtccgaggctaccccgaggagaagaaagaggaggagggcagcgcaaaccgcagaccagaggaccaggagctggagagcctgtcggccattgaggcagagctggagaaagtggcccaccagctgcaggcactacggcggggctgagacaccggctggcagggctggccccagggcaccctgtggccctggctctgctgtccccttggcaggtcctggccagatggcccggacgctgcttccggtagggaggcagcctccagcctgcccaagcccaggccaccctatcgccccctacgcgccttgtctcctactcctgactcctacctgccctggaacatcctttgcagggcagccccacaactttaaacattgacgattccttctctgaacacaggcagctttctagaagtttcccttcctccatcctatccactgggcacaactgcaataacttctgaccttttggtgaaagctgagaactcctgactgtaacatattctgtatgaactttatctaaagaaaaataaatctgttctgggctctttcaaaaaaaaacaacggaccacaaaaaacccaggggctctaataccggggtgccgcacaacacaggcatn

SEQ ID NO: 54573 - DNA, 3018 bp, Homo sapiens
agggcgctgctgctgccaccgctgctgccactgcagtgctcgagccccgtgcaggggagcttgcgggaggatcgaccgacagacggacgcacgccgaggcactgcgcccccagccccgcgccggtgccaccgcagcccgaccccggccgccagtccagccgcccctcgcccggtgcctaggtgcccggccccacaccgccagctgctcggcgcccgggtccgccatgcgctccgccgctgtcctggctcttctgctctgcgccgggcaagtcactgcgctccctgtgaacagccctatgaataaaggggataccgaggtgatgaaatgcatcgttgaggtcatctccgacacactttccaagcccagccccatgcctgtcagccaggaatgttttgagacactccgaggagatgaacggatcctttccattctgagacatcagaatttactgaaggagctccaagacctcgctctccaaggcgccaaggagagggcacatcagcagaagaaacacagcggttttgaagatgaactctcagaggttcttgagaaccagagcagccaggccgagctgaaagaggcggtggaagagccatcatccaaggatgttatggagaaaagagaggattccaaggaggcagagaaaagtggtgaagccacagacggagccaggccccaggccctcccggagcccatgcaggagtccaaggctgaggggaacaatcaggcccctggggaggaagaggaggaggaggaggaggccaccaacacccaccctccagccagcctccccagccagaaatacccaggcccacaggccgagggggacagtgagggcctctctcagggtctggtggacagagagaagggcctgagtgcagagccagggtggcaggcaaagagagaagaggaggaggaggaggaggaggaggctgaggctggagaggaggctgtccccgaggaagaaggccccactgtagtgctgaacccccacccgagccttggctacaaggagatccggaaaggcgagagtcggtcggaggctctggctgtggatggagctgggaagcctggggctgaggaggctcaggaccccgaagggaagggagaacaggagcactcccagcagaaagaggaggaggaggagatggcagtggtcccgcaaggcctcttccggggtgggaagagcggagagctggagcaggaggaggagcggctctccaaggagtgggaggactccaaacgctggagcaagatggaccagctggccaaggagctgacggctgagaagcggctggaggggcaggaggaggaggaggacaaccgggacagttccatgaagctctccttccgggcccgggcctacggcttcaggggccctgggccgcagctgcgacgaggctggaggccatcctcccgggaggacagccttgaggcgggcctgcccctccaggtccgaggctaccccgaggagaagaaagaggaggagggcagcgcaaaccgcagaccagaggaccaggagctggagagcctgtcggccattgaggcagagctggagaaagtggcccaccagctgcaggcactacggcggggctgagacaccggctggcagggctggccccagggcaccctgtggccctggctctgctgtccccttggcaggtcctggccagatggcccggacgctgcttccggtagggaggcagcctccagcctgcccaagcccaggccaccctatcgccccctacgcgccttgtctcctactcctgactcctacctgccctggaacatcctttgcagggcagccccacaactttaaacattgacgattccttctctgaacacaggcagctttctagaagtttcccttcctccatcctatccactgggcacaactgcaataacttctgaccttttggtgaaagctgagaactcctgactgtaacatattctgtatgaactttatctaaagaaaaataaatctgttctgggctctttcaaacaaaacaacacccacacacaccacacacacaacacaccaggggggcccgccacagaatataacccccccgggagagcgcccccaacgtctaccgcgcggacccccacaccaatactcggccacacacgcggcgccccctacaaacagaccacacacacacaccagccacaggccctgcgccccgccacttcacaacacgccccgcgaacggcgcacacacacggcaaccatgaggcaccccccagggagaagagacccccctaactcccggagggggggcgcaccatattcgtgcgcccaacacatccccacaccaacacatttcacagcagcccaaaagggaacaaattaacactcccacacgggcataaagcggcggctcacctcaaccccagcatatagactgcgacagcttggaagaagcctggagaacaaccccgggagccccagcacaccgtcgcaacaccatctattccacccccgcggcccacacatcatcaccaaacccccaccccgcccccaccaacaacacacacagcaccgacaccacccaccaaacaccaccccccacaccccacaacagcagccgcacgccggctcatccacacagggcgcagagggcagcaaccgcgcgacccggggcagtcggtgggcgggcaccgacagcgaggggaggtcgcagccacagcagcggcacaggccaggaagcccgcaggagcaggtcgggagtggacggaggagcggaccagggcgcgtgggcagggcacagggggacgaggacgggcgaagacgaggcacacggccaaggtacgaaacgcaggggagcacgcaggaggggagcgcacagggcgcagcgacacacgacacagcggacacgcgctgcacaagagacgcgcggggggcgcacagtcgcaaccaggagccaggggcgcgtgcgacgcggtggcacagacgaggggcgtgacagcacagccacgccccgtgaagaacggtggcccgcaccactgagacacga

SEQ ID NO: 54574 - DNA, 1704 bp, Homo sapiens
agggcgctgctgctgccaccgctgctgccactgcagtgctcgagccccgtgcaggggagcttgcgggaggatcgaccgacagacggacgcacgccgaggcactgcgcccccagccccgcgccggtgccaccgcagcccgaccccggccgccagtccagccgcccctcgcccggtgcctaggtgcccggccccacaccgccagctgctcggcgcccgggtccgccatgcgctccgccgctgtcctggctcttctgctctgcgccgggcaagtcactgcgctccctgtgaacagccctatgaataaaggggataccgaggtgatgaaatgcatcgttgaggtcatctccgacacactttccaagcccagccccatgcctgtcagccaggaatgttttgagacactccgaggagatgaacggatcctttccattctgagacatcagaatttactgaaggagctccaagacctcgctctccaaggcgccaaggagagggcacatcagcagaagaaacacagcggttttgaagatgaactctcagaggttcttgagaaccagagcagccaggccgagctgaaagaggcggtggaagagccatcatccaaggatgttatggagaaaagagaggattccaaggaggcagagaaaagtggtgaagccacagacggagccaggccccaggccctcccggagcccatgcaggagtccaaggctgaggggaacaatcaggcccctggggaggaagaggaggaggaggaggaggccaccaacacccaccctccagccagcctccccagccagaaatacccaggcccacaggccgagggggacagtgagggcctctctcagggtctggtggacagagagaagggcctgagtgcagagccagggtggcaggcaaagagagcaggaggaggagcggctctccaaggagtgggaggactccaaacgctggagcaagatggaccagctggccaaggagctgacggctgagaagcggctggaggggcaggaggaggaggaggacaaccgggacagttccatgaagctctccttccgggcccgggcctacggcttcaggggccctgggccgcagctgcgacgaggctggaggccatcctcccgggaggacagccttgaggcgggcctgcccctccaggtccgaggctaccccgaggagaagaaagaggaggagggcagcgcaaaccgcagaccagaggaccaggagctggagagcctgtcggccattgaggcagagctggagaaagtggcccaccagctgcaggcactacggcggggctgagacaccggctggcagggctggccccagggcaccctgtggccctggctctgctgtccccttggcaggtcctggccagatggcccggacgctgcttccggtagggaggcagcctccagcctgcccaagcccaggccaccctatcgccccctacgcgccttgtctcctactcctgactcctacctgccctggaacatcctttgcagggcagccccacaactttaaacattgacgattccttctctgaacacaggcagctttctagaagtttcccttcctccatcctatccactgggcacaactgcaataacttctgaccttttggtgaaagctgagaactcctgactgtaacatattctgtatgaactttatctaaagaaaaataaatctgttctgggctctttc

SEQ ID NO: 54575 - DNA, 1547 bp, Homo sapiens
agggcgctgctgctgccaccgctgctgccactgcagtgctcgagccccgtgcaggggagcttgcgggaggatcgaccgacagacggacgcacgccgaggcactgcgcccccagccccgcgccggtgccaccgcagcccgaccccggccgccagtccagccgcccctcgcccggtgcctaggtgcccggccccacaccgccagctgctcggcgcccgggtccgccatgcgctccgccgctgtcctggctcttctgctctgcgccgggcaagtcactgcgctccctgtgaacagccctatgaataaaggggataccgaggtgatgaaatgcatcgttgaggtcatctccgacacactttccaagcccagccccatgcctgtcagccaggaatgttttgagacactccgaggagatgaacggatcctttccattctgagacatcagaatttactgaaggagctccaagacctcgctctccaaggcgccaaggagagggcacatcagcagaagaaacacagcggttttgaagatgaactctcagaggttcttgagaaccagagcagccaggccgagctgaaaggtcggtcggaggctctggctgtggatggagctgggaagcctggggctgaggaggctcaggaccccgaagggaagggagaacaggagcactcccagcagaaagaggaggaggaggagatggcagtggtcccgcaaggcctcttccggggtgggaagagcggagagctggagcaggaggaggagcggctctccaaggagtgggaggactccaaacgctggagcaagatggaccagctggccaaggagctgacggctgagaagcggctggaggggcaggaggaggaggaggacaaccgggacagttccatgaagctctccttccgggcccgggcctacggcttcaggggccctgggccgcagctgcgacgaggctggaggccatcctcccgggaggacagccttgaggcgggcctgcccctccaggtccgaggctaccccgaggagaagaaagaggaggagggcagcgcaaaccgcagaccagaggaccaggagctggagagcctgtcggccattgaggcagagctggagaaagtggcccaccagctgcaggcactacggcggggctgagacaccggctggcagggctggccccagggcaccctgtggccctggctctgctgtccccttggcaggtcctggccagatggcccggacgctgcttccggtagggaggcagcctccagcctgcccaagcccaggccaccctatcgccccctacgcgccttgtctcctactcctgactcctacctgccctggaacatcctttgcagggcagccccacaactttaaacattgacgattccttctctgaacacaggcagctttctagaagtttcccttcctccatcctatccactgggcacaactgcaataacttctgaccttttggtgaaagctgagaactcctgactgtaacatattctgtatgaactttatctaaagaaaaataaatctgttctgggctctttc

SEQ ID NO: 54576 - DNA, 1727 bp, Homo sapiens
agggcgctgctgctgccaccgctgctgccactgcagtgctcgagccccgtgcaggggagcttgcgggaggatcgaccgacagacggacgcacgccgaggcactgcgcccccagccccgcgccggtgccaccgcagcccgaccccggccgccagtccagccgcccctcgcccggtgcctaggtgcccggccccacaccgccagctgctcggcgcccgggtccgccatgcgctccgccgctgtcctggctcttctgctctgcgccgggcaagtcactgcgctccctgtgaacagccctatgaataaaggggataccgaggtgatgaaatgcatcgttgaggtcatctccgacacactttccaagcccagccccatgcctgtcagccaggaatgttttgagacactccgaggagatgaacggatcctttccattctgagacatcagaatttactgaaggagctccaagacctcgctctccaaggcgccaaggagagggcacatcagcagaagaaacacagcggttttgaagatgaactctcagaggttcttgagaaccagagcagccaggccgagctgaaagaggcggtggaagagccatcatccaaggatgttatggagaaaagagaggattccaaggaggcagagaaaagtggtgaagccacagacggagccaggccccaggccctcccggagcccatgcaggagtccaaggctgaggggaacaatcaggcccctggggaggaagaggaggaggaggaggaggccaccaacacccaccctccagccagcctccccagccagaaatacccaggcccacaggccgagggggacagtgagggcctctctcagggtctggtggacagagagaagggcctgagtgcagagccagggtggcaggcaaagagagaagaggaggaggaggaggaggaggaggctgaggctggagaggaggctgtccccgaggaagaaggccccactgtagtgctgaacccccacccgagccttggctacaaggagatccggaaaggcgagagtcggtcggaggctctggctgtggatggagctgggaagcctggggctgaggaggctcaggaccccgaagggaagggagaacaggagcactcccagcagaaagaggaggaggaggagatggcagtggtcccgcaaggcctcttccggggtgggaagagcggagagctggagaagaaagaggaggagggcagcgcaaaccgcagaccagaggaccaggagctggagagcctgtcggccattgaggcagagctggagaaagtggcccaccagctgcaggcactacggcggggctgagacaccggctggcagggctggccccagggcaccctgtggccctggctctgctgtccccttggcaggtcctggccagatggcccggacgctgcttccggtagggaggcagcctccagcctgcccaagcccaggccaccctatcgccccctacgcgccttgtctcctactcctgactcctacctgccctggaacatcctttgcagggcagccccacaactttaaacattgacgattccttctctgaacacaggcagctttctagaagtttcccttcctccatcctatccactgggcacaactgcaataacttctgaccttttggtgaaagctgagaactcctgactgtaacatattctgtatgaactttatctaaagaaaaataaatctgttctgggctctttc

SEQ ID NO: 54577 - DNA, 1675 bp, Homo sapiens
agggcgctgctgctgccaccgctgctgccactgcagtgctcgagccccgtgcaggggagcttgcgggaggatcgaccgacagacggacgcacgccgaggcactgcgcccccagccccgcgccggtgccaccgcagcccgaccccggccgccagtccagccgcccctcgcccggtgcctaggtgcccggccccacaccgccagctgctcggcgcccgggtccgccatgcgctccgccgctgtcctggctcttctgctctgcgccgggcaagtcactgcgctccctgtgaacagccctatgaataaaggggataccgaggtgatgaaatgcatcgttgaggtcatctccgacacactttccaagcccagccccatgcctgtcagccaggaatgttttgagacactccgaggagatgaacggatcctttccattctgagacatcagaatttactgaaggagctccaagacctcgctctccaaggcgccaaggagagggcacatcagcagaagaaacacagcggttttgaagatgaactctcagaggttcttgagaaccagagcagccaggccgagctgaaagaggcggtggaagagccatcatccaaggatgttatggagaaaagagaggattccaaggaggcagagaaaagtggtgaagccacagacggagccaggccccaggccctcccggagcccatgcaggagtccaaggctgaggggaacaatcaggcccctggggaggaagaggaggaggaggaggaggccaccaacacccaccctccagccagcctccccagccagaaatacccaggcccacaggccgagggggacagtgagggcctctctcagggtctggtggacagagagaagggcctgagtgcagagccagggtggcaggcaaagagagaagaggaggaggaggaggaggaggaggctgaggctggagaggaggctgtccccgaggaagaaggccccactgtagtgctgaacccccacccgagccttggctacaaggagatccggaaaggcgagagtcggtcggaggctctggctgtggatggagctgggaagcctggggctgaggaggctcaggaccccgaagggaagggagaacaggagcactcccagcagaaagaggaggaggaggagatggcagtggtcccgcaaggcctcttccggggtgggaagagcggagagctggagcaggaggaggagcggctctccaaggagtgggaggactccaaacgctggagcaagatggaccagctggccaaggagctgacggctgagaagcggctggaggggcaggaggaggaggaggacaaccgggacagttccatgaagctctccttccgggcccgggcctacggcttcaggggccctgggccgcagctgcgacgaggctggaggccatcctcccgggaggacagccttgaggcgggcctgcccctccaggtccgaggctaccccgaggagaagaaagaggaggagggcagcgcaaaccgcagaccagaggaccaggagctggagagcctgtcggccattgaggcagagctggagaaagtggcccaccagctgcaggcactacggcggggctgagacaccggctggcagggctggccccccagctgcaggcactacggcggggctgagacaccggctggcagggctggccg

SEQ ID NO: 54578 - DNA, 1873 bp, Homo sapiens
agggcgctgctgctgccaccgctgctgccactgcagtgctcgagccccgtgcaggggagcttgcgggaggatcgaccgacagacggacgcacgccgaggcactgcgcccccagccccgcgccggtgccaccgcagcccgaccccggccgccagtccagccgcccctcgcccggtgcctaggtgcccggccccacaccgccagctgctcggcgcccgggtccgccatgcgctccgccgctgtcctggctcttctgctctgcgccgggcaagtcactgcgctccctgtgaacagccctatgaataaaggggataccgaggtgatgaaatgcatcgttgaggtcatctccgacacactttccaagcccagccccatgcctgtcagccaggaatgttttgagacactccgaggagatgaacggatcctttccattctgagacatcagaatttactgaaggagctccaagacctcgctctccaaggcgccaaggagagggcacatcagcagaagaaacacagcggttttgaagatgaactctcagaggttcttgagaaccagagcagccaggccgagctgaaagaggcggtggaagagccatcatccaaggatgttatggagaaaagagaggattccaaggaggcagagaaaagtggtgaagccacagacggagccaggccccaggccctcccggagcccatgcaggagtccaaggctgaggggaacaatcaggcccctggggaggaagaggaggaggaggaggaggccaccaacacccaccctccagccagcctccccagccagaaatacccaggcccacaggccgagggggacagtgagggcctctctcagggtctggtggacagagagaagggcctgagtgcagagccagggtggcaggcaaagagagaagaggaggaggaggaggaggaggaggctgaggctggagaggaggctgtccccgaggaagaaggccccactgtagtgctgaacccccacccgagccttggctacaaggagatccggaaaggcgagagtcggtcggaggctctggctgtggatggagctgggaagcctggggctgaggaggctcaggaccccgaagggaagggagaacaggagcactcccagcagaaagaggaggaggaggagatggcagtggtcccgcaaggcctcttccggggtgggaagagcggagagctggagcaggaggaggagcggctctccaaggagtgggaggactccaaacgctggagcaagatggaccagctggccaaggagctgacggctgagaagcggctggaggggcaggaggaggaggaggacaaccgggacagttccatgaagctctccttccgggcccgggcctacggcttcaggggccctgggccgcagagcctgcccaagcccaggccaccctatcgccccctacgcgccttgtctcctactcctgactcctacctgccctggaacatcctttgcagggcagccccacaactttaaacattgacgattccttctctgaacacaggcagctttctagaagtttcccttcctccatcctatccactgggcacaactgcaataacttctgaccttttggtgaaagctgagaactcctgactgtaacatattctgtatgaactttatctaaagaaaaataaatctgttctgggctctttcaaaaaaaaaaaaaaaaaaaaacaaaaaaacaaaaaacaaaacaaaacaaaaacaccagcacagagggaatcacattgccgagcacaagcaagtgaagacgaggacacacgaggcaaggacaacacccaagtgtgaaaagggagaaacggcgacctcagaagagaaacatagaaaagggagaccatgtaacacag

SEQ ID NO: 54579 - DNA, 768 bp, Homo sapiens
tttttttcagaggaaagagcccagaacagatttatttttctttagataaagttcatacagaatatgttacagtcaggagttctcagctttcaccaaaaggtcagaagttattgcagttgtgcccagtggataggaaaaaggaagggaaacttctagaaagctgcctgtgttcagagaaggaatcgtcaatgtttaaagtttgaggcgggcctgcccctccaggtccgaggctaccccgaggagaagaaagaggaggagggcagcgcaaaccgcagaccagaggaccaggagctggagagcctgtcggccattgaggcagagctggagaaagtggcccaccagctgcaggcactacggcggggctgagacaccggctggcagggctggccccagggcaccctgtggccctggctctgctgtccccttggcaggtcctggccagatggcccggacgctgcttccggtagggaggcagcctccagcctgcccaagcccaggccaccctatcgccccctacgcgccttgtctcctactcctgactcctacctgccctggaacatcctttgcagggcagccccacaactttaaacattgacgattccttctctgaacacaggcagctttctagaagtttcccttcctccatcctatccactgggcacaactgcaataacttctgaccttttggtgaaagctgagaactcctgactgtaacatattctgtatgaactttatctaaagaaaaataaatctgttctgggctctttc

SEQ ID NO: 54580 - DNA, 1310 bp, Homo sapiens
agggcgctgctgctgccaccgctgctgccactgcagtgctcgagccccgtgcaggggagcttgcgggaggatcgaccgacagacggacgcacgccgaggcactgcgcccccagccccgcgccggtgccaccgcagcccgaccccggccgccagtccagccgcccctcgcccggtgcctaggtgcccggccccacaccgccagctgctcggcgcccgggtccgccatgcgctccgccgctgtcctggctcttctgctctgcgccgggcaagtcactgcgctccctgtgaacagccctatgaataaaggggataccgaggtgatgaaatgcatcgttgaggtcatctccgacacactttccaagcccagccccatgcctgtcagccaggaatgttttgagacactccgaggagatgaacggatcctttccattctgagacatcagaatttactgaaggagctccaagacctcgctctccaaggcgccaaggagagggcacatcagcagaagaaacacagcggttttgaagatgaactctcagaggttcttgagaaccagagcagccaggccgagctgaaagaggcggtggaagagccatcatccaaggatgttatggagaaaagagaggattccaaggaggcagagaaaagtggtgaagccacagacggagccaggccccaggccctcccggagcccatgcaggagtccaaggctgaggggaacaatcaggcccctggagccctagcctcttctcctcaaattctaagtgttttctctttaggtttccctggctttgtgaatggatcatgtgtctctaggtataaacctgacatcatctttccacccggcttacctccaccagatctccccagttctgtctccatcttctacctgcagctgctctgttctcatggtcactgctgcatcactgagtctggacccttgttatcattttcaaactggcctccttccctcgttccccacttcttaaagtcacctgtccattgccaccagattaagcttagcctgcccaagcccaggccaccctatcgccccctacgcgccttgtctcctactcctgactcctacctgccctggaacatcctttgcagggcagccccacaactttaaacattgacgattccttctctgaacacaggcagctttctagaagtttcccttcctccatcctatccactgggcacaactgcaataacttctgaccttttggtgaaagctgagaactcctgactgtaacatattctgtatgaactttatctaaagaaaaataaatctgttctgggctctttc

SEQ ID NO: 54581 - DNA, 317 bp, Homo sapiens
agtaagctcattatcactgtctccatgatggatgagggtacagagagacaaagccacctgtccgaggccacacagctaacccagcgcctttctggcttactgtgccttccatgccactggccaggctggcccgagtgaaccccaatgtctctcctaggaccaggagctggagagcctgtcggccattgaggcagagctggagaaagtggcccaccagctgcaggcactacggcggggctgagacaccggctggcagggctggccccagggcaccctgtggccctggctctgctgtccccttggcaggtcctggccag

SEQ ID NO: 54582 - DNA, 483 bp, Homo sapiens
ctcttccggggtgggaagagcggagagctggagcagtgagggcctctctcagggtctggtggacagagagaagggcctgagtgcagagccagggtggcaggcaaagagagaagaggaggaggaggaggaggaggaggctgaggctggagaggaggctgtccccgaggaagaaggccccactgtagtgctgaacccccacccgagccttggctacaaggagatccggaaaggcgagagtcggtcggaggctctggctgtggatggagctggaacatcctttgcagggcagccccacaactttaaacattgacgattccttctctgaacacaggcagctttctagaagtttcccttcctccatcctatccactgggcacaactgcaataacttctgaccttttggtgaaagctgagaactcctgactgtaacatattctgtatgaactttatctaaagaaaaataaatctgttctgggctctttc

SEQ ID NO: 54583 - DNA, 2481 bp, Homo sapiens
agggcgctgctgctgccaccgctgctgccactgcagtgctcgagccccgtgcaggggagcttgcgggaggatcgaccgacagacggacgcacgccgaggcactgcgcccccagccccgcgccggtgccaccgcagcccgaccccggccgccagtccagccgcccctcgcccggtgcctaggtgcccggccccacaccgccagctgctcggcgcccgggtccgccatgcgctccgccgctgtcctggctcttctgctctgcgccgggcaagtcactgcgctccctgtgaacagccctatgaataaaggggataccgaggtgatgaaatgcatcgttgaggtcatctccgacacactttccaagcccagccccatgcctgtcagccaggaatgttttgagacactccgaggagatgaacggatcctttccattctgagacatcagaatttactgaaggagctccaagacctcgctctccaaggcgccaaggagagggcacatcagcagaagaaacacagcggttttgaagatgaactctcagaggttcttgagaaccagagcagccaggccgagctgaaagaggcggtggaagagccatcatccaaggatgttatggagaaaagagaggattccaaggaggcagagaaaagtggtgaagccacagacggagccaggccccaggccctcccggagcccatgcaggagtccaaggctgaggggaacaatcaggcccctggggaggaagaggaggaggaggaggaggccaccaacacccaccctccagccagcctccccagccagaaatacccaggcccacaggccgagggggacagtgagggcctctctcagggtctggtggacagagagaagggcctgagtgcagagccagggtggcaggcaaagagagaagaggaggaggaggaggaggaggaggctgaggctggagaggaggctgtccccgaggaagaaggccccactgtagtgctgaacccccacccgagccttggctacaaggagatccggaaaggcgagagtcggtcggaggctctggctgtggatggagctgggaagcctggggctgaggaggctcaggaccccgaagggaagggagaacaggagcactcccagcagaaagaggaggaggaggagatggcagtggtcccgcaaggcctcttccggggtgggaagagcggagagctggagcaggaggaggagcggctctccaaggagtgggaggactccaaacgctggagcaagatggaccagctggccaaggagctgacggctgagaagcggctggaggggcaggaggaggaggaggacaaccgggacagttccatgaagctctccttccgggcccgggcctacggcttcaggggccctgggccgcagctgcgacgaggctggaggccatcctcccgggaggacagccttgaggcgggcctgcccctccaggtccgaggctaccccgaggagaagaaagaggaggagggcagcgcaaaccgcagaccagaggaccaggagctggagagcctgtcggccattgaggcagagctggagaaagtggcccaccagctgcaggcactacggcggggctgagacaccggctggcagggctggccccagggcaccctgtggccctggctctgctgtccccttggcaggtcctggccagatggcccggacgctgcttccggtagggaggcagcctccagcctgcccaagcccaggccaccctatcgccccctacgcgccttgtctcctactcctgactcctacctgccctggaacatcctttgcagggcagccccacaactttaaacattgacgattccttctctgaacacaggcagctttctagaagtttcccttcctccatcctatccactgggcacaactgcaataacttctgaccttttggtgaaagctgagaactcctgactgtaacatattctgtatgaactttatctaaagaaaaataaatctgttctgggctctttcaaaaaaaaaaaaaaaaaaaaacaacacgacacaaaaaaacccccgcggggctctcttgggggggggcgcggacacacggcggtgttccaaaagggggccctgggccaaggtgtttcccgcgcccccttcttttttcccccggggggaaaccccggggcaccccataagggggggcaataaaaattggaagacgcgccgggttcccctttttgtatcttcgcccgtccataccgggtgtcactgcacctgacagcaaaacgaggtgcaacacaatttagaaaccaatgcgtcaggagagaaattgaccgacggcacataactgattgtcccgaagcgagtagcatcgaccaacactccgacacagcgtagtcatcgtgcacagcagactaatcgcagtaacagaacagtaagtcagcacagactatcgcgcagatctcgccacgtctgactcgtcaatcgctcaacgaccaagtgcaaggcc

SEQ ID NO: 54584 - DNA, 1869 bp, Homo sapiens
agggcgctgctgctgccaccgctgctgccactgcagtgctcgagccccgtgcaggggagcttgcgggaggatcgaccgacagacggacgcacgccgaggcactgcgcccccagccccgcgccggtgccaccgcagcccgaccccggccgccagtccagccgcccctcgcccggtgcctaggtgcccggccccacaccgccagctgctcggcgcccgggtccgccatgcgctccgccgctgtcctggctcttctgctctgcgccgggcaagtcactgcgctccctgtgaacagccctatgaataaaggggataccgaggtgatgaaatgcatcgttgaggtcatctccgacacactttccaagcccagccccatgcctgtcagccaggaatgttttgagacactccgaggagatgaacggatcctttccattctgagacatcagaatttactgaaggagctccaagacctcgctctccaaggcgccaaggagagggcacatcagcagaagaaacacagcggttttgaagatgaactctcagaggttcttgagaaccagagcagccaggccgagctgaaagaggcggtggaagagccatcatccaagggaggaagaggaggaggaggaggaggccaccaacacccaccctccagccagcctccccagccagaaatacccaggcccacaggccgagggggacagtgagggcctctctcagggtctggtggacagagagaagggcctgagtgcagagccagggtggcaggcaaagagagaagaggaggaggaggaggaggaggaggctgaggctggagaggaggctgtccccgaggaagaaggccccactgtagtgctgaacccccacccgagccttggctacaaggagatccggaaaggcgagagtcggtcggaggctctggctgtggatggagctgggaagcctggggctgaggaggctcaggaccccgaagggaagggagaacaggagcactcccagcagaaagaggaggaggaggagatggcagtggtcccgcaaggcctcttccggggtgggaagagcggagagctggagcaggaggaggagcggctctccaaggagtgggaggactccaaacgctggagcaagatggaccagctggccaaggagctgacggctgagaagcggctggaggggcaggaggaggaggaggacaaccgggacagttccatgaagctctccttccgggcccgggcctacggcttcaggggccctgggccgcagctgcgacgaggctggaggccatcctcccgggaggacagccttgaggcgggcctgcccctccaggtccgaggctaccccgaggagaagaaagaggaggagggcagcgcaaaccgcagaccagaggaccaggagctggagagcctgtcggccattgaggcagagctggagaaagtggcccaccagctgcaggcactacggcggggctgagacaccggctggcagggctggccccagggcaccctgtggccctggctctgctgtccccttggcaggtcctggccagatggcccggacgctgcttccggtagggaggcagcctccagcctgcccaagcccaggccaccctatcgccccctacgcgccttgtctcctactcctgactcctacctgccctggaacatcctttgcagggcagccccacaactttaaacattgacgattccttctctgaacacaggcagctttctagaagtttcccttcctccatcctatccactgggcacaactgcaataacttctgaccttttggtgaaagctgagaactcctgactgtaacatattctgtatgaactttatctaaagaaaaataaatctgttctgggctctttc

SEQ ID NO: 54585 - DNA, 1218 bp, Homo sapiens
tttttttcagaggaaagagcccagaacagatttatttttctttagataaagttcatacagaatatgttacagtcaggagttctcagctttcaccaaaaggtcagaagttattgcagttgtgcccaagaggaggaggaggaggaggaggaggctgaggctggagaggaggctgtccccgaggaagaaggccccactgtagtgctgaacccccacccgagccttggctacaaggagatccggaaaggcgagagtcggtcggaggctctggctgtggatggagctgggaagcctggggctgaggaggctcaggaccccgaagggaagggagaacaggagcactcccagcagaaagaggaggaggaggagatggcagtggtcccgcaaggcctcttccggggtgggaagagcggagagctggagcaggaggaggagcggctctccaaggagtgggaggactccaaacgctggagcaagatggaccagctggccaaggagctgacggctgagaagcggctggaggggcaggaggaggaggaggacaaccgggacagttccatgaagctctccttccgggcccgggcctacggcttcaggggccctgggccgcagctgcgacgaggctggaggccatcctcccgggaggacagccttgaggcgggcctgcccctccaggtccgaggctaccccgaggagaagaaagaggaggagggcagcgcaaaccgcagaccagaggaccaggagctggagagcctgtcggccattgaggcagagctggagaaagtggcccaccagctgcaggcactacggcggggctgagacaccggctggcagggctggccccagggcaccctgtggccctggctctgctgtccccttggcaggtcctggccagatggcccggacgctgcttccggtagggaggcagcctccagcctgcccaagcccaggccaccctatcgccccctacgcgccttgtctcctactcctgactcctacctgccctggaacatcctttgcagggcagccccacaactttaaacattgacgattccttctctgaacacaggcagctttctagaagtttcccttcctccatcctatccactgggcacaactgcaataacttctgaccttttggtgaaagctgagaactcctgactgtaacatattctgtatgaactttatctaaagaaaaataaatctgttctgggctctttc

SEQ ID NO: 54586 - DNA, 1778 bp, Homo sapiens
agggcgctgctgctgccaccgctgctgccactgcagtgctcgagccccgtgcaggggagcttgcgggaggatcgaccgacagacggacgcacgccgaggcactgcgcccccagccccgcgccggtgccaccgcagcccgaccccggccgccagtccagccgcccctcgcccggtgcctaggtgcccggccccacaccgccagctgctcggcgcccgggtccgccatgcgctccgccgctgtcctggctcttctgctctgcgccgggcaagtcactgcgctccctgtgaacagccctatgaataaaggggataccgaggtgatgaaatgcatcgttgaggtcatctccgacacactttccaagcccagccccatgcctgtcagccaggaatgttttgagacactccgaggagatgaacggatcctttccattctgagacatcagaatttactgaaggagctccaagacctcgctctccaaggcgccaaggagagggcacatcagcagaagaaacacagcggttttgaagatgaactctcagaggttcttgagaaccagagcagccaggccgagctgaaagaggcggtggaagagccatcatccaaggatgttatggagaaaagagaggattccaaggaggcagagaaaagtggtgaagccacagacggagccaggccccaggccctcccggagcccatgcaggagtccaaggctgaggggaacaatcaggcccctggggaggaagaggaggaggaggaggaggccaccaacacccaccctccagccagcctccccagccagaaatacccaggcccacaggccgagggggacagtgagggcctctctcagggtctggtggacagagagaagggcctgagtgcagagccagggtggcaggcaaagagagaagaggaggaggaggaggaggaggaggctgaggctggagaggaggctgtccccgaggaagaaggccccactgtagtgctgaacccccacccgagccttggctacaaggagatccggaaaggcgagagtcggtcggaggctctggctgtggatggagctgggaagcctggggctgaggaggctcaggaccccgaagggaagggagaacaggagcactcccagcagaaagaggaggaggaggagatggcagtggtcccgcaaggcctcttccggggtgggaagagcggagagctggagcaggaggaggagcggctctccaaggagtgggaggactccaaacgctggagcaagaaagaggaggagggcagcgcaaaccgcagaccagaggaccaggagctggagagcctgtcggccattgaggcagagctggagaaagtggcccaccagctgcaggcactacggcggggctgagacaccggctggcagggctggccccagggcaccctgtggccctggctctgctgtccccttggcaggtcctggccagatggcccggacgctgcttccggtagggaggcagcctccagcctgcccaagcccaggccaccctatcgccccctacgcgccttgtctcctactcctgactcctacctgccctggaacatcctttgcagggcagccccacaactttaaacattgacgattccttctctgaacacaggcagctttctagaagtttcccttcctccatcctatccactgggcacaactgcaataacttctgaccttttggtgaaagctgagaactcctgactgtaacatattctgtatgaactttatctaaagaaaaataaatctgttctgggctctttc

SEQ ID NO: 54587 - DNA, 1972 bp, Homo sapiens
agggcgctgctgctgccaccgctgctgccactgcagtgctcgagccccgtgcaggggagcttgcgggaggatcgaccgacagacggacgcacgccgaggcactgcgcccccagccccgcgccggtgccaccgcagcccgaccccggccgccagtccagccgcccctcgcccggtgcctaggtgcccggccccacaccgccagctgctcggcgcccgggtccgccatgcgctccgccgctgtcctggctcttctgctctgcgccgggcaagtcactgcgctccctgtgaacagccctatgaataaaggggataccgaggtgatgaaatgcatcgttgaggtcatctccgacacactttccaagcccagccccatgcctgtcagccaggaatgttttgagacactccgaggagatgaacggatcctttccattctgagacatcagaatttactgaaggagctccaagacctcgctctccaaggcgccaaggagagggcacatcagcagaagaaacacagcggttttgaagatgaactctcagaggttcttgagaaccagagcagccaggccgagctgaaagaggcggtggaagagccatcatccaaggatgttatggagaaaagagaggattccaaggaggcagagaaaagtggtgaagccacagacggagccaggccccaggccctcccggagcccatgcaggagtccaaggctgaggggaacaatcaggcccctggggaggaagaggaggaggaggaggaggccaccaacacccaccctccagccagcctccccagccagaaatacccaggcccacaggccgagggggacagtgagggcctctctcagggtctggtggacagagagaagggcctgagtgcagagccagggtggcaggcaaagagagaagaggaggaggaggaggaggaggaggctgaggctggagaggaggctgtccccgaggaagaaggccccactgtagtgctgaacccccacccgagccttggctacaaggagatccggaaaggcgagagtcggtcggaggctctggctgtggatggagctgggaagcctggggctgaggaggctcaggaccccgaagggaagggagaacaggagcactcccagcagaaagaggaggaggaggagatggcagtggtcccgcaaggcctcttccggggtgggaagagcggagagctggagcaggaggaggagcggctctccaaggagtgggaggactccaaacgctggagcaagatggaccagctggccaaggagctgacggctgagaagcggctggaggggcaggaggaggaggaggacaaccgggacagttccatgaagctctccttccgggcccgggcctacggcttcaggggccctgggccgcagctgcgacgaggctggaggccatcctcccgggaggacagccttgaggcgggcctgcccctccaggtccgaggctaccccgaggagaagaaagaggaggagggcagcgcaaaccgcagaccagaggaccaggagctggagagcctgtcggccattgaggcagagctggagaaagtggcccaccagctgcaggcactacggcggggctgagacaccggctggcagggctggccccagggcaccctgtggccctggctctgctgtccccttggcaggtcctggccagatggcccggacgctgcttccggtagggaggcagcctcctgctttcggtaggaggcagctccagctggccaagcccagcaacctatgcccctagcgcttgttctatcctgactctactgcctggacatctttgcagggaggccacaatttacatgacgattctttctgacacgggagttctaaaattccttctcatctatcctggcgactgataatttgcttgggagtggacctgccgacatttgtgagtttgaaaatttggaaaaaacgggttcggggagaagggaggtttcctttag

SEQ ID NO: 54588 - DNA, 1840 bp, Homo sapiens
agggcgctgctgctgccaccgctgctgccactgcagtgctcgagccccgtgcaggggagcttgcgggaggatcgaccgacagacggacgcacgccgaggcactgcgcccccagccccgcgccggtgccaccgcagcccgaccccggccgccagtccagccgcccctcgcccggtgcctaggtgcccggccccacaccgccagctgctcggcgcccgggtccgccatgcgctccgccgctgtcctggctcttctgctctgcgccgggcaagtcactgcgctccctgtgaacagccctatgaataaaggggataccgaggtgatgaaatgcatcgttgaggtcatctccgacacactttccaagcccagccccatgcctgtcagccaggaatgttttgagacactccgaggagatgaacggatcctttccattctgagacatcagaatttactgaaggagctccaagacctcgctctccaaggcgccaaggagagggcacatcagcagaagaaacacagcggttttgaagatgaactctcagaggttcttgagaaccagagcagccaggccgagctgaaagaggcggtggaagagccatcatccaaggatgttatggagaaaagagaggattccaaggaggcagagaaaagtggtgaagccacagacggagccaggccccaggccctcccggagcccatgcaggagtccaaggctgaggggaacaatcaggcccctggggaggaagaggaggaggaggaggaggccaccaacacccaccctccagccagcctccccagccagaaatacccaggcccacaggccgagggggacagtgagggcctctctcagggtctggtggacagagagaagggcctgagtgcagagccagggtggcaggcaaagagagaagaggaggaggaggaggaggaggaggctgaggctggagaggaggctgtccccgaggaagaaggccccactgtagtgctgaacccccacccgagccttggctacaaggagatccggaaaggcgagagtcggtcggaggctctggctgtggatggagctgggaagcctggggctgaggaggctcaggaccccgaagggaagggagaacaggagcactcccagcagaaagaggaggaggaggagatggcagtggtcccgcaaggcctcttccggggtgggaagagcggagagctggagcaggaggaggagcggctctccaaggagtgggaggactccaaacgctggagcaagatggaccagctggccaaggagctgacggctgagaagcggctggaggggcaggaggaggaggaggacaaccgggacagttccatgaagctctccttccgggcccgggcctacggcttcaggggccctgggccgcagctgcgacgaggctggaggccatcctcccgggaggacagccttgaggcgggcctgcccctccaggtccgaggctaccccgaggagaagaaagaggaggagggcagcgcaaaccgcagaccagagatggcccggacgctgcttccggtagggaggcagcctccagcctgcccaagcccaggccaccctatcgccccctacgcgccttgtctcctactcctgactcctacctgccctggaacatcctttgcagggcagccccacaactttaaacattgacgattccttctctgaacacaggcagctttctagaagtttcccttcctccatcctatccactgggcacaactgcaataacttctgaccttttggtgaaagctgagaactcctgactgtaacatattctgtatgaactttatctaaagaaaaataaatctgttctgggctctttc

SEQ ID NO: 54589 - DNA, 628 bp, Homo sapiens
gggaggaggggggcagcgcaaaccgcagaccagaggaccaggagctggagagcctgtcggtgaggcgggcctgcccctccaggtccgaggctaccccgaggagaagaaagaggaggagggcagcgcaaaccgcagaccagaggaccaggagctggagagcctgtcggccattgaggcagagctggagaaagtggcccaccagctgcaggcactacggcggggctgagacaccggctggcagggctggccccagggcaccctgtggccctggctctgctgtccccttggcaggtcctggccagatggcccggacgctgcttccggtagggaggcagcctccagcctgcccaagcccaggccaccctatcgccccctacgcgccttgtctcctactcctgactcctacctgccctggaacatcctttgcagggcagccccacaactttaaacattgacgattccttctctgaacacaggcagctttctagaagtttcccttcctccatcctatccactgggcacaactgcaataacttctgaccttttggtgaaagctgagaactcctgactgtaacatattctgtatgaactttatctaaagaaaaataaatctgttctgggctctttc

SEQ ID NO: 54590 - DNA, 1601 bp, Homo sapiens
  misc_feature (1240)..(1240): n is a, c, g, or t
agggcgctgctgctgccaccgctgctgccactgcagtgctcgagccccgtgcaggggagcttgcgggaggatcgaccgacagacggacgcacgccgaggcactgcgcccccagccccgcgccggtgccaccgcagcccgaccccggccgccagtccagccgcccctcgcccggtgcctaggtgcccggccccacaccgccagctgctcggcgcccgggtccgccatgcgctccgccgctgtcctggctcttctgctctgcgccgggcaagtcactgcgctccctgtgaacagccctatgaataaaggggataccgaggtgatgaaatgcatcgttgaggtcatctccgacacactttccaagcccagccccatgcctgtcagccaggaatgttttgagacactccgaggagatgaacggatcctttccattctgagacatcagaatttactgaaggagctccaagacctcgctctccaaggcgccaaggagagggcacatcagcagaagaaacacagcggttttgaagatgaactctcagaggttcttgagaaccagagcagccaggccgagctgaaagaggcggtggaagagccatcatccaaggatgttatggagaaaagagaggattccaaggaggcagagaaaagtggtgaagccacagacggagccaggccccaggccctcccggagcccatgcaggagtccaaggctgaggggaacaatcaggcccctggggaggaagaggaggaggaggaggaggccaccaacacccaccctccagccagcctccccagccagaaatacccaggcccacaggccgagggggacagtgagggcctctctcagggtctggtggacagagagaagggcctgagtgcagagccagggtggcaggcaaagagagaagaggaggaggaggaggaggaggaggctgaggctggagaggaggctgtccccgaggaagaaggccccactgtagtgctgaacccccacccgagccttggctacaaggagatccggaaaggcgagagtcggtcggaggctctggctgtggatggagctgggaagcctggggctgaggaggctcaggaccccgaagggaagggagaacaggagcactcccagcagaaagaggaggaggaggagatggcagtggtcccgcaaggcctcttcctggtggttggtgaatgatgctggatgatgcttggatgcagtgagtgatgtgatgctgtgctctnccaatggatgttggtgtgatgtgactccataactgcttggatgcaagattggaccatgctgtgccaaatggagcttgactggcttgaagaaggctgtgcttgggatgtgtgtgcacgtgacgtgacgtgacgtgatgtgacatacctgtggaacattgttccattgaaagctctccttcctgggtgccctggggcctactgtgcttcatgtgtgtgcccttgtggcctgctggcttgctgacgaaggcttggatggccatccctcccctggggatggatcagcctttgaggctgtggcctgccccctccaggtccgagggctaccccctgaggagaagaccgatggagtggtggcagtgcc

SEQ ID NO: 54591 - DNA, 418 bp, Homo sapiens
aggcactacggcggggctgagacaccggctggcagggctggccccagggcaccctgtggccctggctctgctgtccccttggcaggtcctggccagatggcccggacgctgcttccggtagggaggcagcctccagcctgcccaagcccaggccaccctatcgccccctacgcgccttgtctcctactcctgactcctacctgccctggaacatcctttgcagggcagccccacaactttaaacattgacgattccttctctgaacacaggcagctttctagaagtttcccttcctccatcctatccactgggcacaactgcaataacttctgaccttttggtgaaagctgagaactcctgactgtaacatattctgtatgaactttatctaaagaaaaataaatctgttctgggctc

SEQ ID NO: 54592 - DNA, 2383 bp, Homo sapiens
cttcccttggggctttaaaaaccacagcccttgggcaggagggaccttcgatcctcggggagcccaggagaccagaacatgaactccttcaattataccacccctgattatgggcactatgatgacaaggataccctggacctcaacacccctgtggataaaacttctaacacgctgcgtgttccagacatcctggccttggtcatctttgcagtcgtcttcctggtgggagtgctgggcaatgccctggtggtctgggtgacggcattcgaggccaagcggaccatcaatgccatctggttcctcaacttggcggtagccgacttcctctcctgcctggcgctgcccatcttgttcacgtccattgtacagcatcaccactggccctttggcggggccgcctgcagcatcctgccctccctcatcctgctcaacatgtacgccagcatcctgctcctggccaccatcagcgccgaccgctttctgctggtgtttaaacccatctggtgccagaacttccgaggggccggcttggcctggatcgcctgtgccgtggcttggggtttagccctgctgctgaccataccctccttcctgtaccgggtggtccgggaggagtactttccaccaaaggtgttgtgtggcgtggactacagccacgacaaacggcgggagcgagccgtggccatcgtccggctggtcctgggcttcctgtggcctctactcacgctcacgatttgttacactttcatcctgctccggacgtggagccgcagggccacgcggtccaccaagacactcaaggtggtggtggcagtggtggccagtttctttatcttctggttgccctaccaggtgacggggataatgatgtccttcctggagccatcgtcacccaccttcctgctgctgaataagctggactccctgtgtgtctcctttgcctacatcaactgctgcatcaaccccatcatctacgtggtggccggccagggcttccagggccgactgcggaaatccctccccagcctcctccggaacgtgttgactgaagagtccgtggttagggagagcaagtcattcacgcgctccacagtggacactatggcccagaagacccaggcagtgtaggcgacagcctcatgggccactgtggcccgatgtccccttccttcccggccattctccctcttgttttcacttcacttttcgtgggatggtgttaccttagctaactaactctcctccatgttgcctgtctttcccagacttgtccctccttttccagcgggactcttctcatccttcctcatttgcaaggtgaacacttccttctagggagcaccctcccaccccccacccccccccacacaccatctttccatcccaggcttttgaaaaacaaacagaaacccgtgtatctgggatatttccatatggcaataggtgtgaacagggaactcagaatacagacaagtagaaagattctcgcttaaaaaaatgtatttattttatggcaagttggaaaatatgtaactggaatctcaaaagttctttgggacaaaacagaagtccatggagttatctaagctcttgtaagtgagttaatttaaaaaagaaaattaggctgagagcagtggctcacgcctgtaatcccagaactttgggaggctaaggtgggtggatcacctgaggtcaagagttccagaccaggctggccagcatggtgaaaccccgtctgtactaaaaatacaaaaaattaactgggcatggtagtgggtgcctgtaatcccagctacttgggaggctgaggtgggagaattgctcgaaccttggaggtggaggttgtggtgagccatgatcgcaccactgcactctagcctgggtgaccgagggaggctctgtctcaaaagcaaagcaaaaacaaaaacaaaaacacctaaaaaacctgcagttttgtttgtactttgtttttaaattatgctttctattttgagatcattgcaaactcaacacaattgtaagtaatgatacagagggatcttgtgtacccttcacccagcctcccccaatggcaacatcttgcaaaactacaatgtagtctcataaccaggatattgacattgatacagtgaagatacaggacattctcatcaccacagggatccccaggatgcccacttccctccacccccacaccccagccgtgtccctaacccctggcaaccaggaatccactctccatttctataatgttgtcatttcaagaatgttattcaatggaatcatatagtatgtaacctgttttgagcttaaaaaaaaagtatacatgactttaatgaggaaaataaaaatgaatattgaaatgttgtgttatttctag

SEQ ID NO: 54593 - DNA, 2167 bp, Homo sapiens
aagtgctggctctcgtgcccccgcgggactagtctgactgggattcagtcgagcgggcgccgcatacggctgcggtctggtaccgtgcgaggtagtcctctagactcgacccgctcgtgtctgaggctgcccatcttgttcacgtccattgtacagcatcaccactggccctttggcggggccgcctgcagcatcctgccctccctcatcctgctcaacatgtacgccagcatcctgctcctggccaccatcagcgccgaccgctttctgctggtgtttaaacccatctggtgccagaacttccgaggggccggcttggcctggatcgcctgtgccgtggcttggggtttagccctgctgctgaccataccctccttcctgtaccgggtggtccgggaggagtactttccaccaaaggtgttgtgtggcgtggactacagccacgacaaacggcgggagcgagccgtggccatcgtccggctggtcctgggcttcctgtggcctctactcacgctcacgatttgttacactttcatcctgctccggacgtggagccgcagggccacgcggtccaccaagacactcaaggtggtggtggcagtggtggccagtttctttatcttctggttgccctaccaggtgacggggataatgatgtccttcctggagccatcgtcacccaccttcctgctgctgaataagctggactccctgtgtgtctcctttgcctacatcaactgctgcatcaaccccatcatctacgtggtggccggccagggcttccagggccgactgcggaaatccctccccagcctcctccggaacgtgttgactgaagagtccgtggttagggagagcaagtcattcacgcgctccacagtggacactatggcccagaagacccaggcagtgtaggcgacagcctcatgggccactgtggcccgatgtccccttccttcccggccattctccctcttgttttcacttcacttttcgtgggatggtgttaccttagctaactaactctcctccatgttgcctgtctttcccagacttgtccctccttttccagcgggactcttctcatccttcctcatttgcaaggtgaacacttccttctagggagcaccctcccaccccccacccccccccacacaccatctttccatcccaggcttttgaaaaacaaacagaaacccgtgtatctgggatatttccatatggcaataggtgtgaacagggaactcagaatacagacaagtagaaagattctcgcttaaaaaaatgtatttattttatggcaagttggaaaatatgtaactggaatctcaaaagttctttgggacaaaacagaagtccatggagttatctaagctcttgtaagtgagttaatttaaaaaagaaaattaggctgagagcagtggctcacgcctgtaatcccagaactttgggaggctaaggtgggtggatcacctgaggtcaagagttccagaccaggctggccagcatggtgaaaccccgtctgtactaaaaatacaaaaaattaactgggcatggtagtgggtgcctgtaatcccagctacttgggaggctgaggtgggagaattgctcgaaccttggaggtggaggttgtggtgagccatgatcgcaccactgcactctagcctgggtgaccgagggaggctctgtctcaaaagcaaagcaaaaacaaaaacaaaaacacctaaaaaacctgcagttttgtttgtactttgtttttaaattatgctttctattttgagatcattgcaaactcaacacaattgtaagtaatgatacagagggatcttgtgtacccttcacccagcctcccccaatggcaacatcttgcaaaactacaatgtagtctcataaccaggatattgacattgatacagtgaagatacaggacattctcatcaccacagggatccccaggatgcccacttccctccacccccacaccccagccgtgtccctaacccctggcaaccaggaatccactctccatttctataatgttgtcatttcaagaatgttattcaatggaatcatatagtatgtaacctgttttgagcttaaaaaaaaagtatacatgactttaatgaggaaaataaaaatgaatattgaaatgttgtgttatttctag

SEQ ID NO: 54594 - DNA, 416 bp, Homo sapiens
tagctgggactacaggcaagtgcaaccacgcctggctaatttttgtattttcagtagagacggggttttgccatgttgcccaggctattctcaaactcctgggctcaagcagtccgcccgcctcggcctcccaaagtgctgggatgacaggcgtgagctacggcatctgcctcaatattttaataagtggtgtgacaccctagttgactctcagccctcagcatccccatttcctagtgagaaaaagccacacaggggaaaagccacatgcctgagccaggatgccccctacccgggcacatgtctgcagactcatcctctctgctctctccgattccccttagaactccttcaattataccacccctgattatgggcactatgatgacaaggataccctggacctcaacacccct

SEQ ID NO: 54595 - DNA, 1330 bp, Homo sapiens
cttcccttggggctttaaaaaccacagcccttgggcaggagggaccttcgatcctcggggagcccaggagaccagaacatgaactccttcaattataccacccctgattatgggcactatgatgacaaggataccctggacctcaacacccctgtggataaaacttctaacacgctgcgtgttccagacatcctggccttggtcatctttgcagtcgtcttcctggtgggagtgctgggcaatgccctggtggtctgggtgacggcattcgaggccaagcggaccatcaatgccatctggttcctcaacttggcggtagccgacttcctctcctgcctggcgctgcccatcttgttcacgtccattgtacagcatcaccactggccctttggcggggccgcctgcagcatcctgccctccctcatcctgctcaacatgtacgccagcatcctgctcctggccaccatcagcgccgaccgctttctgctggtgtttaaacccatctggtgccagaacttccgaggggccggcttggcctggatcgcctgtgccgtggcttggggtttagccctgctgctgaccataccctccttcctgtaccgggtggtccgggaggagtactttccaccaaaggtgttgtgtggcgtggactacagccacgacaaacggcgggagcgagccgtggccatcgtccggctggtcctgggcttcctgtggcctctactcacgctcacgatttgttacactttcatcctgctccggacgtggagccgcagggccacgcggtccaccaagacactcaaggtggtggtggcagtggtggccagtttctttatcttctggttgccctaccaggtgacggggataatgatgtccttcctggagccatcgtcacccaccttcctgctgctgaataagctggactccctgtgtgtctcctttgcctacatcaactgctgcatcaaccccatcatctacgtggtggccggccagggcttccagggccgactgcggaaatccctccccagcctcctccggaacgtgttgactgaagagtccgtggttagggagagcaagtcattcacgcgctccacagtggacactatggcccagaagacccaggcagtgtaggcgacagcctcatgggccactgtggcccgatgtccccttccttcccggccattctccctcttgttttcacttcacttttcgtgggatggtgttaccttagctaactaactctcctccatgttgcctgtctttcccagacttgtcgcgatccatctgccacgccggatatacactggacatcacgctagaccaagaggta

SEQ ID NO: 54596 - DNA, 432 bp, Homo sapiens
actgctggcccccttggcctccgcacctatgaccacagggggcaaagaggaaaggtgcaacccagcagggaggccaaggacagtgtagtgctctttccagctgttctggagcctaaaataaaagccatctcaaaaaggaagacaggagctgggtgtagtggttcacgcctgtaatcccagcactttgggaggctgaggagggtggatcaccagaggtcgggagttcaagaccagcctgaccaacatggagaaaccccgtctctactaaaaacacaaaattagccaggcgtggtggtgcatgcctgtaatcccagctactcatggagtagctgaggcaggagaatcgcttgaatcggggaggcggaggttgcagtgagatgagattgcaccattgcactccagtctgggcaacaagagtgaaactccatcttt

SEQ ID NO: 54597 - DNA, 539 bp, Homo sapiens
gcaggaactactgcctcatgatagcatcttgtatactttatactcgcttcttatttctctgccccttatcccctcccttcccactaagatggggagtttccatctcaaaaatcccatacaagaaatgagagaggagagagagggagaaattatctgatagacgagacagtatttttcacggttaattgaggatgattttcataactggcaaatgtcattttgatctttgctattagaacatctgcaccatctcacaacaggaagcacagctatattccttgggatttacctattcttagaactaagagcacacattccaccagctgtctcgtgttgaaaatgttagctttccaaatccacgcaattggattgagcgtttataaatagattcaataaaaggaggttccattaggtctatacactaaaactggaattttttaaagatcctccaaggccccttttatttggtctgttcttgaatcatgccctgagagcaaaccatgcagttttattgctgaagataatatacattgtttttt

SEQ ID NO: 54598 - DNA, 298 bp, Homo sapiens
ccactgagaaggcgacgcttaaatgaggacttgaagaaggagaggagggaatgagctctagagatttcttggggagtgtattttcatatagtagatattaagaagtagaaaaggcttttgatattatctatcatttgaaatcagtaaattgcagttgtaaccagtaagtaccaattcagtttctggagtctagatcttttaaggctattgaaaaatatgtgtattgcaaatataggccatgaatttcttgcattttattttggtgtatactaataaaatcaactatcagatgccagtg

SEQ ID NO: 54599 - DNA, 1172 bp, Homo sapiens
gacaattcataaaggaaagattacactaagaagtaaaactattttatgcaaaagcctctatgagtaaagctaaaagacaaactctgaactggaaaaatattttttcaacacataaagcagaaaaaaacgtttcagactatatagtcagagaatccttacaaatcagtataaaaaagacggacaacttactacagaaatgggttgcaaaggataccctcaggcaatacacagaggagcggatttaaagaaccaataaacataagagatgctgaccttactaacaattaggagaaatgctggctgaaacaaaaactaccctttctcgcccttcataatggcaaaaataaagaaacatgactgtccaaatattgggccggatgaacgaaactgggcatgtagtgtggtacaccactttggaaagcaagttggcaatacctgctaaaatttgaaatgtggtccataaccaagcagttttaccacaacaaatatttcccaaagaagcacttgcaacagaagccctgtacaaggatgttcactgaagcattttttttgtcatgatgagacctaatgtctcttaatggagagatgaaaataaattagagtatgttcatattttgtttccttcattgctgtgctcccagccaccggaacatttcttggaacattgctgatgcacataaatatttgttgaatgaatgaatatggtggaacccacataacagttgaaaatgaataaattagatccatatgtatcaacatggatagatttcagaaacagcgttgggcgaacaaagtgactttagagtatggatgttatggtacaattttaatatgcataaaatgatactatatgctgtttatagatgcctatgtgtagtaaaaatattaaaatgtactgaaaaacacaaaaattataatgccagttgcctctgggaagggaaaggaaggcaggatttctctaggaaagagaaagaggaaaggagaagaaggagggtaggcattgggaaacaggagacttaagtttacctctgtggccttatttcttttaataagaaaattcatctgaagtacaaatgacaaaatgtaaactttttttaaaattctgagttgtaaatgcatgagtgcgctctctatgccctctttaactctaccactttccctcaggaagatat

SEQ ID NO: 54600 - DNA, 401 bp, Homo sapiens
  misc_feature (1)..(1): n is a, c, g, or t
  misc_feature (294)..(294): n is a, c, g, or t
  misc_feature (400)..(401): n is a, c, g, or t
natggacaggtagatgaatgaatggatagatgggtggataaataaatagaaaagactacagagctttgtacatgtggctgagagacccacgtaaactcagggagcacctactgtagtggtgaagcatgtagctgttggagccagtctgagggggccaaatcccagctctactgcttacatggtttaaaacaaaggcacaaaatatttgatgctccctcttcaagagatggagcctacgttccttccccttacatgttggctggatttagtaactcatttctgttaaataaagtngaagtgatggtgtgtaactttagagactaagtctaagggtgctgtgggttttctctttctctctggaattgtttgctttggggaaaattagctatcatgttgtgann

SEQ ID NO: 54601 - DNA, 269 bp, Homo sapiens
  misc_feature (162)..(162): n is a, c, g, or t
  misc_feature (268)..(269): n is a, c, g, or t
tagtagagctgggatttggccccctcagactggttccaacagctacatggtttaaaacaaaggcacaaaatatttgatgctccctcttcaagagatggagcctacgttccttccccttacatgttggctggatttagtaactcatttctgttaaataaagtngaagtgatggtgtgtaactttagagactaagtctaagggtgctgtgggttttctctttctctctggaattgtttgctttggggaaaattagctatcatgttgtgann

SEQ ID NO: 54602 - DNA, 1200 bp, Homo sapiens
ttgagacaagtgacagagtctctgttgcttaggctggagtgaagtggcatgatcatagctcactgcagccataaactcctgggcacaagtgatactcccacctcaacttaccaagtaggtagaactaaaggtgagcatgatcacacttggtcaatttttattttttgtagagatagggtttctctatgttgcccaggctggcattgaactcctggccttaagtgatgctcccactttggcttcccaaagttataggattattggcatgagctactgtgcacaggcaaatttactttctttataaattacctagtttgtgatattccattatagtaacacaaaatgaactaaggcaaaggactatagtcagaattacctaaaaccatgttgggaaagcattaagcaggacatatggtctaatttgccataggttctcaattcatgatttttttctccttttgattccaagcccaattgttttttttcctacagcatagggtgaacccccaacatcggaggcaggtctcagttaatttagaaagtttattttgccaaggttgaggatgggcaaccatgacacagcctcaggaggttctgagaacttctgcccaaggtggtcagggcacagcttggttttatacattttagggagacatgagacatcaatcaatatgtgtaagatgtacattgggccaatccagaaaggtgggacagctccaggtgaaggcaggacagctggaagcctggaggggacttccaggtcataggtaggtaagagaaaaatggttgcattcttttgagtttctgatgagcctctccaaatgaggcaatcagatatgcatttatctcagtgagcagagtggtgactttgaatagaatggaaggcaagtttgccctaagcagttcccagcttaactcttccctttagcttagtgattttggggccccaagatttattttcctttcacaatactataaaacatgttaatgcacttctattagttaggttccttttgattgcaagcaacaactacccaattcaatatagcttatgaaaaagaaaatatattttaaggatacaagggtatcttggagcatctctgagaattcaagatttcaggaatgatctgaggacagggaagggagtttctctttgggccacttcttttcttttctttttttttttttttttccccaaga

SEQ ID NO: 54603 - DNA, 572 bp, Homo sapiens
agggcatattccaaccttccagcctgcgacctgcagagaaaaaaaaattacttattttcttgccccgtacataccttgaagtgagcaaaaaaattaaattttaaccatgagggaaatcgtgcacatccaggctggtcagcgtggcaaccagatcggtgccaagttctgggaggtgatcagtgatgaacatggcatcgaccccactggcacctaccacggggacagcgacctgcagctggaccgcatctccgtgtactacagtgaagccactgatggcaaatatgttcctcgtgccatactggtggatctagaacctgggaccatggactctgttcgctcaggtccttttggccagatctttagaccagacaactttgtatttggtcagtctggggcagagcccccatcacctcaggcttctcagttcccttagccgtcttactcaactgcccgtttcctctccctcagaatttgtgtttgctgcctctatcttgttttttgttttttcttctggggagggtctagaacagtgcctggcacatagtaggcactcaataaatacttgtttgttg

SEQ ID NO: 54604 - DNA, 534 bp, Homo sapiens
agggcatattccaaccttccagcctgcgacctgcagagaaaaaaaaattacttattttcttgccccgtacataccttgaagtgagcaaaaaaattaaattttaaccatgagggaaatcgtgcacatccaggctggtcagcgtggcaaccagatcggtgccaagttctgggaggtgatcagtgatgaacatggcatcgaccccactggcacctaccacggggacagcgacctgcagctggaccgcatctccgtgtactacagtgaagccactgatggcaaatatgttcctcgtgccatactggtggatctagaacctgggaccatggactctgttcgctcaggtccttttggccagatctttagaccagacaactttgtatttggtcagtctggggcaggtaacaactgggccaaaggccactacacagagggcgccgagctggtcagtgtggcaaccagatcggtgccaagttctgggaggtgatcagtgattaacatggtccccttcccacgtctccatttctttatgcctgg

SEQ ID NO: 54605 - DNA, 1006 bp, Homo sapiens
taaataaggacaataaatgaagtataactgaacaaaataataatccgtgtgttaatttaactagtaaaatagagaaatacagctggcacgggggctcacgcctgtaatcccagtactttgggaggccgaggtgggtggatcacctttgcttgggagttcgagaccagcctgaccaacgtggagaaacccgtctttactaaaaaaatacaaaattagccaggcgtggtggcagatgcctgcaatcccagctactgggagtctgaggcaggagactcgtttcaatccgggaggcggaggttgtgctgagccgagatcatgccattgcactccagccggggcaacgagcaagactccatctcaaaaataaaaaaaaaataaaaaaaaatagagaaatacacaaatgagaggttatagtcatgttagtagcaaaaattgattcaggtaaagtttatctgggtgctaaatcttggatgaggggagggagtttcccaggaaacaagttacgaacatgatctcaaattcactgccaatgaattatttatgtgtttatttttctttttttcctttttttgtggagacgggaggtgggtctcgctgtgttgcccaggctggtcttgaactcctggcctcaagtgatcccaccactgtagcctcaaagtgctgggattacaggtgtgaaccaccatgcccagccagattatttattaattataaatagagaaatggtaactataaaatggggatgtaggaggcaaggatagatgtcatgtgtgcttccagacatgacactttgagaacacaacatcatttatgaaatatctaagccgaaaatttttaacaacctgaatccagtcatgaggacacccaatctaaatggcattcaacaagatacctggcctgtgttcttcagaagtgtcatgctgagagaaacaaaggttgggaaaattgtgaactgctcattgtgaacaattgagaaacttggaatatggattttcaattgagtaaa

SEQ ID NO: 54606 - DNA, 950 bp, Homo sapiens
  misc_feature (4)..(4): n is a, c, g, or t
  misc_feature (10)..(10): n is a, c, g, or t
  misc_feature (65)..(65): n is a, c, g, or t
  misc_feature (82)..(82): n is a, c, g, or t
  misc_feature (91)..(91): n is a, c, g, or t
  misc_feature (103)..(103): n is a, c, g, or t
  misc_feature (111)..(111): n is a, c, g, or t
  misc_feature (119)..(119): n is a, c, g, or t
  misc_feature (130)..(130): n is a, c, g, or t
  misc_feature (133)..(133): n is a, c, g, or t
ctcntcccgnacaaatctcccggacacattccggcgcgaaactacttcgtcgcacatactctcgncacaggccgcgcctccncagggcgangaaaattggagnaacccttngtaaaaanaccgcgcaggnggncgatctagaatagaggatcccccgggctgcaggctgtggtccatgacctctgacattttttttgacaactttatcatttgtgctgatcgaagaatagttgatgattgggccaatgatggatggggcctgaagaaagctgctgatggggctgctgagccaggcgttgtggggcagatgatcgaggcagctgaagagcgcccgtggctgtgggtagtctatattctaactgtagcccttcctgtgttcctggttatcctcttctgctgttctggaaagaaacagaccagtggtatggagtataagaaaactgatgcacctcaaccggatgtgaaggaagaggaagaagagaaggaagaggaaaaggacaagggagatgaggaggaggaaggagaagagaaacttgaagagaaacagaaaagtgatgctgaagaagatggtggcactgtcagtcaagaggaggaagacagaaaacctaaagcagaggaggatgaaattttgaacagatcaccaagaaacagaaagccacgaagagagtgaaacaatcttaagagcttgatctgtgatttcttctccctcctcccctgcaagagtggtcctaggagaggacctggcacaccttaggttgacattcagaaaacttcaagacatcaccatcagcaggctccaagtggaacactaatctggggaaactttaaaacatctagaagtaaaaaattggcaggttgggataaaaaaggaccctgcttcctggagaaaaggaaaacactttaaaataaagggtcggggaaagggaaccacggccccttttttttttttt

SEQ ID NO: 54607 - DNA, 2325 bp, Homo sapiens
  misc_feature (2282)..(2282): n is a, c, g, or t
ggcacgtgacggtcgggccgcctccgcctctctctttactgcggcgcggggcaaggtgtgcgggcgggaaggggcacgggcacccccgcggtccccgggaggctagagatcatggaagggaagtggttgctgtgtatgttactggtgcttggaactgctattgttgaggctcatgatggacatgatgatgatgtgattgatattgaggatgaccttgacgatgtcattgaagaggtagaagactcaaaaccagataccactgctcctccttcatctcccaaggttacttacaaagctccagttccaacaggggaagtatattttgctgattcttttgacagaggaactctgtcagggtggattttatccaaagccaagaaagacgataccgatgatgaaattgccaaatatgatggaaagtgggaggtagaggaaatgaaggagtcaaagcttccaggtgataaaggacttgtgttgatgtctcgggccaagcatcatgccatctctgctaaactgaacaagcccttcctgtttgacaccaagcctctcattgttcagtatgaggttaatttccaaaatggaatagaatgtggtggtgcctatgtgaaactgctttctaaaacaccagaactcaacctggatcagttccatgacaagaccccttatacgattatgtttggtccagataaatgtggagaggactataaactgcacttcatcttccgacacaaaaaccccaaaacgggtatctatgaagaaaaacatgctaagaggccagatgcagatctgaagacctattttactgataagaaaacacatctttacacactaatcttgaatccagataatagttttgaaatactggttgaccaatctgtggtgaatagtggaaatctgctcaatgacatgactcctcctgtaaatccttcacgtgaaattgaggacccagaagaccggaagcccgaggattgggatgaaagaccaaaaatcccagatccagaagctgtcaagccagatgactgggatgaagatgcccctgctaagattccagatgaagaggccacaaaacccgaaggctggttagatgatgagcctgagtacgtacctgatccagacgcagagaaacctgaggattgggatgaagacatggatggagaatgggaggctcctcagattgccaaccctagatgtgagtcagctcctggatgtggtgtctggcagcgacctgtgattgacaaccccaattataaaggcaaatggaagcctcctatgattgacaatcccagttaccagggaatctggaaacccaggaaaataccaaatccagatttctttgaagatctggaacctttcagaatgactccttttagtgctattggtttggagctgtggtccatgacctctgacattttttttgacaactttatcatttgtgctgatcgaagaatagttgatgattgggccaatgatggatggggcctgaagaaagctgctgatggggctgctgagccaggcgttgtggggcagatgatcgaggcagctgaagagcgcccgtggctgtgggtagtctatattctaactgtagcccttcctgtgttcctggttatcctcttctgctgttctggaaagaaacagaccagtggtatggagtataagaaaactgatgcacctcaaccggatgtgaaggaagaggaagaagagaaggaagaggaaaaggacaagggagatgaggaggaggaaggagaagagaaacttgaagagaaacagaaaagtgatgctgaagaagatggtggcactgtcagtcaagaggaggaagacagaaaacctaaagcagaggaggatgaaattttgaacagatcaccaagaaacagaaagccacgaagagagtgaaacaatcttaagagcttgatctgtgatttcttctccctcctcccctgcaagagtggtcctaggagaggacctggcacaccttaggttgacattcagaaaacttcaagacatcaccatcagcaggctccagttgaacactagtctgtgtaactttaaacatctagcagtaaatacttgcagttgtgatataaaggaccctgtttctgtagaaaagaaaacatttaacataatggttgtgaaatgtaacatgaagcaaactaacttttttttttttaacatctttgtttttaaaatagaatgatagaactttgccagtctttaagatcttggcttaatttaatgtattaatctgtttgtgcaaataattaccccatttaaaatgtcggggatgnagttgggtataaagattgtccgttgggtgggaaaatcactttg

SEQ ID NO: 54608 - DNA, 1364 bp, Homo sapiens
  misc_feature (1321)..(1321): n is a, c, g, or t
tacgatcgagctcgtacccgacgttactgcacctgcgacacaaaaaccccaaaacgggtatctatgaagaaaaacatgctaagaggccagatgaagaggccacaaaacccgaaggctggttagatgatgagcctgagtacgtacctgatccagacgcagagaaacctgaggattgggatgaagacatggatggagaatgggaggctcctcagattgccaaccctagatgtgagtcagctcctggatgtggtgtctggcagcgacctgtgattgacaaccccaattataaaggcaaatggaagcctcctatgattgacaatcccagttaccagggaatctggaaacccaggaaaataccaaatccagatttctttgaagatctggaacctttcagaatgactccttttagtgctattggtttggagctgtggtccatgacctctgacattttttttgacaactttatcatttgtgctgatcgaagaatagttgatgattgggccaatgatggatggggcctgaagaaagctgctgatggggctgctgagccaggcgttgtggggcagatgatcgaggcagctgaagagcgcccgtggctgtgggtagtctatattctaactgtagcccttcctgtgttcctggttatcctcttctgctgttctggaaagaaacagaccagtggtatggagtataagaaaactgatgcacctcaaccggatgtgaaggaagaggaagaagagaaggaagaggaaaaggacaagggagatgaggaggaggaaggagaagagaaacttgaagagaaacagaaaagtgatgctgaagaagatggtggcactgtcagtcaagaggaggaagacagaaaacctaaagcagaggaggatgaaattttgaacagatcaccaagaaacagaaagccacgaagagagtgaaacaatcttaagagcttgatctgtgatttcttctccctcctcccctgcaagagtggtcctaggagaggacctggcacaccttaggttgacattcagaaaacttcaagacatcaccatcagcaggctccagttgaacactagtctgtgtaactttaaacatctagcagtaaatacttgcagttgtgatataaaggaccctgtttctgtagaaaagaaaacatttaacataatggttgtgaaatgtaacatgaagcaaactaacttttttttttttaacatctttgtttttaaaatagaatgatagaactttgccagtctttaagatcttggcttaatttaatgtattaatctgtttgtgcaaataattaccccatttaaaatgtcggggatgnagttgggtataaagattgtccgttgggtgggaaaatcactttg

SEQ ID NO: 54609 - DNA, 2139 bp, Homo sapiens
ggcacgtgacggtcgggccgcctccgcctctctctttactgcggcgcggggcaaggtgtgcgggcgggaaggggcacgggcacccccgcggtccccgggaggctagagatcatggaagggaagtggttgctgtgtatgttactggtgcttggaactgctattgttgaggctcatgatggacatgatgatgatgtgattgatattgaggatgaccttgacgatgtcattgaagaggtagaagactcaaaaccagataccactgctcctccttcatctcccaaggttacttacaaagctccagttccaacaggggaagtatattttgctgattcttttgacagaggaactctgtcagggtggattttatccaaagccaagaaagacgataccgatgatgaaattgccaaatatgatggaaagtgggaggtagaggaaatgaaggagtcaaagcttccaggtgataaaggacttgtgttgatgtctcgggccaagcatcatgccatctctgctaaactgaacaagcccttcctgtttgacaccaagcctctcattgttcagtatgaggttaatttccaaaatggaatagaatgtggtggtgcctatgtgaaactgctttctaaaacaccagaactcaacctggatcagttccatgacaagaccccttatacgattatgtttggtccagataaatgtggagaggactataaactgcacttcatcttccgacacaaaaaccccaaaacgggtatctatgaagaaaaacatgctaagaggccagatgcagatctgaagacctattttactgataagaaaacacatctttacacactaatcttgaatccagataatagttttgaaatactggttgaccaatctgtggtgaatagtggaaatctgctcaatgacatgactcctcctgtaaatccttcacgtgaaattgaggacccagaagaccggaagcccgaggattgggatgaaagaccaaaaatcccagatccagaagctgtcaagccagatgactgggatgaagatgcccctgctaagattccagatgaagaggccacaaaacccgaaggctggttagatgatgagcctgagtacgtacctgatccagacgcagagaaacctgaggattgggatgaagacatggatggagaatgggaggctcctcagattgccaaccctagatgtgagtcagctcctggatgtggtgtctggcagcgacctgtgattgacaaccccaattataaaggcaaatggaagcctcctatgattgacaatcccagttaccagggaatctggaaacccaggaaaataccaaatccagatttctttgaagatctggaacctttcagaatgactccttttagtgctattggtttggagctgtggtccatgacctctgacattttttttgacaactttatcatttgtgctgatcgaagaatagttgatgattgggccaatgatggatggggcctgaagaaagctgctgatggggctgctgagccaggcgttgtggggcagatgatcgaggcagctgaagagcgcccgtggctgtgggtagtctatattctaactgtagcccttcctgtgttcctggttatcctcttctgctgttctggaaagaaacagaccagtggtatggagtataagaaaactgatgcacctcaaccggatgtgaaggaagaggaagaagagaaggaagaggaaaaggacaagggagatgaggaggaggaaggagaagagaaacttgaagagaaacagaaaagtgatgctgaagaagatggtggcactgtcagtcaagaggaggaagacagaaaacctaaagcagaggaggatgaaattttgaacagatcaccaagaaacagaaagccacgaagagagtgaaacaatcttaagagcttgatctgtgatttcttctccctcctcccctgcaagagtggtcctaggagaggacctggcacaccttaggttgacattcagaaaacttcaagacatcaccatcagcaggctccagttgaacactagtctgtgtaactttaaacactagcagtaatattgcggtgggatataaagagccgtgctgtgacagaacatttcctatggggggatgtactgagctttttttcctggttc

SEQ ID NO: 54610 - DNA, 1225 bp, Homo sapiens
  misc_feature (1182)..(1182): n is a, c, g, or t
tccaagtgacatggcacagggcatggattcatagagggatgaagacatggatggagaatgggaggctcctcagattgccaaccctagatgtgagtcagctcctggatgtggtgtctggcagcgacctgtgattgacaaccccaattataaaggcaaatggaagcctcctatgattgacaatcccagttaccagggaatctggaaacccaggaaaataccaaatccagatttctttgaagatctggaacctttcagaatgactccttttagtgctattggtttggagctgtggtccatgacctctgacattttttttgacaactttatcatttgtgctgatcgaagaatagttgatgattgggccaatgatggatggggcctgaagaaagctgctgatggggctgctgagccaggcgttgtggggcagatgatcgaggcagctgaagagcgcccgtggctgtgggtagtctatattctaactgtagcccttcctgtgttcctggttatcctcttctgctgttctggaaagaaacagaccagtggtatggagtataagaaaactgatgcacctcaaccggatgtgaaggaagaggaagaagagaaggaagaggaaaaggacaagggagatgaggaggaggaaggagaagagaaacttgaagagaaacagaaaagtgatgctgaagaagatggtggcactgtcagtcaagaggaggaagacagaaaacctaaagcagaggaggatgaaattttgaacagatcaccaagaaacagaaagccacgaagagagtgaaacaatcttaagagcttgatctgtgatttcttctccctcctcccctgcaagagtggtcctaggagaggacctggcacaccttaggttgacattcagaaaacttcaagacatcaccatcagcaggctccagttgaacactagtctgtgtaactttaaacatctagcagtaaatacttgcagttgtgatataaaggaccctgtttctgtagaaaagaaaacatttaacataatggttgtgaaatgtaacatgaagcaaactaacttttttttttttaacatctttgtttttaaaatagaatgatagaactttgccagtctttaagatcttggcttaatttaatgtattaatctgtttgtgcaaataattaccccatttaaaatgtcggggatgnagttgggtataaagattgtccgttgggtgggaaaatcactttg

SEQ ID NO: 54611 - DNA, 1255 bp, Homo sapiens
tacgatcgagctcgtacccgacgttactgcacctgcgacacaaaaaccccaaaacgggtatctatgaagaaaaacatgctaagaggccagatgcagatctgaagacctattttactgataagaaaacacatctttacacactaatcttgaatccagataatagttttgaaatactggttgaccaatctgtggtgaatagtggaaatctgctcaatgacatgactcctcctgtaaatccttcacgtgaaattgaggacccagaagaccggaagcccgaggattgggatgaaagaccaaaaatcccagatccagaagctgtcaagccagatgactgggatgaagatgcccctgctaagattccagatgaagaggccacaaaacccgaaggctggttagatgatgagcctgagtacgtacctgatccagacgcagagaaacctgaggattgggatgaagacatggatggagaatgggaggctcctcagattgccaaccctagatgtgagtcagctcctggatgtggtgtctggcagcgacctgtgattgacaaccccaattataaaggcaaatggaagcctcctatgattgacaatcccagttaccagggaatctggaaacccaggaaaataccaaatccagatttctttgaagatctggaacctttcagaatgactccttttagtgctattggtttggagctgtggtccatgacctctgacattttttttgacaactttatcatttgtgctgatcgaagaatagttgatgattgggccaatgatggatggggcctgaagaaagctgctgatggggctgctgagccaggcgttgtggggcagatgatcgaggcagctgaagagcgcccgtggctgtgggtagtctatattctaactgtagcccttcctgtgttcctggttatcctcttctgctgttctggaaagaaacagaccagtggtatggagtataagaaaactgatgcacctcaaccggatgtgaaggaagaggaagaagagaaggaagaggaaaaggacaagggagatgaggaggaggaaggagaagagaaacttgaagagaaacagaaaagtgatgctgaagaagatggtggcactgtcagtcaagaggaggaagacagaaaacctaaagcagaggaggatgaaattttgaacagatcaccaagaaacagaagcctctgagagtgggtgtctcttggagaggcctgccccacctttcgtgttcacttcagcttctcacctcg

SEQ ID NO: 54612 - DNA, 3086 bp, Homo sapiens
  misc_feature (2695)..(2695): n is a, c, g, or t
  misc_feature (2729)..(2729): n is a, c, g, or t
attatttgtctgggtatatatttcgaaatttgtcatttaggctatattttaatacactcttatatgttgaatctcggtttacactacatacagaattttcaaacaactggtcatgtggccgatttaagaattggagagccagggatactgagataagaaattcactggatcctgaggttaagggagccttttgcaggtgatgtagaagccagcttttgcacctatgagagtgaaatcatcttgattataaggagagcaagaggatggaggctttctctaatttcttttttacattttatgagcattttctctgaaaaagaaggtcctgcgtagtgccatgccataactgaactgcagaaaaacagcacggcctatgtttggtgtcaaaagctggaactttcaatcagccctgtcttgtttttcagccaggcgttgtggggcagatgatcgaggcagctgaagagcgcccgtggctgtgggtagtctatattctaactgtagcccttcctgtgttcctggttatcctcttctgctgttctggaaagaaacagaccagtggtatggagtataagaaaactgatgcacctcaaccggatgtgaaggaagaggaagaagagaaggaagaggaaaaggacaagggagatgaggaggaggaaggagaagagaaacttgaagagaaacagaaaagtgatgctgaagaagatggtggcactgtcagtcaagaggaggaagacagaaaacctaaagcagaggaggatgaaattttgaacagatcaccaagaaacagaaagccacgaagagagtgaaacaatcttaagagcttgatctgtgatttcttctccctcctcccctgcaagagtggtcctaggagaggacctggcacaccttaggttgacattcagaaaacttcaagacatcaccatcagcaggctccagttgaacactagtctgtgtaactttaaacatctagcagtaaatacttgcagttgtgatataaaggaccctgtttctgtagaaaagaaaacatttaacataatggttgtgaaatgtaacatgaagcaaactaacttttttttttttaacatctttgtttttaaaatagaatgatagaactttgccagtctttaagatcttggcttaatttaatgtattaatctgtttgtgcaaacataataccaccatttaaaaatgttagggagatgagttgcagtttttataatagattttttttaaagtttggtattgtaaaacattcacacctctgtccctcaaaattgataattacgtttaaagtgcagtcatttgtggttagaatcttgttttgtttgcttccattattgagttcctcctaaggaaattgaggagagggactgaatagaagcccaaattcatataaaagttgcgtttaagttgtattaaaaatagatatataagaaaaaattctttcacttgatgtttgttagaccagaaagtgtgtgtgttctgtagctcagttcccagacagctttttaggtagtggaggaggtggcttcatgtggcacttgggcatttatattccacttgggagggtcaggcctgtggccttctggagcaggtggcttgttaaggaacgctagcagggcatggcacgtgagctccggaatagatgtcttcatcacttcttccactgtgtgttgacactgttttccttacctatttcctcagatccccagctttctcctctgctatgcattttcttcacagtgcagcttgcagtccgttgctgaaaatgattataagccctgcataatgttaagctttattgtgattacgtgtatgtttcttctttcttttaagcagacccatacctttccagggtcaaagtacagaatagaatacattgatacaaagtacagaaaaatactttgatttttatccatttcttttactctgtgtaaagactttagaagtctaattcacaggcaaaccaatacagaattgactgcagttgaacagactagaagtatttgtgggaggagtgacatgaagcatgagttatctgattttttttgtagctgctatatattttaagccttcatttgcaattcatgtaacagttgtgtcataaattacacaataaagcagtcctgttcaaatttttttttaacgtggcttgtagaatttttaaaaaagtgatcttaggtttgttttttcatgcgggatgcagatgggtgctatcagagcctctcccacaccactatagtgtaataatgttattattactctacactgaaacgtattcagagttagatattattttagcttcagttgttctttagaggctttcaaatgtaccgatgatactgtttcttgcactgaatatataaacactccacagtgtttatattgggaagatattgggaaggaaatatatttgtaaaagatgaaggctgtatctatttttttttctttttaaactggttcacttaaattcttttgaggatgggatgtatttttcttgctgttcagtgctttttccttttcatctgttgttctgtggtcacagtgaccttagctacatagcagactttcccaaatgtattgattacaaataaacagttgttacttagcaagacctgaaaatatgtctgcaggtttctccttgaagcaaatgtgtgggatcattgcatttccagaaatctgcctccttcacccnccgttgacagtatatgtcatgcctcactttcttntagctgagctttaaatcattagagcttaaattgtcagatcgttcattgcctttccagggttatttagtaaagtttgttgaaaacaaaaacgccttttcttggttcttttttcagttattttgaaggtccagcatcctgattaaatgtctgacacttaatgaatgaccagcagcagctttcagctcttaaaaagacacttatattttgattttacatgctggttacctgttccattgttgtcaaatgcccagtgtccatcagatgtgttcctccattttcttatccacaaagtactcctcacttttcaatttgtcatgttactaaatggtgttacattaaagccctgtgttaagtgtc

SEQ ID NO: 54613 - DNA, 3432 bp, Homo sapiens
  misc_feature (3041)..(3041): n is a, c, g, or t
  misc_feature (3075)..(3075): n is a, c, g, or t
tacgatcgagctcgtacccgacgttactgcacctgcgacacaaaaaccccaaaacgggtatctatgaagaaaaacatgctaagaggccagatgcagatctgaagacctattttactgataagaaaacacatctttacacactaatcttgaatccagataatagttttgaaatactggttgaccaatctgtggtgaatagtggaaatctgctcaatgacatgactcctcctgtaaatccttcacgtgaaattgaggacccagaagaccggaagcccgaggattgggatgaaagaccaaaaatcccagatccagaagctgtcaagccagatgactgggatgaagatgcccctgctaagattccagatgaagaggccacaaaacccgaaggctggttagatgatgagcctgagtacgtacctgatccagacgcagagaaacctgaggattgggatgaagacatggatggagaatgggaggctcctcagattgccaaccctagatgtgagtcagctcctggatgtggtgtctggcagcgacctgtgattgacaaccccaattataaaggcaaatggaagcctcctatgattgacaatcccagttaccagggaatctggaaacccaggaaaataccaaatccagatttctttgaagatctggaacctttcagaatgactccttttagtgctattggtttggagctgtggtccatgacctctgacattttttttgacaactttatcatttgtgctgatcgaagaatagttgatgattgggccaatgatggatggggcctgaagaaagctgctgatggggctgctgagccaggcgttgtggggcagatgatcgaggcagctgaagagcgcccgtggctgtgggtagtctatattctaaaaacagaccagtggtatggagtataagaaaactgatgcacctcaaccggatgtgaaggaagaggaagaagagaaggaagaggaaaaggacaagggagatgaggaggaggaaggagaagagaaacttgaagagaaacagaaaagtgatgctgaagaagatggtggcactgtcagtcaagaggaggaagacagaaaacctaaagcagaggaggatgaaattttgaacagatcaccaagaaacagaaagccacgaagagagtgaaacaatcttaagagcttgatctgtgatttcttctccctcctcccctgcaagagtggtcctaggagaggacctggcacaccttaggttgacattcagaaaacttcaagacatcaccatcagcaggctccagttgaacactagtctgtgtaactttaaacatctagcagtaaatacttgcagttgtgatataaaggaccctgtttctgtagaaaagaaaacatttaacataatggttgtgaaatgtaacatgaagcaaactaacttttttttttttaacatctttgtttttaaaatagaatgatagaactttgccagtctttaagatcttggcttaatttaatgtattaatctgtttgtgcaaacataataccaccatttaaaaatgttagggagatgagttgcagtttttataatagattttttttaaagtttggtattgtaaaacattcacacctctgtccctcaaaattgataattacgtttaaagtgcagtcatttgtggttagaatcttgttttgtttgcttccattattgagttcctcctaaggaaattgaggagagggactgaatagaagcccaaattcatataaaagttgcgtttaagttgtattaaaaatagatatataagaaaaaattctttcacttgatgtttgttagaccagaaagtgtgtgtgttctgtagctcagttcccagacagctttttaggtagtggaggaggtggcttcatgtggcacttgggcatttatattccacttgggagggtcaggcctgtggccttctggagcaggtggcttgttaaggaacgctagcagggcatggcacgtgagctccggaatagatgtcttcatcacttcttccactgtgtgttgacactgttttccttacctatttcctcagatccccagctttctcctctgctatgcattttcttcacagtgcagcttgcagtccgttgctgaaaatgattataagccctgcataatgttaagctttattgtgattacgtgtatgtttcttctttcttttaagcagacccatacctttccagggtcaaagtacagaatagaatacattgatacaaagtacagaaaaatactttgatttttatccatttcttttactctgtgtaaagactttagaagtctaattcacaggcaaaccaatacagaattgactgcagttgaacagactagaagtatttgtgggaggagtgacatgaagcatgagttatctgattttttttgtagctgctatatattttaagccttcatttgcaattcatgtaacagttgtgtcataaattacacaataaagcagtcctgttcaaatttttttttaacgtggcttgtagaatttttaaaaaagtgatcttaggtttgttttttcatgcgggatgcagatgggtgctatcagagcctctcccacaccactatagtgtaataatgttattattactctacactgaaacgtattcagagttagatattattttagcttcagttgttctttagaggctttcaaatgtaccgatgatactgtttcttgcactgaatatataaacactccacagtgtttatattgggaagatattgggaaggaaatatatttgtaaaagatgaaggctgtatctatttttttttctttttaaactggttcacttaaattcttttgaggatgggatgtatttttcttgctgttcagtgctttttccttttcatctgttgttctgtggtcacagtgaccttagctacatagcagactttcccaaatgtattgattacaaataaacagttgttacttagcaagacctgaaaatatgtctgcaggtttctccttgaagcaaatgtgtgggatcattgcatttccagaaatctgcctccttcacccnccgttgacagtatatgtcatgcctcactttcttntagctgagctttaaatcattagagcttaaattgtcagatcgttcattgcctttccagggttatttagtaaagtttgttgaaaacaaaaacgccttttcttggttcttttttcagttattttgaaggtccagcatcctgattaaatgtctgacacttaatgaatgaccagcagcagctttcagctcttaaaaagacacttatattttgattttacatgctggttacctgttccattgttgtcaaatgcccagtgtccatcagatgtgttcctccattttcttatccacaaagtactcctcacttttcaatttgtcatgttactaaatggtgttacattaaagccctgtgttaagtgtc

SEQ ID NO: 54614 - DNA, 1466 bp, Homo sapiens
tacgatcgagctcgtacccgacgttactgcacctgcgacacaaaaaccccaaaacgggtatctatgaagaaaaacatgctaagaggccagatgcagatctgaagacctattttactgataagaaaacacatctttacacactaatcttgaatccagataatagttttgaaatactggttgaccaatctgtggtgaatagtggaaatctgctcaatgacatgactcctcctgtaaatccttcacgtgaaattgaggacccagaagaccggaagcccgaggattgggatgaaagaccaaaaatcccagatccagaagctgtcaagccagatgactgggatgaagatgcccctgctaagattccagatgaagaggccacaaaacccgaaggctggttagatgatgagcctgagtacgtacctgatccagacgcagagaaacctgaggattgggatgaagacatggatggagaatgggaggctcctcagattgccaaccctagatgtgagtcagctcctggatgtggtgtctggcagcgacctgtgattgacaaccccaattataaaggcaaatggaagcctcctatgattgacaatcccagttaccagggaatctggaaacccaggaaaataccaaatccagatttctttgaagatctggaacctttcagaatgactccttttagtgctattggtttggagctgtggtccatgacctctgacattttttttgacaactttatcatttgtgctgatcgaagaatagttgatgattgggccaatgatggatggggcctgaagaaagctgctgatggggctgctgagccaggcgttgtggggcagatgatcgaggcagctgaagagcgcccgtggctgtgggtagtctatattctaactgtagcccttcctgtgttcctggttatcctcttctgctgttctggaaaggtaggaagtttttttttttagaatcaattttagagacatcactctagtgattattaaaaataactaagatatgttgcctgaggttttctttgtagtggctcagtaatgaccaagccatgtttggtgttgacttcagaaaccttacttactgttcctcagtggccgtttattgtgcccagatgggagcaggatttatagccccttggttgctattattatttatcctaatctgttactctccatagtgttcggcagcaactttctaaaaaaaaacaataaacttagataccaaactagccacttgggcaataatcagctttgcctgctggcatagctatttctattctttgtaattcagtctttgattcctcattatccattctgccttcaccttccccactctcaaaacagtatgttggggtaccacagccttattgttagtttttcttgtttagcctttttttttttgcatgctatcatcccagtccgagtttttatatcgtaatcagtatcgagctcgcgcgc

SEQ ID NO: 54615 - DNA, 681 bp, Homo sapiens
  misc_feature (638)..(638): n is a, c, g, or t
gtcgactctaagatcccgctggtatgccgatcggatgtgaaggaagaggaagaagagaaggaagaggaaaaggacaagggagatgaggaggaggaaggagaagagaaacttgaagagaaacagaaaagtgatgctgaagaagatggtggcactgtcagtcaagaggaggaagacagaaaacctaaagcagaggaggatgaaattttgaacagatcaccaagaaacagaaagccacgaagagagtgaaacaatcttaagagcttgatctgtgatttcttctccctcctcccctgcaagagtggtcctaggagaggacctggcacaccttaggttgacattcagaaaacttcaagacatcaccatcagcaggctccagttgaacactagtctgtgtaactttaaacatctagcagtaaatacttgcagttgtgatataaaggaccctgtttctgtagaaaagaaaacatttaacataatggttgtgaaatgtaacatgaagcaaactaacttttttttttttaacatctttgtttttaaaatagaatgatagaactttgccagtctttaagatcttggcttaatttaatgtattaatctgtttgtgcaaataattaccccatttaaaatgtcggggatgnagttgggtataaagattgtccgttgggtgggaaaatcactttg

SEQ ID NO: 54616 - DNA, 4170 bp, Homo sapiens
  misc_feature (3779)..(3779): n is a, c, g, or t
  misc_feature (3813)..(3813): n is a, c, g, or t
ggcacgtgacggtcgggccgcctccgcctctctctttactgcggcgcggggcaaggtgtgcgggcgggaaggggcacgggcacccccgcggtccccgggaggctagagatcatggaagggaagtggttgctgtgtatgttactggtgcttggaactgctattgttgaggctcatgatggacatgatgatgatgtgattgatattgaggatgaccttgacgatgtcattgaagaggtagaagactcaaaaccagataccactgctcctccttcatctcccaaggttacttacaaagctccagttccaacaggggaagtatattttgctgattcttttgacagaggaactctgtcagggtggattttatccaaagccaagaaagacgataccgatgatgaaattgccaaatatgatggaaagtgggaggtagaggaaatgaaggagtcaaagcttccaggtgataaaggacttgtgttgatgtctcgggccaagcatcatgccatctctgctaaactgaacaagcccttcctgtttgacaccaagcctctcattgttcagtatgaggttaatttccaaaatggaatagaatgtggtggtgcctatgtgaaactgctttctaaaacaccagaactcaacctggatcagttccatgacaagaccccttatacgattatgtttggtccagataaatgtggagaggactataaactgcacttcatcttccgacacaaaaaccccaaaacgggtatctatgaagaaaaacatgctaagaggccagatgcagatctgaagacctattttactgataagaaaacacatctttacacactaatcttgaatccagataatagttttgaaatactggttgaccaatctgtggtgaatagtggaaatctgctcaatgacatgactcctcctgtaaatccttcacgtgaaattgaggacccagaagaccggaagcccgaggattgggatgaaagaccaaaaatcccagatccagaagctgtcaagccagatgactgggatgaagatgcccctgctaagattccagatgaagaggccacaaaacccgaaggctggttagatgatgagcctgagtacgtacctgatccagacgcagagaaacctgaggattgggatgaagacatggatggagaatgggaggctcctcagattgccaaccctagatgtgagtcagctcctggatgtggtgtctggcagcgacctgtgattgacaaccccaattataaaggcaaatggaagcctcctatgattgacaatcccagttaccagggaatctggaaacccaggaaaataccaaatccagatttctttgaagatctggaacctttcagaatgactccttttagtgctattggtttggagctgtggtccatgacctctgacattttttttgacaactttatcatttgtgctgatcgaagaatagttgatgattgggccaatgatggatggggcctgaagaaagctgctgatggggctgctgagccaggcgttgtggggcagatgatcgaggcagctgaagagcgcccgtggctgtgggtagtctatattctaactgtagcccttcctgtgttcctggttatcctcttctgctgttctggaaagaaacagaccagtggtatggagtataagaaaactgatgcacctcaaccggatgtgaaggaagaggaagaagagaaggaagaggaaaaggacaagggagatgaggaggaggaaggagaagagaaacttgaagagaaacagaaaagtgatgctgaagaagatggtggcactgtcagtcaagaggaggaagacagaaaacctaaagcagaggaggatgaaattttgaacagatcaccaagaaacagaaagccacgaagagagtgaaacaatcttaagagcttgatctgtgatttcttctccctcctcccctgcaagagtggtcctaggagaggacctggcacaccttaggttgacattcagaaaacttcaagacatcaccatcagcaggctccagttgaacactagtctgtgtaactttaaacatctagcagtaaatacttgcagttgtgatataaaggaccctgtttctgtagaaaagaaaacatttaacataatggttgtgaaatgtaacatgaagcaaactaacttttttttttttaacatctttgtttttaaaatagaatgatagaactttgccagtctttaagatcttggcttaatttaatgtattaatctgtttgtgcaaacataataccaccatttaaaaatgttagggagatgagttgcagtttttataatagattttttttaaagtttggtattgtaaaacattcacacctctgtccctcaaaattgataattacgtttaaagtgcagtcatttgtggttagaatcttgttttgtttgcttccattattgagttcctcctaaggaaattgaggagagggactgaatagaagcccaaattcatataaaagttgcgtttaagttgtattaaaaatagatatataagaaaaaattctttcacttgatgtttgttagaccagaaagtgtgtgtgttctgtagctcagttcccagacagctttttaggtagtggaggaggtggcttcatgtggcacttgggcatttatattccacttgggagggtcaggcctgtggccttctggagcaggtggcttgttaaggaacgctagcagggcatggcacgtgagctccggaatagatgtcttcatcacttcttccactgtgtgttgacactgttttccttacctatttcctcagatccccagctttctcctctgctatgcattttcttcacagtgcagcttgcagtccgttgctgaaaatgattataagccctgcataatgttaagctttattgtgattacgtgtatgtttcttctttcttttaagcagacccatacctttccagggtcaaagtacagaatagaatacattgatacaaagtacagaaaaatactttgatttttatccatttcttttactctgtgtaaagactttagaagtctaattcacaggcaaaccaatacagaattgactgcagttgaacagactagaagtatttgtgggaggagtgacatgaagcatgagttatctgattttttttgtagctgctatatattttaagccttcatttgcaattcatgtaacagttgtgtcataaattacacaataaagcagtcctgttcaaatttttttttaacgtggcttgtagaatttttaaaaaagtgatcttaggtttgttttttcatgcgggatgcagatgggtgctatcagagcctctcccacaccactatagtgtaataatgttattattactctacactgaaacgtattcagagttagatattattttagcttcagttgttctttagaggctttcaaatgtaccgatgatactgtttcttgcactgaatatataaacactccacagtgtttatattgggaagatattgggaaggaaatatatttgtaaaagatgaaggctgtatctatttttttttctttttaaactggttcacttaaattcttttgaggatgggatgtatttttcttgctgttcagtgctttttccttttcatctgttgttctgtggtcacagtgaccttagctacatagcagactttcccaaatgtattgattacaaataaacagttgttacttagcaagacctgaaaatatgtctgcaggtttctccttgaagcaaatgtgtgggatcattgcatttccagaaatctgcctccttcacccnccgttgacagtatatgtcatgcctcactttcttntagctgagctttaaatcattagagcttaaattgtcagatcgttcattgcctttccagggttatttagtaaagtttgttgaaaacaaaaacgccttttcttggttcttttttcagttattttgaaggtccagcatcctgattaaatgtctgacacttaatgaatgaccagcagcagctttcagctcttaaaaagacacttatattttgattttacatgctggttacctgttccattgttgtcaaatgcccagtgtccatcagatgtgttcctccattttcttatccacaaagtactcctcacttttcaatttgtcatgttactaaatggtgttacattaaagccctgtgttaagtgtc

SEQ ID NO: 54617 - DNA, 236 bp, Homo sapiens
gtcgtggtgattagaggatccggcgcctagcaacttcctaaaactgatgcacctcaaccggatgtgaaggaagaggaagaagagaaggaagaggaaaaggacaagggagatgaggaggaggaaggagaagagaaacttgaagagaaacagaaaagtgatgctgaagaagatggtggcactgtcagtcaagaggaaaaggacaagggagatgaggaggaggaagttgcctagggcgg

SEQ ID NO: 54618 - DNA, 1300 bp, Homo sapiens
  misc_feature (1257)..(1257): n is a, c, g, or t
cggcacgaggcctgctaagattccagatgaagaggccacaaaacccgaaggctggttagatgatgagcctgagtacgtacctgatccagacgcagagaaacctgaggattgggatgaagacatggatggagaatgggaggctcctcagattgccaaccctagatgtgagtcagctcctggatgtggtgtctggcagcgacctgtgattgacaaccccaattataaaggcaaatggaagcctcctatgattgacaatcccagttaccagggaatctggaaacccaggaaaataccaaatccagatttctttgaagatctggaacctttcagaatgactccttttagtgctattggtttggagctgtggtccatgacctctgacattttttttgacaactttatcatttgtgctgatcgaagaatagttgatgattgggccaatgatggatggggcctgaagaaagctgctgatggggctgctgagccaggcgttgtggggcagatgatcgaggcagctgaagagcgcccgtggctgtgggtagtctatattctaactgtagcccttcctgtgttcctggttatcctcttctgctgttctggaaagaaacagaccagtggtatggagtataagaaaactgatgcacctcaaccggatgtgaaggaagaggaagaagagaaggaagaggaaaaggacaagggagatgaggaggaggaaggagaagagaaacttgaagagaaacagaaaagtgatgctgaagaagatggtggcactgtcagtcaagaggaggaagacagaaaacctaaagcagaggaggatgaaattttgaacagatcaccaagaaacagaaagccacgaagagagtgaaacaatcttaagagcttgatctgtgatttcttctccctcctcccctgcaagagtggtcctaggagaggacctggcacaccttaggttgacattcagaaaacttcaagacatcaccatcagcaggctccagttgaacactagtctgtgtaactttaaacatctagcagtaaatacttgcagttgtgatataaaggaccctgtttctgtagaaaagaaaacatttaacataatggttgtgaaatgtaacatgaagcaaactaacttttttttttttaacatctttgtttttaaaatagaatgatagaactttgccagtctttaagatcttggcttaatttaatgtattaatctgtttgtgcaaataattaccccatttaaaatgtcggggatgnagttgggtataaagattgtccgttgggtgggaaaatcactttg

SEQ ID NO: 54619 - DNA, 2114 bp, Homo sapiens
ggcacgtgacggtcgggccgcctccgcctctctctttactgcggcgcggggcaaggtgtgcgggcgggaaggggcacgggcacccccgcggtccccgggaggctagagatcatggaagggaagtggttgctgtgtatgttactggtgcttggaactgctattgttgaggctcatgatggacatgatgatgatgtgattgatattgaggatgaccttgacgatgtcattgaagaggtagaagactcaaaaccagataccactgctcctccttcatctcccaaggttacttacaaagctccagttccaacaggggaagtatattttgctgattcttttgacagaggaactctgtcagggtggattttatccaaagccaagaaagacgataccgatgatgaaattgccaaatatgatggaaagtgggaggtagaggaaatgaaggagtcaaagcttccaggtgataaaggacttgtgttgatgtctcgggccaagcatcatgccatctctgctaaactgaacaagcccttcctgtttgacaccaagcctctcattgttcagtatgaggttaatttccaaaatggaatagaatgtggtggtgcctatgtgaaactgctttctaaaacaccagaactcaacctggatcagttccatgacaagaccccttatacgattatgtttggtccagataaatgtggagaggactataaactgcacttcatcttccgacacaaaaaccccaaaacgggtatctatgaagaaaaacatgctaagaggccagatgcagatctgaagacctattttactgataagaaaacacatctttacacactaatcttgaatccagataatagttttgaaatactggttgaccaatctgtggtgaatagtggaaatctgctcaatgacatgactcctcctgtaaatccttcacgtgaaattgaggacccagaagaccggaagcccgaggattgggatgaaagaccaaaaatcccagatccagaagctgtcaagccagatgactgggatgaagatgcccctgctaagattccagatgaagaggccacaaaacccgaaggctggttagatgatgagcctgagtacgtacctgatccagacgcagagaaacctgaggattgggatgaagacatggatggagaatgggaggctcctcagattgccaaccctagatgtgagtcagctcctggatgtggtgtctggcagcgacctgtgattgacaaccccaattataaaggcaaatggaagcctcctatgattgacaatcccagttaccagggaatctggaaacccaggaaaataccaaatccagatttctttgaagatctggaacctttcagaatgactccttttagtgctattggtttggagctgtggtccatgacctctgacattttttttgacaactttatcatttgtgctgatcgaagaatagttgatgattgggccaatgatggatggggcctgaagaaagctgctgatggggctgctgagccaggcgttgtggggcagatgatcgaggcagctgaagagcgcccgtggctgtgggtagtctatattctaactgtagcccttcctgtgttcctggttatcctcttctgctgttctggaaagaaacagaccagtggtatggagtataagaaaactgatgcacctcaaccggatgtgaaggaagaggaagaagagaaggaagaggaaaaggacaagggagatgaggaggaggaaggagaagagaaacttgaagagaaacagaaaagtgatgctgaagaagatggtggcactgtcagtcaagaggaggaagacagaaaacctaaagcagaggaggatgaaattttgaacagatcaccaagaaacagaaagccacgaagagagtgaaacaatcttaagagcttgatctgtgatttcttctccctcctcccctgcaagagtggtcctaggagaggacctggcacaccttaggttgacattcagaaaacttcaagacatcaccatcagcaggctccagttgaacactagtctgtgtaactttaaacacatagcggggtatacctggccattggaaatggaccctgttttttgagggttttcctcttgttttc

SEQ ID NO: 54620 - DNA, 1160 bp, Homo sapiens
  misc_feature (1117)..(1117): n is a, c, g, or t
tacgatcgagctcgtacccgacgttactgcacctgcgacacaaaaaccccaaaacgggtatctatgaagaaaaacatgctaagaggccagatgaagaggccacaaaacccgaaggctggttagatgatgagcctgagtacgtacctgatccagacgcagagaaacctgaggattatctggaacctttcagaatgactccttttagtgctattggtttggagctgtggtccatgacctctgacattttttttgacaactttatcatttgtgctgatcgaagaatagttgatgattgggccaatgatggatggggcctgaagaaagctgctgatggggctgctgagccaggcgttgtggggcagatgatcgaggcagctgaagagcgcccgtggctgtgggtagtctatattctaactgtagcccttcctgtgttcctggttatcctcttctgctgttctggaaagaaacagaccagtggtatggagtataagaaaactgatgcacctcaaccggatgtgaaggaagaggaagaagagaaggaagaggaaaaggacaagggagatgaggaggaggaaggagaagagaaacttgaagagaaacagaaaagtgatgctgaagaagatggtggcactgtcagtcaagaggaggaagacagaaaacctaaagcagaggaggatgaaattttgaacagatcaccaagaaacagaaagccacgaagagagtgaaacaatcttaagagcttgatctgtgatttcttctccctcctcccctgcaagagtggtcctaggagaggacctggcacaccttaggttgacattcagaaaacttcaagacatcaccatcagcaggctccagttgaacactagtctgtgtaactttaaacatctagcagtaaatacttgcagttgtgatataaaggaccctgtttctgtagaaaagaaaacatttaacataatggttgtgaaatgtaacatgaagcaaactaacttttttttttttaacatctttgtttttaaaatagaatgatagaactttgccagtctttaagatcttggcttaatttaatgtattaatctgtttgtgcaaataattaccccatttaaaatgtcggggatgnagttgggtataaagattgtccgttgggtgggaaaatcactttg

SEQ ID NO: 54621 - DNA, 1138 bp, Homo sapiens
  misc_feature (956)..(956): n is a, c, g, or t
tacgatcgagctcgtacccgacgttactgcacctgcgacacaaaaaccccaaaacgggtatctatgaagaaaaacatgctaagaggccagatgcagatctgaagacctattttactgataagaaaacacatctttacacactaatcttgaatccagataatagttttgaaatactggttgaccaatctgtggtgaatagtggaaatctgctcaatgacatgactcctcctgtaaatccttcacgtgaaattgaggacccagaagaccggaagcccgaggattgggatgaaagaccaaaaatcccagatccagaagctgtcaagccagatgactgggatgaagatgcccctgctaagattccagatgaagaggccacaaaacccgaaggctggttagatgatgagcctgagtacgtacctgatccagacgcagagaaacctgaggattgggatgaagacatggatggagaatgggaggctcctcagattgccaaccctagatgtgagtcagctcctggatgtggtgtctggcagcgacctgtgattgacaaccccaattataaaggcaaatggaagcctcctatgattgacaatcccagttaccagggaatctggaaacccaggaaaataccaaatccagatttctttgaagatctggaacctttcagaatgactccttttagtgctattggtttggagctgtggtccatgacctctgacattttttttgacaactttatcatttgtgctgatcgaagaatagttgatgattgggccaatgatggatggggcctgaagaaagctgctgatggggctgctgagccaggcgttgtggggcagatgatcgaggcagctgaagagcgcccgtggctgtgggtagtctatattctaactgtagcccttcctgtgttcctggttatcctcttctgctgttctggaaagaaacagaccagtggnatgggtgctcggcgtgtgcatgcacacgccgagtgtccaaacacacacacacttcctattctgcagggcttcagcgtggccttcattcccgcctcgcctcggcctcttttcaattaagaagtgatgccacttgaggcagggtctgcatgatcacttcttgggtatgggtattcggcgtgtca

SEQ ID NO: 54622 - DNA, 1128 bp, Homo sapiens
  misc_feature (956)..(956): n is a, c, g, or t
tacgatcgagctcgtacccgacgttactgcacctgcgacacaaaaaccccaaaacgggtatctatgaagaaaaacatgctaagaggccagatgcagatctgaagacctattttactgataagaaaacacatctttacacactaatcttgaatccagataatagttttgaaatactggttgaccaatctgtggtgaatagtggaaatctgctcaatgacatgactcctcctgtaaatccttcacgtgaaattgaggacccagaagaccggaagcccgaggattgggatgaaagaccaaaaatcccagatccagaagctgtcaagccagatgactgggatgaagatgcccctgctaagattccagatgaagaggccacaaaacccgaaggctggttagatgatgagcctgagtacgtacctgatccagacgcagagaaacctgaggattgggatgaagacatggatggagaatgggaggctcctcagattgccaaccctagatgtgagtcagctcctggatgtggtgtctggcagcgacctgtgattgacaaccccaattataaaggcaaatggaagcctcctatgattgacaatcccagttaccagggaatctggaaacccaggaaaataccaaatccagatttctttgaagatctggaacctttcagaatgactccttttagtgctattggtttggagctgtggtccatgacctctgacattttttttgacaactttatcatttgtgctgatcgaagaatagttgatgattgggccaatgatggatggggcctgaagaaagctgctgatggggctgctgagccaggcgttgtggggcagatgatcgaggcagctgaagagcgcccgtggctgtgggtagtctatattctaactgtagcccttcctgtgttcctggttatcctcttctgctgttctggaaagaaacagaccagtggnatggagcataacaagatctgaggcacctcaaccggataagaaggacgacgcaacgcagagcaggagacgagacaggaggactggatgaagatgggagccgagagaatctgggcgtcgcgacgactccggagccagagagggaatcctcaagaacacagcgatgcgggacccg

SEQ ID NO: 54623 - DNA, 846 bp, Homo sapiens
tacgatcgagctcgtacccgacgttactgcacctgcgacacaaaaaccccaaaacgggtatctatgaagaaaaacatgctaagaggccagatgcagatctgaagacctattttactgataagaaaacacatctttacacactaatcttgaatccagataatagttttgaaatactggttgaccaatctgtggtgaatagtggaaatctgctcaatgacatgactcctcctgtaaatccttcacgtgaaattgaggacccagaagaccggaagcccgaggattgggatgaaagaccaaaaatcccagatccagaagctgtcaagccagatgactgggatgaagatgcccctgctaagattccagatgaagaggccacaaaacccgaaggctggttagatgatgagcctgagtacgtacctgatccagacgcagagaaacctgaggattgggatgaagacatggatggagaatgggaggctcctcagattgccaaccctagatgtgagtcagctcctggatgtggtgtctggcagcgacctgtgattgacaaccccaattataaaggcaaatggaagcctcctatgattgacaatcccagttaccagggaatctggaaacccaggaaaataccaaatccagatttctttgaagatctggaacctttcagaatgactccttttagtgctattggtttggagctgtggtccatgacctctgacattttttttgacaactttatcatttgtgctgatcgaagaatagttgatgattgggccaatgatacacagggcacaacgaagaccatgatgggcattcgagccaggactcctcgggcagatgttacga

SEQ ID NO: 54624 - DNA, 684 bp, Homo sapiens
aagctcaatgctaaaccttttacaaatatttctaatcctcaatcataattagtactttcattttatagaagaggaaactgatttgtgtaatttggaaattacccaaaaggtagtaatgggggtactaggcttcaaatccaggtctgcctgactgtaaacttcatgctctaaaagcaatttgttaaacacttttagcctaaagaaatctaaccaaattacaaagtttagacaaaaacagtctttatcacaagaaaatgacttaacgatacaaagtatctcaacaagtcagaagtatgctttggatttccagactcagatctaggtactcccagcactggtgctgctgctgcctctcttttttactttactttttttctttaaacccatttctgcaggatgctgcctctttctacgctaattcttcccagaggagtttcatactacaaacgacaaagacattgtctaaagcattacagaaattccttcagtcttgcctctgacttatcacctaaatttgtatcgttaggatgaaaggattatccgctataccttaatcatgacgctatgacaacaaaaagttatggtggatccaaggttccaattcagctggtcccacacagtaaaaccaatgcacacttccagtctctttgttgctgttctgataaagcaattaaaaaccattca

SEQ ID NO: 54625 - DNA, 337 bp, Homo sapiens
cccgcggggtaccagtttcctgctcctccctggctgggcgctcagctctgggctggggaattcagcctgactggttgtccaggaagatgctgtctgggcttcccagggtgacccagtatctccctgagcagtgtgcctgtcacagctgcctccctccctgtgagtaccggaacaggcgtgactggtagggcctctgcctccttggggccattgtacctgctgctgcccgccccaccctgctccctcctggcaccatctcctttgcttccccaaggtccctgtgggcacacaaggcaaggaggccaggaggagccaggtgccagaccccctccatccc

SEQ ID NO: 54626 - DNA, 451 bp, Homo sapiens
tttcagttcttatcaggaaactgcatagactttcctctttatgtatgactgagggctttttaccatcatttgttcacttcacagatatttatttggtatttactatataccaggcactcttgtggcagtggaaaatacaactctcgtggaacatctgttccagaaggaaagactgccaataagcaataaaataggcaaaagatatagcatgttagagagtggtaagtaccacagagaaaaataaaatggagaaaagaaacacgaaaagttggggagagaggacaactgtttgagggggtggccaggggcagcttcatctcatcaagggggtgattttttttgagtacagacctgaaggtaacgagtgcacaagccacatgggtacctgagaacagcggcagaacaatggcagggtgctgggagggctatttaccacccatgctgtttagaa

SEQ ID NO: 54627 - DNA, 1324 bp, Homo sapiens
tatcgagtttatatttcatctccccaacgcatttgtgacattcttaagggcgtgaaccatgtactcaatagggccctgatgatagaaaagaaaatcagcttggtccctgttctcaagttcatagtttagtgtgggagactaatacaataactcgccgattcaacagatatttttccaacgtccgtatgtattgggtggaaaaggtgaggcaagagttgtatttcccagactcctgaacaggttgcgagatgattgactcctgagggagaccttctcaccttttcattggttgtcgctggccctctcgtctatcacccaaccaaccccgaatgcctcttgtaagccccacctccggcagccagccaatcagaagtgccgggggccagggtgctgctggggcactgacgcggtttcgattctagcgaaaaatgatttggctcggactgtcccgtgacaggcggtgcgaggaggccaggcccgcgcccgccgagccctagggccgctgctgccgacagccatggaggacgagcagcctgacagcctggagggctgggtgccggtccgggagggcctcttcgccgagcccgagaggcaccggctgcgcttcctggtggcctggaacggcgcggagggcaagttcgctgtgacttgtcacgaccgtaccgcgcagcagcggcggctgcgcgagggggcccggttggggcccgagcccgagcccaagcctgaggccgccgtctccccgtccagctgggccggcctgctctcggccgcggggctccgcggcgcgcaccggcagttggcggcgctgtggccgcctctggagcgctgcttcccgcggctgccgccggagctggacgtgggcggcggcggggcctggggtctggggctcgggctgtgggcgctgctgtggccgacgcgcgcgggtcccggcgaggcggcgctgcaggagctgtgcgggcagctggaacgctatctgggcgcggcggccgacggctgcggcggcgccacagtgcgcgacgcactcttcccggctgagggcggcgcggcgactgcgaaagcccgcgcgagttccgggagcgggccttgcgcgcgcggtgggtcgaggcggacgcgcggctgcgccaggttattcaaggacacggaaaagccaacaccatggtagcattaatgaacgtttaccaagaggaagatgaagcataccaggaattggttaccgtggcaaccatgttcttccagtacttattgcagccatttagggctatgcgagaagttgcaactttataagtctttggatgaggatgacctaggtcctagaagggtagtt

SEQ ID NO: 54628 - DNA, 864 bp, Homo sapiens
gtctgggtaacagaattaggccaatttatttaattccatttgttcatgtatccagccaacagatatttatggtgcacttgttgggtgccagccccgcccccaccactccaccctaccccagcaggcgctaaaggagagctgacatgatggataacgaaaaagaagacgctgtccttctattcagggagtttaacatctggaagagccgggagttctttgtgctaaaggccctctacaaagtgcctgagatgcaaaaataagtcactttctctgtcctctcagcaaccgagtcgcatgtcgttatcaaatttttattttctgtaactgtttccttccgtcttgctccgtagacagctttttgcagcagagagcgctgccgcggggctggtgtctactcttcagtaagtggtcaaaacctggctactggaaggaaatgcaatggaatcgctccgcgctcgagtattctctttggaactacgggaatgacagctccagtgggacacttggaggtcatgatgaacgcaaagaacgtgagaacacttgcagtcctcggggtggaaatgccttctagaaatactaagtatccgttctctcgttgagactttggcaaaccagggattttaggaagggtctggcactcaacgttcctaaaattggtttcctagatggagccggagggagagagggagtcaggaactgctgcttttcgtcggaatgcccggaggggagaagaagaaggaggaggggtgagggcgggcggccaaacgccagccggcaggggacccagagaagagggacatcccgggcgaccccgaggagcgcggcttgggcaccgcagtggccgcggctagtgggagacctgag

SEQ ID NO: 54629 - DNA, 2794 bp, Homo sapiens
agcgattggtgggcggggggccgggcctgggccggcggggagcggattggtcggaaagtaggttagtggtgcgacatttagggaaggcagaaagtaggtcagggacggaggtgcctgtttacccgcgccggactcaccgccgccgccgccgcgggatccgagtgcgggcgcgggcgcgggcgctcccggcgagccacggtggtgctggctagagtgtatacgtttggacccaagcttaacttttccaatgtggaatcctgggccttcattggtttttggaagaagctgaccgcctgaaaagaaattataaaacatgaaaatcgctttgaggtgaccaagtccagaggcccctaactcctcccaagctggatctggggtgtaagaactgtgacttcagatcatccaatggcagaccagagaatggacatttcttcaaccatcagtgatttcatgtccccgggccccaccgacctgctttccagctctcttggtaccagtggtgtggattgcaaccgcaaacggaaaggcagctccactgactaccaagaaagcatggacacagacaaagatgaccctcatggaaggttagaatatacagaacaccaaggaaggataaaaaatgcaagggaagctcacagtcagattgaaaagcggcgtcgggataaaatgaacagttttatagatgaattggcttctttggtaccaacatgcaacgcaatgtccaggaaattagataaacttactgtgctaaggatggctgttcagcacatgaaaacattaagaggtgccaccaatccatacacagaagcaaactacaaaccaacttttctatcagacgatgaattgaaacacctcattctcagggcagcagatggatttttgtttgtcgtaggatgtgaccgagggaagatactctttgtctcagagtctgtcttcaagatcctcaactacagccagaatgatctgattggtcagagtttgtttgactacctgcatcctaaagatattgccaaagtcaaggagcagctctcctcctctgacaccgcaccccgggagcggctcatagatgcaaaaactggacttccagttaaaacagatataacccctgggccatctcgattatgttctggagcacgacgttctttcttctgtaggatgaagtgtaacaggccttcagtaaaggttgaagacaaggacttcccctctacctgctcaaagaaaaaagcagatcgaaaaagcttctgcacaatccacagcacaggctatttgaaaagctggccacccacaaagatggggctggatgaagacaacgaaccagacaatgaggggtgtaacctcagctgcctcgtcgcaattggacgactgcattctcatgtagttccacaaccagtgaacggggaaatcagggtgaaatctatggaatatgtttctcggcacgcgatagatggaaagtttgtttttgtagaccagagggcaacagctattttggcatatttaccacaagaacttctaggcacatcgtgttatgaatattttcaccaagatgacataggacatcttgcagaatgtcataggcaagttttacagacgagagaaaaaattacaactaattgctataaatttaaaatcaaagatggttcttttatcacactacggagtcgatggttcagtttcatgaacccttggaccaaggaagtagaatatattgtctcaactaacactgttgttttagccaacgtcctggaaggcggggacccaaccttcccacagctcacagcatccccccacagcatggacagcatgctgccctctggagaaggtggcccaaagaggacccaccccactgttccagggattccagggggaacccgggctggggcaggaaaaataggccgaatgattgctgaggaaatcatggaaatccacaggataagagggtcatcgccttctagctgtggctccagcccattgaacatcacgagtacgcctccccctgatgcctcttctccaggaggcaagaagattttaaatggagggactccagacattccttccagtggcctactatcaggccaggctcaggagaacccaggttatccatattctgatagttcttctattcttggtgagaacccccacataggtatagacatgattgacaacgaccaaggatcaagtagtcccagtaatgatgaggcagcaatggctgtcatcatgagcctcttggaagcagatgctggactgggtggccctgttgactttagtgacttgccatggccgctgtaaacactacatgttgctttggcaacagctatagtatcaaagtgcattactggtggagttttacagtctgtgaagcttactggataaggagagaatagcttttatgtactgacttcataaaagccatctcagagccattgatacaagtcaatcttactatatgtaacttcagacaaagtggaactaagcctgctccagtgtttcctcatcattgattattgggctagctgtggatagcttgcattaattgtatattttggattctgtttgtgttgaattttttaatcattgtgcacagaagcatcattggtagcttttatatgcaaatggtcatttcagatgtatggtgtttttacactacaaagaagtcccccatgtggatatttcttatactaattgtatcataaagccgtttattcttccttgtaagaatcctttactataaatatgggttaaagtataatgtactagacagttaaatatttttaataaatgtttcccttgttctata

SEQ ID NO: 54630 - DNA, 2387 bp, Homo sapiens
ggagatgagcaaggaggccgtgagcctgtgggcgctcactgtgtccctccaacccccagtccccttgtgtgtctgcagagagatgacaggatcaggcagaagaaaacagcaatgtgtaactttgccattcatctccagagaattatgtttttatcttttgctttttcctccccccaggttagaatatacagaacaccaaggaaggataaaaaatgcaagggaagctcacagtcagattgaaaagcggcgtcgggataaaatgaacagttttatagatgaattggcttctttggtaccaacatgcaacgcaatgtccaggaaattagataaacttactgtgctaaggatggctgttcagcacatgaaaacattaagaggtgccaccaatccatacacagaagcaaactacaaaccaacttttctatcagacgatgaattgaaacacctcattctcagggcagcagatggatttttgtttgtcgtaggatgtgaccgagggaagatactctttgtctcagagtctgtcttcaagatcctcaactacagccagaatgatctgattggtcagagtttgtttgactacctgcatcctaaagatattgccaaagtcaaggagcagctctcctcctctgacaccgcaccccgggagcggctcatagatgcaaaaactggacttccagttaaaacagatataacccctgggccatctcgattatgttctggagcacgacgttctttcttctgtaggatgaagtgtaacaggccttcagtaaaggttgaagacaaggacttcccctctacctgctcaaagaaaaaagcagatcgaaaaagcttctgcacaatccacagcacaggctatttgaaaagctggccacccacaaagatggggctggatgaagacaacgaaccagacaatgaggggtgtaacctcagctgcctcgtcgcaattggacgactgcattctcatgtagttccacaaccagtgaacggggaaatcagggtgaaatctatggaatatgtttctcggcacgcgatagatggaaagtttgtttttgtagaccagagggcaacagctattttggcatatttaccacaagaacttctaggcacatcgtgttatgaatattttcaccaagatgacataggacatcttgcagaatgtcataggcaagttttacagacgagagaaaaaattacaactaattgctataaatttaaaatcaaagatggttcttttatcacactacggagtcgatggttcagtttcatgaacccttggaccaaggaagtagaatatattgtctcaactaacactgttgttttagccaacgtcctggaaggcggggacccaaccttcccacagctcacagcatccccccacagcatggacagcatgctgccctctggagaaggtggcccaaagaggacccaccccactgttccagggattccagggggaacccgggctggggcaggaaaaataggccgaatgattgctgaggaaatcatggaaatccacaggataagagggtcatcgccttctagctgtggctccagcccattgaacatcacgagtacgcctccccctgatgcctcttctccaggaggcaagaagattttaaatggagggactccagacattccttccagtggcctactatcaggccaggctcaggagaacccaggttatccatattctgatagttcttctattcttggtgagaacccccacataggtatagacatgattgacaacgaccaaggatcaagtagtcccagtaatgatgaggcagcaatggctgtcatcatgagcctcttggaagcagatgctggactgggtggccctgttgactttagtgacttgccatggccgctgtaaacactacatgttgctttggcaacagctatagtatcaaagtgcattactggtggagttttacagtctgtgaagcttactggataaggagagaatagcttttatgtactgacttcataaaagccatctcagagccattgatacaagtcaatcttactatatgtaacttcagacaaagtggaactaagcctgctccagtgtttcctcatcattgattattgggctagctgtggatagcttgcattaattgtatattttggattctgtttgtgttgaattttttaatcattgtgcacagaagcatcattggtagcttttatatgcaaatggtcatttcagatgtatggtgtttttacactacaaagaagtcccccatgtggatatttcttatactaattgtatcataaagccgtttattcttccttgtaagaatcctttactataaatatgggttaaagtataatgtactagacagttaaatatttttaataaatgtttcccttgttctata

SEQ ID NO: 54631 - DNA, 931 bp, Homo sapiens
agcgattggtgggcggggggccgggcctgggccggcggggagcggattggtcggaaagtaggttagtggtgcgacatttagggaaggcagaaagtaggtcagggacggaggtgcctgtttacccgcgccggactcaccgccgccgccgccgcgggatccgagtgcgggcgcgggcgcgggcgctcccggcgagccacggtgagtgtcaggccggcggcggccagcgacgcgatcccgcgcaccccgtcgggggaccgttagcaccctcgcgggcgctgcgcccctgccgccgccccgggggcaacccggccgccgaagaaccctgcccgacgtgcccgctgccggccttaaagggcccgtgaccgctccctgcccccacccgggccgtggggaggctgcgccccttaaaggcgccgcgcccgtccgcccccatcctcctcgcgggggctgccgctgcgggctagggcaggcagaggtgctgcaggagcccttaaaggggccgggaaagtgttcgctggagtacccaccgcccttccgcgggcatcgctacctggcggggggagggggcagctagctgcctcttaaagggatagctctgcccttgggggcagtgactcggccgaggaggactcctagatgtgtccccgggagcttcggggatccccgaggggaccatgcctggtggctgcccctcaagggcgttgggcgaacggtgccgcgtctgcccttcctccccgcttcacttccctttcgggagcccgcgaggctgggtgggggcggggagggcgtctccgtcgggcttggggagtccaagtccgcccgccccttcggccctgtagccagggctggcgctgcacccgggaatccccggccggcacggggccgaccccagcctgcgaactttcgtggggcctgtgccgtccaggtcctg

SEQ ID NO: 54632 - DNA, 907 bp, Homo sapiens
gtctgggtaacagaattaggccaatttatttaattccatttgttcatgtatccagccaacagatatttatggtgcacttgttgggtgccagccccgcccccaccactccaccctaccccagcaggcgctaaaggagagctgacatgatggataacgaaaaagaagacgctgtccttctattcagggagtttaacatctggaagagccgggagttctttgtgctaaaggccctctacaaagtgcctgagatgcaaaaataagtcactttctctgtcctctcagcaaccgagtcgcatgtcgttatcaaatttttattttctgtaactgtttccttccgtcttgctccgtagacagctttttgcagcagagagcgctgccgcggggctggtgtctactcttcagtaagtggtcaaaacctggctactggaaggaaatgcaatggaatcgctccgcgctcgagtattctctttggaactacgggaatgacagctccagtgggacacttggaggtcatgatgaacgcaaagaacgtggtgctggctagagtgtatacgtttggacccaagcttaacttttccaatgtggaatcctgggccttcattggtttttggaagaagctgaccgcctgaaaagaaattataaaacatgaaaatcgctttgaggtgaccaagtccagaggcccctaactcctcccaagctggatctggggtgtaagaactgtgacttcagatcatccaatggcagaccagagaatggacatttcttcaaccatcagtgatttcatgtccccgggccccaccgacctgctttccagctctcttggtaccagtggtgtggattgcaaccgcaaacggaaaggcagctccactgactaccagtaaggcctttggggcatgtcttcctcttg

SEQ ID NO: 54633 - DNA, 3197 bp, Homo sapiens
gtctgggtaacagaattaggccaatttatttaattccatttgttcatgtatccagccaacagatatttatggtgcacttgttgggtgccagccccgcccccaccactccaccctaccccagcaggcgctaaaggagagctgacatgatggataacgaaaaagaagacgctgtccttctattcagggagtttaacatctggaagagccgggagttctttgtgctaaaggccctctacaaagtgcctgagatgcaaaaataagtcactttctctgtcctctcagcaaccgagtcgcatgtcgttatcaaatttttattttctgtaactgtttccttccgtcttgctccgtagacagctttttgcagcagagagcgctgccgcggggctggtgtctactcttcagtaagtggtcaaaacctggctactggaaggaaatgcaatggaatcgctccgcgctcgagtattctctttggaactacgggaatgacagctccagtgggacacttggaggtcatgatgaacgcaaagaacgtggtgctggctagagtgtatacgtttggacccaagcttaacttttccaatgtggaatcctgggccttcattggtttttggaagaagctgaccgcctgaaaagaaattataaaacatgaaaatcgctttgaggtgaccaagtccagaggcccctaactcctcccaagctggatctggggtgtaagaactgtgacttcagatcatccaatggcagaccagagaatggacatttcttcaaccatcagtgatttcatgtccccgggccccaccgacctgctttccagctctcttggtaccagtggtgtggattgcaaccgcaaacggaaaggcagctccactgactaccattcacaggtcgaatttggggagcacaatggctggaggtcagatgcccactaggagatgctatgattaatatagaaagcatggacacagacaaagatgaccctcatggaaggttagaatatacagaacaccaaggaaggataaaaaatgcaagggaagctcacagtcagattgaaaagcggcgtcgggataaaatgaacagttttatagatgaattggcttctttggtaccaacatgcaacgcaatgtccaggaaattagataaacttactgtgctaaggatggctgttcagcacatgaaaacattaagaggtgccaccaatccatacacagaagcaaactacaaaccaacttttctatcagacgatgaattgaaacacctcattctcagggcagcagatggatttttgtttgtcgtaggatgtgaccgagggaagatactctttgtctcagagtctgtcttcaagatcctcaactacagccagaatgatctgattggtcagagtttgtttgactacctgcatcctaaagatattgccaaagtcaaggagcagctctcctcctctgacaccgcaccccgggagcggctcatagatgcaaaaactggacttccagttaaaacagatataacccctgggccatctcgattatgttctggagcacgacgttctttcttctgtaggatgaagtgtaacaggccttcagtaaaggttgaagacaaggacttcccctctacctgctcaaagaaaaaagcagatcgaaaaagcttctgcacaatccacagcacaggctatttgaaaagctggccacccacaaagatggggctggatgaagacaacgaaccagacaatgaggggtgtaacctcagctgcctcgtcgcaattggacgactgcattctcatgtagttccacaaccagtgaacggggaaatcagggtgaaatctatggaatatgtttctcggcacgcgatagatggaaagtttgtttttgtagaccagagggcaacagctattttggcatatttaccacaagaacttctaggcacatcgtgttatgaatattttcaccaagatgacataggacatcttgcagaatgtcataggcaagttttacagacgagagaaaaaattacaactaattgctataaatttaaaatcaaagatggttcttttatcacactacggagtcgatggttcagtttcatgaacccttggaccaaggaagtagaatatattgtctcaactaacactgttgttttagccaacgtcctggaaggcggggacccaaccttcccacagctcacagcatccccccacagcatggacagcatgctgccctctggagaaggtggcccaaagaggacccaccccactgttccagggattccagggggaacccgggctggggcaggaaaaataggccgaatgattgctgaggaaatcatggaaatccacaggataagagggtcatcgccttctagctgtggctccagcccattgaacatcacgagtacgcctccccctgatgcctcttctccaggaggcaagaagattttaaatggagggactccagacattccttccagtggcctactatcaggccaggctcaggagaacccaggttatccatattctgatagttcttctattcttggtgagaacccccacataggtatagacatgattgacaacgaccaaggatcaagtagtcccagtaatgatgaggcagcaatggctgtcatcatgagcctcttggaagcagatgctggactgggtggccctgttgactttagtgacttgccatggccgctgtaaacactacatgttgctttggcaacagctatagtatcaaagtgcattactggtggagttttacagtctgtgaagcttactggataaggagagaatagcttttatgtactgacttcataaaagccatctcagagccattgatacaagtcaatcttactatatgtaacttcagacaaagtggaactaagcctgctccagtgtttcctcatcattgattattgggctagctgtggatagcttgcattaattgtatattttggattctgtttgtgttgaattttttaatcattgtgcacagaagcatcattggtagcttttatatgcaaatggtcatttcagatgtatggtgtttttacactacaaagaagtcccccatgtggatatttcttatactaattgtatcataaagccgtttattcttccttgtaagaatcctttactataaatatgggttaaagtataatgtactagacagttaaatatttttaataaatgtttcccttgttctata

SEQ ID NO: 54634 - DNA, 2751 bp, Homo sapiens
agcgattggtgggcggggggccgggcctgggccggcggggagcggattggtcggaaagtaggttagtggtgcgacatttagggaaggcagaaagtaggtcagggacggaggtgcctgtttacccgcgccggactcaccgccgccgccgccgcgggatccgagtgcgggcgcgggcgcgggcgctcccggcgagccacggtggtgctggctagagtgtatacgtttggacccaagcttaacttttccaatgtggaatcctgggccttcattggtttttggaagaagctgaccgcctgaaaagaaattataaaacatgaaaatcgctttgaggtgaccaagtccagaggcccctaactcctcccaagctggatctggggtgtaagaactgtgacttcagatcatccaatggcagaccagagaatggacatttcttcaaccatcagtgatttcatgtccccgggccccaccgacctgctttccagctctcttggtaccagtggtgtggattgcaaccgcaaacggaaaggcagctccactgactaccattcacaggtcgaatttggggagcacaatggctggaggtcagatgcccactaggagatgctatgattaatatagaaagcatggacacagacaaagatgaccctcatggaaggttagaatatacagaacaccaaggaaggataaaaaatgcaagggaagctcacagtcagattgaaaagcggcgtcgggataaaatgaacagttttatagatgaattggcttctttggtaccaacatgcaacgcaatgtccaggaaattagataaacttactgtgctaaggatggctgttcagcacatgaaaacattaagaggtgccaccaatccatacacagaagcaaactacaaaccaacttttctatcagacgatgaattgaaacacctcattctcagggcagcagatggatttttgtttgtcgtaggatgtgaccgagggaagatactctttgtctcagagtctgtcttcaagatcctcaactacagccagaatgatctgattggtcagagtttgtttgactacctgcatcctaaagatattgccaaagtcaaggagcagctctcctcctctgacaccgcaccccgggagcggctcatagatgcaaaaactggacttccagttaaaacagatataacccctgggccatctcgattatgttctggagcacgacgttctttcttctgtaggatgaagtgtaacaggccttcagtaaaggttgaagacaaggacttcccctctacctgctcaaagaaaaaagcagatcgaaaaagcttctgcacaatccacagcacaggggcaacagctattttggcatatttaccacaagaacttctaggcacatcgtgttatgaatattttcaccaagatgacataggacatcttgcagaatgtcataggcaagttttacagacgagagaaaaaattacaactaattgctataaatttaaaatcaaagatggttcttttatcacactacggagtcgatggttcagtttcatgaacccttggaccaaggaagtagaatatattgtctcaactaacactgttgttttgtccagagtggacaccggacaccttggccaagttgaaaggtgcacagttctgagcaggcctgactcacgtttccttattgctggggatgttcacagagccaacgtcctggaaggcggggacccaaccttcccacagctcacagcatccccccacagcatggacagcatgctgccctctggagaaggtggcccaaagaggacccaccccactgttccagggattccagggggaacccgggctggggcaggaaaaataggccgaatgattgctgaggaaatcatggaaatccacaggataagagggtcatcgccttctagctgtggctccagcccattgaacatcacgagtacgcctccccctgatgcctcttctccaggaggcaagaagattttaaatggagggactccagacattccttccagtggcctactatcaggccaggctcaggagaacccaggttatccatattctgatagttcttctattcttggtgagaacccccacataggtatagacatgattgacaacgaccaaggatcaagtagtcccagtaatgatgaggcagcaatggctgtcatcatgagcctcttggaagcagatgctggactgggtggccctgttgactttagtgacttgccatggccgctgtaaacactacatgttgctttggcaacagctatagtatcaaagtgcattactggtggagttttacagtctgtgaagcttactggataaggagagaatagcttttatgtactgacttcataaaagccatctcagagccattgatacaagtcaatcttactatatgtaacttcagacaaagtggaactaagcctgctccagtgtttcctcatcattgattattgggctagctgtggatagcttgcattaattgtatattttggattctgtttgtgttgaattttttaatcattgtgcacagaagcatcattggtagcttttatatgcaaatggtcatttcagatgtatggtgtttttacactacaaagaagtcccccatgtggatatttcttatactaattgtatcataaagccgtttattcttccttgtaagaatcctttactataaatatgggttaaagtataatgtactagacagttaaatatttttaataaatgtttcccttgttctata

SEQ ID NO: 54635 - DNA, 2581 bp, Homo sapiens
catacactgacagggccagaagggctgagatgctgggattgaaccatctttctctttgtgagttgctttccagatagcacgcattccggtcactattttccagagatttaagcagcaaagtgagggaccctcgggcatcgactcagagacctggaggggagcagcttgaagcaatgtaaaaagcactggataaaatctggttctaccaaaaatagggctatgagagttacctcacctccctgaaagtttttggaagaagctgaccgcctgaaaagaaattataaaacatgaaaatcgctttgaggtgaccaagtccagaggcccctaactcctcccaagctggatctggggtgtaagaactgtgacttcagatcatccaatggcagaccagagaatggacatttcttcaaccatcagtgatttcatgtccccgggccccaccgacctgctttccagctctcttggtaccagtggtgtggattgcaaccgcaaacggaaaggcagctccactgactaccattcacaggtcgaatttggggagcacaatggctggaggtcagatgcccactaggagatgctatgattaatatagaaagcatggacacagacaaagatgaccctcatggaaggttagaatatacagaacaccaaggaaggataaaaaatgcaagggaagctcacagtcagattgaaaagcggcgtcgggataaaatgaacagttttatagatgaattggcttctttggtaccaacatgcaacgcaatgtccaggaaattagataaacttactgtgctaaggatggctgttcagcacatgaaaacattaagaggtgccaccaatccatacacagaagcaaactacaaaccaacttttctatcagacgatgaattgaaacacctcattctcagggcagcagatggatttttgtttgtcgtaggatgtgaccgagggaagatactctttgtctcagagtctgtcttcaagatcctcaactacagccagaatgatctgattggtcagagtttgtttgactacctgcatcctaaagatattgccaaagtcaaggagcagctctcctcctctgacaccgcaccccgggagcggctcatagatgcaaaaactggacttccagttaaaacagatataacccctgggccatctcgattatgttctggagcacgacgttctttcttctgtaggatgaagtgtaacaggccttcagtaaaggttgaagacaaggacttcccctctacctgctcaaagaaaaaagttttacagacgagagaaaaaattacaactaattgctataaatttaaaatcaaagatggttcttttatcacactacggagtcgatggttcagtttcatgaacccttggaccaaggaagtagaatatattgtctcaactaacactgttgttttgtccagagtggacaccggacaccttggccaagttgaaaggtgcacagttctgagcaggcctgactcacgtttccttattgctggggatgttcacagagccaacgtcctggaaggcggggacccaaccttcccacagctcacagcatccccccacagcatggacagcatgctgccctctggagaaggtggcccaaagaggacccaccccactgttccagggattccagggggaacccgggctggggcaggaaaaataggccgaatgattgctgaggaaatcatggaaatccacaggataagagggtcatcgccttctagctgtggctccagcccattgaacatcacgagtacgcctccccctgatgcctcttctccaggaggcaagaagattttaaatggagggactccagacattccttccagtggcctactatcaggccaggctcaggagaacccaggttatccatattctgatagttcttctattcttggtgagaacccccacataggtatagacatgattgacaacgaccaaggatcaagtagtcccagtaatgatgaggcagcaatggctgtcatcatgagcctcttggaagcagatgctggactgggtggccctgttgactttagtgacttgccatggccgctgtaaacactacatgttgctttggcaacagctatagtatcaaagtgcattactggtggagttttacagtctgtgaagcttactggataaggagagaatagcttttatgtactgacttcataaaagccatctcagagccattgatacaagtcaatcttactatatgtaacttcagacaaagtggaactaagcctgctccagtgtttcctcatcattgattattgggctagctgtggatagcttgcattaattgtatattttggattctgtttgtgttgaattttttaatcattgtgcacagaagcatcattggtagcttttatatgcaaatggtcatttcagatgtatggtgtttttacactacaaagaagtcccccatgtggatatttcttatactaattgtatcataaagccgtttattcttccttgtaagaatcctttactataaatatgggttaaagtataatgtactagacagttaaatatttttaataaatgtttcccttgttctata

SEQ ID NO: 54636 - DNA, 2122 bp, Homo sapiens
gatgcttagaaagcacaccctctatttgttatcaggctgattacaaattatgtttcctacagtatgagaaattgattatccatttctcctgattaggcagcagatggatttttgtttgtcgtaggatgtgaccgagggaagatactctttgtctcagagtctgtcttcaagatcctcaactacagccagaatgatctgattggtcagagtttgtttgactacctgcatcctaaagatattgccaaagtcaaggagcagctctcctcctctgacaccgcaccccgggagcggctcatagatgcaaaaactggacttccagttaaaacagatataacccctgggccatctcgattatgttctggagcacgacgttctttcttctgtaggatgaagtgtaacaggccttcagtaaaggttgaagacaaggacttcccctctacctgctcaaagaaaaaagcagatcgaaaaagcttctgcacaatccacagcacaggctatttgaaaagctggccacccacaaagatggggctggatgaagacaacgaaccagacaatgaggggtgtaacctcagctgcctcgtcgcaattggacgactgcattctcatgtagttccacaaccagtgaacggggaaatcagggtgaaatctatggaatatgtttctcggcacgcgatagatggaaagtttgtttttgtagaccagagggcaacagctattttggcatatttaccacaagaacttctaggcacatcgtgttatgaatattttcaccaagatgacataggacatcttgcagaatgtcataggcaagttttacagacgagagaaaaaattacaactaattgctataaatttaaaatcaaagatggttcttttatcacactacggagtcgatggttcagtttcatgaacccttggaccaaggaagtagaatatattgtctcaactaacactgttgttttgtccagagtggacaccggacaccttggccaagttgaaaggtgcacagttctgagcaggcctgactcacgtttccttattgctggggatgttcacagagccaacgtcctggaaggcggggacccaaccttcccacagctcacagcatccccccacagcatggacagcatgctgccctctggagaaggtggcccaaagaggacccaccccactgttccagggattccagggggaacccgggctggggcaggaaaaataggccgaatgattgctgaggaaatcatggaaatccacaggataagagggtcatcgccttctagctgtggctccagcccattgaacatcacgagtacgcctccccctgatgcctcttctccaggaggcaagaagattttaaatggagggactccagacattccttccagtggcctactatcaggccaggctcaggagaacccaggttatccatattctgatagttcttctattcttggtgagaacccccacataggtatagacatgattgacaacgaccaaggatcaagtagtcccagtaatgatgaggcagcaatggctgtcatcatgagcctcttggaagcagatgctggactgggtggccctgttgactttagtgacttgccatggccgctgtaaacactacatgttgctttggcaacagctatagtatcaaagtgcattactggtggagttttacagtctgtgaagcttactggataaggagagaatagcttttatgtactgacttcataaaagccatctcagagccattgatacaagtcaatcttactatatgtaacttcagacaaagtggaactaagcctgctccagtgtttcctcatcattgattattgggctagctgtggatagcttgcattaattgtatattttggattctgtttgtgttgaattttttaatcattgtgcacagaagcatcattggtagcttttatatgcaaatggtcatttcagatgtatggtgtttttacactacaaagaagtcccccatgtggatatttcttatactaattgtatcataaagccgtttattcttccttgtaagaatcctttactataaatatgggttaaagtataatgtactagacagttaaatatttttaataaatgtttcccttgttctata

SEQ ID NO: 54637 - DNA, 1845 bp, Homo sapiens
agcgattggtgggcggggggccgggcctgggccggcggggagcggattggtcggaaagtaggttagtggtgcgacatttagggaaggcagaaagtaggtcagggacggaggtgcctgtttacccgcgccggactcaccgccgccgccgccgcgggatccgagtgcgggcgcgggcgcgggcgctcccggcgagccacggtggtgctggctagagtgtatacgtttggacccaagcttaacttttccaatgtggaatcctgggccttcattggtttttggaagaagctgaccgcctgaaaagaaattataaaacatgaaaatcgctttgaggtgaccaagtccagaggcccctaactcctcccaagctggatctggggtgtaagaactgtgacttcagatcatccaatggcagaccagagaatggacatttcttcaaccatcagtgatttcatgtccccgggccccaccgacctgctttccagctctcttggtaccagtggtgtggattgcaaccgcaaacggaaaggcagctccactgactaccaagaaagcatggacacagacaaagatgaccctcatggaaggttagaatatacagaacaccaaggaaggataaaaaatgcaagggaagctcacagtcagattgaaaagcggcgtcgggataaaatgaacagttttatagatgaattggcttctttggtaccaacatgcaacgcaatgtccaggaaattagataaacttactgtgctaaggatggctgttcagcacatgaaaacattaagaggtgccaccaatccatacacagaagcaaactacaaaccaacttttctatcagacgatgaattgaaacacctcattctcagggcagcagatggatttttgtttgtcgtaggatgtgaccgagggaagatactctttgtctcagagtctgtcttcaagatcctcaactacagccagaatgatctgattggtcagagtttgtttgactacctgcatcctaaagatattgccaaagtcaaggagcagctctcctcctctgacaccgcaccccgggagcggctcatagatgcaaaaagatgaagtgtaacaggccttcagtaaaggttgaagacaaggacttcccctctacctgctcaaagaaaaaagcagatcgaaaaagcttctgcacaatccacagcacaggctatttgaaaagctggccacccacaaagatggggctggatgaagacaacgaaccagacaatgaggggtgtaacctcagctgcctcgtcgcaattggacgactgcattctcatgtagttccacaaccagtgaacggggaaatcagggtgaaatctatggaatatcaagccatgctttatagctgcagaatacttggggatctgctgcctgggggttccattggtgtgacagcattggatccaagcagtggatcaatcaccagccctcatgaagagcttgctataagactacactataaataggtttaggaaccagtcatttgttttcatctttgctggagaacttataagcctaggcccatcttaatcgtaaattataaatctgtttatattgcctgatgccagtagagcttaggacagtttaaaggccatcattttggacacaatggcttcctttccccatctcctaaaacagagagagagaatatcaggaatttccataggcaggactcctagggcacaaaccatcaaaagcagggcaaggattttcaaaactgagctcctcggaggtttgttcaggttaccaagagctgtggtgttaccaggtgggatgggcgtggggatagttgctaaggagagagggtaagagtagaaatcctgcttc

SEQ ID NO: 54638 - DNA, 298 bp, Homo sapiens
attccttagagctgtctcttcacaacgtaaccccacttatttcttacgtatttttaaaaaattggttctttcctctaaaaaacagcgatataaaaaaagatagccatgcagcccaaaaagcagcatctcaccctaccattaaatgtaactttcttattaaaaatgtgcttaggaattgcttacttaatctgaagatgctttaaaaaagaaatcactgaccagtctttatctcctcccacaggtgagaacccccacataggtatagacatgattgacaacgaccaaggatcaagtagtc

SEQ ID NO: 54639 - DNA, 2849 bp, Homo sapiens
agcgattggtgggcggggggccgggcctgggccggcggggagcggattggtcggaaagtaggttagtggtgcgacatttagggaaggcagaaagtaggtcagggacggaggtgcctgtttacccgcgccggactcaccgccgccgccgccgcgggatccgagtgcgggcgcgggcgcgggcgctcccggcgagccacggtggtgctggctagagtgtatacgtttggacccaagcttaacttttccaatgtggaatcctgggccttcattggttccgatgtcataggaatctacgctagagggcttcctgtgtgccgggcactgtggtttttggaagaagctgaccgcctgaaaagaaattataaaacatgaaaatcgctttgaggtgaccaagtccagaggcccctaactcctcccaagctggatctggggtgtaagaactgtgacttcagatcatccaatggcagaccagagaatggacatttcttcaaccatcagtgatttcatgtccccgggccccaccgacctgctttccagctctcttggtaccagtggtgtggattgcaaccgcaaacggaaaggcagctccactgactaccaagaaagcatggacacagacaaagatgaccctcatggaaggttagaatatacagaacaccaaggaaggataaaaaatgcaagggaagctcacagtcagattgaaaagcggcgtcgggataaaatgaacagttttatagatgaattggcttctttggtaccaacatgcaacgcaatgtccaggaaattagataaacttactgtgctaaggatggctgttcagcacatgaaaacattaagaggtgccaccaatccatacacagaagcaaactacaaaccaacttttctatcagacgatgaattgaaacacctcattctcagggcagcagatggatttttgtttgtcgtaggatgtgaccgagggaagatactctttgtctcagagtctgtcttcaagatcctcaactacagccagaatgatctgattggtcagagtttgtttgactacctgcatcctaaagatattgccaaagtcaaggagcagctctcctcctctgacaccgcaccccgggagcggctcatagatgcaaaaactggacttccagttaaaacagatataacccctgggccatctcgattatgttctggagcacgacgttctttcttctgtaggatgaagtgtaacaggccttcagtaaaggttgaagacaaggacttcccctctacctgctcaaagaaaaaagcagatcgaaaaagcttctgcacaatccacagcacaggctatttgaaaagctggccacccacaaagatggggctggatgaagacaacgaaccagacaatgaggggtgtaacctcagctgcctcgtcgcaattggacgactgcattctcatgtagttccacaaccagtgaacggggaaatcagggtgaaatctatggaatatgtttctcggcacgcgatagatggaaagtttgtttttgtagaccagagggcaacagctattttggcatatttaccacaagaacttctaggcacatcgtgttatgaatattttcaccaagatgacataggacatcttgcagaatgtcataggcaagttttacagacgagagaaaaaattacaactaattgctataaatttaaaatcaaagatggttcttttatcacactacggagtcgatggttcagtttcatgaacccttggaccaaggaagtagaatatattgtctcaactaacactgttgttttagccaacgtcctggaaggcggggacccaaccttcccacagctcacagcatccccccacagcatggacagcatgctgccctctggagaaggtggcccaaagaggacccaccccactgttccagggattccagggggaacccgggctggggcaggaaaaataggccgaatgattgctgaggaaatcatggaaatccacaggataagagggtcatcgccttctagctgtggctccagcccattgaacatcacgagtacgcctccccctgatgcctcttctccaggaggcaagaagattttaaatggagggactccagacattccttccagtggcctactatcaggccaggctcaggagaacccaggttatccatattctgatagttcttctattcttggtgagaacccccacataggtatagacatgattgacaacgaccaaggatcaagtagtcccagtaatgatgaggcagcaatggctgtcatcatgagcctcttggaagcagatgctggactgggtggccctgttgactttagtgacttgccatggccgctgtaaacactacatgttgctttggcaacagctatagtatcaaagtgcattactggtggagttttacagtctgtgaagcttactggataaggagagaatagcttttatgtactgacttcataaaagccatctcagagccattgatacaagtcaatcttactatatgtaacttcagacaaagtggaactaagcctgctccagtgtttcctcatcattgattattgggctagctgtggatagcttgcattaattgtatattttggattctgtttgtgttgaattttttaatcattgtgcacagaagcatcattggtagcttttatatgcaaatggtcatttcagatgtatggtgtttttacactacaaagaagtcccccatgtggatatttcttatactaattgtatcataaagccgtttattcttccttgtaagaatcctttactataaatatgggttaaagtataatgtactagacagttaaatatttttaataaatgtttcccttgttctata

SEQ ID NO: 54640 - DNA, 2865 bp, Homo sapiens
agcgattggtgggcggggggccgggcctgggccggcggggagcggattggtcggaaagtaggttagtggtgcgacatttagggaaggcagaaagtaggtcagggacggaggtgcctgtttacccgcgccggactcaccgccgccgccgccgcgggatccgagtgcgggcgcgggcgcgggcgctcccggcgagccacggtggtgctggctagagtgtatacgtttggacccaagcttaacttttccaatgtggaatcctgggccttcattggtttttggaagaagctgaccgcctgaaaagaaattataaaacatgaaaatcgctttgaggtgaccaagtccagaggcccctaactcctcccaagctggatctggggtgtaagaactgtgacttcagatcatccaatggcagaccagagaatggacatttcttcaaccatcagtgatttcatgtccccgggccccaccgacctgctttccagctctcttggtaccagtggtgtggattgcaaccgcaaacggaaaggcagctccactgactaccattcacaggtcgaatttggggagcacaatggctggaggtcagatgcccactaggagatgctatgattaatatagaaagcatggacacagacaaagatgaccctcatggaaggttagaatatacagaacaccaaggaaggataaaaaatgcaagggaagctcacagtcagattgaaaagcggcgtcgggataaaatgaacagttttatagatgaattggcttctttggtaccaacatgcaacgcaatgtccaggaaattagataaacttactgtgctaaggatggctgttcagcacatgaaaacattaagaggtgccaccaatccatacacagaagcaaactacaaaccaacttttctatcagacgatgaattgaaacacctcattctcagggcagcagatggatttttgtttgtcgtaggatgtgaccgagggaagatactctttgtctcagagtctgtcttcaagatcctcaactacagccagaatgatctgattggtcagagtttgtttgactacctgcatcctaaagatattgccaaagtcaaggagcagctctcctcctctgacaccgcaccccgggagcggctcatagatgcaaaaactggacttccagttaaaacagatataacccctgggccatctcgattatgttctggagcacgacgttctttcttctgtaggatgaagtgtaacaggccttcagtaaaggttgaagacaaggacttcccctctacctgctcaaagaaaaaagcagatcgaaaaagcttctgcacaatccacagcacaggctatttgaaaagctggccacccacaaagatggggctggatgaagacaacgaaccagacaatgaggggtgtaacctcagctgcctcgtcgcaattggacgactgcattctcatgtagttccacaaccagtgaacggggaaatcagggtgaaatctatggaatatgtttctcggcacgcgatagatggaaagtttgtttttgtagaccagagggcaacagctattttggcatatttaccacaagaacttctaggcacatcgtgttatgaatattttcaccaagatgacataggacatcttgcagaatgtcataggcaagttttacagacgagagaaaaaattacaactaattgctataaatttaaaatcaaagatggttcttttatcacactacggagtcgatggttcagtttcatgaacccttggaccaaggaagtagaatatattgtctcaactaacactgttgttttagccaacgtcctggaaggcggggacccaaccttcccacagctcacagcatccccccacagcatggacagcatgctgccctctggagaaggtggcccaaagaggacccaccccactgttccagggattccagggggaacccgggctggggcaggaaaaataggccgaatgattgctgaggaaatcatggaaatccacaggataagagggtcatcgccttctagctgtggctccagcccattgaacatcacgagtacgcctccccctgatgcctcttctccaggaggcaagaagattttaaatggagggactccagacattccttccagtggcctactatcaggccaggctcaggagaacccaggttatccatattctgatagttcttctattcttggtgagaacccccacataggtatagacatgattgacaacgaccaaggatcaagtagtcccagtaatgatgaggcagcaatggctgtcatcatgagcctcttggaagcagatgctggactgggtggccctgttgactttagtgacttgccatggccgctgtaaacactacatgttgctttggcaacagctatagtatcaaagtgcattactggtggagttttacagtctgtgaagcttactggataaggagagaatagcttttatgtactgacttcataaaagccatctcagagccattgatacaagtcaatcttactatatgtaacttcagacaaagtggaactaagcctgctccagtgtttcctcatcattgattattgggctagctgtggatagcttgcattaattgtatattttggattctgtttgtgttgaattttttaatcattgtgcacagaagcatcattggtagcttttatatgcaaatggtcatttcagatgtatggtgtttttacactacaaagaagtcccccatgtggatatttcttatactaattgtatcataaagccgtttattcttccttgtaagaatcctttactataaatatgggttaaagtataatgtactagacagttaaatatttttaataaatgtttcccttgttctata

SEQ ID NO: 54641 - DNA, 3362 bp, Homo sapiens
agcgattggtgggcggggggccgggcctgggccggcggggagcggattggtcggaaagtaggttagtggtgcgacatttagggaaggcagaaagtaggtcagggacggaggtgcctgtttacccgcgccggactcaccgccgccgccgccgcgggatccgagtgcgggcgcgggcgcgggcgctcccggcgagccacggtggtgctggctagagtgtatacgtttggacccaagcttaacttttccaatgtggaatcctgggccttcattggtttttggaagaagctgaccgcctgaaaagaaattataaaacatgaaaatcgctttgaggtgaccaagtccagaggcccctaactcctcccaagctggatctggggtgtaagaactgtgacttcagatcatccaatggcagaccagagaatggacatttcttcaaccatcagtgatttcatgtccccgggccccaccgacctgctttccagctctcttggtaccagtggtgtggattgcaaccgcaaacggaaaggcagctccactgactaccaagaaagcatggacacagacaaagatgaccctcatggaaggttagaatatacagaacaccaaggaaggataaaaaatgcaagggaagctcacagtcagattgaaaagcggcgtcgggataaaatgaacagttttatagatgaattggcttctttggtaccaacatgcaacgcaatgtccaggaaattagataaacttactgtgctaaggatggctgttcagcacatgaaaacattaagaggtgccaccaatccatacacagaagcaaactacaaaccaacttttctatcagacgatgaattgaaacacctcattctcagggcagcagatggatttttgtttgtcgtaggatgtgaccgagggaagatactctttgtctcagagtctgtcttcaagatcctcaactacagccagaatgatctgattggtcagagtttgtttgactacctgcatcctaaagatattgccaaagtcaaggagcagctctcctcctctgacaccgcaccccgggagcggctcatagatgcaaaaactggacttccagttaaaacagatataacccctgggccatctcgattatgttctggagcacgacgttctttcttctgtaggatgaagtgtaacaggccttcagtaaaggttgaagacaaggacttcccctctacctgctcaaagaaaaaagcagatcgaaaaagcttctgcacaatccacagcacaggctatttgaaaagctggccacccacaaagatggggctggatgaagacaacgaaccagacaatgaggggtgtaacctcagctgcctcgtcgcaattggacgactgcattctcatgtagttccacaaccagtgaacggggaaatcagggtgaaatctatggaatatgtttctcggcacgcgatagatggaaagtttgtttttgtagaccagagggcaacagctattttggcatatttaccacaagaacttctaggcacatcgtgttatgaatattttcaccaagatgacataggacatcttgcagaatgtcataggcaagttttacagacgagagaaaaaattacaactaattgctataaatttaaaatcaaagatggttcttttatcacactacggagtcgatggttcagtttcatgaacccttggaccaaggaagtagaatatattgtctcaactaacactgttgttttagccaacgtcctggaaggcggggacccaaccttcccacagctcacagcatccccccacagcatggacagcatgctgccctctggagaaggtggcccaaagaggacccaccccactgttccagggattccagggggaacccgggctggggcaggaaaaataggccgaatgattgctgaggaaatcatggaaatccacaggataagagggtcatcgccttctagctgtggctccagcccattgaacatcacgagtacgcctccccctgatgcctcttctccaggaggcaagaagattttaaatggagggactccagacattccttccagtggcctactatcaggccaggctcaggagaacccaggttatccatattctgatagttcttctattcttggtgagaacccccacataggtatagacatgattgacaacgaccaaggatcaagtagtcccagtaatgatgaggcagcaatggctgtcatcatgagcctcttggaagcagatgctggactgggtggccctgttgactttagtgacttgccatggccgctgtaaacactacatgttgctttggcaacagctatagtatcaaagtgcattactggtggagttttacagtctgtgaagcttactggataaggagagaatagcttttatgtactgacttcataaaagccatctcagagccattgatacaagtcaatcttactatatgtaacttcagacaaagtggaactaagcctgctccagtgtttcctcatcattgattattgggctagctgtggatagcttgcattaattgtatattttggattctgtttgtgttgaattttttaatcattgtgcacagaagcatcattggtagcttttatatgcaaatggtcatttcagatgtatggtgtttttacactacaaagaagtcccccatgtggatatttcttatactaattgtatcataaagccgtttattcttccttgtaagaatcctttactataaatatgggttaaagtataatgtactagacagttaaatatttttaataaatgtttcccttgttctataaatactgttcacatttcaaataattagaaaagatgatctacgccagtagcatttgtggtgcttttctggccttcataacgattctgggcttgcataatttccccatgctactagcttagctgtgttgttaaaatagttcatttataaattgttgcaattttaatttatgtgagaacaaagatgttactgcttatccacaaacatcgaatcctctgaaattataaattcaagattatatttaacaaattggcttctctaatgctgcacctctctaatactacttcagttatatagtaagtgaccccagtcctaaagcacctaaatatttgatcccttcttgaattggaccacagaatatttagaatagcatttgcataaataatttgctaagcaaagtagcatggtataatggaaaaagcactgaactagtatgagaaactggctctgaaacttagggtgactatatgacctagtaaagtcattttgcccttcatatcaagttggactagaaaatactcttttcagctctaataaatattgttttgatttatagtacattttataatta

SEQ ID NO: 54642 - DNA, 2811 bp, Homo sapiens
agcgattggtgggcggggggccgggcctgggccggcggggagcggattggtcggaaagtaggttagtggtgcgacatttagggaaggcagaaagtaggtcagggacggaggtgcctgtttacccgcgccggactcaccgccgccgccgccgcgggatccgagtgcgggcgcgggcgcgggcgctcccggcgagccacggtggtgctggctagagtgtatacgtttggacccaagcttaacttttccaatgtggaatcctgggccttcattggtttttggaagaagctgaccgcctgaaaagaaattataaaacatgaaaatcgctttgaggtgaccaagtccagaggcccctaactcctcccaagctggatctggggtgtaagaactgtgacttcagatcatccaatggcagaccagagaatggacatttcttcaaccatcagtgatttcatgtccccgggccccaccgacctgctttccagctctcttggtaccagtggtgtggattgcaaccgcaaacggaaaggcagctccactgactaccaagaaagcatggacacagacaaagatgaccctcatggaaggttagaatatacagaacaccaaggaaggataaaaaatgcaagggaagctcacagtcagattgaaaagcggcgtcgggataaaatgaacagttttatagatgaattggcttctttggtaccaacatgcaacgcaatgtccaggaaattagataaacttactgtgctaaggatggctgttcagcacatgaaaacattaagaggtgccaccaatccatacacagaagcaaactacaaaccaacttttctatcagacgatgaattgaaacacctcattctcagggcagcagatggatttttgtttgtcgtaggatgtgaccgagggaagatactctttgtctcagagtctgtcttcaagatcctcaactacagccagaatgatctgattggtcagagtttgtttgactacctgcatcctaaagatattgccaaagtcaaggagcagctctcctcctctgacaccgcaccccgggagcggctcatagatgcaaaaagatgaagtgtaacaggccttcagtaaaggttgaagacaaggacttcccctctacctgctcaaagaaaaaagcagatcgaaaaagcttctgcacaatccacagcacaggctatttgaaaagctggccacccacaaagatggggctggatgaagacaacgaaccagacaatgaggggtgtaacctcagctgcctcgtcgcaattggacgactgcattctcatgtagttccacaaccagtgaacggggaaatcagggtgaaatctatggaatatgtttctcggcacgcgatagatggaaagtttgtttttgtagaccagagggcaacagctattttggcatatttaccacaagaacttctaggcacatcgtgttatgaatattttcaccaagatgacataggacatcttgcagaatgtcataggcaagttttacagacgagagaaaaaattacaactaattgctataaatttaaaatcaaagatggttcttttatcacactacggagtcgatggttcagtttcatgaacccttggaccaaggaagtagaatatattgtctcaactaacactgttgttttgtccagagtggacaccggacaccttggccaagttgaaaggtgcacagttctgagcaggcctgactcacgtttccttattgctggggatgttcacagagccaacgtcctggaaggcggggacccaaccttcccacagctcacagcatccccccacagcatggacagcatgctgccctctggagaaggtggcccaaagaggacccaccccactgttccagggattccagggggaacccgggctggggcaggaaaaataggccgaatgattgctgaggaaatcatggaaatccacaggataagagggtcatcgccttctagctgtggctccagcccattgaacatcacgagtacgcctccccctgatgcctcttctccaggaggcaagaagattttaaatggagggactccagacattccttccagtggcctactatcaggccaggctcaggagaacccaggttatccatattctgatagttcttctattcttggtgagaacccccacataggtatagacatgattgacaacgaccaaggatcaagtagtcccagtaatgatgaggcagcaatggctgtcatcatgagcctcttggaagcagatgctggactgggtggccctgttgactttagtgacttgccatggccgctgtaaacactacatgttgctttggcaacagctatagtatcaaagtgcattactggtggagttttacagtctgtgaagcttactggataaggagagaatagcttttatgtactgacttcataaaagccatctcagagccattgatacaagtcaatcttactatatgtaacttcagacaaagtggaactaagcctgctccagtgtttcctcatcattgattattgggctagctgtggatagcttgcattaattgtatattttggattctgtttgtgttgaattttttaatcattgtgcacagaagcatcattggtagcttttatatgcaaatggtcatttcagatgtatggtgtttttacactacaaagaagtcccccatgtggatatttcttatactaattgtatcataaagccgtttattcttccttgtaagaatcctttactataaatatgggttaaagtataatgtactagacagttaaatatttttaataaatgtttcccttgttctata

SEQ ID NO: 54643 - DNA, 2357 bp, Homo sapiens
agcgattggtgggcggggggccgggcctgggccggcggggagcggattggtcggaaagtaggttagtggtgcgacatttagggaaggcagaaagtaggtcagggacggaggtgcctgtttacccgcgccggactcaccgccgccgccgccgcgggatccgagtgcgggcgcgggcgcgggcgctcccggcgagccacggtggtgctggctagagtgtatacgtttggacccaagcttaacttttccaatgtggaatcctgggccttcattggtttttggaagaagctgaccgcctgaaaagaaattataaaacatgaaaatcgctttgaggtgaccaagtccagaggcccctaactcctcccaagctggatctggggtgtaagaactgtgacttcagatcatccaatggcagaccagagaatggacatttcttcaaccatcagtgatttcatgtccccgggccccaccgacctgctttccagctctcttggtaccagtggtgtggattgcaaccgcaaacggaaaggcagctccactgactaccaagaaagcatggacacagacaaagatgaccctcatggaaggttagaatatacagaacaccaaggaaggataaaaaatgcaagggaagctcacagtcagattgaaaagcggcgtcgggataaaatgaacagttttatagatgaattggcttctttggtaccaacatgcaacgcaatgtccaggaaattagataaacttactgtgctaaggatggctgttcagcacatgaaaacattaagaggtgccaccaatccatacacagaagcaaactacaaaccaacttttctatcagacgatgaattgaaacacctcattctcagggcagcagatggatttttgtttgtcgtaggatgtgaccgagggaagatactctttgtctcagagtctgtcttcaagatcctcaactacagccagaatgatctgattggtcagagtttgtttgactacctgcatcctaaagatattgccaaagtcaaggagcagctctcctcctctgacaccgcaccccgggagcggctcatagatgcaaaaactggacttccagttaaaacagatataacccctgggccatctcgattatgttctggagcacgacgttctttcttctgtaggatgaagtgtaacaggccttcagtaaaggttgaagacaaggacttcccctctacctgctcaaagaaaaaagcagatgctggactgggtggccctgttgactttagtgacttgccatggccgctgtaaacactacatgttgctttggcaacagctatagtatcaaagtgcattactggtggagttttacagtctgtgaagcttactggataaggagagaatagcttttatgtactgacttcataaaagccatctcagagccattgatacaagtcaatcttactatatgtaacttcagacaaagtggaactaagcctgctccagtgtttcctcatcattgattattgggctagctgtggatagcttgcattaattgtatattttggattctgtttgtgttgaattttttaatcattgtgcacagaagcatcattggtagcttttatatgcaaatggtcatttcagatgtatggtgtttttacactacaaagaagtcccccatgtggatatttcttatactaattgtatcataaagccgtttattcttccttgtaagaatcctttactataaatatgggttaaagtataatgtactagacagttaaatatttttaataaatgtttcccttgttctataaatactgttcacatttcaaataattagaaaagatgatctacgccagtagcatttgtggtgcttttctggccttcataacgattctgggcttgcataatttccccatgctactagcttagctgtgttgttaaaatagttcatttataaattgttgcaattttaatttatgtgagaacaaagatgttactgcttatccacaaacatcgaatcctctgaaattataaattcaagattatatttaacaaattggcttctctaatgctgcacctctctaatactacttcagttatatagtaagtgaccccagtcctaaagcacctaaatatttgatcccttcttgaattggaccacagaatatttagaatagcatttgcataaataatttgctaagcaaagtagcatggtataatggaaaaagcactgaactagtatgagaaactggctctgaaacttagggtgactatatgacctagtaaagtcattttgcccttcatatcaagttggactagaaaatactcttttcagctctaataaatattgttttgatttatagtacattttataatta

SEQ ID NO: 54644 - DNA, 1644 bp, Homo sapiens
accagcttctagctctcagtctgcgcgagggtgtaggaaggaaagcccaggacctccggagcagagcacagcagctgcagaggcaaggccagcatgtcgcccaacttcaaacttcagtgtcacttcattctcatcttcctgacggctctaagaggggaaagccggtacctagagctgagggaagcggcggactacgatcctttcctgctcttcagcgccaacctgaagcgggagctggctggggagcagccgtaccgccgcgctctgcggtgcctggacatgctgagcctccagggccagttcaccttcaccgccgaccggccgcagctgcactgcgcagccttcttcatcagcgagcccgaggagttcattaccatccactacgaccaggtctccatcgactgtcagggcggcgacttcctgaaggtatttgatggttggattctcaagggggagaagttccccagttcccaggatcatcctctcccctcagctgagcggtacatagatttctgtgagagtggtcttagcaggaggagcatcagatcttcccagaatgtggccatgatcttcttccgagtccatgaaccaggaaatggattcacattaaccataaagacagaccccaacctctttccttgcaatgtcatttctcagactccaaatggaaagtttaccctggtagttccacaccagcatcgaaactgcagcttctccataatttatcctgtggtgatcaaaatatctgatcttaccctgggacacgtaaatggtcttcagttaaagaaatcctcagcaggttgcgagggaataggagactttgtggagctgctgggaggaactggattggacccttccaagatgacgcctttagctgatctctgctacccctttcatggcccggcccagatgaaagttggctgtgacaacactgtggtgcgcatggtctccagtggaaaacacgtaaatcgtgtgacttttgagtatcgtcagctggagccgtacgagctggaaaacccaaatggaaacagtatcggggaattctgtttgtctggtctttgaataaccaacccagtgatttacatgctgatagctaagtgagtttttaatggccattgtgtatgattttgatgcacaactagttaaaagcctttcataccagtcagtattcccagccttgagcgcacgcgcgcacacacacacacacatacacacacgcattaatttttgtactttgcttcttttatgtttgtaatctgtaaatgaacacatggcagaaaataacccctgattggtaggatcatagttctaaatggaaatgtttgtaattctttgatgtgctacaaacctgaaactggtaagacaagcacaaagcaacgtgcaatacaaaaatcgtatctcaagggaaaatactcaaagaaagaaaagtggcagcacttatattagttttataacaggataaagtcttgtgtatagcaaagtagttgcatctgtttattttctatttattattgttacaataggtaatagttatagcaattatttattgatttgtaacaacttgtttttaaccaaactttgtagcatggaaaaaattttccatccacaaatacaaacatgaataaatacattcagaatgttggc

SEQ ID NO: 54645 - DNA, 1656 bp, Homo sapiens
gccgctggggataccctggcctgatggagagggtctaagaccttcccgtcttctccggacacgggaaaacattacccctctctctttattcgctatgctgagtggcagggagggtgccccgctcctggtccccttttttatccccagcccttgaacttttccggactgacctatgtttcttgccagctgagggaagcggcggactacgatcctttcctgctcttcagcgccaacctgaagcgggagctggctggggagcagccgtaccgccgcgctctgcggtgcctggacatgctgagcctccagggccagttcaccttcaccgccgaccggccgcagctgcactgcgcagccttcttcatcagcgagcccgaggagttcattaccatccactacgaccaggtctccatcgactgtcagggcggcgacttcctgaaggtatttgatggttggattctcaagggggagaagttccccagttcccaggatcatcctctcccctcagctgagcggtacatagatttctgtgagagtggtcttagcaggaggagcatcagatcttcccagaatgtggccatgatcttcttccgagtccatgaaccaggaaatggattcacattaaccataaagacagaccccaacctctttccttgcaatgtcatttctcagactccaaatggaaagtttaccctggtagttccacaccagcatcgaaactgcagcttctccataatttatcctgtggtgatcaaaatatctgatcttaccctgggacacgtaaatggtcttcagttaaagaaatcctcagcaggttgcgagggaataggagactttgtggagctgctgggaggaactggattggacccttccaagatgacgcctttagctgatctctgctacccctttcatggcccggcccagatgaaagttggctgtgacaacactgtggtgcgcatggtctccagtggaaaacacgtaaatcgtgtgacttttgagtatcgtcagctggagccgtacgagctggaaaacccaaatggaaacagtatcggggaattctgtttgtctggtctttgaataaccaacccagtgatttacatgctgatagctaagtgagtttttaatggccattgtgtatgattttgatgcacaactagttaaaagcctttcataccagtcagtattcccagccttgagcgcacgcgcgcacacacacacacacatacacacacgcattaatttttgtactttgcttcttttatgtttgtaatctgtaaatgaacacatggcagaaaataacccctgattggtaggatcatagttctaaatggaaatgtttgtaattctttgatgtgctacaaacctgaaactggtaagacaagcacaaagcaacgtgcaatacaaaaatcgtatctcaagggaaaatactcaaagaaagaaaagtggcagcacttatattagttttataacaggataaagtcttgtgtatagcaaagtagttgcatctgtttattttctatttattattgttacaataggtaatagttatagcaattatttattgatttgtaacaacttgtttttaaccaaactttgtagcatggaaaaaattttccatccacaaatacaaacatgaataaatacattcagaatgttggc

SEQ ID NO: 54646 - DNA, 1595 bp, Homo sapiens
accagcttctagctctcagtctgcgcgagggtgtaggaaggaaagcccaggacctccggagcagagcacagcagctgcagaggcaaggccagcatgtcgcccaacttcaaacttcagtgtcacttcattctcatcttcctgacggctctaagaggggaaagccggtacctagagctgagggaagcggcggactacgatcctttcctgctcttcagcgccaacctgaagcgggagctggctggggagcagccgtaccgccgcgctctgcggtgcctggacatgctgagcctccagggccagttcaccttcaccgccgaccggccgcagctgcactgcgcagccttcttcatcagcgagcccgaggagttcattaccatccactacgaccaggtctccatcgactgtcagggcggcgacttcctgaaggtatttgatggttggattctcaagggggagaagttccccagttcccaggatcatcctctcccctcagctgagcggtacatagatttctgtgagagtggtcttagcaggaggagcatcagatcttcccagaatgtggccatgatcttcttccgagtccatgaaccaggaaatggattcacattaaccataaagacagaccccaacctctttccttgcaatgtcatttctcagactccaaatggaaagtttaccctggtagttccacaccagcatcgaaactgcagcttctccataatttatcctgtggtgataaatcctcagcaggttgcgagggaataggagactttgtggagctgctgggaggaactggattggacccttccaagatgacgcctttagctgatctctgctacccctttcatggcccggcccagatgaaagttggctgtgacaacactgtggtgcgcatggtctccagtggaaaacacgtaaatcgtgtgacttttgagtatcgtcagctggagccgtacgagctggaaaacccaaatggaaacagtatcggggaattctgtttgtctggtctttgaataaccaacccagtgatttacatgctgatagctaagtgagtttttaatggccattgtgtatgattttgatgcacaactagttaaaagcctttcataccagtcagtattcccagccttgagcgcacgcgcgcacacacacacacacatacacacacgcattaatttttgtactttgcttcttttatgtttgtaatctgtaaatgaacacatggcagaaaataacccctgattggtaggatcatagttctaaatggaaatgtttgtaattctttgatgtgctacaaacctgaaactggtaagacaagcacaaagcaacgtgcaatacaaaaatcgtatctcaagggaaaatactcaaagaaagaaaagtggcagcacttatattagttttataacaggataaagtcttgtgtatagcaaagtagttgcatctgtttattttctatttattattgttacaataggtaatagttatagcaattatttattgatttgtaacaacttgtttttaaccaaactttgtagcatggaaaaaattttccatccacaaatacaaacatgaataaatacattcagaatgttggc

SEQ ID NO: 54647 - DNA, 1258 bp, Homo sapiens
accagcttctagctctcagtctgcgcgagggtgtaggaaggaaagcccaggacctccggagcagagcacagcagctgcagaggcaaggccagcatgtcgcccaacttcaaacttcagtgtcacttcattctcatcttcctgacggctctaagaggggaaagccggtacctagagctgagggaagcggcggactacgatcctttcctgctcttcagcgccaacctgaagcgggagctggctggggagcagccgtaccgccgcgctctgcggtgcctggacatgctgagcctccagggccagttcaccttcaccgccgaccggccgcagctgcactgcgcagccttcttcatcagcgagcccgaggagttcattaccatccactacgaccaggtctccatcgactgtcagggcggcgacttcctgaaggtatttgatggttggattctcaagggggagaagttccccagttcccaggatcatcctctcccctcagctgagcggtacatagatttctgtgagagtggtcttagcaggaggagcatcagatcttcccagaatgtggccatgatcttcttccgagtccatgaaccaggaaatggattcacattaaccataaagacagaccccaacctctttccttgcaatgtcatttctcagactccaaatggaaagtttaccctggtagttccacaccagcatcgaaactgcagcttctccataatttatcctgtggtgatcaaaatatctgatcttaccctgggacacgtaaatggtcttcagttaaagaaatcctcagcaggttgcgagggaataggagactttgtggagctgctgggaggaactggattggacccttccaagatgacgcctttagctgatctctgctacccctttcatggcccggttttgtttaggaccagcccagaatgcaatctatcctgtgtggaatggatgggatgagagatggatgggcccagccttagaagcaagatctagacctataagtatagtcaacagaatggagagggaagaacccagacttcaggaacccaatgtagagtcctgcatgaccccttgttcactatcaaactgacttccacatacaggagcacgaaaggcacaggaatggatgccaatagactcattagcacctcctcaatatcacctcagtccacttaactgagaaacagctgttgaagatggcgagatccaaaataaaacccagttctcaaccaaataaaatatctctaaaaagagg

SEQ ID NO: 54648 - DNA, 1900 bp, Homo sapiens
accagcttctagctctcagtctgcgcgagggtgtaggaaggaaagcccaggacctccggagcagagcacagcagctgcagaggcaaggccagcatgtcgcccaacttcaaacttcagtgtcacttcattctcatcttcctgacggctctaagaggggaaagccggtacctagagctgagggaagcggcggactacgatcctttcctgctcttcagcgccaacctgaagcgggagctggctggggagcagccgtaccgccgcgctctgcggtgcctggacatgctgagcctccagggccagttcaccttcaccgccgaccggccgcagctgcactgcgcagccttcttcatcagcgagcccgaggagttcattaccatccactacgaccaggtctccatcgactgtcagggcggcgacttcctgaaggtatttgatggttggattctcaagggggagaagttccccagttcccaggatcatcctctcccctcagctgagcggtacatagatttctgtgagagtggtcttagcaggaggagcatcagatcttcccagaatgtggccatgatcttcttccgagtccatgaaccaggaaatggattcacattaaccataaagacagaccccaacctctttccttgcaatgtcatttctcagactccaaatggaaagtttaccctggtagttccacaccagcatcgaaactgcagcttctccataatttatcctgtggtgatcaaaatatctgatcttaccctgggacacgtaaatggtcttcagttaaagaaatcctcagcaggttgcgagggaataggagactttgtggagctgctgggaggaactggattggacccttccaagatgacgcctttagctgatctctgctacccctttcatggcccggcccagatgaaagttggctgtgacaacactgtggtgcgcatggtctccagtggaaaacacgtaaatcgtgtgacttttgagtatcgtcagctggagccgtacgagctggaaaacccaaatggaaacagtatcggggaattctgtttgtctggtctttgaataaccaacccagtgatttacatgctgatagctaagtgagtttttaatggccattgtgtatgattttgatgcacaactagttaaaagcctttcataccagtcagtattcccagccttgagcgcacgcgcgcacacacacacacacatacacacacgcattaatttttgtactttgcttcttttatgtttgtaatctgtaaatgaacacatggcagaaaataacccctgattggtaggatcatagttctaaatggaaatgtttgtaattctttgatgtgctacaaacctgaaactggtaagacaagcacaaagcaacgtgcaatacaaaaatcgtatctcaagggaaaatactcaaagaaagaaaagtggcagcacttatattagttttataacaggataaagtcttgtgtatagcaaagtagttgcatctgtttattttctatttattattgttacaataggtaatagttatagcaattatttattgatttgtaacaacttgtttttaaccaaactttgtagcatggaaaaaattttccatccacaaatacaaacatgaataaatacattcagaatgttggccaaaaaaaatagaaaagaaagaacaagtgtggggcacgcagaggacccgaaaaaaagtgttcagaaccatcgagtggagcaacgagcgacccaagaagataaaggaaccggggcaatagagtggtaccaggagaacccggggacgagaacaacgagggggatctccgacaaaaaaaaagccacgggaaacaagagtgcttgaacaaaccagaggagagagagagcaaacggagataaaaagagcaaagcacgataa

SEQ ID NO: 54649 - DNA, 1591 bp, Homo sapiens
accagcttctagctctcagtctgcgcgagggtgtaggaaggaaagcccaggacctccggagcagagcacagcagctgcagaggcaaggccagcatgtcgcccaacttcaaacttcagtgtcacttcattctcatcttcctgacggctctaagaggggaaagccggtacctagagctgagggaagcggcggactacgatcctttcctgctcttcagcgccaacctgaagcgggagctggctggggagcagccgtaccgccgcgctctgcggtgcctggacatgctgagcctccagggccagttcaccttcaccgccgaccggccgcagctgcactgcgcagccttcttcatcagcgagcccgaggagttcattaccatccactacgaccaggtctccatcgactgtcagggcggcgacttcctgaaggtatttgatggttggattctcaagggggagaagttccccagttcccaggatcatcctctcccctcagctgagcggtacatagatttctgtgagagtggtcttagcaggaggagcatcagatcttcccagaatgtggccatgatcttcttccgagtccatgaaccaggaaatggattcacattaaccataaagacagaccccaacctctttccttgcaatgtcatttctcagactccaaatggaaagtttaccctggtagttccacaccagcatcgaaactgcagcttctccataatttatcctgtggtgatcaaaatatctgatcttaccctgggacacgtaaatggtcttcagttaaagaaatcctcagcaggttgcgagggaataggagactttgtggagctgctgggaggaactggattggacccttccaagatgacgcctttagctgatctctgctacccctttcatggcccggcccagatgaaagttggctgtgacaacactgtggtgcgcatggtctccagtggaaaacacgtaaatcgtgtgacttttgagtatcgtcagctggagccgtacgagctgaaccaacccagtgatttacatgctgatagctaagtgagtttttaatggccattgtgtatgattttgatgcacaactagttaaaagcctttcataccagtcagtattcccagccttgagcgcacgcgcgcacacacacacacacatacacacacgcattaatttttgtactttgcttcttttatgtttgtaatctgtaaatgaacacatggcagaaaataacccctgattggtaggatcatagttctaaatggaaatgtttgtaattctttgatgtgctacaaacctgaaactggtaagacaagcacaaagcaacgtgcaatacaaaaatcgtatctcaagggaaaatactcaaagaaagaaaagtggcagcacttatattagttttataacaggataaagtcttgtgtatagcaaagtagttgcatctgtttattttctatttattattgttacaataggtaatagttatagcaattatttattgatttgtaacaacttgtttttaaccaaactttgtagcatggaaaaaattttccatccacaaatacaaacatgaataaatacattcagaatgttggc

SEQ ID NO: 54650 - DNA, 968 bp, Homo sapiens
caggatgttgagggctgattgagtgaattcatggacccgctgttggtcaaatggtttgacttctgtaattggtttaaatgtgtctttctctgctgctttattcccttagaaaatcctcagcaggttgcgagggaataggagactttgtggagctgctgggaggaactggattggacccttccaagatgacgcctttagctgatctctgctacccctttcatggcccggcccagatgaaagttggctgtgacaacactgtggtgcgcatggtctccagtggaaaacacgtaaatcgtgtgacttttgagtatcgtcagctggagccgtacgagctggaaaacccaaatggaaacagtatcggggaattctgtttgtctggtctttgaataaccaacccagtgatttacatgctgatagctaagtgagtttttaatggccattgtgtatgattttgatgcacaactagttaaaagcctttcataccagtcagtattcccagccttgagcgcacgcgcgcacacacacacacacatacacacacgcattaatttttgtactttgcttcttttatgtttgtaatctgtaaatgaacacatggcagaaaataacccctgattggtaggatcatagttctaaatggaaatgtttgtaattctttgatgtgctacaaacctgaaactggtaagacaagcacaaagcaacgtgcaatacaaaaatcgtatctcaagggaaaatactcaaagaaagaaaagtggcagcacttatattagttttataacaggataaagtcttgtgtatagcaaagtagttgcatctgtttattttctatttattattgttacaataggtaatagttatagcaattatttattgatttgtaacaacttgtttttaaccaaactttgtagcatggaaaaaattttccatccacaaatacaaacatgaataaatacattcagaatgttggc

SEQ ID NO: 54651 - DNA, 286 bp, Homo sapiens
attctgcttatcaacattgtatggtaaatacctgtatctcctgtcacttccatgtatgcactctgttctctagcagatttgaaatctggaaacctccctcatcagcacacatgtgcacacatacatgcatacatacaccccatactcttttagagccatcctctttacatgttgtttctgcgttgggaaagtgtacatggtgaacttcttgtggtttactaagaagaatatgattgtaggcatcacaaaaataacatattgtgtagtactttatcaaatgctttta

SEQ ID NO: 54652 - DNA, 392 bp, Homo sapiens
ggggcatagtgcctgttgattcgagcttgataaaataaggccaaaataattcttcccagtggatctttagggatttggttgaggaaaagcttaggaaagtgttctcaaacatgactatgagaatcacttgggagcacttttacaactctaccccagacctgctgaatcaacattccatcggagatatcagaaatctgttttgtaagagctagagaacttgtcctgaaaccagcctgctgagcaagtaactatactggctttactgagactatcaactaatctgtaagagttgactgagataggagtgagctgaagctcagccaagttcccctgagtcactgccactgtcacagaagaaaaaattttgaagcattcacactgtggtgagaatt

SEQ ID NO: 54653 - DNA, 257 bp, Homo sapiens
cacacacaccagcagagctggaaatgaacgcttattcaagcagttctgttacctctgtggagaagtgccatgggaattataatggcaatcagcttccctgctgcaattgaaaagttggttaatgtattggcactaatacagcacctcttcccatcacagcagaattggctgttactgttatagctggattatggccacttctccctcctttgcaaaatttaagtctgtgatgttctcgtcaagggaaatgatgatag

SEQ ID NO: 54654 - DNA, 198 bp, Homo sapiens
ttgacccactctttgagataagttattctgaagctttcatataagtaaaagcaattaaattttgccaccagcaccatcctcaaccattctgaattataaagtgttaaaattaagaacaggaagaatggaagtattcaataaaaaatgaagtattttcagttccatattgtcatcaaataagggtgggaaaggcaaagg

SEQ ID NO: 54655 - DNA, 230 bp, Homo sapiens
caggaagaggaatggcaactactcagccggactcagcagcgggcaggagcctccgagggcacaggtcagggccagggctcagagagtgccatggtgatcgatgaggacttcctgggggcgagagggctggtgaggctgggccagggctcagagagtgccgtggtgattgatgaggacatcctgggggcgagagggctggtgaggttgggccaggcctcagagagtgccgt

SEQ ID NO: 54656 - DNA, 389 bp, Homo sapiens
agttattctccctcctcagcctcctgagtagctgggattataggcatgtgccaccacgcctggctaatttttgtgattttagtagagatgggatttcaccatgttgacagggctggtcttgaacttctgacctcgtgatccactcacctcggcctccgaaagtgctgggattacaggtgtgagccactgcgcccggccctgtgtcttggttttgaatctctctgtggccccttgactgagcgccgtgctgcgtggttgcttagctgcccatgtcgctgatgggctgtaggctccttgggcagtggcgtcatcattcttgtttgcctctgcatccccagcgcctggcacagagcctgacacggaggggccctgaaactgatttgctacag

SEQ ID NO: 54657 - DNA, 300 bp, Homo sapiens
ctaatttttgtatttttagtagagacggagttctaccatgttggccaggctagtttcaaactcctgacctcggatgatccacccgcctcggcctcccaaagtgttgggattataggcatgagccactgtgcccggttactttttccttttttaaaacactgaaattgctgtatctaccacattaacattttatttaaaaaaatttgttaaatagcatatgtatgtaaatttaatattaatatacctctttttttgtccttctttaggtgttggagcctaggatacttacttactgatttt

SEQ ID NO: 54658 - DNA, 290 bp, Homo sapiens
ggagataggaatggaattgatggctttattcttcagaactaccaccgtaggcagccatggcaagcaggggcgcccttgcgttgttcttgaggaaaatattaagtgaggctaaattcaaactgagcctgactccccaacccccacaacccttttatatatatatggcatattacagtgagaatttctttttaaagttttaggtctttgtctttttcttgataaaattatagttataatagttgtcataagttaatcaatcgtatgttttaagtgcccttagtgcaaaattt

SEQ ID NO: 54659 - DNA, 230 bp, Homo sapiens
aatttttaaattttttgtagaaacatggtttcaccatgttgcccaggctggtcttatactcctggcctcaaacaatcctcctgtctcagcctcccaaaatgctggaattatagttgtaaagcactgtgctgagcttataacagacttttatatagcagagttatttccctgttcaaataatttgaaaaaattaaaaaataatctgtatgtttaaaatgtatatcctattt

SEQ ID NO: 54660 - DNA, 368 bp, Homo sapiens
gggacacattcaggccataccacagctggagctaagagagcgtagcaatcattacatgatcttggcctcagcaatcctctgtcttaagtagctgaacagtttagccataggccagatagatgtacatggatattagaactagatagcattatctggccaatattacaacttaatatggtacatattaaggtattcctgttttttgcttagttttatttttcttctctgccttaagaaatctctgtctttcatgtactaacaagttttcaaaacttctcttggatcactctccattattttcagagctttaaagaatataatttaattatgcatatttttaaagtttctcctgaatatgtttaaagatg

SEQ ID NO: 54661 - DNA, 275 bp, Homo sapiens
ctcagcctcccgagtagctgggactaccatgatttattttatccttctttatcattcatcaacaatttgtctgcctgttacaaggagagcacagcaaacatgtctttaggcacctgtgtttagtatcttgtaggatggatttccagatatgatgctgctgcatggatatgaacatttaaaaatattgaaagataatgcccaagttgttcttttaagaaagctgaaccattgacattattactgtcaaggaagaaaagctttgattaccttccacg

SEQ ID NO: 54662 - DNA, 632 bp, Homo sapiens
gttttacagttgagtaatctcagataaagacaggaacatggtgtttataagctgcccttaatggcagagaacacagacagaaacgagggaagagagagaaattggggaccctgaagaaagggggccagcagcaggtaggtgccatcagggacaagaacagcacctcccagggtgggagaccccaggcctttctggcagcaggtctggatggaaagtggacaggaggctcacccgtctgcatcccctgctcctgcccctgctcggctacatctcccctcctgtgaccagctgaggacctcaggctgcagcggagccatgcccagatacacggtgcacgtacgtggggaatggctggcagtgccctgccaggacgcgcagctcactgtgggctggctgggccgggaggccgtgaggcgctatatcaagaataagcccgacaatggtggcttcacctccgtggatgacgcgcacttccttgtgcgccggtgcaagggcctgggcctgctggacaacgaggaccggctcgaggtggccctagagaacaacgagttcgtggaagtggtatagagggggaggcctgtctcctaatttaatccatctcaaccagaggagtttattattcagggtccggg

SEQ ID NO: 54663 - DNA, 3914 bp, Homo sapiens
gttttacagttgagtaatctcagataaagacaggaacatggtgtttataagctgcccttaatggcagagaacacagacagaaacgagggaagagagagaaattggggaccctgaagaaagggggccagcagcaggtaggtgccatcagggacaagaacagcacctcccagggtgggagaccccaggcctttctggcagcaggtctggatggaaagtggacaggaggctcacccgtctgcatcccctgctcctgcccctgctcggctacaaaaaccaaagggacagcagctgaccacaccccggtagccactcctgcataaagctctcccctcctgtgaccagctgaggacctcaggctgcagcggagccatgcccagatacacggtgcacgtacgtggggaatggctggcagtgccctgccaggacgcgcagctcactgtgggctggctgggccgggaggccgtgaggcgctatatcaagaataagcccgacaatggtggcttcacctccgtggatgacgcgcacttccttgtgcgccggtgcaagggcctgggcctgctggacaacgaggaccggctcgaggtggccctagagaacaacgagttcgtggaagtggttatagagggtgatgccatgtctcctgacttcattccatctcaaccagaaggagtttatctatacagcaagtaccgggagcctgaaaagtacatcgagttagatggagaccgtctgaccacggaggatctggtcaacttgggaaagggacgctacaaaataaagctcaccccaacagctgagaagagggtgcagaaatccagggaggtcatagatagcatcataaaagagaaaacagttgtttacggtattactacaggttttgggaaatttgccagaactgtaattcctatcaataagctacaggagcttcaggtcaacttagtacgctcacattcttcaggtgttgggaaaccactaagtcctgagaggtgtcggatgctcttggctttaaggatcaatgtcttagccaaaggatacagtggcatttccctggagaccctcaaacaagtcatagaaatgtttaatgcctcctgcctgccctatgtcccagagaaaggaaccgttggtgccagtggagaccttgccccactctctcatcttgctcttgggctagttggagaagggaagatgtggtctccgaagagtggctgggctgatgctaaatacgtgctagaagcccatggattgaaaccagttattttaaaaccaaaagagggcctggcactcatcaatgggacgcagatgatcacatccctgggctgtgaagctgtagagcgagccagtgctattgcacggcaggctgacattgtggcagccctgacccttgaggtgctgaagggcaccaccaaagcctttgacactgacattcatgctcttcgacctcaccgtgggcaaattgaagttgcttttcggtttcggtcactcttggactcagatcaccacccatcagaaatagcagagagtcacaggttctgtgatcgcgtccaggatgcatacaccttgcgctgctgtccacaggtccatggtgtggtgaatgatacaatagcatttgtgaagaacatcattaccacagaactgaacagcgcaacagataatcctatggtctttgccaataggggagagacagtttctggaggaaacttccatggtgaatacccagccaaagccctagactacttggccattggcatccatgaacttgctgcaatcagtgagagaagaatcgagcggctctgcaatccctccctcagtgagctgcctgccttcctggtggctgaaggtggtctgaactctgggttcatgatagctcactgcacggcagcagcccttgtttctgagaacaaggctctgtgccatccctcgtctgttgactccctctccaccagcgcagccacggaggaccacgtctccatgggaggatgggcagcaaggaaagccctcagggtcatcgagcatgtggagcaagtgctggccatcgagctccttgcagcctgccagggcatagagtttctacgtcccctgaaaacaaccactccgctggagaaggtctatgacctggtgcgctctgttgtaaggccctggataaaagatcgcttcatggccccggacatcgaggcagcccacaggctgctcctggagcagaaggtttgggaagtagctgctccatacattgaaaaatacagaatggagcatattccagaatcaagacctctttctccaacagccttttcactgcaatttctgcacaagaaatccaccaaaatcccggagtctgaggacctttaatgggctttgtcatgaagtagcagatgagagggcagtcagtttagcacaaagcaatactaggctgaaggagagacctgagaactttcctaggtagatcaatccattgtatcattcagttcttctaaagcctacgttggttaggctgatggcagtattatagttgctaaattcagcactgtgttcctgttgtcgtggttcaagacccaccaggtattttcagattataaaacttttctttctttcttaacagtttcaacaggccactcactcttaagggtgagaagaataaccacaattgtatgtgcctgttttttactcttagcattagatgaattcaaatttggaaacagattgatagcaattttttctaaaaacattagacttttgttaacctttttttttttttttaaatttgcttcaacaagctctccaccagttgactttctttggctaattttactttgcatgatatgccttaatatgccttcataaataaccattttaagtcataatttgtccttaagctgcttttttcttctattaattggatcatagtaaagagtagtcaatagggtcttcagctattaattgtagaggtgattaaaaccaacaaggagtttcatgtgcaaaggagataaggaatgaatataaagattgctatttgggtggctcttattaaactgtgtattttgtacttatcactacacgtatcccccaaatgcttacatgggagtttgaggttagtattttcacttccttggtgttagtactctattcacattcttattgtaaccttcctcatttcacagataaggaatctttggggattaaccaacctcctttctgtaatggtaatcattaaaataagtcctattgataaaggtcagatggagccctagagtgtattactgcatctatttttttccccgagaagataaaggaccttcagggatggcttaagtgtatctgtccagatgaaggatgggtcacatgacctcttggcttcccaagtctaagctctgtgactttgcaccagtgtgtgcatatatgtgcaaggcccttcaagtggtctgaaaccgtggctctaaaaaccacagctggtggagaggaggacagacacacttgccaccttgcctacctaattgccatctaaaatgggccgaacagtggatttcacaatagagttttcaccctttagatttacaacctgtcaggtggaaactgaagtgaaaactgctgcacacagcaattcagggagcaaaaaatgtgctgaggagactgtttacctaaaggttgttcttggtgctattccttgtcaaaatgtgaacacacacaaatgaggtttgtgcattgtcatccgtgggctgccattgagccagtaacccccagtggtctcatggtgctcttcgctccagtttggggaatgctggattctttcagcccctgcagccctccaggtcaaaatgacactttgtcactgagttttctacacagctctattagtaactgacagcacacgccttcaagggaacttcaagggaaacatggaataaactaagtctcaattgcaa

SEQ ID NO: 54664 - DNA, 2271 bp, Homo sapiens
ccatctctgctaaaaatacaaaaattttttgggcctggtggcatgcacctgtaatcccagctactcaggaggctgaggcacaagaattgcttgaacatggaaggtggaggttgcagtgagctgagatcatgctactgcactccagcgtgggcgacagagtgagactctgtctcacaaaaaaagaaaaaaaacaaaaaaacaagaaaaaaaaccacataggtactgttaagaccctggagcaactatccttcactctatccacactgaattctctgggttttgttatttgcttgcttgttttgcttaggaaaagtatgcagcttaaaatctttatgatgactttagaaagttttggactttgtatatttacagtctttaatgcaaccaaagactaattgacacaggtcatgtgtcaaatggcttaaaataaaagcaagcaaacagcagctgtgtctggtcatgtatagagtatgttttgacttcggatgaagttgatgtttaatagcatgtggaaacaatgtcgtcaatatttcaactttgttttgtccttgcttttcaggtttgggaagtagctgctccatacattgaaaaatacagaatggagcatattccagaatcaagacctctttctccaacagccttttcactgcaatttctgcacaagaaatccaccaaaatcccggagtctgaggacctttaatgggctttgtcatgaagtagcagatgagagggcagtcagtttagcacaaagcaatactaggctgaaggagagacctgagaactttcctaggtagatcaatccattgtatcattcagttcttctaaagcctacgttggttaggctgatggcagtattatagttgctaaattcagcactgtgttcctgttgtcgtggttcaagacccaccaggtattttcagattataaaacttttctttctttcttaacagtttcaacaggccactcactcttaagggtgagaagaataaccacaattgtatgtgcctgttttttactcttagcattagatgaattcaaatttggaaacagattgatagcaattttttctaaaaacattagacttttgttaacctttttttttttttttaaatttgcttcaacaagctctccaccagttgactttctttggctaattttactttgcatgatatgccttaatatgccttcataaataaccattttaagtcataatttgtccttaagctgcttttttcttctattaattggatcatagtaaagagtagtcaatagggtcttcagctattaattgtagaggtgattaaaaccaacaaggagtttcatgtgcaaaggagataaggaatgaatataaagattgctatttgggtggctcttattaaactgtgtattttgtacttatcactacacgtatcccccaaatgcttacatgggagtttgaggttagtattttcacttccttggtgttagtactctattcacattcttattgtaaccttcctcatttcacagataaggaatctttggggattaaccaacctcctttctgtaatggtaatcattaaaataagtcctattgataaaggtcagatggagccctagagtgtattactgcatctatttttttccccgagaagataaaggaccttcagggatggcttaagtgtatctgtccagatgaaggatgggtcacatgacctcttggcttcccaagtctaagctctgtgactttgcaccagtgtgtgcatatatgtgcaaggcccttcaagtggtctgaaaccgtggctctaaaaaccacagctggtggagaggaggacagacacacttgccaccttgcctacctaattgccatctaaaatgggccgaacagtggatttcacaatagagttttcaccctttagatttacaacctgtcaggtggaaactgaagtgaaaactgctgcacacagcaattcagggagcaaaaaatgtgctgaggagactgtttacctaaaggttgttcttggtgctattccttgtcaaaatgtgaacacacacaaatgaggtttgtgcattgtcatccgtgggctgccattgagccagtaacccccagtggtctcatggtgctcttcgctccagtttggggaatgctggattctttcagcccctgcagccctccaggtcaaaatgacactttgtcactgagttttctacacagctctattagtaactgacagcacacgccttcaagggaacttcaagggaaacatggaataaactaagtctcaattgcaa

SEQ ID NO: 54665 - DNA, 2883 bp, Homo sapiens
gagttaagtttctaattctgagtggtggctaaggacccctgggacttttgagggctgtgtcagcaccgtagatggtcctgaaccattgatggtcatttgttctaatatcagaattactcgacctggcatggtggctcatgcctgtaatcccagcactttgggaggccaaggtaggaggatcgctagagcccaggagtttgaaaccagcctggggaacgtagtgagacccccatctttaaaaaaaataaataaatggaattattcagactttttctccttcatcaattctagacattcatgctcttcgacctcaccgtgggcaaattgaagttgcttttcggtttcggtcactcttggactcagatcaccacccatcagaaatagcaggtctgaccatgtttatgggagtgacctatttggttacgtgttttgtgaaaagaattggtaacatgatccctgtctcatcccctccacctcttccacagagagtcacaggttctgtgatcgcgtccaggatgcatacaccttgcgctgctgtccacaggtccatggtgtggtgaatgatacaatagcatttgtgaagaacatcattaccacagaactgaacagcgcaacagataatcctatggtctttgccaataggggagagacagtttctggaggaaacttccatggtgaatacccagccaaagccctagactacttggccattggcatccatgaacttgctgcaatcagtgagagaagaatcgagcggctctgcaatccctccctcagtgagctgcctgccttcctggtggctgaaggtggtctgaactctgggttcatgatagctcactgcacggcagcagcccttgtttctgagaacaaggctctgtgccatccctcgtctgttgactccctctccaccagcgcagccacggaggaccacgtctccatgggaggatgggcagcaaggaaagccctcagggtcatcgagcatgtggagcaagtgctggccatcgagctccttgcagcctgccagggcatagagtttctacgtcccctgaaaacaaccactccgctggagaaggtctatgacctggtgcgctctgttgtaaggccctggataaaagatcgcttcatggccccggacatcgaggcagcccacaggctgctcctggagcagaaggtttgggaagtagctgctccatacattgaaaaatacagaatggagcatattccagaatcaagacctctttctccaacagccttttcactgcaatttctgcacaagaaatccaccaaaatcccggagtctgaggacctttaatgggctttgtcatgaagtagcagatgagagggcagtcagtttagcacaaagcaatactaggctgaaggagagacctgagaactttcctaggtagatcaatccattgtatcattcagttcttctaaagcctacgttggttaggctgatggcagtattatagttgctaaattcagcactgtgttcctgttgtcgtggttcaagacccaccaggtattttcagattataaaacttttctttctttcttaacagtttcaacaggccactcactcttaagggtgagaagaataaccacaattgtatgtgcctgttttttactcttagcattagatgaattcaaatttggaaacagattgatagcaattttttctaaaaacattagacttttgttaacctttttttttttttttaaatttgcttcaacaagctctccaccagttgactttctttggctaattttactttgcatgatatgccttaatatgccttcataaataaccattttaagtcataatttgtccttaagctgcttttttcttctattaattggatcatagtaaagagtagtcaatagggtcttcagctattaattgtagaggtgattaaaaccaacaaggagtttcatgtgcaaaggagataaggaatgaatataaagattgctatttgggtggctcttattaaactgtgtattttgtacttatcactacacgtatcccccaaatgcttacatgggagtttgaggttagtattttcacttccttggtgttagtactctattcacattcttattgtaaccttcctcatttcacagataaggaatctttggggattaaccaacctcctttctgtaatggtaatcattaaaataagtcctattgataaaggtcagatggagccctagagtgtattactgcatctatttttttccccgagaagataaaggaccttcagggatggcttaagtgtatctgtccagatgaaggatgggtcacatgacctcttggcttcccaagtctaagctctgtgactttgcaccagtgtgtgcatatatgtgcaaggcccttcaagtggtctgaaaccgtggctctaaaaaccacagctggtggagaggaggacagacacacttgccaccttgcctacctaattgccatctaaaatgggccgaacagtggatttcacaatagagttttcaccctttagatttacaacctgtcaggtggaaactgaagtgaaaactgctgcacacagcaattcagggagcaaaaaatgtgctgaggagactgtttacctaaaggttgttcttggtgctattccttgtcaaaatgtgaacacacacaaatgaggtttgtgcattgtcatccgtgggctgccattgagccagtaacccccagtggtctcatggtgctcttcgctccagtttggggaatgctggattctttcagcccctgcagccctccaggtcaaaatgacactttgtcactgagttttctacacagctctattagtaactgacagcacacgccttcaagggaacttcaagggaaacatggaataaactaagtctcaattgcaa

SEQ ID NO: 54666 - DNA, 2924 bp, Homo sapiens
gttttacagttgagtaatctcagataaagacaggaacatggtgtttataagctgcccttaatggcagagaacacagacagaaacgagggaagagagagaaattggggaccctgaagaaagggggccagcagcaggtaggtgccatcagggacaagaacagcacctcccagggtgggagaccccaggcctttctggcagcaggtctggatggaaagtggacaggaggctcacccgtctgcatcccctgctcctgcccctgctcggctacaaaaaccaaagggacagcagctgaccacaccccggtagccactcctgcataaagctctcccctcctgtgaccagctgaggacctcaggctgcagcggagccatgcccagatacacggtgcacgtacgtggggaatggctggcagtgccctgccaggacgcgcagctcactgtgggctggctgggccgggaggccgtgaggcgctatatcaagaataagcccgacaatggtggcttcacctccgtggatgacgcgcacttccttgtgcgccggtgcaagggcctgggcctgctggacaacgaggaccggctcgaggtggccctagagaacaacgagttcgtggaagtggttatagagggtgatgccatgtctcctgacttcattccatctcaaccagaaggagtttatctatacagcaagtaccgggagcctgaaaagtacatcgagttagatggagaccgtctgaccacggaggatctggtcaacttgggaaagggacgctacaaaataaagctcaccccaacagctgagaagagggtgcagaaatccagggaggtcatagatagcatcataaaagagaaaacagttgtttacggtattactacaggttttgggaaatttgccagaactgtaattcctatcaataagctacaggagcttcaggtcaacttagtacgctcacattcttcaggtgttgggaaaccactaagtcctgagaggtgtcggatgctcttggctttaaggatcaatgtcttagccaaaggatacagtggcatttccctggagaccctcaaacaaggcatagagtttctacgtcccctgaaaacaaccactccgctggagaaggtctatgacctggtgcgctctgttgtaaggccctggataaaagatcgcttcatggccccggacatcgaggcagcccacaggctgctcctggagcagaaggtttgggaagtagctgctccatacattgaaaaatacagaatggagcatattccagaatcaagacctctttctccaacagccttttcactgcaatttctgcacaagaaatccaccaaaatcccggagtctgaggacctttaatgggctttgtcatgaagtagcagatgagagggcagtcagtttagcacaaagcaatactaggctgaaggagagacctgagaactttcctaggtagatcaatccattgtatcattcagttcttctaaagcctacgttggttaggctgatggcagtattatagttgctaaattcagcactgtgttcctgttgtcgtggttcaagacccaccaggtattttcagattataaaacttttctttctttcttaacagtttcaacaggccactcactcttaagggtgagaagaataaccacaattgtatgtgcctgttttttactcttagcattagatgaattcaaatttggaaacagattgatagcaattttttctaaaaacattagacttttgttaacctttttttttttttttaaatttgcttcaacaagctctccaccagttgactttctttggctaattttactttgcatgatatgccttaatatgccttcataaataaccattttaagtcataatttgtccttaagctgcttttttcttctattaattggatcatagtaaagagtagtcaatagggtcttcagctattaattgtagaggtgattaaaaccaacaaggagtttcatgtgcaaaggagataaggaatgaatataaagattgctatttgggtggctcttattaaactgtgtattttgtacttatcactacacgtatcccccaaatgcttacatgggagtttgaggttagtattttcacttccttggtgttagtactctattcacattcttattgtaaccttcctcatttcacagataaggaatctttggggattaaccaacctcctttctgtaatggtaatcattaaaataagtcctattgataaaggtcagatggagccctagagtgtattactgcatctatttttttccccgagaagataaaggaccttcagggatggcttaagtgtatctgtccagatgaaggatgggtcacatgacctcttggcttcccaagtctaagctctgtgactttgcaccagtgtgtgcatatatgtgcaaggcccttcaagtggtctgaaaccgtggctctaaaaaccacagctggtggagaggaggacagacacacttgccaccttgcctacctaattgccatctaaaatgggccgaacagtggatttcacaatagagttttcaccctttagatttacaacctgtcaggtggaaactgaagtgaaaactgctgcacacagcaattcagggagcaaaaaatgtgctgaggagactgtttacctaaaggttgttcttggtgctattccttgtcaaaatgtgaacacacacaaatgaggtttgtgcattgtcatccgtgggctgccattgagccagtaacccccagtggtctcatggtgctcttcgctccagtttggggaatgctggattctttcagcccctgcagccctccaggtcaaaatgacactttgtcactgagttttctacacagctctattagtaactgacagcacacgccttcaagggaacttcaagggaaacatggaataaactaagtctcaattgcaa

SEQ ID NO: 54667 - DNA, 3862 bp, Homo sapiens
gttttacagttgagtaatctcagataaagacaggaacatggtgtttataagctgcccttaatggcagagaacacagacagaaacgagggaagagagagaaattggggaccctgaagaaagggggccagcagcaggtaggtgccatcagggacaagaacagcacctcccagggtgggagaccccaggcctttctggcagcaggtctggatggaaagtggacaggaggctcacccgtctgcatcccctgctcctgcccctgctcggctacaaaaaccaaagggacagcagctgaccacaccccggtagccactcctgcataaagctctcccctcctgtgaccagctgaggacctcaggctgcagcggagccatgcccagatacacggtgcacgtacgtggggaatggctggcagtgccctgccaggacgcgcagctcactgtgggctggctgggccgggaggccgtgaggcgctatatcaagaataagcccgacaatggtggcttcacctccgtggatgacgcgcacttccttgtgcgccggtgcaagggcctgggcctgctggacaacgaggaccggctcgaggtggccctagagaacaacgagttcgtggaagtggttatagagggtgatgccatgtctcctgacttcattccatctcaaccagaaggagtttatctatacagcaagtaccgggagcctgaaaagtacatcgagttagatggagaccgtctgaccacggaggatctggtcaacttgggaaagggacgctacaaaataaagctcaccccaacagctgagaagagggtgcagaaatccagggaggtcatagatagcatcataaaagagaaaacagttgtttacggtattactacaggttttgggaaatttgccagaactgtaattcctatcaataagctacaggagcttcaggtcaacttagtacgctcacattcttcaggtgttgggaaaccactaagtcctgagaggtgtcggatgctcttggctttaaggatcaatgtcttagccaaaggatacagtggcatttccctggagaccctcaaacaagtcatagaaatgtttaatgcctcctgcctgccctatgtcccagagaaaggaaccgttggtgccagtggagaccttgccccactctctcatcttgctcttgggctagttggagaagggaagatgtggtctccgaagagtggctgggctgatgctaaatacgtgctagaagcccatggattgaaaccagttattttaaaaccaaaagagggcctggcactcatcaatgggacgcagatgatcacatccctgggctgtgaagctgtagagcgagccagtgctattgcacggcaggctgacattgtggcagccctgacccttgaggtgctgaagggcaccaccaaagcctttgacactgacattcatgctcttcgacctcaccgtgggcaaattgaagttgcttttcggtttcggtcactcttggactcagatcaccacccatcagaaatagcagagagtcacaggttctgtgatcgcgtccaggatgcatacaccttgcgctgctgtccacaggtccatggtgtggtgaatgatacaatagcatttgtgaagaacatcattaccacagaactgaacagcgcaacagataatcctatggtctttgccaataggggagagacagtttctggaggaaacttccatggtgaatacccagccaaagccctagactacttggccattggcatccatgaacttgctgcaatcagtgagagaagaatcgagcggctctgcaatccctccctcagtgagctgcctgccttcctggtggctgaaggtggtctgaactctgggttcatgatagctcactgcacggcagcagcccttgtttctgagaacaaggctctgtgccatccctcgtctgttgactccctctccaccagcgcagccacggaggaccacgtctccatgggaggatgggcagcaaggaaagccctcagggtcatcgagcatgtggagcaagtgctggccatcgagctccttgcagcctgccagggcatagagtttctacgtcccctgaaaacaaccactccgctggagaaggtctatgacctggtgcgctctgttgtaaggccctggataaaagatcgcttcatggccccggacatcgaggcagcccacaggctgctcctggagcagaaggtttgggaagtagctgctccatacattgaaaaatacagaatggagcatattccagaatcaagacctctttctccaacagccttttcactgcaatttctgcacaagaaatccaccaaaatcccggagtctgaggacctttaatgggctttgtcatgaagtagcagatgagagggcagtcagtttagcacaaagcaatactaggctgaaggagagacctgagaactttcctaggtagatcaatccattgtatcattcagttcttctaaagcctacgttggttaggctgatggcagtattatagttgctaaattcagcactgtgttcctgttgtcgtggttcaagacccaccaggtattttcagattataaaacttttctttctttcttaacagtttcaacaggccactcactcttaagggtgagaagaataaccacaattgtatgtgcctgttttttactcttagcattagatgaattcaaatttggaaacagattgatagcaattttttctaaagctctccaccagttgactttctttggctaattttactttgcatgatatgccttaatatgccttcataaataaccattttaagtcataatttgtccttaagctgcttttttcttctattaattggatcatagtaaagagtagtcaatagggtcttcagctattaattgtagaggtgattaaaaccaacaaggagtttcatgtgcaaaggagataaggaatgaatataaagattgctatttgggtggctcttattaaactgtgtattttgtacttatcactacacgtatcccccaaatgcttacatgggagtttgaggttagtattttcacttccttggtgttagtactctattcacattcttattgtaaccttcctcatttcacagataaggaatctttggggattaaccaacctcctttctgtaatggtaatcattaaaataagtcctattgataaaggtcagatggagccctagagtgtattactgcatctatttttttccccgagaagataaaggaccttcagggatggcttaagtgtatctgtccagatgaaggatgggtcacatgacctcttggcttcccaagtctaagctctgtgactttgcaccagtgtgtgcatatatgtgcaaggcccttcaagtggtctgaaaccgtggctctaaaaaccacagctggtggagaggaggacagacacacttgccaccttgcctacctaattgccatctaaaatgggccgaacagtggatttcacaatagagttttcaccctttagatttacaacctgtcaggtggaaactgaagtgaaaactgctgcacacagcaattcagggagcaaaaaatgtgctgaggagactgtttacctaaaggttgttcttggtgctattccttgtcaaaatgtgaacacacacaaatgaggtttgtgcattgtcatccgtgggctgccattgagccagtaacccccagtggtctcatggtgctcttcgctccagtttggggaatgctggattctttcagcccctgcagccctccaggtcaaaatgacactttgtcactgagttttctacacagctctattagtaactgacagcacacgccttcaagggaacttcaagggaaacatggaataaactaagtctcaattgcaa

SEQ ID NO: 54668 - DNA, 2501 bp, Homo sapiens
gttttttcagcctccaaattgggtgtacatgatccacctttaaggctttttgttttttgcttttgtgcccctttatatctcttgcaggaagacttgtctctttccctccacctcacatttgtacacagactgccacctccacgttaaaccttaacctcttttgaaagatggtctttgccaataggggagagacagtttctggaggaaacttccatggtgaatacccagccaaagtaagctttttagaactgctcttgacccagaaggcacatttcaatataggctgactaaatggagaccctctttcaggccctagactacttggccattggcatccatgaacttgctgcaatcagtgagagaagaatcgagcggctctgcaatccctccctcagtgagctgcctgccttcctggtggctgaaggtggtctgaactctgggttcatgatagctcactgcacggcagcagcccttgtttctgagaacaaggctctgtgccatccctcgtctgttgactccctctccaccagcgcagccacggaggaccacgtctccatgggaggatgggcagcaaggaaagccctcagggtcatcgagcatgtggagcaagtgctggccatcgagctccttgcagcctgccagggcatagagtttctacgtcccctgaaaacaaccactccgctggagaaggtctatgacctggtgcgctctgttgtaaggccctggataaaagatcgcttcatggccccggacatcgaggcagcccacaggctgctcctggagcagaaggtttgggaagtagctgctccatacattgaaaaatacagaatggagcatattccagaatcaagacctctttctccaacagccttttcactgcaatttctgcacaagaaatccaccaaaatcccggagtctgaggacctttaatgggctttgtcatgaagtagcagatgagagggcagtcagtttagcacaaagcaatactaggctgaaggagagacctgagaactttcctaggtagatcaatccattgtatcattcagttcttctaaagcctacgttggttaggctgatggcagtattatagttgctaaattcagcactgtgttcctgttgtcgtggttcaagacccaccaggtattttcagattataaaacttttctttctttcttaacagtttcaacaggccactcactcttaagggtgagaagaataaccacaattgtatgtgcctgttttttactcttagcattagatgaattcaaatttggaaacagattgatagcaattttttctaaaaacattagacttttgttaacctttttttttttttttaaatttgcttcaacaagctctccaccagttgactttctttggctaattttactttgcatgatatgccttaatatgccttcataaataaccattttaagtcataatttgtccttaagctgcttttttcttctattaattggatcatagtaaagagtagtcaatagggtcttcagctattaattgtagaggtgattaaaaccaacaaggagtttcatgtgcaaaggagataaggaatgaatataaagattgctatttgggtggctcttattaaactgtgtattttgtacttatcactacacgtatcccccaaatgcttacatgggagtttgaggttagtattttcacttccttggtgttagtactctattcacattcttattgtaaccttcctcatttcacagataaggaatctttggggattaaccaacctcctttctgtaatggtaatcattaaaataagtcctattgataaaggtcagatggagccctagagtgtattactgcatctatttttttccccgagaagataaaggaccttcagggatggcttaagtgtatctgtccagatgaaggatgggtcacatgacctcttggcttcccaagtctaagctctgtgactttgcaccagtgtgtgcatatatgtgcaaggcccttcaagtggtctgaaaccgtggctctaaaaaccacagctggtggagaggaggacagacacacttgccaccttgcctacctaattgccatctaaaatgggccgaacagtggatttcacaatagagttttcaccctttagatttacaacctgtcaggtggaaactgaagtgaaaactgctgcacacagcaattcagggagcaaaaaatgtgctgaggagactgtttacctaaaggttgttcttggtgctattccttgtcaaaatgtgaacacacacaaatgaggtttgtgcattgtcatccgtgggctgccattgagccagtaacccccagtggtctcatggtgctcttcgctccagtttggggaatgctggattctttcagcccctgcagccctccaggtcaaaatgacactttgtcactgagttttctacacagctctattagtaactgacagcacacgccttcaagggaacttcaagggaaacatggaataaactaagtctcaattgcaa

SEQ ID NO: 54669 - DNA, 2054 bp, Homo sapiens
  misc_feature (15)..(15): n is a, c, g, or t
gtgagactctgtctnacaaaaaaagctatccttcactctatccacactgaattctctgggttttgttatttgcttgcttgttttgcttaggaaaagtatgcagcttaaaatctttatgatgactttagaaagttttggactttgtatatttacagtctttaatgcaaccaaagactaattgacacaggtcatgtgtcaaatggcttaaaataaaagcaagcaaacagcagctgtgtctggtcatgtatagagtatgttttgacttcggatgaagttgatgtttaatagcatgtggaaacaatgtcgtcaatatttcaactttgttttgtccttgcttttcaggtttgggaagtagctgctccatacattgaaaaatacagaatggagcatattccagaatcaagacctctttctccaacagccttttcactgcaatttctgcacaagaaatccaccaaaatcccggagtctgaggacctttaatgggctttgtcatgaagtagcagatgagagggcagtcagtttagcacaaagcaatactaggctgaaggagagacctgagaactttcctaggtagatcaatccattgtatcattcagttcttctaaagcctacgttggttaggctgatggcagtattatagttgctaaattcagcactgtgttcctgttgtcgtggttcaagacccaccaggtattttcagattataaaacttttctttctttcttaacagtttcaacaggccactcactcttaagggtgagaagaataaccacaattgtatgtgcctgttttttactcttagcattagatgaattcaaatttggaaacagattgatagcaattttttctaaaaacattagacttttgttaacctttttttttttttttaaatttgcttcaacaagctctccaccagttgactttctttggctaattttactttgcatgatatgccttaatatgccttcataaataaccattttaagtcataatttgtccttaagctgcttttttcttctattaattggatcatagtaaagagtagtcaatagggtcttcagctattaattgtagaggtgattaaaaccaacaaggagtttcatgtgcaaaggagataaggaatgaatataaagattgctatttgggtggctcttattaaactgtgtattttgtacttatcactacacgtatcccccaaatgcttacatgggagtttgaggttagtattttcacttccttggtgttagtactctattcacattcttattgtaaccttcctcatttcacagataaggaatctttggggattaaccaacctcctttctgtaatggtaatcattaaaataagtcctattgataaaggtcagatggagccctagagtgtattactgcatctatttttttccccgagaagataaaggaccttcagggatggcttaagtgtatctgtccagatgaaggatgggtcacatgacctcttggcttcccaagtctaagctctgtgactttgcaccagtgtgtgcatatatgtgcaaggcccttcaagtggtctgaaaccgtggctctaaaaaccacagctggtggagaggaggacagacacacttgccaccttgcctacctaattgccatctaaaatgggccgaacagtggatttcacaatagagttttcaccctttagatttacaacctgtcaggtggaaactgaagtgaaaactgctgcacacagcaattcagggagcaaaaaatgtgctgaggagactgtttacctaaaggttgttcttggtgctattccttgtcaaaatgtgaacacacacaaatgaggtttgtgcattgtcatccgtgggctgccattgagccagtaacccccagtggtctcatggtgctcttcgctccagtttggggaatgctggattctttcagcccctgcagccctccaggtcaaaatgacactttgtcactgagttttctacacagctctattagtaactgacagcacacgccttcaagggaacttcaagggaaacatggaataaactaagtctcaattgcaa

SEQ ID NO: 54670 - DNA, 2218 bp, Homo sapiens
ccatctctgctaaaaatacaaaaattttttgggcctggtggcatgcacctgtaatcccagctactcaggaggctgaggcacaagaattgcttgaacatggaaggtggaggttgcagtgagctgagatcatgctactgcactccagcgtgggcgacagagtgagactctgtctcacaaaaaaagaaaaaaaacaaaaaaacaagaaaaaaaaccacataggtactgttaagaccctggagcaactatccttcactctatccacactgaattctctgggttttgttatttgcttgcttgttttgcttaggaaaagtatgcatctttaatgcaaccaaagactaattgacacaggtcatgtgtcaaatggcttaaaataaaagcaagcaaacagcagctgtgtctggtcatgtatagagtatgttttgacttcggatgaagttgatgtttaatagcatgtggaaacaatgtcgtcaatatttcaactttgttttgtccttgcttttcaggtttgggaagtagctgctccatacattgaaaaatacagaatggagcatattccagaatcaagacctctttctccaacagccttttcactgcaatttctgcacaagaaatccaccaaaatcccggagtctgaggacctttaatgggctttgtcatgaagtagcagatgagagggcagtcagtttagcacaaagcaatactaggctgaaggagagacctgagaactttcctaggtagatcaatccattgtatcattcagttcttctaaagcctacgttggttaggctgatggcagtattatagttgctaaattcagcactgtgttcctgttgtcgtggttcaagacccaccaggtattttcagattataaaacttttctttctttcttaacagtttcaacaggccactcactcttaagggtgagaagaataaccacaattgtatgtgcctgttttttactcttagcattagatgaattcaaatttggaaacagattgatagcaattttttctaaaaacattagacttttgttaacctttttttttttttttaaatttgcttcaacaagctctccaccagttgactttctttggctaattttactttgcatgatatgccttaatatgccttcataaataaccattttaagtcataatttgtccttaagctgcttttttcttctattaattggatcatagtaaagagtagtcaatagggtcttcagctattaattgtagaggtgattaaaaccaacaaggagtttcatgtgcaaaggagataaggaatgaatataaagattgctatttgggtggctcttattaaactgtgtattttgtacttatcactacacgtatcccccaaatgcttacatgggagtttgaggttagtattttcacttccttggtgttagtactctattcacattcttattgtaaccttcctcatttcacagataaggaatctttggggattaaccaacctcctttctgtaatggtaatcattaaaataagtcctattgataaaggtcagatggagccctagagtgtattactgcatctatttttttccccgagaagataaaggaccttcagggatggcttaagtgtatctgtccagatgaaggatgggtcacatgacctcttggcttcccaagtctaagctctgtgactttgcaccagtgtgtgcatatatgtgcaaggcccttcaagtggtctgaaaccgtggctctaaaaaccacagctggtggagaggaggacagacacacttgccaccttgcctacctaattgccatctaaaatgggccgaacagtggatttcacaatagagttttcaccctttagatttacaacctgtcaggtggaaactgaagtgaaaactgctgcacacagcaattcagggagcaaaaaatgtgctgaggagactgtttacctaaaggttgttcttggtgctattccttgtcaaaatgtgaacacacacaaatgaggtttgtgcattgtcatccgtgggctgccattgagccagtaacccccagtggtctcatggtgctcttcgctccagtttggggaatgctggattctttcagcccctgcagccctccaggtcaaaatgacactttgtcactgagttttctacacagctctattagtaactgacagcacacgccttcaagggaacttcaagggaaacatggaataaactaagtctcaattgcaa

SEQ ID NO: 54671 - DNA, 3270 bp, Homo sapiens
gttttacagttgagtaatctcagataaagacaggaacatggtgtttataagctgcccttaatggcagagaacacagacagaaacgagggaagagagagaaattggggaccctgaagaaagggggccagcagcaggtaggtgccatcagggacaagaacagcacctcccagggtgggagaccccaggcctttctggcagcaggtctggatggaaagtggacaggaggctcacccgtctgcatcccctgctcctgcccctgctcggctacaaaaaccaaagggacagcagctgaccacaccccggtagccactcctgcataaagctctcccctcctgtgaccagctgaggacctcaggctgcagcggagccatgcccagatacacggtgcacgtacgtggggaatggctggcagtgccctgccaggacgcgcagctcactgtgggctggctgggccgggaggccgtgaggcgctatatcaagaataagcccgacaatggtggcttcacctccgtggatgacgcgcacttccttgtgcgccggtgcaagggcctgggcctgctggacaacgaggaccggctcgaggtggccctagagaacaacgagttcgtggaagtggttatagagggtgatgccatgtctcctgacttcattccatctcaaccagaaggagtttatctatacagcaagtaccgggagcctgaaaagtacatcgagttagatggagaccgtctgaccacggaggatctggtcaacttgggaaagggacgctacaaaataaagctcaccccaacagctgagaagagggtgcagaaatccagggaggtcatagatagcatcataaaagagaaaacagttgtttacggtattactacaggttttgggaaatttgccagaactgtaattcctatcaataagctacaggagcttcaggtcaacttagtacgctcacattcttcaggtgttgggaaaccactaagtcctgagaggtgtcggatgctcttggctttaaggatcaatgtcttagccaaaggatacagtggcatttccctggagaccctcaaacaagtcatagaaatgtttaatgcctcctgcctgccctatgtcccagagaaaggaaccgttggtgccagtggagaccttgccccactctctcatcttgctcttgggctagttggagaagggaagatgtggtctccgaagagtggctgggctgatgctaaatacgtgctagaagcccatggattgaaaccagttattttaaaaccaaaagagggcctggcactcatcaatgggacgcagatgatcacatccctgggctgtgaagctgtagagcgagccagtgctattgcacggcaggctgacattgtggcagccctgacccttgaggtgctgaagggcaccaccaaagcctttgacactgacattcatgctcttcgacctcaccgtgggcaaattgaagttgcttttcggtttcggtcactcttggactcagatcaccacccatcagaaatagcagagagtcacaggttctgtgatcgcgtccaggatgcatacaccttgcgctgctgtccacaggtccatggtgtggtgaatgatacaatagcatttgtgaagaacatcattaccacagaactgaacagcgcaacagataatcctatggtctttgccaataggggagagacagtttctggaggaaacttccatggtgaatacccagccaaagccctagactacttggccattggcatccatgaacttgctgcaatcagtgagagaagaatcgagcggctctgcaatccctccctcagtgagctgcctgccttcctggtggctgaaggtggtctgaactctgggttcatgatagctcactgcacggcagcagcccttgtttctgagaacaaggctctgtgccatccctcgtctgttgactccctctccaccagcgcagccacggaggaccacgtctccatgggaggatgggcagcaaggaaagccctcagggtcatcgagcatgtggagcaagtgctggccatcgagctccttgcagcctgccagggcatagagtttctacgtcccctgaaaacaaccactccgctggagaaggtctatgacctggtgcgctctgttgtaaggccctggataaaagatcgcttcatggccccggacatcgaggcagcccacaggctgctcctggagcagaaggcaagctggctccttggcttgtttcttaatttttaattgttacaggaaagcaaagtcggggatggagaaacattgccttattctattgttttctggccattccttgggaatgagcaaaaaggtatttgagcaacaacttgcagcaccactaagaagccatataataaacactaagtgcaccagggtgcagccaacggttgaatatctaaggattagaaacagaaatggattttaaatggagttttgggacaatattcatggggaaaaaaataagatgtcaggttcattgatgcctccccacccctgcaagatgtcctctttgattcaaaagtgcgttcccttctgggtgatgctatcacaactaccaccactgggtgcaatggctgcgtagacctggagagaaaaccaaggcccgggtgtttacttcagaagactttcggtctgtctagtgctctggtgagatgcgggtttttctttcttgcatatttccactggttacattgaccgtatactcagctgccaggtacagatgcccagcatgctggcttatcttttaaatatcgtttttgaagtgctttaaaccttttgaataacttgtgggtgttatgttccctagaatcgcttgatttccttaaaacagttgctctgctctggggcagtgatttttccctgtgattttcacacccattatttctaagcatgccctgcactctggatggggaagctgcttgcctgctgccaactttggtgctaggagggaggtatacgagaggttagcctttaagagtattcatttgctaaggtcataaaaaataataggaaaggctccttggctgtcagtggcaatcagttaaaaagcagatataaaccaaaaacagggccttaatttcattcaatttaaaaaaaaatttttttggagatgcgggtcttgctatgttgccaaggctggactcaaactcctgggctcaagtgatcctcccactttggcttcttgagtagctgggactacaggcacatgccaccatgcccgtccagggccttactttgagatgatgttatgcttaagaa

SEQ ID NO: 54672 - DNA, 2446 bp, Homo sapiens
gttttacagttgagtaatctcagataaagacaggaacatggtgtttataagctgcccttaatggcagagaacacagacagaaacgagggaagagagagaaattggggaccctgaagaaagggggccagcagcaggtaggtgccatcagggacaagaacagcacctcccagggtgggagaccccaggcctttctggcagcaggtctggatggaaagtggacaggaggctcacccgtctgcatcccctgctcctgcccctgctcggctacaaaaaccaaagggacagcagctgaccacaccccggtagccactcctgcataaagctctcccctcctgtgaccagctgaggacctcaggctgcagcggagccatgcccagatacacggtgcacgtacgtggggaatggctggcagtgccctgccaggacgcgcagctcactgtgggctggctgggccgggaggccgtgaggcgctatatcaagaataagcccgacaatggtggcttcacctccgtggatgacgcgcacttccttgtgcgccggtgcaagggcctgggcctgctggacaacgaggaccggctcgaggtggccctagagaacaacgagttcgtggaagtggttatagagggtgatgccatgtctcctgacttcattccatctcaaccagaaggagtttatctatacagcaagtaccgggagcctgaaaagtacatcgagttagatggagaccgtctgaccacggaggatctggtcaacttgggaaagggacgctacaaaataaagctcaccccaacagctgagaagagggtgcagaaatccagggaggtcatagatagcatcataaaagagaaaacagttgtttacggtattactacaggttttgggaaatttgccagaactgtaattcctatcaataagctacaggagcttcaggtcaacttagtacgctcacattcttcaggtgttgggaaaccactaagtcctgagaggtgtcggatgctcttggctttaaggatcaatgtcttagccaaaggatacagtggcatttccctggagaccctcaaacaagtcatagaaatgtttaatgcctcctgcctgccctatgtcccagagaaaggaaccgttggtgccagtggagaccttgccccactctctcatcttgctcttgggctagttggagaagggaagatgtggtctccgaagagtggctgggctgatgctaaatacgtgctagaagcccatggattgaaaccagttattttaaaaccaaaagagggcctggcactcatcaatgggacgcagatgatcacatccctgggctgtgaagctgtagagcgagccagtgctattgcacggcaggctgacattgtggcagccctgacccttgaggtgctgaagggcaccaccaaagcctttgacactgacattcatgctcttcgacctcaccgtgggcaaattgaagttgcttttcggtttcggtcactcttggactcagatcaccacccatcagaaatagcaggtctgaccatgtttatgggagtgacctatttggttacgtgttttgtgaaaagaattggtaacatgatccctgtctcatcccctccacctcttccacagagagtcacaggttctgtgatcgcgtccaggatgcatacaccttgcgctgctgtccacaggtccatggtgtggtgaatgatacaatagcatttgtgaagaacatcattaccacagaactgaacagcgcaacagataatcctgtatcttttgattgtatactaacctgcaattatagaattgcagctggtaattttaggatctactgaaacaatcattttgtgtagctttctcagttccattgctccatttcacagagtaaatgaatcagtacctgaggctcagaggttaactgactttctccaggtcagagctggtaagtggcagaggtgacctgtgaacttactctcaggttccaagtctaacatgctgtactttcaaaatggacctattcaagatttaagaagatatttccagcattggctgacatgtttcctgaagacactggccctaaaacccactgccaaggttgttggtggaagggtgaagacgtgggtcacaaatgtgattgcagaaatgctgaacaatttatgcaggcctctctgctttgagtgagagcagtttgcattatgcagaggtcagccttttaacacttaccaaagtattgattaaagagttatggcttcctcatcctgaggtttttggcattttttttttgtttatttttagacggagtctcactctgtctcctaggctggagtgcagtggtgccatctcggctctctgcaacctctgcctcacgggttcaagcgattctcctgcctcagcctcctgagtagctggaattacaggcatgtgccagcaggcctggctaatatttgtatttttagtagcg

SEQ ID NO: 54673 - DNA, 1909 bp, Homo sapiens
gttttacagttgagtaatctcagataaagacaggaacatggtgtttataagctgcccttaatggcagagaacacagacagaaacgagggaagagagagaaattggggaccctgaagaaagggggccagcagcaggtaggtgccatcagggacaagaacagcacctcccagggtgggagaccccaggcctttctggcagcaggtctggatggaaagtggacaggaggctcacccgtctgcatcccctgctcctgcccctgctcggctacaaaaaccaaagggacagcagctgaccacaccccggtagccactcctgcataaagctctcccctcctgtgaccagctgaggacctcaggctgcagcggagccatgcccagatacacggtgcacgtacgtggggaatggctggcagtgccctgccaggacgcgcagctcactgtgggctggctgggccgggaggccgtgaggcgctatatcaagaataagcccgacaatggtggcttcacctccgtggatgacgcgcacttccttgtgcgccggtgcaagggcctgggcctgctggacaacgaggaccggctcgaggtggccctagagaacaacgagttcgtggaagtggttatagagggtgatgccatgtctcctgacttcattccatctcaaccagaaggagtttatctatacagcaagtaccgggagcctgaaaagtacatcgagttagatggagaccgtctgaccacggaggatctggtcaacttgggaaagggacgctacaaaataaagctcaccccaacagctgagaagagggtgcagaaatccagggaggtcatagatagcatcataaaagagaaaacagttgtttacggtattactacaggttttgggaaatttgccagaactgtaattcctatcaataagctacaggagcttcaggtcaacttagtacgctcacattcttcaggtgttgggaaaccactaagtcctgagaggtgtcggatgctcttggctttaaggatcaatgtcttagccaaaggatacagtggcatttccctggagaccctcaaacaagtcatagaaatgtttaatgcctcctgcctgccctatgtcccagagaaaggaaccgttggtgccagtggagaccttgccccactctctcatcttgctcttgggctagttggagaagggaagatgtggtctccgaagagtggctgggctgatgctaaataccataaagcatcatttaatgtatcatccctgatgaactgctgggagcttccctgatagtaagtgaaaggggtagagggccccagaagaggaaacagctaaggaaatagataatccttttggggatgcagcttctagatcatctgtcttccgtgcaggcttgtctttgattatttcactatggacagcgttttcctccgaccaccctcatacagcaatcaccctgacctttctaaacagcaaattcaagcatgttctggtgaaaacttgtaatgcttcccattgtcctcaggataaaggctaaacttaaagtggctttcaagggtcttgtttgtcacattagcccctaatcccttcctatgtgtggttctgcattgcagaaactggaggttgcttggagaaggaatgttctgggcagagggtctggtacaaatacgttcttctctctcctatttctgcttctgaaacatcttctagggatcttttgaagccagaagttcaagaccagcctgggcaagaaaaggctgccgcctctacataaaataattaaaaaattatcctggcacagtagcatgtgcctgtagtcccagctactcaggaggctgaggatcacttgagcccaggagttcaaggctgcagtgagctaggattgaccactgtgctcgctctagcctgggttacagagaca

SEQ ID NO: 54674 - DNA, 410 bp, Homo sapiens
taaaggctaaacttaaagtggctttcaagggtcttgtttgtcacattagcccctaatcccttcctatgtgtggttctgcattgcagaaactggaggttgcttggagaaggaatgttctgggcagagggtctggtacaaatacgttcttctctctcctatttctgcttctgaaacatcttctagggatcttttgaagccagaagttcaagaccagcctgggcaagaaaaggctgccgcctctacataaaataattaaaaaattatcctggcacagtagcatgtgcctgtagtcccagctactcaggaggctgaggatcacttgagcccaggagttcaaggctgcagtgagctaggattgaccactgtgctcgctctagcctgggttacagagacaggtgtctaaaaaataa

SEQ ID NO: 54675 - DNA, 397 bp, Homo sapiens
tccctaagctcttaccctagtggctaatcaaaaaagcctgtttttgataaagctttggtgttttcttcatctgtgtctgaatttcattacagcagcataaagcatcatttaatgtatcatccctgatgaactgctgggagcttccctgatagtaagtgaaaggggtagagggccccagaagaggaaacagctaaggaaatagataatccttttggggatgcagcttctagatcatctgtcttccgtgcaggcttgtctttgattatttcactatggacagcgttttcctccgaccaccctcatacagcaatcaccctgacctttctaaacagcaaattcaagcatgttctggtgaaaacttgtaatgcttcccattgtcctcaggataaaggctaaa

SEQ ID NO: 54676 - DNA, 207 bp, Homo sapiens
gtactcctttcgtatttggctttcttttagtgttgctattctagtgtgtgtttctggtttttatcttcctaccatttatcatttgtacttgtaatttcttagaactcttttgtgttcctccagtttcctggaaaaaccttcgggtcttgcgtcatggcccgagcatcttctgtgtttggatattattaatagccttgttttgcttat

SEQ ID NO: 54677 - DNA, 341 bp, Homo sapiens
ttctgtttcatctttgtactgctttatcacatagttgtggatagacagttcgcctctttggtagaacatctgaagcctttactatgggaactgctcagtttgggaatggcctttgtgatgtagcttccaggtaatttccggagtagggggctgctgggcaggatcccttctgcctggatatcatgtatatttgtgtttcttaccttatggagtgggggttggggaagagtggctgggaaacagtgcataaccctggctccagaaggctggctagggtttgttttccttcttcattcctgccagccctgttagctaggggctgggttgtctgtccaccctta

SEQ ID NO: 54678 - DNA, 446 bp, Homo sapiens
  misc_feature (261)..(261): n is a, c, g, or t
  misc_feature (352)..(352): n is a, c, g, or t
  misc_feature (407)..(407): n is a, c, g, or t
aatttatacctttcatctaactgtatgttcgtacccattaactcaactctcttcatctgtggttccgctcacccagacctttcaatccactagttcctgtcattctactctctgcctttaggaggtgaatttccacagctcccatgagtgaagacgtgcagtttctttctgttcctggtggtttcacctgacacggtcacctcccattccagccacgttgttacaaatgacaggctctcaaaaaaaaaaagggggagggtngcgcaaggagaggacacctctctcctggggcctgtcgccatctttccctcatcaatagctaaaaatgggcaaagaaggaaagagccagggnccccgtggccatcaaatccttccggccttgtgcttgccctgttttcgggcactgnttgcctttagggagattcagggagtgtttcctaggccat

SEQ ID NO: 54679 - DNA, 297 bp, Homo sapiens
actgtcacagcttcctggtacccttgcctttgcctgtcaggtagcacttcggtttggacctcactttttcaggatttgttggaaacaagatcccttatcttctctaggtcagatttggggtgaacttggctgacagtattccagggcaggcagaggtcaggctggctggtgacctgctgcctccttcccatcggcagctagttctagggccatccacagggatccccagccctccatagtaccagtgagcctcactggcatgtgccagggccaagagggccttcagcgtcgcctcca

SEQ ID NO: 54680 - DNA, 309 bp, Homo sapiens
ttcactagagtgtctgcacaggaaggatagggcagctcaggctgctgatctgggtgagtgggtgctccaaatgcctggagatctccctgagtgttgagctgagagggccccactgcaccatgatctcaggagaacagtctagcataccaagcaataactcactcagaccagtccacaggtcaccaagctgaccctggttgcatcttgttgcctaggagaaaccacagctgtagcagtccctttcccaccccagtcctgtgacagggaagagcacattgccagcacctactgcaaggtgctttctacaat

SEQ ID NO: 54681 - DNA, 2569 bp, Homo sapiens
cgccaggaacagcttgaggtacctgagccctgccagctccagcagcacccgagagggtcaggagaaaagcggaggaagctgggtaggccctgaggggcctcggtaagccatcatgaccacccggcaagccacgaaggatcccctcctccggggtgtatctcctacccctagcaagattccggtacgctctcagaaacgcacgcctttccccactgttacatcgtgcgccgtggaccaggagaaccaagatccaaggagatgggtgcagaaaccaccgctcaatattcaacgccccctcgttgattcagcaggccccaggccgaaagccaggcaccaggcagagacatcacaaagattggtggggatcagtcagcctcggaaccccttggaagagctcaggcctagccctaggggtcaaaatgtggggcctgggccccctgcccagacagaggctccagggaccatagagtttgtggctgaccctgcagccctggccaccatcctgtcaggtgagggtgtgaagagctgtcacctggggcgccagcctagtctggctaaaagagtactggttcgaggaagtcagggaggcaccacccagagggtccagggtgttcgggcctctgcatatttggcccccagaacccccacccaccgactggaccctgccagggcttcctgcttctctaggctggagggaccaggacctcgaggccggacattgtgcccccagaggctacaggctctgatttcaccttcaggaccttcctttcacccttccactcgccccagtttccaggagctaagaagggagacagctggcagcagccggacttcagtgagccaggcctcaggattgctcctggagaccccagtccagcctgctttctctcttcctaaaggagaacgcgaggttgtcactcactcagatgaaggaggtgtggcctctcttggtctggcccagcgagtaccattaagagaaaaccgagaaatgtcacataccagggacagccatgactcccacctgatgccctcccctgcccctgtggcccagcccttgcctggccatgtggtgccatgtccatcaccctttggacgggctcagcgtgtaccctccccaggccctccaactctgacctcatattcagtgttgcggcgtctcaccgttcaacctaaaacccggttcacacccatgccatcaacccccagagttcagcaggcccagtggctgcgtggtgtctcccctcagtcctgctctgaagatcctgccctgccctgggagcaggttgccgtccggttgtttgaccaggagagttgtataaggtcactggagggttctgggaaaccaccggtggccactccttctggaccccactctaacagaacccccagcctccaggaggtgaagattcaacgcatcggtatcctgcaacagctgttgagacaggaagtagaggggctggtagggggccagtgtgtccctcttaatggaggctcttctctggatatggttgaacttcagcccctgctgactgagatttctagaactctgaatgccacagagcataactctgggacttcccaccttcctggactgttaaaacactcagggctgccaaagccctgtcttccagaggagtgcggggaaccacagccctgccctccggcagagcctgggcccccagaggccttctgtaggagtgagcctgagataccagagccctccctccaggaacagcttgaagtaccagagccctaccctccagcagaacccaggcccctagagtcctgctgtaggagtgagcctgagataccggagtcctctcgccaggaacagcttgaggtacctgagccctgccctccagcagaacccaggcccctagagtcctactgtaggattgagcctgagataccggagtcctctcgccaggaacagcttgaggtacctgagccctgccctccagcagaacccgggccccttcagcccagcacccaggggcagtctggacccccagggccctgccctagggtagagctgggggcatcagagccctgcaccctggaacatagaagtctagagtccagtctaccaccctgctgcagtcagtgggctccagcaaccaccagcctgatcttctcttcccaacacccgctttgtgccagcccccctatctgctcactccagtctttgagacccccagcaggccaggcaggcctcagcaatctggcccctcgaaccctagccctgagggagcgcctcaaatcgtgtttaaccgccatccactgcttccacgaggctcgtctggacgatgagtgtgccttttacaccagccgagcccctccctcaggccccacccgggtctgcaccaaccctgtggctacattactcgaatggcaggatgccctgtgtttcattccagttggttctgctgccccccagggctctccatgatgagacaaccactcctgccctgccgtacttcttccttttagcccttatttattgtcggtctgcccatgggactgggagccgcccacttttgtcctcaataaagtttctaaagtaaaacac

SEQ ID NO: 54682 - DNA, 817 bp, Homo sapiens
taggctaggtagaggccgcgtgtgtaatcggccgagggagctccagcagcacccgagagggtcaggagaaaagcggaggaagctgggtaggccctgaggggcctcggtaagccatcatgaccacccggcaagccacgaaggatcccctcctccggggtgtatctcctacccctagcaagattccggtacgctctcagaaacgcacgcctttccccactgttacatcgtgcgccgtggaccaggagaaccaagatccaaggagatgggtgcagaaaccaccgctcaatattcaacgccccctcgttgattcagcaggccccaggccgaaagccaggcaccaggcagagacatcacaaagattggtggggatcagtcagcctcggaaccccttggaagagctcaggcctagccctaggggtcaaaatgtggggcctgggccccctgcccagacagaggctccagggaccatagagtttgtggctgaccctgcagccctggccaccatcctgtcaggtgagggtgtgaagagctgtcacctggggcgccagcctagtctggctaaaagagtactggttcgaggaagtcagggaggcaccacccagagggtccagggtgttcgggcctctgcatatttggcccccagaacccccacccaccgactggaccctgccagggcttcctgcttctctaggctggagggaccaggacctcgaggccggacattgtgcccccagaggctacaggctctgaattcacattcaggacttcttttcacctccatcgccaagtcaaggagcaaagggaaagtgagaacgat

SEQ ID NO: 54683 - DNA, 2760 bp, Homo sapiens
cccgttaggggttaccccttccatcttaagcaggatattctaggatctctcagtctcacagccttgcccaccaataaccagcagaaagcggttcgacaattggtccttcttttggcccctcctgcgatgcccgcggattggacggctgagtctggctacgcgggcctccgcgggagcgcgatggggccaatcaagagcttggcgtattttacaaactgagaaagtagctccagcagcacccgagagggtcaggagaaaagcggaggaagctgggtaggccctgaggggcctcggtaagccatcatgaccacccggcaagccacgaaggatcccctcctccggggtgtatctcctacccctagcaagattccggtacgctctcagaaacgcacgcctttccccactgttacatcgtgcgccgtggaccaggagaaccaagatccaaggagatgggtgcagaaaccaccgctcaatattcaacgccccctcgttgattcagcaggccccaggccgaaagccaggcaccaggcagagacatcacaaagattggtggggatcagtcagcctcggaaccccttggaagagctcaggcctagccctaggggtcaaaatgtggggcctgggccccctgcccagacagaggctccagggaccatagagtttgtggctgaccctgcagccctggccaccatcctgtcaggtgagggtgtgaagagctgtcacctggggcgccagcctagtctggctaaaagagtactggttcgaggaagtcagggaggcaccacccagagggtccagggtgttcgggcctctgcatatttggcccccagaacccccacccaccgactggaccctgccagggcttcctgcttctctaggctggagggaccaggacctcgaggccggacattgtgcccccagaggctacaggctctgatttcaccttcaggaccttcctttcacccttccactcgccccagtttccaggagctaagaagggagacagctggcagcagccggacttcagtgagccaggcctcaggattgctcctggagaccccagtccagcctgctttctctcttcctaaaggagaacgcgaggttgtcactcactcagatgaaggaggtgtggcctctcttggtctggcccagcgagtaccattaagagaaaaccgagaaatgtcacataccagggacagccatgactcccacctgatgccctcccctgcccctgtggcccagcccttgcctggccatgtggtgccatgtccatcaccctttggacgggctcagcgtgtaccctccccaggccctccaactctgacctcatattcagtgttgcggcgtctcaccgttcaacctaaaacccggttcacacccatgccatcaacccccagagttcagcaggcccagtggctgcgtggtgtctcccctcagtcctgctctgaagatcctgccctgccctgggagcaggttgccgtccggttgtttgaccaggagagttgtataaggtcactggagggttctgggaaaccaccggtggccactccttctggaccccactctaacagaacccccagcctccaggaggtgaagattcaacgcatcggtatcctgcaacagctgttgagacaggaagtagaggggctggtagggggccagtgtgtccctcttaatggaggctcttctctggatatggttgaacttcagcccctgctgactgagatttctagaactctgaatgccacagagcataactctgggacttcccaccttcctggactgttaaaacactcagggctgccaaagccctgtcttccagaggagtgcggggaaccacagccctgccctccggcagagcctgggcccccagaggccttctgtaggagtgagcctgagataccagagccctccctccaggaacagcttgaagtaccagagccctaccctccagcagaacccaggcccctagagtcctgctgtaggagtgagcctgagataccggagtcctctcgccaggaacagcttgaggtacctgagccctgccctccagcagaacccaggcccctagagtcctactgtaggattgagcctgagataccggagtcctctcgccaggaacagcttgaggtacctgagccctgccctccagcagaacccgggccccttcagcccagcacccaggggcagtctggacccccagggccctgccctagggtagagctgggggcatcagagccctgcaccctggaacatagaagtctagagtccagtctaccaccctgctgcagtcagtgggctccagcaaccaccagcctgatcttctcttcccaacacccgctttgtgccagcccccctatctgctcactccagtctttgagacccccagcaggccaggcaggcctcagcaatctggcccctcgaaccctagccctgagggagcgcctcaaatcgtgtttaaccgccatccactgcttccacgaggctcgtctggacgatgagtgtgccttttacaccagccgagcccctccctcaggccccacccgggtctgcaccaaccctgtggctacattactcgaatggcaggatgccctgtgtttcattccagttggttctgctgccccccagggctctccatgatgagacaaccactcctgccctgccgtacttcttccttttagcccttatttattgtcggtctgcccatgggactgggagccgcccacttttgtcctcaataaagtttctaaagtaaaacac

SEQ ID NO: 54684 - DNA, 2673 bp, Homo sapiens
cccgttaggggttaccccttccatcttaagcaggatattctaggatctctcagtctcacagccttgcccaccaataaccagcagaaagcggttcgacaattggtccttcttttggcccctcctgcgatgcccgcggattggacggctgagtctggctacgcgggcctccgcgggagcgcgatggggccaatcaagagcttggcgtattttacaaactgagaaagtagctccagcagcacccgagagggtcaggagaaaagcggaggaagctgggtaggccctgaggggcctcggtaagccatcatgaccacccggcaagccacgaaggatcccctcctccggggtgtatctcctacccctagcaagattccggtacgctctcagaaacgcacgcctttccccactgttacatcgtgcgccgtggaccaggagaaccaagatccaaggagatgggtgcagaaaccaccgctcaatattcaacgccccctcgttgattcagcaggccccaggccgaaagccaggcaccaggcagagacatcacaaagattggtggggatcagtcagcctcggaaccccttggaagagctcaggcctagccctaggggtcaaaatgtggggcctgggccccctgcccagacagaggctccagggaccatagagtttgtggctgaccctgcagccctggccaccatcctgtcaggtgagggtgtgaagagctgtcacctggggcgccagcctagtctggctaaaagagtactggttcgaggaagtcagggaggcaccacccagagggtccagggtgttcgggcctctgcatatttggcccccagaacccccacccaccgactggaccctgccagggcttcctgcttctctaggctggagggaccaggacctcgaggccggacattgtgcccccagaggctacaggctctgatttcaccttcaggaccttcctttcacccttccactcgccccagtttccaggagctaagaagggagacagctggcagcagccggacttcagtgagccaggcctcaggattgctcctggagaccccagtccagcctgctttctctcttcctaaaggagaacgcgaggttgtcactcactcagatgaaggaggtgtggcctctcttggtctggcccagcgagtaccattaagagaaaaccgagaaatgtcacataccagggacagccatgactcccacctgatgccctcccctgcccctgtggcccagcccttgcctggccatgtggtgccatgtccatcaccctttggacgggctcagcgtgtaccctccccaggccctccaactctgacctcatattcagtgttgcggcgtctcaccgttcaacctaaaacccggttcacacccatgccatcaacccccagagttcagcaggcccagtggctgcgtggtgtctcccctcagtcctgctctgaagatcctgccctgccctgggagcaggttgccgtccggttgtttgaccaggagagttgtataaggtcactggagggttctgggaaaccaccggtggccactccttctggaccccactctaacagaacccccagcctccaggaggtgaagattcaacgcatcggtatcctgcaacagctgttgagacaggaagtagaggggctggtagggggccagtgtgtccctcttaatggaggctcttctctggatatggttgaacttcagcccctgctgactgagatttctagaactctgaatgccacagagcataactctgggacttcccaccttcctggactgttaaaacactcagggctgccaaagccctgtcttccagaggagtgcggggaaccacagccctgccctccggcagagcctgggcccccagaggccttctgtaggagtgagcctgagataccagagccctccctccaggaacagcttgaagtaccagagccctaccctccagcagaacccaggcccctagagtcctgctgtaggagtgagcctgagataccggagtcctctcgccaggaacagcttgaggaacagcttgaggtacctgagccctgccctccagcagaacccgggccccttcagcccagcacccaggggcagtctggacccccagggccctgccctagggtagagctgggggcatcagagccctgcaccctggaacatagaagtctagagtccagtctaccaccctgctgcagtcagtgggctccagcaaccaccagcctgatcttctcttcccaacacccgctttgtgccagcccccctatctgctcactccagtctttgagacccccagcaggccaggcaggcctcagcaatctggcccctcgaaccctagccctgagggagcgcctcaaatcgtgtttaaccgccatccactgcttccacgaggctcgtctggacgatgagtgtgccttttacaccagccgagcccctccctcaggccccacccgggtctgcaccaaccctgtggctacattactcgaatggcaggatgccctgtgtttcattccagttggttctgctgccccccagggctctccatgatgagacaaccactcctgccctgccgtacttcttccttttagcccttatttattgtcggtctgcccatgggactgggagccgcccacttttgtcctcaataaagtttctaaagtaaaacac

SEQ ID NO: 54685 - DNA, 3030 bp, Homo sapiens
cccgttaggggttaccccttccatcttaagcaggatattctaggatctctcagtctcacagccttgcccaccaataaccagcagaaagcggttcgacaattggtccttcttttggcccctcctgcgatgcccgcggattggacggctgagtctggctacgcgggcctccgcgggagcgcgatggggccaatcaagagcttggcgtattttacaaactgagaaagtagctccagcagcacccgagagggtcaggagaaaagcggaggaagctgggtaggccctgaggggcctcggtaagccatcatgaccacccggcaagccacgaaggatcccctcctccggggtgtatctcctacccctagcaagattccggtacgctctcagaaacgcacgcctttccccactgttacatcgtgcgccgtggaccaggagaaccaagatccaaggagatgggtgcagaaaccaccgctcaatattcaacgccccctcgttgattcagcaggccccaggccgaaagccaggcaccaggcagagacatcacaaagattggtggggatcagtcagcctcggaaccccttggaagagctcaggcctagccctaggggtcaaaatgtggggcctgggccccctgcccagacagaggctccagggaccatagagtttgtggctgaccctgcagccctggccaccatcctgtcaggtgagggtgtgaagagctgtcacctggggcgccagcctagtctggctaaaagagtactggttcgaggaagtcagggaggcaccacccagagggtccagggtgttcgggcctctgcatatttggcccccagaacccccacccaccgactggaccctgccagggcttcctgcttctctaggctggagggaccaggacctcgaggccggacattgtgcccccagaggctacaggctctgatttcaccttcaggaccttcctttcacccttccactcgccccagtttccaggagctaagaagggagacagctggcagcagccggacttcagtgagccaggcctcaggattgctcctggagaccccagtccagcctgctttctctcttcctaaaggagaacgcgaggttgtcactcactcagatgaaggaggtgtggcctctcttggtctggcccagcgagtaccattaagagaaaaccgagaaatgtcacataccagggacagccatgactcccacctgatgccctcccctgcccctgtggcccagcccttgcctggccatgtggtgccatgtccatcaccctttggacgggctcagcgtgtaccctccccaggccctccaactctgacctcatattcagtgttgcggcgtctcaccgttcaacctaaaacccggttcacacccatgccatcaacccccagagttcagcaggcccagtggctgcgtggtgtctcccctcagtcctgctctgaagatcctgccctgccctgggagcaggttgccgtccggttgtttgaccaggagagttgtataaggtcactggagggttctgggaaaccaccggtggccactccttctggaccccactctaacagaacccccagcctccaggaggtgaagattcaacgcatcggtatcctgcaacagctgttgagacaggaagtagaggggctggtagggggccagtgtgtccctcttaatggaggctcttctctggatatggttgaacttcagcccctgctgactgagatttctagaactctgaatgccacagagcataactctgggacttcccaccttcctggactgttaaaacactcagggctgccaaagccctgtcttccagaggagtgcggggaaccacagccctgccctccggcagagcctgggcccccagaggccttctgtaggagtgagcctgagataccagagccctccctccaggaacagcttgaagtaccagagccctaccctccagcagaacccaggcccctagagtcctgctgtaggagtgagcctgagataccggagtcctctcgccaggaacagcttgaggtacctgagccctgccctccagcagaacccaggcccctagagtcctactgtaggattgagcctgagataccggagtcctctcgccaggaacagcttgaggtacctgagccctgccctccagcagaacccgggccccttcagcccagcacccaggggcagtctggacccccagggccctgccctagggtagagctgggggcatcagagccctgcaccctggaacatagaagtctagagtccagtctaccaccctgctgcagtcagtgggctccagcaaccaccagcctgatcttctcttcccaacacccgctttgtgccagcccccctatctgctcactccagtctttgagacccccagcaggccaggcaggtaaggagttggctgggaaggagtgtgaacacaagaggtcctcacctcactgtgagctgcacacctgccctgcccctaccccaggcaatctcatgcttccacaccttccaccctggcccagcctggctctccctcaggaagaggggaggggctgcacttccagccctgtgctcctaattggcttggccgttggtgggggaggaggagaggacagtacatggtggaagtataggaccccagacctccctctaaattttccatgcccctcaggcctcagcaatctggcccctcgaaccctagccctgagggagcgcctcaaatcgtgtttaaccgccatccactgcttccacgaggctcgtctggacgatgagtgtgccttttacaccagccgagcccctccctcaggccccacccgggtctgcaccaaccctgtggctacattactcgaatggcaggatgccctgtgtttcattccagttggttctgctgccccccagggctctccatgatgagacaaccactcctgccctgccgtacttcttccttttagcccttatttattgtcggtctgcccatgggactgggagccgcccacttttgtcctcaataaagtttctaaagtaaaacac

SEQ ID NO: 54686 - DNA, 3195 bp, Homo sapiens
cccgttaggggttaccccttccatcttaagcaggatattctaggatctctcagtctcacagccttgcccaccaataaccagcagaaagcggttcgacaattggtccttcttttggcccctcctgcgatgcccgcggattggacggctgagtctggctacgcgggcctccgcgggagcgcgatggggccaatcaagagcttggcgtattttacaaactgagaaagtagctccagcagcacccgagagggtcaggagaaaagcggaggaagctgggtaggccctgaggggcctcggtaagccatcatgaccacccggcaagccacgaaggatcccctcctccggggtgtatctcctacccctagcaagattccggtacgctctcagaaacgcacgcctttccccactgttacatcgtgcgccgtggaccaggagaaccaagatccaaggagatgggtgcagaaaccaccgctcaatattcaacgccccctcgttgattcagcaggccccaggccgaaagccaggcaccaggcagagacatcacaaagattggtggggatcagtcagcctcggaaccccttggaagagctcaggcctagccctaggggtcaaaatgtggggcctgggccccctgcccagacagaggctccagggaccatagagtttgtggctgaccctgcagccctggccaccatcctgtcaggtgagggtgtgaagagctgtcacctggggcgccagcctagtctggctaaaagagtactggttcgaggaagtcagggaggcaccacccagagggtccagggtgttcgggcctctgcatatttggcccccagaacccccacccaccgactggaccctgccagggcttcctgcttctctaggctggagggaccaggacctcgaggccggacattgtgcccccagaggctacaggctctgatttcaccttcaggaccttcctttcacccttccactcgccccagtttccaggagctaagaagggagacagctggcagcagccggacttcagtgagccaggcctcaggattgctcctggagaccccagtccagcctgctttctctcttcctaaaggagaacgcgaggttgtcactcactcagatgaaggaggtgtggcctctcttggtctggcccagcgagtaccattaagagaaaaccgagaaatgtcacataccagggacagccatgactcccacctgatgccctcccctgcccctgtggcccagcccttgcctggccatgtggtgccatgtccatcaccctttggacgggctcagcgtgtaccctccccaggccctccaactctgacctcatattcagtgttgcggcgtctcaccgttcaacctaaaacccggttcacacccatgccatcaacccccagagttcagcaggcccagtggctgcgtggtgtctcccctcagtcctgctctgaagatcctgccctgccctgggagcaggttgccgtccggttgtttgaccaggagagttgtataaggtcactggagggttctgggaaaccaccggtggccactccttctggaccccactctaacagaacccccagcctccaggaggtgaagattcaacgcatcggtatcctgcaacagctgttgagacaggaagtagaggggctggtagggggccagtgtgtccctcttaatggaggctcttctctggatatggttgaacttcagcccctgctgactgagatttctagaactctgaatgccacagagcataactctgggacttcccaccttcctggactgttaaaacactcagggctgccaaagccctgtcttccagaggagtgcggggaaccacagccctgccctccggcagagcctgggcccccagaggccttctgtaggagtgagcctgagataccagagccctccctccaggaacagcttgaagtaccagagccctaccctccagcagaacccaggcccctagagtcctgctgtaggagtgagcctgagataccggagtcctctcgccaggaacagcttgaggtacctgagccctgccctccagcagaacccaggcccctagagtcctactgtaggattgagcctgagataccggagtcctctcgccaggaacagcttgaggtacctgagccctgccctccagcagaacccgggccccttcagcccagcacccaggggcagtctggacccccagggccctgccctagggtagagctgggggcatcagagccctgcaccctggaacatagaagtctagagtccagtctaccaccctgctgcagtcagtgggctccagcaaccaccagcctgatcttctcttcccaacacccgctttgtgccagcccccctatctgctcactccagtctttgagacccccagcaggccaggcaggtaaggagttggctgggaaggagtgtgaacacaagaggtcctcacctcactgtgagctgcacacctgccctgcccctaccccaggcaatctcatgcttccacaccttccaccctggcccagcctggctctccctcaggaagaggggaggggctgcacttccagccctgtgctcctaattggcttggccgttggtgggggaggaggagaggacagtacatggtggaagtataggaccccagacctccctctaaattttccatgcccctcaggcctcagcaatctggcccctcgaaccctagccctgagggagcgcctcaaatcgtgtttaaccgccatccactgcttccacgaggctcgtctggacgatgagtgtgccttttacaccagccgagcccctccctcaggccccacccgggtctgcaccaaccctgtggctacattactcgaatggcaggatgccctggtgagactccaacccacagcccagctgtggctgcacagtgagcctgatgggaggtggggaacagggacagggggccacctgggcttcttcacagagaggtcagcaggaaggcttggctacagtgcaaggttggctgagctgtgacaaggtcttctctgtctccagtgtttcattccagttggttctgctgccccccagggctctccatgatgagacaaccactcctgccctgccgtacttcttccttttagcccttatttattgtcggtctgcccatgggactgggagccgcccacttttgtcctcaataaagtttctaaagtaaaacac

SEQ ID NO: 54687 - DNA, 2409 bp, Homo sapiens
cccgttaggggttaccccttccatcttaagcaggatattctaggatctctcagtctcacagccttgcccaccaataaccagcagaaagcggttcgacaattggtccttcttttggcccctcctgcgatgcccgcggattggacggctgagtctggctacgcgggcctccgcgggagcgcgatggggccaatcaagagcttggcgtattttacaaactgagaaagtagctccagcagcacccgagagggtcaggagaaaagcggaggaagctgggtaggccctgaggggcctcggtaagccatcatgaccacccggcaagccacgaaggatcccctcctccggggtgtatctcctacccctagcaagattccggtacgctctcagaaacgcacgcctttccccactgttacatcgtgcgccgtggaccaggagaaccaagatccaaggggtgttcgggcctctgcatatttggcccccagaacccccacccaccgactggaccctgccagggcttcctgcttctctaggctggagggaccaggacctcgaggccggacattgtgcccccagaggctacaggctctgatttcaccttcaggaccttcctttcacccttccactcgccccagtttccaggagctaagaagggagacagctggcagcagccggacttcagtgagccaggcctcaggattgctcctggagaccccagtccagcctgctttctctcttcctaaaggagaacgcgaggttgtcactcactcagatgaaggaggtgtggcctctcttggtctggcccagcgagtaccattaagagaaaaccgagaaatgtcacataccagggacagccatgactcccacctgatgccctcccctgcccctgtggcccagcccttgcctggccatgtggtgccatgtccatcaccctttggacgggctcagcgtgtaccctccccaggccctccaactctgacctcatattcagtgttgcggcgtctcaccgttcaacctaaaacccggttcacacccatgccatcaacccccagagttcagcaggcccagtggctgcgtggtgtctcccctcagtcctgctctgaagatcctgccctgccctgggagcaggttgccgtccggttgtttgaccaggagagttgtataaggtcactggagggttctgggaaaccaccggtggccactccttctggaccccactctaacagaacccccagcctccaggaggtgaagattcaacgcatcggtatcctgcaacagctgttgagacaggaagtagaggggctggtagggggccagtgtgtccctcttaatggaggctcttctctggatatggttgaacttcagcccctgctgactgagatttctagaactctgaatgccacagagcataactctgggacttcccaccttcctggactgttaaaacactcagggctgccaaagccctgtcttccagaggagtgcggggaaccacagccctgccctccggcagagcctgggcccccagaggccttctgtaggagtgagcctgagataccagagccctccctccaggaacagcttgaagtaccagagccctaccctccagcagaacccaggcccctagagtcctgctgtaggagtgagcctgagataccggagtcctctcgccaggaacagcttgaggtacctgagccctgccctccagcagaacccaggcccctagagtcctactgtaggattgagcctgagataccggagtcctctcgccaggaacagcttgaggtacctgagccctgccctccagcagaacccgggccccttcagcccagcacccaggggcagtctggacccccagggccctgccctagggtagagctgggggcatcagagccctgcaccctggaacatagaagtctagagtccagtctaccaccctgctgcagtcagtgggctccagcaaccaccagcctgatcttctcttcccaacacccgctttgtgccagcccccctatctgctcactccagtctttgagacccccagcaggccaggcaggcctcagcaatctggcccctcgaaccctagccctgagggagcgcctcaaatcgtgtttaaccgccatccactgcttccacgaggctcgtctggacgatgagtgtgccttttacaccagccgagcccctccctcaggccccacccgggtctgcaccaaccctgtggctacattactcgaatggcaggatgccctgtgtttcattccagttggttctgctgccccccagggctctccatgatgagacaaccactcctgccctgccgtacttcttccttttagcccttatttattgtcggtctgcccatgggactgggagccgcccacttttgtcctcaataaagtttctaaagtaaaacac

SEQ ID NO: 54688 - DNA, 1417 bp, Homo sapiens
gagaagattagcatggcccctgcgcaaggatgacacgcaaattcgtgaagcgttccatattttcaggctggtctttctcctgccccagcctggcttgcttgtgtgccttgttccttggtgacaggagcaggttgccgtccggttgtttgaccaggagagttgtataaggtcactggagggttctgggaaaccaccggtggccactccttctggaccccactctaacagaacccccagcctccaggaggtgaagattcaacgcatcggtatcctgcaacagctgttgagacaggaagtagaggggctggtagggggccagtgtgtccctcttaatggaggctcttctctggatatggttgaacttcagcccctgctgactgagatttctagaactctgaatgccacagagcataactctgggacttcccaccttcctggactgttaaaacactcagggctgccaaagccctgtcttccagaggagtgcggggaaccacagccctgccctccggcagagcctgggcccccagaggccttctgtaggagtgagcctgagataccagagccctccctccaggaacagcttgaagtaccagagccctaccctccagcagaacccaggcccctagagtcctgctgtaggagtgagcctgagataccggagtcctctcgccaggaacagcttgaggtacctgagccctgccctccagcagaacccaggcccctagagtcctactgtaggattgagcctgagataccggagtcctctcgccaggaacagcttgaggtacctgagccctgccctccagcagaacccgggccccttcagcccagcacccaggggcagtctggacccccagggccctgccctagggtagagctgggggcatcagagccctgcaccctggaacatagaagtctagagtccagtctaccaccctgctgcagtcagtgggctccagcaaccaccagcctgatcttctcttcccaacacccgctttgtgccagcccccctatctgctcactccagtctttgagacccccagcaggccaggcaggcctcagcaatctggcccctcgaaccctagccctgagggagcgcctcaaatcgtgtttaaccgccatccactgcttccacgaggctcgtctggacgatgagtgtgccttttacaccagccgagcccctccctcaggccccacccgggtctgcaccaaccctgtggctacattactcgaatggcaggatgccctgtgtttcattccagttggttctgctgccccccagggctctccatgatgagacaaccactcctgccctgccgtacttcttccttttagcccttatttattgtcggtctgcccatgggactgggagccgcccacttttgtcctcaataaagtttctaaagtaaaacac

SEQ ID NO: 54689 - DNA, 1563 bp, Homo sapiens
ctgtctccactaaaattttaaaaattagaaagtgctctctggaaaagctgcctaactctcactgcttctctgctgcccctcctaatgtacatctagggcctctcagttaggggcttcaatccattcctcatgagggtgggactcaggctggtctttctcctgccccagcctggcttgcttgtgtgccttgttccttggtgacaggagcaggttgccgtccggttgtttgaccaggagagttgtataaggtcactggagggttctgggaaaccaccggtggccactccttctggaccccactctaacagaacccccagcctccaggaggtgaagattcaagtgagtctgtgtggccaacagctttgatgtctattgaacagtgactgggctgaggaagagggaaaagagatgggggatcaggaataggacagtgtgggtagactactgaacgcacatcttgatgtcacactggggtgctctctcccaccacagcgcatcggtatcctgcaacagctgttgagacaggaagtagaggggctggtagggggccagtgtgtccctcttaatggaggctcttctctggatatggttgaacttcagcccctgctgactgagatttctagaactctgaatgccacagagcataactctgggacttcccaccttcctggactgttaaaacactcagggctgccaaagccctgtcttccagaggagtgcggggaaccacagccctgccctccggcagagcctgggcccccagaggccttctgtaggagtgagcctgagataccagagccctccctccaggaacagcttgaagtaccagagccctaccctccagcagaacccaggcccctagagtcctgctgtaggagtgagcctgagataccggagtcctctcgccaggaacagcttgaggaacagcttgaggtacctgagccctgccctccagcagaacccgggccccttcagcccagcacccaggggcagtctggacccccagggccctgccctagggtagagctgggggcatcagagccctgcaccctggaacatagaagtctagagtccagtctaccaccctgctgcagtcagtgggctccagcaaccaccagcctgatcttctcttcccaacacccgctttgtgccagcccccctatctgctcactccagtctttgagacccccagcaggccaggcaggcctcagcaatctggcccctcgaaccctagccctgagggagcgcctcaaatcgtgtttaaccgccatccactgcttccacgaggctcgtctggacgatgagtgtgccttttacaccagccgagcccctccctcaggccccacccgggtctgcaccaaccctgtggctacattactcgaatggcaggatgccctgtgtttcattccagttggttctgctgccccccagggctctccatgatgagacaaccactcctgccctgccgtacttcttccttttagcccttatttattgtcggtctgcccatgggactgggagccgcccacttttgtcctcaataaagtttctaaagtaaaacac

SEQ ID NO: 54690 - DNA, 1095 bp, Homo sapiens
cccgttaggggttaccccttccatcttaagcaggatattctaggatctctcagtctcacagccttgcccaccaataaccagcagaaagcggttcgacaattggtccttcttttggcccctcctgcgatgcccgcggattggacggctgagtctggctacgcgggcctccgcgggagcgcgatggggccaatcaagagcttggcgtattttacaaactgagaaagtagctccagcagcacccgagagggtcaggagaaaagcggaggaagctgggtaggccctgaggggcctcggtaagccatcatgaccacccggcaagccacgaaggatcccctcctccggggtgtatctcctacccctagcaagattccggtacgctctcagaaacgcacgcctttccccactgttacatcgtgcgccgtggaccaggagaaccaagatccaaggagatgggtgcagaaaccaccgctcaatattcaacgccccctcgttgattcagcaggccccaggccgaaagccaggcaccaggcagagacatcacaaagattggtggggatcagtcagcctcggaaccccttggaagagctcaggcctagccctaggggtcaaaatgtggggcctgggccccctgcccagacagaggctccagggaccatagagtttgtggctgaccctgcagccctggccaccatcctgtcaggtgagggtgtgaagagctgtcacctggggcgccagcctagtctggctaaaagagtactggttcgaggaagtcagggaggcaccacccagagggtccagggtgttcgggcctctgcatatttggcccccagaacccccacccaccgactggaccctgccagggcttcctgcttctctaggctggagggaccaggacctcgaggccggacattgtgcccccagaggctacaggctctgatttcaccttcaggaccttcctttcacccttccactcgccccagtttccaggagctaagaagggagacagctggcagcagccgggacttacagttgaggccaggggcctcaagggaattttggcattcccccctgtgggggggaaacaaaggggcaaac

SEQ ID NO: 54691 - DNA, 928 bp, Homo sapiens
cccgttaggggttaccccttccatcttaagcaggatattctaggatctctcagtctcacagccttgcccaccaataaccagcagaaagcggttcgacaattggtccttcttttggcccctcctgcgatgcccgcggattggacggctgagtctggctacgcgggcctccgcgggagcgcgatggggccaatcaagagcttggcgtattttacaaactgagaaagtagctccagcagcacccgagagggtcaggagaaaagcggaggaagctgggtaggccctgaggggcctcggtaagccatcatgaccacccggcaagccacgaaggatcccctcctccggggtgtatctcctacccctagcaagattccggtacgctctcagaaacgcacgcctttccccactgttacatcgtgcgccgtggaccaggagaaccaagatccaaggagatgggtgcagaaaccaccgctcaatattcaacgccccctcgttgattcagcaggccccaggccgaaagccaggcaccaggcagagacatcacaaagattggtggggatcagtcagcctcggaaccccttggaagagctcaggcctagccctaggggtcaaaatgtggggcctgggccccctgcccagacagtcctggtcccagctcctggaaagctctttgctcttagaagatctccctttcctccagcaaaatgtcatctcgccaggtgccatggcttgtacctgtaatcacagctactcaggaggctgaagcaggaggatcactggaggccaggagttggagaccagcctggatgacagagggagatcccatctctttaaaaaataaataaataaataaataataaatatcacttcttctgaagccttttccagttccccatgtcacaatcagttgctctgtgttctcctaatactt

SEQ ID NO: 54692 - DNA, 1010 bp, Homo sapiens
cccgttaggggttaccccttccatcttaagcaggatattctaggatctctcagtctcacagccttgcccaccaataaccagcagaaagcggttcgacaattggtccttcttttggcccctcctgcgatgcccgcggattggacggctgagtctggctacgcgggcctccgcgggagcgcgatggggccaatcaagagcttggcgtattttacaaactgagaaagtagctccagcagcacccgagagggtcaggagaaaagcggaggaagctgggtaggccctgaggggcctcggtaagccatcatgaccacccggcaagccacgaaggatcccctcctccggggtgtatctcctacccctagcaagattccggtacgctctcagaaacgcacgcctttccccactgttacatcgtgcgccgtggaccaggagaaccaagatccaaggagatgggtgcagaaaccaccgctcaatattcaacgccccctcgttgattcagcaggccccaggccgaaagccaggcaccaggcagagacatcacaaagattggtggggatcagtcagcctcggaaccccttggaagagctcaggcctagccctaggggtcaaaatgtggggcctgggccccctgcccagacaggtgccatggcttgtacctgtaatcacagctactcaggaggctgaagcaggaggatcactggaggccaggagttggagaccagcctggatgacagagggagatcccatctctttaaaaaataaataaataaataaataataaaaaaaaaaaaaaaaaaaaaaaaatctcagaggggctttataggtaggggtgggggaaaaagggggcattggaattgggccattggggcataagctgggtttccgtgacccacgagttttcgtgggtaacaaggtgggtaaaaatcggccgggtctccccatattagggaagtctggattaaaattcgcgaataacccgggggtaaaccgtggttaatgacacggggaga

SEQ ID NO: 54693 - DNA, 716 bp, Homo sapiens
cgccaggaacagcttgaggtacctgagccctgccagctccagcagcacccgagagggtcaggagaaaagcggaggaagctgggtaggccctgaggggcctcggtaagccatcatgaccacccggcaagccacgaaggatcccctcctccggggtgtatctcctaccccctagggtagagctgggggcatcagagccctgcaccctggaacatagaagtctagagtccagtctaccaccctgctgcagtcagtgggctccagcaaccaccagcctgatcttctcttcccaacacccgctttgtgccagcccccctatctgctcactccagtctttgagacccccagcaggccaggcaggcctcagcaatctggcccctcgaaccctagccctgagggagcgcctcaaatcgtgtttaaccgccatccactgcttccacgaggctcgtctggacgatgagtgtgccttttacaccagccgagcccctccctcaggccccacccgggtctgcaccaaccctgtggctacattactcgaatggcaggatgccctgtgtttcattccagttggttctgctgccccccagggctctccatgatgagacaaccactcctgccctgccgtacttcttccttttagcccttatttattgtcggtctgcccatgggactgggagccgcccacttttgtcctcaataaagtttctaaagtaaaacac

SEQ ID NO: 54694 - DNA, 1045 bp, Homo sapiens
cccgttaggggttaccccttccatcttaagcaggatattctaggatctctcagtctcacagccttgcccaccaataaccagcagaaagcggttcgacaattggtccttcttttggcccctcctgcgatgcccgcggattggacggctgagtctggctacgcgggcctccgcgggagcgcgatggggccaatcaagagcttggcgtattttacaaactgagaaagtagctccagcagcacccgagagggtcaggagaaaagcggaggaagctgggtaggccctgaggggcctcggtaagccatcatgaccacccggcaagccacgaaggatcccctcctccggggtgtatctcctacccctagcaagattccggtacgctctcagaaacgcacgcctttccccactgttacatcgtgcgccgtggaccaggagaaccaagatccaaggagatgggtgcagaaaccaccgctcaatattcaacgccccctcgttgattcagcaggccccaggccgaaagccaggcaccaggcagagacatcacaaagattggtggggatcagtcagcctcggaaccccttggaagagctcaggcctagccctaggggtcaaaatgtggggcctgggccccctgcccagacaggtacctgttggagccatggtaacacggcctccatggctgagtaggggactaggaagggtaaaagtggggttttggggttttgcactcactcctgctgtctcctacttactgtgatagtcctggtcccagctcctggaaagctctttgctcttagaagatctccctttcctccagcaaaatgtcatctcgccaggtgccatggcttgtacctgtaatcacagctactcaggaggctgaagcaggaggatcactggaggccaggagttggagaccagcctggatgacagagggagatcccatctctttaaaaaataaataaataaataaataataaatatcacttcttctgaagccttttccagttccccatgtcacaatcagttgctctgtgttctcctaatactt

SEQ ID NO: 54695 - DNA, 871 bp, Homo sapiens
cccgttaggggttaccccttccatcttaagcaggatattctaggatctctcagtctcacagccttgcccaccaataaccagcagaaagcggttcgacaattggtccttcttttggcccctcctgcgatgcccgcggattggacggctgagtctggctacgcgggcctccgcgggagcgcgatggggccaatcaagagcttggcgtattttacaaactgagaaagtagctccagcagcacccgagagggtcaggagaaaagcggaggaagctgggtaggccctgaggggcctcggtaagccatcatgaccacccggcaagccacgaaggatcccctcctccggggtgtatctcctacccctagcaagattccggtacgctctcagaaacgcacgcctttccccactgttacatcgtgcgccgtggaccaggagaaccaagatccaaggagatgggtgcagaaaccaccgctcaatattcaacgccccctcgttgattcagcaggccccaggccgaaagccaggcaccaggcagagacatcacaaagattggtggggatcagtcagcctcggaaccccttggaagagctcaggcctagccctaggggtcaaaatgtggggcctgggccccctgcccagacagcaaaatgtcatctcgccaggtgccatggcttgtacctgtaatcacagctactcaggaggctgaagcaggaggatcactggaggccaggagttggagaccagcctggatgacagagggagatcccatctctttaaaaaataaataaataaataaataataaatatcacttcttctgaagccttttccagttccccatgtcacaatcagttgctctgtgttctcctaatactt

SEQ ID NO: 54696 - DNA, 412 bp, Homo sapiens
accttttgtttagatagtatgcgtacttggaactaagagcactggctttttttccccaaacaatgtcattataagctgatgtcatttataacaccagagcttataagtaggggttgagtttgcctttctcatcaattaaaagtgaattgcagctgggtgtcgtggctcacacctatagtaccaacactttgggaagccaaggcaggagggttgcttgaggccaggagttcgagaccagcctatgcaacacaatgagaccccatctctacaaaaaaattagatgagtatgatggcatgcgcctctgaagtgagaggatggcttgagcccaggagttagaggctgcagttaactatgatcccaccactgtactccagcctgggtgacagagcaagaacctgtctcttagaagaa

SEQ ID NO: 54697 - DNA, 400 bp, Homo sapiens
ggaccttgttttacattctggatttttctttttactttcctaatgatgtaatttaacttcttcctgtattttccatatttcctataaaatggtagttagatctaaaagcttgatttacttatttcagatttctagtcaagggtactcaatagattgtattttcttttgcctcacacggaggtgcataatgtctgcctggcctgtagtgatgctaaggttgatcattctgttcaggtggcatcagtctgtgatagcttcctgtaagaatcgttcattaacctttcatctaatggttccattcattcatgatctttaactgaatccctgttatttcattagggaatagcaaaataatgattttctaattctgttattcctttcacatttattaactgtaatt

SEQ ID NO: 54698 - DNA, 368 bp, Homo sapiens
aataaaaatggctgtggaacagagcactttggggcatgatagagaattcattttgttgaagtgggatttaggctttttccttttcctttcctttcacgtttgccttctgagctgccactaaattttagtgctttcttttaagcatggagtgtgtatctgtttgccaaaacaggaaactgaaatggtttcacatgcttcatcgactgtaaattccattctggaaatccccacagaaattaaaaccatgatcactgaccccataatttcccaaactttctagatagagctttacatagtctgatgttcttaaaggtgagaaaactgaattctggaatcttttataactgctttaatcctgggtgctataa

SEQ ID NO: 54699 - DNA, 459 bp, Homo sapiens
ggccgttgtccctgctttctctctgcccatccttctttcccagagtcattacaccaaggcacagactggttcctctgctctgagggtgggtccaggcagacatgtggactctggggaggtactgggggccggaaaatagcgggaattcttgcaacgtgtatatcatcctaaaagtgggggttgcctcaagacagcccccaggaactgataagaagggatgaactcccgtactctccagagtactgaagattctcccctccctggaaccagggatgtgaaactggaattctcagatgcctgaggagctcccagtctcaaaggactctggtgtctcacccatccaccagggcggaccttggagagggtgtcaggggtggcagtcttggaaatgtccaggactgggatggtgagaggcctttggaaacagaaatgatttctatttctgtaaacagcaatgtt

SEQ ID NO: 54700 - DNA, 3800 bp, Homo sapiens
gcggcggcggcggcgccccgactgcagtcccggcgggagcggagccgagccggggccgggcccgagccggcgccatggggcggcgccgcctgtgagcggcggcgagcggaccgcgggcgccgagcagggccaggcgggaggcgtcggcgcccgaggccgagcgagccgcggccgggccgggccgagcgccgagcgagcaggagcggcggcggcggcggcggcggcgggaggaggcagcgccgccgccaagatggcggacctggaggcggtgctggccgacgtgagctacctgatggccatggagaagagcaaggccacgccggccgcgcgcgccagcaagaagatactgctgcccgagcccagcatccgcagtgtcatgcagaagtacctggaggaccggggcgaggtgacctttgagaagatcttttcccagaagctggggtacctgctcttccgagacttctgcctgaaccacctggaggaggccaggcccttggtggaattctatgaggagatcaagaagtacgagaagctggagacggaggaggagcgtgtggcccgcagccgggagatcttcgactcatacatcatgaaggagctgctggcctgctcgcatcccttctcgaagagtgccactgagcatgtccaaggccacctggggaagaagcaggtgcctccggatctcttccagccatacatcgaagagatttgtcaaaacctccgaggggacgtgttccagaaattcattgagagcgataagttcacacggttttgccagtggaagaatgtggagctcaacatccacctgaccatgaatgacttcagcgtgcatcgcatcattgggcgcgggggctttggcgaggtctatgggtgccggaaggctgacacaggcaagatgtacgccatgaagtgcctggacaaaaagcgcatcaagatgaagcagggggagaccctggccctgaacgagcgcatcatgctctcgctcgtcagcactggggactgcccattcattgtctgcatgtcatacgcgttccacacgccagacaagctcagcttcatcctggacctcatgaacggtggggacctgcactaccacctctcccagcacggggtcttctcagaggctgacatgcgcttctatgcggccgagatcatcctgggcctggagcacatgcacaaccgcttcgtggtctaccgggacctgaagccagccaacatccttctggacgagcatggccacgtgcggatctcggacctgggcctggcctgtgacttctccaagaagaagccccatgccagcgtgggcacccacgggtacatggctccggaggtcctgcagaagggcgtggcctacgacagcagtgccgactggttctctctggggtgcatgctcttcaagttgctgcgggggcacagccccttccggcagcacaagaccaaagacaagcatgagatcgaccgcatgacgctgacgatggccgtggagctgcccgactccttctcccctgaactacgctccctgctggaggggttgctgcagagggatgtcaaccggagattgggctgcctgggccgaggggctcaggaggtgaaagagagcccctttttccgctccctggactggcagatggtcttcttgcagaagtaccctcccccgctgatccccccacgaggggaggtgaacgcggccgacgccttcgacattggctccttcgatgaggaggacacaaaaggaatcaagttactggacagtgatcaggagctctaccgcaacttccccctcaccatctcggagcggtggcagcaggaggtggcagagactgtcttcgacaccatcaacgctgagacagaccggctggaggctcgcaagaaagccaagaacaagcagctgggccatgaggaagactacgccctgggcaaggactgcatcatgcatggctacatgtccaagatgggcaaccccttcctgacccagtggcagcggcggtacttctacctgttccccaaccgcctcgagtggcggggcgagggcgaggccccgcagagcctgctgaccatggaggagatccagtcggtggaggagacgcagatcaaggagcgcaagtgcctgctcctcaagatccgcggtgggaaacagttcattttgcagtgcgatagcgaccctgagctggtgcagtggaagaaggagctgcgcgacgcctaccgcgaggcccagcagctggtgcagcgggtgcccaagatgaagaacaagccgcgctcgcccgtggtggagctgagcaaggtgccgctggtccagcgcggcagtgccaacggcctctgacccgcccacccgccttttataaacctctaatttattttgtcgaatttttattatttgttttcccgccaagcggaaaaggttttattttgtaattattgtgatttcccgtggccccagcctggcccagctcccccgggaggggcccgcttgcctcggctcctgctgcaccaacccagccgctgcccggcgccctctgtcctgacttcaggggctgcccgctcccagtgtcttcctgtgggggaagagcacagccctcccgccccttccccgagggatgatgccacaccaagctgtgccaccctgggctctgtgggctgcactctgtgcccatgggcactgctgggtggcccatcccccctcaccaggggcaggcacagcacagggatccgacttgaattttcccactgcaccccctcctgctgcagaggggcaggccctgcactgtcctgctccacagtgttggcgagaggaggggcccgttgtctccctggccctcaaggcctcccacagtgactcgggctcctgtgcccttattcaggaaaagcctctgtgtcactggctgcctccactcccacttccctgacactgcggggcttggctgagagagtggcattggcagcaggtgctgctaccctccctgctgtcccctcttgccccaacccccagcacccgggctcagggaccacagcaaggcacctgcaggttgggccatactggcctcgcctggcctgaggtctcgctgatgctgggctgggtgcgaccccatctgcccaggacggggccggccaggtgggcgggcagcacagcaaggaggctggctggggcctatcagtgtgccccccatcctggcccatcagtgtacccccgcccaggctggccagccccacagcccacgtcctgtcagtgccgccgcctcgcccaccgcatgccccctcgtgccagtcgcgctgcctgtgtggtgtcgcgccttctcccccccggggctgggttggcgcaccctcccctcccgtctactcattccccggggcgtttctttgccgatttttgaatgtgattttaaagagtgaaaaatgagactatgcgtttttataaaaaatggtgcctgattcggctgtctcagactctttttgtacctggtgaccccttttcagcttctgctgggctggggcctgatggggagggtctcggtggtaccaggtctcctccaccgccatggcttccaaggtggtctgctcgggcccaggccatcttccaggtggggtgaggcagtgggtcccacttcccctcctacccctcccagctgacagtcctctccacctagtggctgtccagtgcccattcctcaccttttcccggggaggagagagcagcttctgccacttcccaggtaagcaggaggaggtgccaacagtgttaggcctggcacagtgtctgggctgactgggaccgtctcaggcccacagaacacccctgcacagca

SEQ ID NO: 54701 - DNA, 3468 bp, Homo sapiens
gcggcggcggcggcgccccgactgcagtcccggcgggagcggagccgagccggggccgggcccgagccggcgccatggggcggcgccgcctgtgagcggcggcgagcggaccgcgggcgccgagcagggccaggcgggaggcgtcggcgcccgaggccgagcgagccgcggccgggccgggccgagcgccgagcgagcaggagcggcggcggcggcggcggcggcgggaggaggcagcgccgccgccaagatggcggacctggaggcggtgctggccgacgtgagctacctgatggccatggagaagagcaaggccacgccggccgcgcgcgccagcaagaagatactgctgcccgagcccagcatccgcagtgtcatgcagaagtacctggaggaccggggcgaggtgacctttgagaagatcttttcccagaagctggggtacctgctcttccgagacttctgcctgaaccacctggaggaggccaggcccttggtggaattctatgaggagatcaagaagtacgagaagctggagacggaggaggagcgtgtggcccgcagccgggagatcttcgactcatacatcatgaaggagctgctggcctgctcgcatcccttctcgaagagtgccactgagcatgtccaaggccacctggggaagaagcaggtgcctccggatctcttccagccatacatcgaagagatttgtcaaaacctccgaggggacgtgttccagaaattcattgagagcgataagttcacacggttttgccagtggaagaatgtggagctcaacatccacctgaccatgaatgacttcagcgtgcatcgcatcattgggcgcgggggctttggcgaggtctatgggtgccggaaggctgacacaggcaagatgtacgccatgaagtgcctggacaaaaagcgcatcaagatgaagcagggggagaccctggccctgaacgagcgcatcatgctctcgctcgtcagcactggggactgcccattcattgtctgcatgtcatacgcgttccacacgccagacaagctcagcttcatcctggacctcatgaacggtggggacctgcactaccacctctcccagcacggggtcttctcagaggctgacatgcgcttctatgcggccgagatcatcctgggcctggagcacatgcacaaccgcttcgtggtctaccgggacctgaagccagccaacatccttctggacgagcatggccacgtgcggatctcggacctgggcctggcctgtgacttctccaagaagaagccccatgccagcgtgggcacccacgggtacatggctccggaggtcctgcagaagggcgtggcctacgacagcagtgccgactggttctctctggggtgcatgctcttcaagttgctgcgggggcacagccccttccggcagcacaagaccaaagacaagcatgagatcgaccgcatgacgctgacgatggccgtggagctgcccgactccttctcccctgaactacgctccctgctggaggggttgctgcagagggatgtcaaccggagattgggctgcctgggccgaggggctcaggaggtgaaagagagcccctttttccgctccctggactggcagatggtcttcttgcagaagtaccctcccccgctgatccccccacgaggggaggtgaacgcggccgacgccttcgacattggctccttcgatgaggaggacacaaaaggaatcaagttactggacagtgatcaggagctctaccgcaacttccccctcaccatctcggagcggtggcagcaggaggtggcagagactgtcttcgacaccatcaacgctgagacagaccggctggaggctcgcaagaaagccaagaacaagcagctgggccatgaggaagactacgccctgggcaaggactgcatcatgcatggctacatgtccaagatgggcaaccccttcctgacccagtggcagcggcggtacttctacctgttccccaaccgcctcgagtggcggggcgagggcgaggccccgcagagcctgctgaccatggaggagatccagtcggtggaggagacgcagatcaaggagcgcaagtgcctgctcctcaagatccgcggtgggaaacagttcattttgcagtgcgatagcgaccctgagctggtgcagtggaagaaggagctgcgcgacgcctaccgcgaggcccagcagctggtgcagcgggtgcccaagatgaagaacaagccgcgctcgcccgtggtggagctgagcaaggtgccgctggtccagcgcggcagtgccaacggcctctgacccgcccacccgccttttataaacctctaatttattttgtcgaatttttattatttgttttcccgccaagcggaaaaggttttattttgtaattattgtgatttcccgtggccccagcctggcccagctcccccgggaggggcccgcttgcctcggctcctgctgcaccaacccagccgctgcccggcgccctctgtcctgacttcaggggctgcccgctcccagtgtcttcctgtgggggaagagcacagccctcccgccccttccccgagggatgatgccacaccaagctgtgccaccctgggctctgtgggctgcactctgtgcccatgggcactgctgggtggcccatcccccctcaccaggggcaggcacagcacagggatccgacttgaattttcccactgcaccccctcctgctgcagaggggcaggccctgcactgtcctgctccacagtgttggcgagaggaggggcccgttgtctccctggccctcaaggcctcccacagtgactcgggctcctgtgcccttattcaggaaaagcctctgtgtcactggctgcctccactcccacttccctgacactgcggggcttggctgagagagtggcattggcagcaggtgctgctaccctccctgctgtcccctcttgccccaacccccagcacccgggctcagggaccacagcaaggcacctgcaggttgggccatactggcctcgcctggcctgaggtctcgctgatgctgggctgggtgcgaccccatctgcccaggacggggccggccaggtgggcgggcagcacagcaaggaggctggctggggcctatcagtgtgccccccatcctggcccatcagtgtacccccgcccaggctggccagccccacagcccacgtcctgtcagtgccgccgcctcgcccaccgcatgccccctcgtgccagtcgcgctgcctgtgtggtgtcgcgccttctcccccccggggctgggttggcgcaccctcccctcccgtctactcattccccggggcgtttctttgccgatttttgaatgtgattttaaagagtgaaaaatgagactatgcgtttttataaaaaatggtgcctgaaaaccaacaaaaaaaagggagccgctcgggatctagaactag

SEQ ID NO: 54702 - DNA, 3115 bp, Homo sapiens
cgaggacaggtgtggtttgtccctgtggaacagatggggaaactgaagctagcatccgcagtgtcatgcagaagtacctggaggaccggggcgaggtgacctttgagaagatcttttcccagaagctggggtacctgctcttccgagacttctgcctgaaccacctggaggaggccaggcccttggtggaattctatgaggagatcaagaagtacgagaagctggagacggaggaggagcgtgtggcccgcagccgggagatcttcgactcatacatcatgaaggagctgctggcctgctcgcatcccttctcgaagagtgccactgagcatgtccaaggccacctggggaagaagcaggtgcctccggatctcttccagccatacatcgaagagatttgtcaaaacctccgaggggacgtgttccagaaattcattgagagcgataagttcacacggttttgccagtggaagaatgtggagctcaacatccacctgaccatgaatgacttcagcgtgcatcgcatcattgggcgcgggggctttggcgaggtctatgggtgccggaaggctgacacaggcaagatgtacgccatgaagtgcctggacaaaaagcgcatcaagatgaagcagggggagaccctggccctgaacgagcgcatcatgctctcgctcgtcagcactggggactgcccattcattgtctgcatgtcatacgcgttccacacgccagacaagctcagcttcatcctggacctcatgaacggtggggacctgcactaccacctctcccagcacggggtcttctcagaggctgacatgcgcttctatgcggccgagatcatcctgggcctggagcacatgcacaaccgcttcgtggtctaccgggacctgaagccagccaacatccttctggacgagcatggccacgtgcggatctcggacctgggcctggcctgtgacttctccaagaagaagccccatgccagcgtgggcacccacgggtacatggctccggaggtcctgcagaagggcgtggcctacgacagcagtgccgactggttctctctggggtgcatgctcttcaagttgctgcgggggcacagccccttccggcagcacaagaccaaagacaagcatgagatcgaccgcatgacgctgacgatggccgtggagctgcccgactccttctcccctgaactacgctccctgctggaggggttgctgcagagggatgtcaaccggagattgggctgcctgggccgaggggctcaggaggtgaaagagagcccctttttccgctccctggactggcagatggtcttcttgcagaagtaccctcccccgctgatccccccacgaggggaggtgaacgcggccgacgccttcgacattggctccttcgatgaggaggacacaaaaggaatcaagttactggacagtgatcaggagctctaccgcaacttccccctcaccatctcggagcggtggcagcaggaggtggcagagactgtcttcgacaccatcaacgctgagacagaccggctggaggctcgcaagaaagccaagaacaagcagctgggccatgaggaagactacgccctgggcaaggactgcatcatgcatggctacatgtccaagatgggcaaccccttcctgacccagtggcagcggcggtacttctacctgttccccaaccgcctcgagtggcggggcgagggcgaggccccgcagagcctgctgaccatggaggagatccagtcggtggaggagacgcagatcaaggagcgcaagtgcctgctcctcaagatccgcggtgggaaacagttcattttgcagtgcgatagcgaccctgagctggtgcagtggaagaaggagctgcgcgacgcctaccgcgaggcccagcagctggtgcagcgggtgcccaagatgaagaacaagccgcgctcgcccgtggtggagctgagcaaggtgccgctggtccagcgcggcagtgccaacggcctctgacccgcccacccgccttttataaacctctaatttattttgtcgaatttttattatttgttttcccgccaagcggaaaaggttttattttgtaattattgtgatttcccgtggccccagcctggcccagctcccccgggaggggcccgcttgcctcggctcctgctgcaccaacccagccgctgcccggcgccctctgtcctgacttcaggggctgcccgctcccagtgtcttcctgtgggggaagagcacagccctcccgccccttccccgagggatgatgccacaccaagctgtgccaccctgggctctgtgggctgcactctgtgcccatgggcactgctgggtggcccatcccccctcaccaggggcaggcacagcacagggatccgacttgaattttcccactgcaccccctcctgctgcagaggggcaggccctgcactgtcctgctccacagtgttggcgagaggaggggcccgttgtctccctggccctcaaggcctcccacagtgactcgggctcctgtgcccttattcaggaaaagcctctgtgtcactggctgcctccactcccacttccctgacactgcggggcttggctgagagagtggcattggcagcaggtgctgctaccctccctgctgtcccctcttgccccaacccccagcacccgggctcagggaccacagcaaggcacctgcaggttgggccatactggcctcgcctggcctgaggtctcgctgatgctgggctgggtgcgaccccatctgcccaggacggggccggccaggtgggcgggcagcacagcaaggaggctggctggggcctatcagtgtgccccccatcctggcccatcagtgtacccccgcccaggctggccagccccacagcccacgtcctgtcagtgccgccgcctcgcccaccgcatgccccctcgtgccagtcgcgctgcctgtgtggtgtcgcgccttctcccccccggggctgggttggcgcaccctcccctcccgtctactcattccccggggcgtttctttgccgatttttgaatgtgattttaaagagtgaaaaatgagactatgcgtttttataaaaaatggtgcctga

SEQ ID NO: 54703 - DNA, 3046 bp, Homo sapiens
agggcgactgttgaggatcccccgaggtgcccttaaagaagatcttttaccagaagctgaggtacctgctcttccgagacttctgcctgaaccacctggaggaggccaggcccttggtggaattctatgaggagatcaagaagtacgagaagctggagacggaggaggagcgtgtggcccgcagccgggagatcttcgactcatacatcatgaaggagctgctggcctgctcgcatcccttctcgaagagtgccactgagcatgtccaaggccacctggggaagaagcaggtgcctccggatctcttccagccatacatcgaagagatttgtcaaaacctccgaggggacgtgttccagaaattcattgagagcgataagttcacacggttttgccagtggaagaatgtggagctcaacatccacctgaccatgaatgacttcagcgtgcatcgcatcattgggcgcgggggctttggcgaggtctatgggtgccggaaggctgacacaggcaagatgtacgccatgaagtgcctggacaaaaagcgcatcaagatgaagcagggggagaccctggccctgaacgagcgcatcatgctctcgctcgtcagcactggggactgcccattcattgtctgcatgtcatacgcgttccacacgccagacaagctcagcttcatcctggacctcatgaacggtggggacctgcactaccacctctcccagcacggggtcttctcagaggctgacatgcgcttctatgcggccgagatcatcctgggcctggagcacatgcacaaccgcttcgtggtctaccgggacctgaagccagccaacatccttctggacgagcatggccacgtgcggatctcggacctgggcctggcctgtgacttctccaagaagaagccccatgccagcgtgggcacccacgggtacatggctccggaggtcctgcagaagggcgtggcctacgacagcagtgccgactggttctctctggggtgcatgctcttcaagttgctgcgggggcacagccccttccggcagcacaagaccaaagacaagcatgagatcgaccgcatgacgctgacgatggccgtggagctgcccgactccttctcccctgaactacgctccctgctggaggggttgctgcagagggatgtcaaccggagattgggctgcctgggccgaggggctcaggaggtgaaagagagcccctttttccgctccctggactggcagatggtcttcttgcagaagtaccctcccccgctgatccccccacgaggggaggtgaacgcggccgacgccttcgacattggctccttcgatgaggaggacacaaaaggaatcaagttactggacagtgatcaggagctctaccgcaacttccccctcaccatctcggagcggtggcagcaggaggtggcagagactgtcttcgacaccatcaacgctgagacagaccggctggaggctcgcaagaaagccaagaacaagcagctgggccatgaggaagactacgccctgggcaaggactgcatcatgcatggctacatgtccaagatgggcaaccccttcctgacccagtggcagcggcggtacttctacctgttccccaaccgcctcgagtggcggggcgagggcgaggccccgcagagcctgctgaccatggaggagatccagtcggtggaggagacgcagatcaaggagcgcaagtgcctgctcctcaagatccgcggtgggaaacagttcattttgcagtgcgatagcgaccctgagctggtgcagtggaagaaggagctgcgcgacgcctaccgcgaggcccagcagctggtgcagcgggtgcccaagatgaagaacaagccgcgctcgcccgtggtggagctgagcaaggtgccgctggtccagcgcggcagtgccaacggcctctgacccgcccacccgccttttataaacctctaatttattttgtcgaatttttattatttgttttcccgccaagcggaaaaggttttattttgtaattattgtgatttcccgtggccccagcctggcccagctcccccgggaggggcccgcttgcctcggctcctgctgcaccaacccagccgctgcccggcgccctctgtcctgacttcaggggctgcccgctcccagtgtcttcctgtgggggaagagcacagccctcccgccccttccccgagggatgatgccacaccaagctgtgccaccctgggctctgtgggctgcactctgtgcccatgggcactgctgggtggcccatcccccctcaccaggggcaggcacagcacagggatccgacttgaattttcccactgcaccccctcctgctgcagaggggcaggccctgcactgtcctgctccacagtgttggcgagaggaggggcccgttgtctccctggccctcaaggcctcccacagtgactcgggctcctgtgcccttattcaggaaaagcctctgtgtcactggctgcctccactcccacttccctgacactgcggggcttggctgagagagtggcattggcagcaggtgctgctaccctccctgctgtcccctcttgccccaacccccagcacccgggctcagggaccacagcaaggcacctgcaggttgggccatactggcctcgcctggcctgaggtctcgctgatgctgggctgggtgcgaccccatctgcccaggacggggccggccaggtgggcgggcagcacagcaaggaggctggctggggcctatcagtgtgccccccatcctggcccatcagtgtacccccgcccaggctggccagccccacagcccacgtcctgtcagtgccgccgcctcgcccaccgcatgccccctcgtgccagtcgcgctgcctgtgtggtgtcgcgccttctcccccccggggctgggttggcgcaccctcccctcccgtctactcattccccggggcgtttctttgccgatttttgaatgtgattttaaagagtgaaaaatgagactatgcgtttttataaaaaatggtgcctga

SEQ ID NO: 54704 - DNA, 3735 bp, Homo sapiens
gcggcggcggcggcgccccgactgcagtcccggcgggagcggagccgagccggggccgggcccgagccggcgccatggggcggcgccgcctgtgagcggcggcgagcggaccgcgggcgccgagcagggccaggcgggaggcgtcggcgcccgaggccgagcgagccgcggccgggccgggccgagcgccgagcgagcaggagcggcggcggcggcggcggcggcgggaggaggcagcgccgccgccaagatggcggacctggaggcggtgctggccgacgtgagctacctgatggccatggagaagagcaaggccacgccggccgcgcgcgccagcaagaagatactgctgcccgagcccagcatccgcagtgtcatgcagaagtacctggaggaccggggcgaggtgacctttgagaagatcttttcccagaagctggggtacctgctcttccgagacttctgcctgaaccacctggaggaggccaggcccttggtggaattctatgaggagatcaagaagtacgagaagctggagacggaggaggagcgtgtggcccgcagccgggagatcttcgactcatacatcatgaaggagctgctggcctgctcgcatcccttctcgaagagtgccactgagcatgtccaaggccacctggggaagaagcaggtgcctccggatctcttccagccatacatcgaagagatttgtcaaaacctccgaggggacgtgttccagaaattcattgagagcgataagttcacacggttttgccagtggaagaatgtggagctcaacatccacgtgagtgggcttgggtggggcatggaaagccacgcaccctgctgctcctctcccgggagctgggcctgtggcttggctgggagggggaggtcaggggatgtctgtcctttagcccccagggccgtggctatgggggtcagggccgggatcccagcatggggaggccggagcaggtaaatatgtggcaaggatggccaggacatgggtatggggaccctggcatggggccagcccctgctgcccaggtgcctctgccccagggctgggcagaggcagcctgtggtgaccgcagctgtcgctgcccctcagctgaccatgaatgacttcagcgtgcatcgcatcattgggcgcgggggctttggcgaggtctatgggtgccggaaggctgacacaggcaagatgtacgccatgaagtgcctggacaaaaagcgcatcaagatgaagcagggggagaccctggccctgaacgagcgcatcatgctctcgctcgtcagcactggggactgcccattcattgtctgcatgtcatacgcgttccacacgccagacaagctcagcttcatcctggacctcatgaacggtggggacctgcactaccacctctcccagcacggggtcttctcagaggctgacatgcgcttctatgcggccgagatcatcctgggcctggagcacatgcacaaccgcttcgtggtctaccgggacctgaagccagccaacatccttctggacgagcatggccacgtgcggatctcggacctgggcctggcctgtgacttctccaagaagaagccccatgccagcgtgggcacccacgggtacatggctccggaggtcctgcagaagggcgtggcctacgacagcagtgccgactggttctctctggggtgcatgctcttcaagttgctgcgggggcacagccccttccggcagcacaagaccaaagacaagcatgagatcgaccgcatgacgctgacgatggccgtggagctgcccgactccttctcccctgaactacgctccctgctggaggggttgctgcagagggatgtcaaccggagattgggctgcctgggccgaggggctcaggaggtgaaagagagcccctttttccgctccctggactggcagatggtcttcttgcagaagtaccctcccccgctgatccccccacgaggggaggtgaacgcggccgacgccttcgacattggctccttcgatgaggaggacacaaaaggaatcaagttactggacagtgatcaggagctctaccgcaacttccccctcaccatctcggagcggtggcagcaggaggtggcagagactgtcttcgacaccatcaacgctgagacagaccggctggaggctcgcaagaaagccaagaacaagcagctgggccatgaggaagactacgccctgggcaaggactgcatcatgcatggctacatgtccaagatgggcaaccccttcctgacccagtggcagcggcggtacttctacctgttccccaaccgcctcgagtggcggggcgagggcgaggccccgcagagcctgctgaccatggaggagatccagtcggtggaggagacgcagatcaaggagcgcaagtgcctgctcctcaagatccgcggtgggaaacagttcattttgcagtgcgatagcgaccctgagctggtgcagtggaagaaggagctgcgcgacgcctaccgcgaggcccagcagctggtgcagcgggtgcccaagatgaagaacaagccgcgctcgcccgtggtggagctgagcaaggtgccgctggtccagcgcggcagtgccaacggcctctgacccgcccacccgccttttataaacctctaatttattttgtcgaatttttattatttgttttcccgccaagcggaaaaggttttattttgtaattattgtgatttcccgtggccccagcctggcccagctcccccgggaggggcccgcttgcctcggctcctgctgcaccaacccagccgctgcccggcgccctctgtcctgacttcaggggctgcccgctcccagtgtcttcctgtgggggaagagcacagccctcccgccccttccccgagggatgatgccacaccaagctgtgccaccctgggctctgtgggctgcactctgtgcccatgggcactgctgggtggcccatcccccctcaccaggggcaggcacagcacagggatccgacttgaattttcccactgcaccccctcctgctgcagaggggcaggccctgcactgtcctgctccacagtgttggcgagaggaggggcccgttgtctccctggccctcaaggcctcccacagtgactcgggctcctgtgcccttattcaggaaaagcctctgtgtcactggctgcctccactcccacttccctgacactgcggggcttggctgagagagtggcattggcagcaggtgctgctaccctccctgctgtcccctcttgccccaacccccagcacccgggctcagggaccacagcaaggcacctgcaggttgggccatactggcctcgcctggcctgaggtctcgctgatgctgggctgggtgcgaccccatctgcccaggacggggccggccaggtgggcgggcagcacagcaaggaggctggctggggcctatcagtgtgccccccatcctggcccatcagtgtacccccgcccaggctggccagccccacagcccacgtcctgtcagtgccgccgcctcgcccaccgcatgccccctcgtgccagtcgcgctgcctgtgtggtgtcgcgccttctcccccccggggctgggttggcgcaccctcccctcccgtctactcattccccggggcgtttctttgccgatttttgaatgtgattttaaagagtgaaaaatgagactatgcgtttttataaaaaatggtgcctga

SEQ ID NO: 54705 - DNA, 2709 bp, Homo sapiens
  misc_feature (4)..(4): n is a, c, g, or t
  misc_feature (19)..(19): n is a, c, g, or t
  misc_feature (25)..(25): n is a, c, g, or t
ttanggctaggtagaggcnggggtnaatcggccgagcgataagttcacacggttttgccagtggaagaatgtggagctcaacatccacctgaccatgaatgacttcagcgtgcatcgcatcattgggcgcgggggctttggcgaggtctatgggtgccggaaggctgacacaggcaagatgtacgccatgaagtgcctggacaaaaagcgcatcaagatgaagcagggggagaccctggccctgaacgagcgcatcatgctctcgctcgtcagcactggggactgcccattcattgtctgcatgtcatacgcgttccacacgccagacaagctcagcttcatcctggacctcatgaacggtggggacctgcactaccacctctcccagcacggggtcttctcagaggctgacatgcgcttctatgcggccgagatcatcctgggcctggagcacatgcacaaccgcttcgtggtctaccgggacctgaagccagccaacatccttctggacgagcatggccacgtgcggatctcggacctgggcctggcctgtgacttctccaagaagaagccccatgccagcgtgggcacccacgggtacatggctccggaggtcctgcagaagggcgtggcctacgacagcagtgccgactggttctctctggggtgcatgctcttcaagttgctgcgggggcacagccccttccggcagcacaagaccaaagacaagcatgagatcgaccgcatgacgctgacgatggccgtggagctgcccgactccttctcccctgaactacgctccctgctggaggggttgctgcagagggatgtcaaccggagattgggctgcctgggccgaggggctcaggaggtgaaagagagcccctttttccgctccctggactggcagatggtcttcttgcagaagtaccctcccccgctgatccccccacgaggggaggtgaacgcggccgacgccttcgacattggctccttcgatgaggaggacacaaaaggaatcaagttactggacagtgatcaggagctctaccgcaacttccccctcaccatctcggagcggtggcagcaggaggtggcagagactgtcttcgacaccatcaacgctgagacagaccggctggaggctcgcaagaaagccaagaacaagcagctgggccatgaggaagactacgccctgggcaaggactgcatcatgcatggctacatgtccaagatgggcaaccccttcctgacccagtggcagcggcggtacttctacctgttccccaaccgcctcgagtggcggggcgagggcgaggccccgcagagcctgctgaccatggaggagatccagtcggtggaggagacgcagatcaaggagcgcaagtgcctgctcctcaagatccgcggtgggaaacagttcattttgcagtgcgatagcgaccctgagctggtgcagtggaagaaggagctgcgcgacgcctaccgcgaggcccagcagctggtgcagcgggtgcccaagatgaagaacaagccgcgctcgcccgtggtggagctgagcaaggtgccgctggtccagcgcggcagtgccaacggcctctgacccgcccacccgccttttataaacctctaatttattttgtcgaatttttattatttgttttcccgccaagcggaaaaggttttattttgtaattattgtgatttcccgtggccccagcctggcccagctcccccgggaggggcccgcttgcctcggctcctgctgcaccaacccagccgctgcccggcgccctctgtcctgacttcaggggctgcccgctcccagtgtcttcctgtgggggaagagcacagccctcccgccccttccccgagggatgatgccacaccaagctgtgccaccctgggctctgtgggctgcactctgtgcccatgggcactgctgggtggcccatcccccctcaccaggggcaggcacagcacagggatccgacttgaattttcccactgcaccccctcctgctgcagaggggcaggccctgcactgtcctgctccacagtgttggcgagaggaggggcccgttgtctccctggccctcaaggcctcccacagtgactcgggctcctgtgcccttattcaggaaaagcctctgtgtcactggctgcctccactcccacttccctgacactgcggggcttggctgagagagtggcattggcagcaggtgctgctaccctccctgctgtcccctcttgccccaacccccagcacccgggctcagggaccacagcaaggcacctgcaggttgggccatactggcctcgcctggcctgaggtctcgctgatgctgggctgggtgcgaccccatctgcccaggacggggccggccaggtgggcgggcagcacagcaaggaggctggctggggcctatcagtgtgccccccatcctggcccatcagtgtacccccgcccaggctggccagccccacagcccacgtcctgtcagtgccgccgcctcgcccaccgcatgccccctcgtgccagtcgcgctgcctgtgtggtgtcgcgccttctcccccccggggctgggttggcgcaccctcccctcccgtctactcattccccggggcgtttctttgccgatttttgaatgtgattttaaagagtgaaaaatgagactatgcgtttttataaaaaatggtgcctga

SEQ ID NO: 54706 - DNA, 3331 bp, Homo sapiens
gcggcggcggcggcgccccgactgcagtcccggcgggagcggagccgagccggggccgggcccgagccggcgccatggggcggcgccgcctgtgagcggcggcgagcggaccgcgggcgccgagcagggccaggcgggaggcgtcggcgcccgaggccgagcgagccgcggccgggccgggccgagcgccgagcgagcaggagcggcggcggcggcggcggcggcgggaggaggcagcgccgccgccaagatggcggacctggaggcggtgctggccgacgtgagctacctgatggccatggagaagagcaaggccacgccggccgcgcgcgccagcaagaagatactgctgcccgagcccagcatccgcagtgtcatgcagaagtacctggaggaccggggcgaggtgacctttgagaagatcttttcccagaagctggggtacctgctcttccgagacttctgcctgaaccacctggaggaggccaggcccttggtggaattctatgaggagatcaagaagtacgagaagctggagacggaggaggagcgtgtggcccgcagccgggagatcttcgactcatacatcatgaaggagctgctggcctgctcgcatcccttctcgaagagtgccactgagcatgtccaaggccacctggggaagaagcaggtgcctccggatctcttccagccatacatcgaagagatttgtcaaaacctccgaggggacgtgttccagaaattcattgagagcgataagttcacacggttttgccagtggaagaatgtggagctcaacatccacctgaccatgaatgacttcagcgtgcatcgcatcattgggcgcgggggctttggcgaggtctatgggtgccggaaggctgacacaggcaagatgtacgccatgaagtgcctggacaaaaagcgcatcaagatgaagcagggggagaccctggccctgaacgagcgcatcatgctctcgctcgtcagcactggggactgcccattcattgtctgcatgtcatacgcgttccacacgccagacaagctcagcttcatcctggacctcatgaacggtggggacctgcactaccacctctcccagcacggggtcttctcagaggctgacatgcgcttctatgcggccgagatcatcctgggcctggagcacatgcacaaccgcttcgtggtctaccgggacctgaaggggcacccacgggtacatggctccggaggtcctgcagaagggcgtggcctacgacagcagtgccgactggttctctctggggtgcatgctcttcaagttgctgcgggggcacagccccttccggcagcacaagaccaaagacaagcatgagatcgaccgcatgacgctgacgatggccgtggagctgcccgactccttctcccctgaactacgctccctgctggaggggttgctgcagagggatgtcaaccggagattgggctgcctgggccgaggggctcaggaggtgaaagagagcccctttttccgctccctggactggcagatggtcttcttgcagaagtaccctcccccgctgatccccccacgaggggaggtgaacgcggccgacgccttcgacattggctccttcgatgaggaggacacaaaaggaatcaagttactggacagtgatcaggagctctaccgcaacttccccctcaccatctcggagcggtggcagcaggaggtggcagagactgtcttcgacaccatcaacgctgagacagaccggctggaggctcgcaagaaagccaagaacaagcagctgggccatgaggaagactacgccctgggcaaggactgcatcatgcatggctacatgtccaagatgggcaaccccttcctgacccagtggcagcggcggtacttctacctgttccccaaccgcctcgagtggcggggcgagggcgaggccccgcagagcctgctgaccatggaggagatccagtcggtggaggagacgcagatcaaggagcgcaagtgcctgctcctcaagatccgcggtgggaaacagttcattttgcagtgcgatagcgaccctgagctggtgcagtggaagaaggagctgcgcgacgcctaccgcgaggcccagcagctggtgcagcgggtgcccaagatgaagaacaagccgcgctcgcccgtggtggagctgagcaaggtgccgctggtccagcgcggcagtgccaacggcctctgacccgcccacccgccttttataaacctctaatttattttgtcgaatttttattatttgttttcccgccaagcggaaaaggttttattttgtaattattgtgatttcccgtggccccagcctggcccagctcccccgggaggggcccgcttgcctcggctcctgctgcaccaacccagccgctgcccggcgccctctgtcctgacttcaggggctgcccgctcccagtgtcttcctgtgggggaagagcacagccctcccgccccttccccgagggatgatgccacaccaagctgtgccaccctgggctctgtgggctgcactctgtgcccatgggcactgctgggtggcccatcccccctcaccaggggcaggcacagcacagggatccgacttgaattttcccactgcaccccctcctgctgcagaggggcaggccctgcactgtcctgctccacagtgttggcgagaggaggggcccgttgtctccctggccctcaaggcctcccacagtgactcgggctcctgtgcccttattcaggaaaagcctctgtgtcactggctgcctccactcccacttccctgacactgcggggcttggctgagagagtggcattggcagcaggtgctgctaccctccctgctgtcccctcttgccccaacccccagcacccgggctcagggaccacagcaaggcacctgcaggttgggccatactggcctcgcctggcctgaggtctcgctgatgctgggctgggtgcgaccccatctgcccaggacggggccggccaggtgggcgggcagcacagcaaggaggctggctggggcctatcagtgtgccccccatcctggcccatcagtgtacccccgcccaggctggccagccccacagcccacgtcctgtcagtgccgccgcctcgcccaccgcatgccccctcgtgccagtcgcgctgcctgtgtggtgtcgcgccttctcccccccggggctgggttggcgcaccctcccctcccgtctactcattccccggggcgtttctttgccgatttttgaatgtgattttaaagagtgaaaaatgagactatgcgtttttataaaaaatggtgcctga

SEQ ID NO: 54707 - DNA, 3366 bp, Homo sapiens
gcggcggcggcggcgccccgactgcagtcccggcgggagcggagccgagccggggccgggcccgagccggcgccatggggcggcgccgcctgtgagcggcggcgagcggaccgcgggcgccgagcagggccaggcgggaggcgtcggcgcccgaggccgagcgagccgcggccgggccgggccgagcgccgagcgagcaggagcggcggcggcggcggcggcggcgggaggaggcagcgccgccgccaagatggcggacctggaggcggtgctggccgacgtgagctacctgatggccatggagaagagcaaggccacgccggccgcgcgcgccagcaagaagatactgctgcccgagcccagcatccgcagtgtcatgcagaagtacctggaggaccggggcgaggtgacctttgagaagatcttttcccagaagctggggtacctgctcttccgagacttctgcctgaaccacctggaggaggccaggcccttggtggaattctatgaggagatcaagaagtacgagaagctggagacggaggaggagcgtgtggcccgcagccgggagatcttcgactcatacatcatgaaggagctgctggcctgctcgcatcccttctcgaagagtgccactgagcatgtccaaggccacctggggaagaagcaggtgcctccggatctcttccagccatacatcgaagagatttgtcaaaacctccgaggggacgtgttccagaaattcattgagagcgataagttcacacggttttgccagtggaagaatgtggagctcaacatccacctgaccatgaatgacttcagcgtgcatcgcatcattgggcgcgggggctttggcgaggtctatgggtgccggaaggctgacacaggcaagatgtacgccatgaagtgcctggacaaaaagcgcatcaagatgaagcagggggagaccctggccctgaacgagcgcatcatgctctcgctcgtcagcactggggactgcccattcattgtctgcatgtcatacgcgttccacacgccagacaagctcagcttcatcctggacctcatgaacggtggggacctgcactaccacctctcccagcacggggtcttctcagaggctgacatgcgcttctatgcggccgagatcatcctgggcctggagcacatgcacaaccgcttcgtggtctaccgggacctgaagccagccaacatccttctggacgagcatggccacgtgcggatctcggacctgggcctggcctgtgacttctccaagaagaagccccatgccagcgtgggcacccacgggtacatggctccggaggtcctgcagaagggcgtggcctacgacagcagtgccgactggttctctctggggtgcatgctcttcaagttgctgcgggggcacagccccttccggcagcacaagaccaaagacaagcatgagatcgaccgcatgacgctgacgatggccgtggagctgcccgactccttctcccctgaactacgctccctgctggaggggttgctgcagagggatgtcaaccggagattgggctgcctgggccgaggggctcaggaggtgaaagagagcccctttttccgctccctggactggcagatggtcttcttgcagaagtaccctcccccgctgatccccccacgaggggaggtgaacgcggccgacgccttcgacattggctccttcgatgaggaggacacaaaaggaatcaagttactggacagtgatcaggagctctaccgcaacttccccctcaccatctcggagcggtggcagcaggaggtggcagagactgtcttcgacaccatcaacgctgagacagaccggctggaggctcgcaagaaagccaagaacaagcagctgggccatgaggaagactacgccctgggcaaggactgcatcatgcatggctacatgtccaagatgggcaaccccttcctgacccagtggcagcggcggtacttctacctgttccccaaccgcctcgagtggcggggcgagggcgaggccccgcagagcctgctgaccatggaggagatccagtcggtggaggagacgcagatcaaggagcgcaagtgcctgctcctcaagatccgcggtgggaaacagttcattttgcagtgcgatagcgaccctgagctggtgcagtggaagaaggagctgcgcgacgcctaccgcgaggcccagcagctggtgcagcgggtgcccaagatgaagaacaagccgcgctcgcccgtggtggagctgagcaaggtgccgctggtccagcgcggcagtgccaacggcctctgacccgcccacccgccttttataaacctctaatttattttgtcgaatttttattatttgttttcccgccaagcggaaaaggttttattttgtaattattgtgatttcccgtggccccagcctggcccagctcccccgggaggggcccgcttgcctcggctcctgctgcaccaacccagccgctgcccggcgccctctgtcctgacttcaggggctgcccgctcccagtgtcttcctgtgggggaagagcacagccctcccgccccttccccgagggatgatgccacaccaagctgtgccaccctgggctctgtgggctgcactctgtgcccatgggcactgctgggtggcccatcccccctcaccaggggcaggcacagcacagggatccgacttgaattttcccactgcaccccctcctgctgcagaggggcaggccctgcactgtcctgctccacagtgttggcgagaggaggggcccgttgtctccctggccctcaaggcctcccacagtgactcgggctcctgtgcccttattcaggaaaagcctctgtgtcactggctgcctccactcccacttccctgacactgcggggcttggctgagagagtggcattggcagcaggtgctgctaccctccctgctgtcccctcttgccccaacccccagcacccgggctcagggaccacagcaaggcacctgcaggttgggccatactggcctcgcctggcctgaggtctcgctgatgctgggctgggtgcgaccccatctgcccaggacggggccggccaggtgggcgggcagcacagcaaggaggctggcagccccacagcccacgtcctgtcagtgccgccgcctcgcccaccgcatgccccctcgtgccagtcgcgctgcctgtgtggtgtcgcgccttctcccccccggggctgggttggcgcaccctcccctcccgtctactcattccccggggcgtttctttgccgatttttgaatgtgattttaaagagtgaaaaatgagactatgcgtttttataaaaaatggtgcctga

SEQ ID NO: 54708 - DNA, 2519 bp, Homo sapiens
  misc_feature (4)..(4): n is a, c, g, or t
  misc_feature (19)..(19): n is a, c, g, or t
  misc_feature (25)..(25): n is a, c, g, or t
ttanggctaggtagaggcnggggtnaatcggccgagggggagaccctggccctgaacgagcgcatcatgctctcgctcgtcagcactggggactgcccattcattgtctgcatgtcatacgcgttccacacgccagacaagctcagcttcatcctggacctcatgaacggtggggacctgcactaccacctctcccagcacggggtcttctcagaggctgacatgcgcttctatgcggccgagatcatcctgggcctggagcacatgcacaaccgcttcgtggtctaccgggacctgaagccagccaacatccttctggacgagcatggccacgtgcggatctcggacctgggcctggcctgtgacttctccaagaagaagccccatgccagcgtgggcacccacgggtacatggctccggaggtcctgcagaagggcgtggcctacgacagcagtgccgactggttctctctggggtgcatgctcttcaagttgctgcgggggcacagccccttccggcagcacaagaccaaagacaagcatgagatcgaccgcatgacgctgacgatggccgtggagctgcccgactccttctcccctgaactacgctccctgctggaggggttgctgcagagggatgtcaaccggagattgggctgcctgggccgaggggctcaggaggtgaaagagagcccctttttccgctccctggactggcagatggtcttcttgcagaagtaccctcccccgctgatccccccacgaggggaggtgaacgcggccgacgccttcgacattggctccttcgatgaggaggacacaaaaggaatcaagttactggacagtgatcaggagctctaccgcaacttccccctcaccatctcggagcggtggcagcaggaggtggcagagactgtcttcgacaccatcaacgctgagacagaccggctggaggctcgcaagaaagccaagaacaagcagctgggccatgaggaagactacgccctgggcaaggactgcatcatgcatggctacatgtccaagatgggcaaccccttcctgacccagtggcagcggcggtacttctacctgttccccaaccgcctcgagtggcggggcgagggcgaggccccgcagagcctgctgaccatggaggagatccagtcggtggaggagacgcagatcaaggagcgcaagtgcctgctcctcaagatccgcggtgggaaacagttcattttgcagtgcgatagcgaccctgagctggtgcagtggaagaaggagctgcgcgacgcctaccgcgaggcccagcagctggtgcagcgggtgcccaagatgaagaacaagccgcgctcgcccgtggtggagctgagcaaggtgccgctggtccagcgcggcagtgccaacggcctctgacccgcccacccgccttttataaacctctaatttattttgtcgaatttttattatttgttttcccgccaagcggaaaaggttttattttgtaattattgtgatttcccgtggccccagcctggcccagctcccccgggaggggcccgcttgcctcggctcctgctgcaccaacccagccgctgcccggcgccctctgtcctgacttcaggggctgcccgctcccagtgtcttcctgtgggggaagagcacagccctcccgccccttccccgagggatgatgccacaccaagctgtgccaccctgggctctgtgggctgcactctgtgcccatgggcactgctgggtggcccatcccccctcaccaggggcaggcacagcacagggatccgacttgaattttcccactgcaccccctcctgctgcagaggggcaggccctgcactgtcctgctccacagtgttggcgagaggaggggcccgttgtctccctggccctcaaggcctcccacagtgactcgggctcctgtgcccttattcaggaaaagcctctgtgtcactggctgcctccactcccacttccctgacactgcggggcttggctgagagagtggcattggcagcaggtgctgctaccctccctgctgtcccctcttgccccaacccccagcacccgggctcagggaccacagcaaggcacctgcaggttgggccatactggcctcgcctggcctgaggtctcgctgatgctgggctgggtgcgaccccatctgcccaggacggggccggccaggtgggcgggcagcacagcaaggaggctggctggggcctatcagtgtgccccccatcctggcccatcagtgtacccccgcccaggctggccagccccacagcccacgtcctgtcagtgccgccgcctcgcccaccgcatgccccctcgtgccagtcgcgctgcctgtgtggtgtcgcgccttctcccccccggggctgggttggcgcaccctcccctcccgtctactcattccccggggcgtttctttgccgatttttgaatgtgattttaaagagtgaaaaatgagactatgcgtttttataaaaaatggtgcctga

SEQ ID NO: 54709 - DNA, 2162 bp, Homo sapiens
gtctagctgattcctgaggataaaacaaaggcgagtccgggcacccacgggtacatggctccggaggtcctgcagaagggcgtggcctacgacagcagtgccgactggttctctctggggtgcatgctcttcaagttgctgcgggggcacagccccttccggcagcacaagaccaaagacaagcatgagatcgaccgcatgacgctgacgatggccgtggagctgcccgactccttctcccctgaactacgctccctgctggaggggttgctgcagagggatgtcaaccggagattgggctgcctgggccgaggggctcaggaggtgaaagagagcccctttttccgctccctggactggcagatggtcttcttgcagaagtaccctcccccgctgatccccccacgaggggaggtgaacgcggccgacgccttcgacattggctccttcgatgaggaggacacaaaaggaatcaagttactggacagtgatcaggagctctaccgcaacttccccctcaccatctcggagcggtggcagcaggaggtggcagagactgtcttcgacaccatcaacgctgagacagaccggctggaggctcgcaagaaagccaagaacaagcagctgggccatgaggaagactacgccctgggcaaggactgcatcatgcatggctacatgtccaagatgggcaaccccttcctgacccagtggcagcggcggtacttctacctgttccccaaccgcctcgagtggcggggcgagggcgaggccccgcagagcctgctgaccatggaggagatccagtcggtggaggagacgcagatcaaggagcgcaagtgcctgctcctcaagatccgcggtgggaaacagttcattttgcagtgcgatagcgaccctgagctggtgcagtggaagaaggagctgcgcgacgcctaccgcgaggcccagcagctggtgcagcgggtgcccaagatgaagaacaagccgcgctcgcccgtggtggagctgagcaaggtgccgctggtccagcgcggcagtgccaacggcctctgacccgcccacccgccttttataaacctctaatttattttgtcgaatttttattatttgttttcccgccaagcggaaaaggttttattttgtaattattgtgatttcccgtggccccagcctggcccagctcccccgggaggggcccgcttgcctcggctcctgctgcaccaacccagccgctgcccggcgccctctgtcctgacttcaggggctgcccgctcccagtgtcttcctgtgggggaagagcacagccctcccgccccttccccgagggatgatgccacaccaagctgtgccaccctgggctctgtgggctgcactctgtgcccatgggcactgctgggtggcccatcccccctcaccaggggcaggcacagcacagggatccgacttgaattttcccactgcaccccctcctgctgcagaggggcaggccctgcactgtcctgctccacagtgttggcgagaggaggggcccgttgtctccctggccctcaaggcctcccacagtgactcgggctcctgtgcccttattcaggaaaagcctctgtgtcactggctgcctccactcccacttccctgacactgcggggcttggctgagagagtggcattggcagcaggtgctgctaccctccctgctgtcccctcttgccccaacccccagcacccgggctcagggaccacagcaaggcacctgcaggttgggccatactggcctcgcctggcctgaggtctcgctgatgctgggctgggtgcgaccccatctgcccaggacggggccggccaggtgggcgggcagcacagcaaggaggctggctggggcctatcagtgtgccccccatcctggcccatcagtgtacccccgcccaggctggccagccccacagcccacgtcctgtcagtgccgccgcctcgcccaccgcatgccccctcgtgccagtcgcgctgcctgtgtggtgtcgcgccttctcccccccggggctgggttggcgcaccctcccctcccgtctactcattccccggggcgtttctttgccgatttttgaatgtgattttaaagagtgaaaaatgagactatgcgtttttataaaaaatggtgcctga

SEQ ID NO: 54710 - DNA, 1999 bp, Homo sapiens
ctagaggatctctcataggttcgaggatcgaccgcatgacgctgacgatggccgtggagctgcccgactccttctcccctgaactacgctccctgctggaggggttgctgcagagggatgtcaaccggagattgggctgcctgggccgaggggctcaggaggtgaaagagagcccctttttccgctccctggactggcagatggtcttcttgcagaagtaccctcccccgctgatccccccacgaggggaggtgaacgcggccgacgccttcgacattggctccttcgatgaggaggacacaaaaggaatcaagttactggacagtgatcaggagctctaccgcaacttccccctcaccatctcggagcggtggcagcaggaggtggcagagactgtcttcgacaccatcaacgctgagacagaccggctggaggctcgcaagaaagccaagaacaagcagctgggccatgaggaagactacgccctgggcaaggactgcatcatgcatggctacatgtccaagatgggcaaccccttcctgacccagtggcagcggcggtacttctacctgttccccaaccgcctcgagtggcggggcgagggcgaggccccgcagagcctgctgaccatggaggagatccagtcggtggaggagacgcagatcaaggagcgcaagtgcctgctcctcaagatccgcggtgggaaacagttcattttgcagtgcgatagcgaccctgagctggtgcagtggaagaaggagctgcgcgacgcctaccgcgaggcccagcagctggtgcagcgggtgcccaagatgaagaacaagccgcgctcgcccgtggtggagctgagcaaggtgccgctggtccagcgcggcagtgccaacggcctctgacccgcccacccgccttttataaacctctaatttattttgtcgaatttttattatttgttttcccgccaagcggaaaaggttttattttgtaattattgtgatttcccgtggccccagcctggcccagctcccccgggaggggcccgcttgcctcggctcctgctgcaccaacccagccgctgcccggcgccctctgtcctgacttcaggggctgcccgctcccagtgtcttcctgtgggggaagagcacagccctcccgccccttccccgagggatgatgccacaccaagctgtgccaccctgggctctgtgggctgcactctgtgcccatgggcactgctgggtggcccatcccccctcaccaggggcaggcacagcacagggatccgacttgaattttcccactgcaccccctcctgctgcagaggggcaggccctgcactgtcctgctccacagtgttggcgagaggaggggcccgttgtctccctggccctcaaggcctcccacagtgactcgggctcctgtgcccttattcaggaaaagcctctgtgtcactggctgcctccactcccacttccctgacactgcggggcttggctgagagagtggcattggcagcaggtgctgctaccctccctgctgtcccctcttgccccaacccccagcacccgggctcagggaccacagcaaggcacctgcaggttgggccatactggcctcgcctggcctgaggtctcgctgatgctgggctgggtgcgaccccatctgcccaggacggggccggccaggtgggcgggcagcacagcaaggaggctggctggggcctatcagtgtgccccccatcctggcccatcagtgtacccccgcccaggctggccagccccacagcccacgtcctgtcagtgccgccgcctcgcccaccgcatgccccctcgtgccagtcgcgctgcctgtgtggtgtcgcgccttctcccccccggggctgggttggcgcaccctcccctcccgtctactcattccccggggcgtttctttgccgatttttgaatgtgattttaaagagtgaaaaatgagactatgcgtttttataaaaaatggtgcctga

SEQ ID NO: 54711 - DNA, 1609 bp, Homo sapiens
accagaagaggttcaccgcgatcgctgagacagaccggctggaggctcgcaagaaagccaagaacaagcagctgggccatgaggaagactacgccctgggcaaggactgcatcatgcatggctacatgtccaagatgggcaaccccttcctgacccagtggcagcggcggtacttctacctgttccccaaccgcctcgagtggcggggcgagggcgaggccccgcagagcctgctgaccatggaggagatccagtcggtggaggagacgcagatcaaggagcgcaagtgcctgctcctcaagatccgcggtgggaaacagttcattttgcagtgcgatagcgaccctgagctggtgcagtggaagaaggagctgcgcgacgcctaccgcgaggcccagcagctggtgcagcgggtgcccaagatgaagaacaagccgcgctcgcccgtggtggagctgagcaaggtgccgctggtccagcgcggcagtgccaacggcctctgacccgcccacccgccttttataaacctctaatttattttgtcgaatttttattatttgttttcccgccaagcggaaaaggttttattttgtaattattgtgatttcccgtggccccagcctggcccagctcccccgggaggggcccgcttgcctcggctcctgctgcaccaacccagccgctgcccggcgccctctgtcctgacttcaggggctgcccgctcccagtgtcttcctgtgggggaagagcacagccctcccgccccttccccgagggatgatgccacaccaagctgtgccaccctgggctctgtgggctgcactctgtgcccatgggcactgctgggtggcccatcccccctcaccaggggcaggcacagcacagggatccgacttgaattttcccactgcaccccctcctgctgcagaggggcaggccctgcactgtcctgctccacagtgttggcgagaggaggggcccgttgtctccctggccctcaaggcctcccacagtgactcgggctcctgtgcccttattcaggaaaagcctctgtgtcactggctgcctccactcccacttccctgacactgcggggcttggctgagagagtggcattggcagcaggtgctgctaccctccctgctgtcccctcttgccccaacccccagcacccgggctcagggaccacagcaaggcacctgcaggttgggccatactggcctcgcctggcctgaggtctcgctgatgctgggctgggtgcgaccccatctgcccaggacggggccggccaggtgggcgggcagcacagcaaggaggctggctggggcctatcagtgtgccccccatcctggcccatcagtgtacccccgcccaggctggccagccccacagcccacgtcctgtcagtgccgccgcctcgcccaccgcatgccccctcgtgccagtcgcgctgcctgtgtggtgtcgcgccttctcccccccggggctgggttggcgcaccctcccctcccgtctactcattccccggggcgtttctttgccgatttttgaatgtgattttaaagagtgaaaaatgagactatgcgtttttataaaaaatggtgcctga

SEQ ID NO: 54712 - DNA, 2078 bp, Homo sapiens
cgccggctgctgcggcaccaggcccctgcctgcttagaagtgagcagctggctcgggtttaaggaactcaccctggatcacagccagaaagtggcggctctgggattcaaactcaggctggggccgggcatggtggctcacgcctgtaatcccagcactttgggaggccaaggagcgcagatcacttgaggtcaggagtttgagaccagcctggccaacatggtgaaaccctgtctctaccaaaaaataccaaaaaaattagccgggcatggtggcacgcgcctgtactcccagctacccgggaggctgaggcgggaggatcgtttgaacctgggaggtggaggttgcagtgagccaagattgtgccacagccctccagcctgggcaacagagtggagaccctgtctcaaaacaaaaaagaaacccaggtggggccggctgagtctcctctgtctctcgcctcagactacgccctgggcaaggactgcatcatgcatggctacatgtccaagatgggcaaccccttcctgacccagtggcagcggcggtacttctacctgttccccaaccgcctcgagtggcggggcgagggcgaggccccggtaaggagcccatgcgggggtccgggagccgggcttccgggtggctggccggcccggctcttacctgcaccacccatccctggccctgcagcagagcctgctgaccatggaggagatccagtcggtggaggagacgcagatcaaggagcgcaagtgcctgctcctcaagatccgcggtgggaaacagttcattttgcagtgcgatagcgaccctgagctggtgcagtggaagaaggagctgcgcgacgcctaccgcgaggcccagcagctggtgcagcgggtgcccaagatgaagaacaagccgcgctcgcccgtggtggagctgagcaaggtgccgctggtccagcgcggcagtgccaacggcctctgacccgcccacccgccttttataaacctctaatttattttgtcgaatttttattatttgttttcccgccaagcggaaaaggttttattttgtaattattgtgatttcccgtggccccagcctggcccagctcccccgggaggggcccgcttgcctcggctcctgctgcaccaacccagccgctgcccggcgccctctgtcctgacttcaggggctgcccgctcccagtgtcttcctgtgggggaagagcacagccctcccgccccttccccgagggatgatgccacaccaagctgtgccaccctgggctctgtgggctgcactctgtgcccatgggcactgctgggtggcccatcccccctcaccaggggcaggcacagcacagggatccgacttgaattttcccactgcaccccctcctgctgcagaggggcaggccctgcactgtcctgctccacagtgttggcgagaggaggggcccgttgtctccctggccctcaaggcctcccacagtgactcgggctcctgtgcccttattcaggaaaagcctctgtgtcactggctgcctccactcccacttccctgacactgcggggcttggctgagagagtggcattggcagcaggtgctgctaccctccctgctgtcccctcttgccccaacccccagcacccgggctcagggaccacagcaaggcacctgcaggttgggccatactggcctcgcctggcctgaggtctcgctgatgctgggctgggtgcgaccccatctgcccaggacggggccggccaggtgggcgggcagcacagcaaggaggctggctggggcctatcagtgtgccccccatcctggcccatcagtgtacccccgcccaggctggccagccccacagcccacgtcctgtcagtgccgccgcctcgcccaccgcatgccccctcgtgccagtcgcgctgcctgtgtggtgtcgcgccttctcccccccggggctgggttggcgcaccctcccctcccgtctactcattccccggggcgtttctttgccgatttttgaatgtgattttaaagagtgaaaaatgagactatgcgtttttataaaaaatggtgcctga

SEQ ID NO: 54713 - DNA, 1426 bp, Homo sapiens
cggacgcgtgggtcgacccacgcgtccggggcgaggccccgcagagcctgctgaccatggaggagatccagtcggtggaggagacgcagatcaaggagcgcaagtgcctgctcctcaagatccgcggtgggaaacagttcattttgcagtgcgatagcgaccctgagctggtgcagtggaagaaggagctgcgcgacgcctaccgcgaggcccagcagctggtgcagcgggtgcccaagatgaagaacaagccgcgctcgcccgtggtggagctgagcaaggtgccgctggtccagcgcggcagtgccaacggcctctgacccgcccacccgccttttataaacctctaatttattttgtcgaatttttattatttgttttcccgccaagcggaaaaggttttattttgtaattattgtgatttcccgtggccccagcctggcccagctcccccgggaggggcccgcttgcctcggctcctgctgcaccaacccagccgctgcccggcgccctctgtcctgacttcaggggctgcccgctcccagtgtcttcctgtgggggaagagcacagccctcccgccccttccccgagggatgatgccacaccaagctgtgccaccctgggctctgtgggctgcactctgtgcccatgggcactgctgggtggcccatcccccctcaccaggggcaggcacagcacagggatccgacttgaattttcccactgcaccccctcctgctgcagaggggcaggccctgcactgtcctgctccacagtgttggcgagaggaggggcccgttgtctccctggccctcaaggcctcccacagtgactcgggctcctgtgcccttattcaggaaaagcctctgtgtcactggctgcctccactcccacttccctgacactgcggggcttggctgagagagtggcattggcagcaggtgctgctaccctccctgctgtcccctcttgccccaacccccagcacccgggctcagggaccacagcaaggcacctgcaggttgggccatactggcctcgcctggcctgaggtctcgctgatgctgggctgggtgcgaccccatctgcccaggacggggccggccaggtgggcgggcagcacagcaaggaggctggctggggcctatcagtgtgccccccatcctggcccatcagtgtacccccgcccaggctggccagccccacagcccacgtcctgtcagtgccgccgcctcgcccaccgcatgccccctcgtgccagtcgcgctgcctgtgtggtgtcgcgccttctcccccccggggctgggttggcgcaccctcccctcccgtctactcattccccggggcgtttctttgccgatttttgaatgtgattttaaagagtgaaaaatgagactatgcgtttttataaaaaatggtgcctga

SEQ ID NO: 54714 - DNA, 1520 bp, Homo sapiens
tggtgagtacctgaggtttgggatttggcagacggctggctcggggagaacctgcccaggctgagtgcatccaggcctcaccctactttccccacaagcccttctccgagttggcagggcgagggcgaggccccgcagagcctgctgaccatggaggagatccagtcggtggaggagacgcagatcaaggagcgcaagtgcctgctcctcaagatccgcggtgggaaacagttcattttgcagtgcgatagcgaccctgagctggtgcagtggaagaaggagctgcgcgacgcctaccgcgaggcccagcagctggtgcagcgggtgcccaagatgaagaacaagccgcgctcgcccgtggtggagctgagcaaggtgccgctggtccagcgcggcagtgccaacggcctctgacccgcccacccgccttttataaacctctaatttattttgtcgaatttttattatttgttttcccgccaagcggaaaaggttttattttgtaattattgtgatttcccgtggccccagcctggcccagctcccccgggaggggcccgcttgcctcggctcctgctgcaccaacccagccgctgcccggcgccctctgtcctgacttcaggggctgcccgctcccagtgtcttcctgtgggggaagagcacagccctcccgccccttccccgagggatgatgccacaccaagctgtgccaccctgggctctgtgggctgcactctgtgcccatgggcactgctgggtggcccatcccccctcaccaggggcaggcacagcacagggatccgacttgaattttcccactgcaccccctcctgctgcagaggggcaggccctgcactgtcctgctccacagtgttggcgagaggaggggcccgttgtctccctggccctcaaggcctcccacagtgactcgggctcctgtgcccttattcaggaaaagcctctgtgtcactggctgcctccactcccacttccctgacactgcggggcttggctgagagagtggcattggcagcaggtgctgctaccctccctgctgtcccctcttgccccaacccccagcacccgggctcagggaccacagcaaggcacctgcaggttgggccatactggcctcgcctggcctgaggtctcgctgatgctgggctgggtgcgaccccatctgcccaggacggggccggccaggtgggcgggcagcacagcaaggaggctggctggggcctatcagtgtgccccccatcctggcccatcagtgtacccccgcccaggctggccagccccacagcccacgtcctgtcagtgccgccgcctcgcccaccgcatgccccctcgtgccagtcgcgctgcctgtgtggtgtcgcgccttctcccccccggggctgggttggcgcaccctcccctcccgtctactcattccccggggcgtttctttgccgatttttgaatgtgattttaaagagtgaaaaatgagactatgcgtttttataaaaaatggtgcctga

SEQ ID NO: 54715 - DNA, 1804 bp, Homo sapiens
gcggcggcggcggcgccccgactgcagtcccggcgggagcggagccgagccggggccgggcccgagccggcgccatggggcggcgccgcctgtgagcggcggcgagcggaccgcgggcgccgagcagggccaggcgggaggcgtcggcgcccgaggccgagcgagccgcggccgggccgggccgagcgccgagcgagcaggagcggcggcggcggcggcggcggcgggaggaggcagcgccgccgccaagatggcggacctggaggcggtgctggccgacgtgagctacctgatggccatggagaagagcaaggccacgccggccgcgcgcgccagcaagaagatactgctgcccgagcccagcatccgcagtgtcatgcagaagtacctggaggaccggggcgaggtgacctttgagaagatcttttcccagaagctggggtacctgctcttccgagacttctgcctgaaccacctggaggaggccaggcccttggtggaattctatgaggagatcaagaagtacgagaagctggagacggaggaggagcgtgtggcccgcagccgggagatcttcgactcatacatcatgaaggagctgctggcctgctcgcatcccttctcgaagagtgccactgagcatgtccaaggccacctggggaagaagcaggtgcctccggatctcttccagccatacatcgaagagatttgtcaaaacctccgaggggacgtgttccagaaattcattgagagcgataagttcacacggttttgccagtggaagaatgtggagctcaacatccacctgaccatgaatgacttcagcgtgcatcgcatcattgggcgcgggggctttggcgaggtctatgggtgccggaaggctgacacaggcaagatgtacgccatgaagtgcctggacaaaaagcgcatcaagatgaagcagggggagaccctggccctgaacgagcgcatcatgctctcgctcgtcagcactggggactgcccattcattgtctgcatgtcatacgcgttccacacgccagacaagctcagcttcatcctggacctcatgaacggtggggacctgcactaccacctctcccagcacggggtcttctcagaggctgacatgcgcttctatgcggccgagatcatcctgggcctggagcacatgcacaaccgcttcgtggtctaccgggacctgaagccagccaacatccttctggacgagcatggccacgtgcggatctcggacctgggcctggcctgtgacttctccaagaagaagccccatgccagcgtgggcacccacgggtacatggctccggaggtcctgcagaagggcgtggcctacgacagcagtgccgactggttctctctggggtgcatgctcttcaagttgctgcgggggcacagccccttccggcagcacaagaccaaagacaagcatgagatcgaccgcatgacgctgacgatggccgtggagctgcccgactccttctcccctgaactacgctccctgctggaggggttgctgcagagggatgtcaaccggagattgggctgcctgggccgaggggctcaggaggtgaaagagagcccctttttccgctccctggactggcagatggtcttcttgcagaagtaccctcccccgtgatccccccccgaaggggggtggaccgcgtgcgaagcctttcgacaattgggccctcgcctagggggcgcccagggaccacggttctgggcaggggtctcagaggcctacgggagattccccctacattctggggggggcgccagg

SEQ ID NO: 54716 - DNA, 1670 bp, Homo sapiens
  misc_feature (1606)..(1606): n is a, c, g, or t
gcggcggcggcggcgccccgactgcagtcccggcgggagcggagccgagccggggccgggcccgagccggcgccatggggcggcgccgcctgtgagcggcggcgagcggaccgcgggcgccgagcagggccaggcgggaggcgtcggcgcccgaggccgagcgagccgcggccgggccgggccgagcgccgagcgagcaggagcggcggcggcggcggcggcggcgggaggaggcagcgccgccgccaagatggcggacctggaggcggtgctggccgacgtgagctacctgatggccatggagaagagcaaggccacgccggccgcgcgcgccagcaagaagatactgctgcccgagcccagcatccgcagtgtcatgcagaagtacctggaggaccggggcgaggtgacctttgagaagatcttttcccagaagctggggtacctgctcttccgagacttctgcctgaaccacctggaggaggccaggcccttggtggaattctatgaggagatcaagaagtacgagaagctggagacggaggaggagcgtgtggcccgcagccgggagatcttcgactcatacatcatgaaggagctgctggcctgctcgcatcccttctcgaagagtgccactgagcatgtccaaggccacctggggaagaagcaggtgcctccggatctcttccagccatacatcgaagagatttgtcaaaacctccgaggggacgtgttccagaaattcattgagagcgataagttcacacggttttgccagtggaagaatgtggagctcaacatccacctgaccatgaatgacttcagcgtgcatcgcatcattgggcgcgggggctttggcgaggtctatgggtgccggaaggctgacacaggcaagatgtacgccatgaagtgcctggacaaaaagcgcatcaagatgaagcagggggagaccctggccctgaacgagcgcatcatgctctcgctcgtcagcactggggactgcccattcattgtctgcatgtcatacgcgttccacacgccagacaagctcagcttcatcctggacctcatgaacggtggggacctgcactaccacctctcccagcacggggtcttctcagaggctgacatgcgcttctatgcggccgagatcatcctgggcctggagcacatgcacaaccgcttcgtggtctaccgggacctgaagccagccaacatccttctggacgagcatggccacgtgcggatctcggacctgggcctggcctgtgacttctccaagaagaagccccatgccagcgtgggcacccacgggtacatggctccggaggtcctgcagaagggcgtggcctacgacagcagtgccgactggttctctctggggtgcatgctcttcaagttgctgcgggggcacagccccttccggcagcacaagaccaaagacaagcatgagatcgaccgcatgacgctgacgatggccgtggagctgcccgactccttctcccctgaactacgctccctgctggaggggttgctgcagagggatgtcaaccggagattgggctgcctgggccgagggctcaggaggtgacagagccccttttcngtcctggactgcaatgcttctgcagagtacctcccggtgatcccagagggaagtaacggcgacc

SEQ ID NO: 54717 - DNA, 1545 bp, Homo sapiens
gcggcggcggcggcgccccgactgcagtcccggcgggagcggagccgagccggggccgggcccgagccggcgccatggggcggcgccgcctgtgagcggcggcgagcggaccgcgggcgccgagcagggccaggcgggaggcgtcggcgcccgaggccgagcgagccgcggccgggccgggccgagcgccgagcgagcaggagcggcggcggcggcggcggcggcgggaggaggcagcgccgccgccaagatggcggacctggaggcggtgctggccgacgtgagctacctgatggccatggagaagagcaaggccacgccggccgcgcgcgccagcaagaagatactgctgcccgagcccagcatccgcagtgtcatgcagaagtacctggaggaccggggcgaggtgacctttgagaagatcttttcccagaagctggggtacctgctcttccgagacttctgcctgaaccacctggaggaggccaggcccttggtggaattctatgaggagatcaagaagtacgagaagctggagacggaggaggagcgtgtggcccgcagccgggagatcttcgactcatacatcatgaaggagctgctggcctgctcgcatcccttctcgaagagtgccactgagcatgtccaaggccacctggggaagaagcaggtgcctccggatctcttccagccatacatcgaagagatttgtcaaaacctccgaggggacgtgttccagaaattcattgagagcgataagttcacacggttttgccagtggaagaatgtggagctcaacatccacctgaccatgaatgacttcagcgtgcatcgcatcattgggcgcgggggctttggcgaggtctatgggtgccggaaggctgacacaggcaagatgtacgccatgaagtgcctggacaaaaagcgcatcaagatgaagcagggggagaccctggccctgaacgagcgcatcatgctctcgctcgtcagcactggggactgcccattcattgtctgcatgtcatacgcgttccacacgccagacaagctcagcttcatcctggacctcatgaacggtggggacctgcactaccacctctcccagcacggggtcttctcagaggctgacatgcgcttctatgcggccgagatcatcctgggcctggagcacatgcacaaccgcttcgtggtctaccgggacctgaagccagccaacatccttctggacgagcatggccacgtgcggatctcggacctgggcctggcctgtgacttctccaagaagaagccccatgccagcgtgggcacccacgggtacatggctccggaggtcctgcagaagggcgtggcctacgacagcagtgccgactggttctctctggggtgcatgctcttcaagttgctgcgggggcacagccccttccggcagcacaagaccaaagacaagcatgagatcgaccgcatgacgctgacgatggcgtggagtgccgatcttttcctgaaatagtcctggtggagggtgtgcggggggtgttccggggatgg

SEQ ID NO: 54718 - DNA, 1802 bp, Homo sapiens
gcggcggcggcggcgccccgactgcagtcccggcgggagcggagccgagccggggccgggcccgagccggcgccatggggcggcgccgcctgtgagcggcggcgagcggaccgcgggcgccgagcagggccaggcgggaggcgtcggcgcccgaggccgagcgagccgcggccgggccgggccgagcgccgagcgagcaggagcggcggcggcggcggcggcggcgggaggaggcagcgccgccgccaagatggcggacctggaggcggtgctggccgacgtgagctacctgatggccatggagaagagcaaggccacgccggccgcgcgcgccagcaagaagatactgctgcccgagcccagcatccgcagtgtcatgcagaagtacctggaggaccggggcgaggtgacctttgagaagatcttttcccagaagctggggtacctgctcttccgagacttctgcctgaaccacctggaggaggccaggcccttggtggaattctatgaggagatcaagaagtacgagaagctggagacggaggaggagcgtgtggcccgcagccgggagatcttcgactcatacatcatgaaggagctgctggcctgctcgcatcccttctcgaagagtgccactgagcatgtccaaggccacctggggaagaagcaggtgcctccggatctcttccagccatacatcgaagagatttgtcaaaacctccgaggggacgtgttccagaaattcattgagagcgataagttcacacggttttgccagtggaagaatgtggagctcaacatccacctgaccatgaatgacttcagcgtgcatcgcatcattgggcgcgggggctttggcgaggtctatgggtgccggaaggctgacacaggcaagatgtacgccatgaagtgcctggacaaaaagcgcatcaagatgaagcagggggagaccctggccctgaacgagcgcatcatgctctcgctcgtcagcactggggactgcccattcattgtctgcatgtcatacgcgttccacacgccagacaagctcagcttcatcctggacctcatgaacggtggggacctgcactaccacctctcccagcacggggtcttctcagaggctgacatgcgcttctatgcggccgagatcatcctgggcctggagcacatgcacaaccgcttcgtggtctaccgggacctgaagatggccgccaacatgtacagggtcggagactacgtctactttgagaactcctccagcaacccagtacctgatccggagaatcgaggagctcaacaagacggccaatgggaacgtggaggccaaagtggtgtgcttctaccggaggcgggacatctccagcaccctcatcgccctggccgacaagcacgcaagggaaatagaagaggaaatggagaatccggaaatggtggacctgcccgagaaactaaagcaccagctgcggcatcgggagctgttcctctcccggcagctggagtctctgcccgccacgcacatcaggggcaagtgcagcgtcaccctgctcaacgagaccgagtcgctcaagtcctacctggagcgggaggatttcttcttctattctctagtctacgacccacagcagaagaccctgctggcagataaaggagagattcgagtaggaaaccggtaccaggcagacatcaccgactgctaaaagaaggcgaggaggatggccgagaccagtccaggtcggagacccaggtgtgggaggcagcacaacccactcacagacaagcagatcgaccagttcctggag

SEQ ID NO: 54719 - DNA, 1005 bp, Homo sapiens
gcggcggcggcggcgccccgactgcagtcccggcgggagcggagccgagccggggccgggcccgagccggcgccatggggcggcgccgcctgtgagcggcggcgagcggaccgcgggcgccgagcagggccaggcgggaggcgtcggcgcccgaggccgagcgagccgcggccgggccgggccgagcgccgagcgagcaggagcggcggcggcggcggcggcggcgggaggaggcagcgccgccgccaagatggcggacctggaggcggtgctggccgacgtgagctacctgatggccatggagaagagcaaggccacgccggccgcgcgcgccagcaagaagatactgctgcccgagcccagcatccgcagtgtcatgcagaagtacctggaggaccggggcgaggtgacctttgagaagatcttttcccagaagctggggtacctgctcttccgagacttctgcctgaaccacctggaggaggccaggcccttggtggaattctatgaggagatcaagaagtacgagaagctggagacggaggaggagcgtgtggcccgcagccgggagatcttcgactcatacatcatgaaggagctgctggcctgctcgcatcccttctcgaagagtgccactgagcatgtccaaggccacctggggaagaagcaggtgcctccggatctcttccagccatacatcgaagagatttgtcaaaacctccgaggggacgtgttccagaaattcattgagagcgataagttcacacggttttgccagtggaagaatgtggagctcaacatccacctgaccatgaatgacttcagcgtgcatcgcatcattgggcgcgggggctttggcgaggtctatgggtgccggaaggctgacacaggcaagatgtacgccagtgcagccaaaagcagcttcatccaccaaggcatccgctgaagaccaacccctcgcctcagttgttttttatttttctaataaagtcatgtctcccttca

SEQ ID NO: 54720 - DNA, 894 bp, Homo sapiens
gcggcggcggcggcgccccgactgcagtcccggcgggagcggagccgagccggggccgggcccgagccggcgccatggggcggcgccgcctgtgagcggcggcgagcggaccgcgggcgccgagcagggccaggcgggaggcgtcggcgcccgaggccgagcgagccgcggccgggccgggccgagcgccgagcgagcaggagcggcggcggcggcggcggcggcgggaggaggcagcgccgccgccaagatggcggacctggaggcggtgctggccgacgtgagctacctgatggccatggagaagagcaaggccacgccggccgcgcgcgccagcaagaagatactgctgcccgagcccagcatccgcagtgtcatgcagaagtacctggaggaccggggcgaggtgacctttgagaagatcttttcccagaagctggggtacctgctcttccgagacttctgcctgaaccacctggaggaggccaggcccttggtggaattctatgaggagatcaagaagtacgagaagctggagacggaggaggagcgtgtggcccgcagccgggagatcttcgactcatacatcatgaaggagctgctggcctgctcgcatcccttctcgaagagtgccactgagcatgtccaaggccacctggggaagaagcaggtgcctccggatctcttccagccatacatcgaagagatttgtcaaaacctccgaggggacgtgttccagaaattcattgagagcgataagttcacacggttttgccagtggaagaatgtggagctcaacatccacgtctgaccatgaacgacttccagcgtgcttcgccatcatagggctcgaagcgctgttgtgccgaggtgctaataggctcccgagggttt

SEQ ID NO: 54721 - DNA, 831 bp, Homo sapiens
gcggcggcggcggcgccccgactgcagtcccggcgggagcggagccgagccggggccgggcccgagccggcgccatggggcggcgccgcctgtgagcggcggcgagcggaccgcgggcgccgagcagggccaggcgggaggcgtcggcgcccgaggccgagcgagccgcggccgggccgggccgagcgccgagcgagcaggagcggcggcggcggcggcggcggcgggaggaggcagcgccgccgccaagatggcggacctggaggcggtgctggccgacgtgagctacctgatggccatggagaagagcaaggccacgccggccgcgcgcgccagcaagaagatactgctgcccgagcccagcatccgcagtgtcatgcagaagtacctggaggaccggggcgaggtgacctttgagaagatcttttcccagaagctggggtacctgctcttccgagacttctgcctgaaccacctggaggaggccaggcccttggtggaattctatgaggagatcaagaagtacgagaagctggagacggaggaggagcgtgtggcccgcagccgggagatcttcgactcatacatcatgaaggagctgctggcctgctcgcatcccttctcgaagagtgccactgagcatgtccaaggccacctggggaagaagcaggtgcctccggatctcttccagccatacatcgaagagatttgtcaaaacctccgaggggacgtgttccagaaattcattgagagcgataagttcacacggattttgccagctggaagaactgtggacgctcaacgatcctccatgtccactctccaggcggc

SEQ ID NO: 54722 - DNA, 380 bp, Homo sapiens
gtgagtaccctggcgccttgggcatgctgctggctgtgcccccatgaggacaagggctgtgtcccgtcacctggaaccccctccaaggtcccagcctccttggaggagctcataagttggggcatggccagccctgtccaatgttctcagagtggaggggctgccctgggagttggagctgctggaaccagctagtaactggcttccagaggggcccttgtcacagatgatgatgatagcagctttttatgtttatcaaacatttattaagcactgggcatagggttgcaaaatttaccagtgttaaaacccacaaccctacgatgtaggaacttctgttctcccatttgagagatgaggaaacagctcaggcttaagga

SEQ ID NO: 54723 - DNA, 428 bp, Homo sapiens
ggccaggcaggctggggagagccccagctgacagagctgggcttggcatgtgcagagcgaccctgagctggtgcagtggaagaaggagctgcgcgacgcctaccgcgaggcccagcagctggtgcagcgggtgcccaagatgaagaacaagccgcgctcgcccgtggtggagctgagcaaggtgccgctggtccagcgcggcagtgccaacggcctctgacccgcccacccgccttttataaacctctaatttattttgtcgaatttttattatttgttttcccgccaagcggaaaaggttttattttgtaattattgtgatttcccgtggccccagcctggcccagctcccccgggaggggcccgcttgcctcggctcctgctgcaccaacccagccgctgcccggcgccctctgtcctgacttcag

SEQ ID NO: 54724 - DNA, 3426 bp, Homo sapiens
gcggcggcggcggcgccccgactgcagtcccggcgggagcggagccgagccggggccgggcccgagccggcgccatggggcggcgccgcctgtgagcggcggcgagcggaccgcgggcgccgagcagggccaggcgggaggcgtcggcgcccgaggccgagcgagccgcggccgggccgggccgagcgccgagcgagcaggagcggcggcggcggcggcggcggcgggaggaggcagcgccgccgccaagatggcggacctggaggcggtgctggccgacgtgagctacctgatggccatggagaagagcaaggccacgccggccgcgcgcgccagcaagaagatactgctgcccgagcccagcatccgcagtgtcatgcagaagtacctggaggaccggggcgaggtgacctttgagaagatcttttcccagaagctggggtacctgctcttccgagacttctgcctgaaccacctggaggaggccaggcccttggtggaattctatgaggagatcaagaagtacgagaagctggagacggaggaggagcgtgtggcccgcagccgggagatcttcgactcatacatcatgaaggagctgctggcctgctcgcatcccttctcgaagagtgccactgagcatgtccaaggccacctggggaagaagcaggtgcctccggatctcttccagccatacatcgaagagatttgtcaaaacctccgaggggacgtgttccagaaattcattgagagcgataagttcacacggttttgccagtggaagaatgtggagctcaacatccacctgaccatgaatgacttcagcgtgcatcgcatcattgggcgcgggggctttggcgaggtctatgggtgccggaaggctgacacaggcaagatgtacgccatgaagtgcctggacaaaaagcgcatcaagatgaagcagggggagaccctggccctgaacgagcgcatcatgctctcgctcgtcagcactggggactgcccattcattgtctgcatgtcatacgcgttccacacgccagacaagctcagcttcatcctggacctcatgaacggtggggacctgcactaccacctctcccagcacggggtcttctcagaggctgacatgcgcttctatgcggccgagatcatcctgggcctggagcacatgcacaaccgcttcgtggtctaccgggacctgaagccagccaacatccttctggacgagcatggccacgtgcggatctcggacctgggcctggcctgtgacttctccaagaagaagccccatgccagcgtgggcacccacgggtacatggctccggaggtcctgcagaagggcgtggcctacgacagcagtgccgactggttctctctggggtgcatgctcttcaagttgctgcgggggcacagccccttccggcagcacaagaccaaagacaagcatgagatcgaccgcatgacgctgacgatggccgtggagctgcccgactccttctcccctgaactacgctccctgctggaggggttgctgcagagggatgtcaaccggagattgggctgcctgggccgaggggctcaggaggtgaaagagagcccctttttccgctccctggactggcagatggtcttcttgcagaagtaccctcccccgctgatccccccacgaggggaggtgaacgcggccgacgccttcgacattggctccttcgatgaggaggacacaaaaggaatcaagttactggacagtgatcaggagctctaccgcaacttccccctcaccatctcggagcggtggcagcaggaggtggcagagactgtcttcgacaccatcaacgctgagacagaccggctggaggctcgcaagaaagccaagaacaagcagctgggccatgaggaagactacgccctgggcaaggactgcatcatgcatggctacatgtccaagatgggcaaccccttcctgacccagtggcagcggcggtacttctacctgttccccaaccgcctcgagtggcggggcgagggcgaggccccgcagagcctgctgaccatggaggagatccagtcggtggaggagacgcagatcaaggagcgcaagtgcctgctcctcaagatccgcggtgggaaacagttcattttgcagtgcgatagcgaccctgagctggtgcagtggaagaaggagctgcgcgacgcctaccgcgaggcccagcagctggtgcagcgggtgcccaagatgaagaacaagccgcgctcgcccgtggtggagctgagcaaggtgccgctggtccagcgcggcagtgccaacggcctctgacccgcccacccgccttttataaacctctaatttattttgtcgaatttttattatttgttttcccgccaagcggaaaaggttttattttgtaattattgtgatttcccgtggccccagcctggcccagctcccccgggaggggcccgcttgcctcggctcctgctgcaccaacccagccgctgcccggcgccctctgtcctgacttcaggggctgcccgctcccagtgtcttcctgtgggggaagagcacagccctcccgccccttccccgagggatgatgccacaccaagctgtgccaccctgggctctgtgggctgcactctgtgcccatgggcactgctgggtggcccatcccccctcaccaggggcaggcacagcacagggatccgacttgaattttcccactgcaccccctcctgctgcagaggggcaggccctgcactgtcctgctccacagtgttggcgagaggaggggcccgttgtctccctggccctcaaggcctcccacagtgactcgggctcctgtgcccttattcaggaaaagcctctgtgtcactggctgcctccactcccacttccctgacactgcggggcttggctgagagagtggcattggcagcaggtgctgctaccctccctgctgtcccctcttgccccaacccccagcacccgggctcagggaccacagcaaggcacctgcaggttgggccatactggcctcgcctggcctgaggtctcgctgatgctgggctgggtgcgaccccatctgcccaggacggggccggccaggtgggcgggcagcacagcaaggaggctggctggggcctatcagtgtgccccccatcctggcccatcagtgtacccccgcccaggctggccagccccacagcccacgtcctgtcagtgccgccgcctcgcccaccgcatgccccctcgtgccagtcgcgctgcctgtgtggtgtcgcgccttctcccccccggggctgggttggcgcaccctcccctcccgtctactcattccccggggcgtttctttgccgatttttgaatgtgattttaaagagtgaaaaatgagactatgcgtttttataaaaaatggtgcctga

SEQ ID NO: 54725 - DNA, 3184 bp, Homo sapiens
acgggctggcctccttcctggaggggtggcgacaccaccacagtgccctcagctcgcgtttctgggcctgcagcccccacgggctctgggggcttctgcttactgcgcccccctgacccagcatccgcagtgtcatgcagaagtacctggaggaccggggcgaggtgacctttgagaagatcttttcccagaagctggggtacctgctcttccgagacttctgcctgaaccacctggaggaggccaggcccttggtggaattctatgaggagatcaagaagtacgagaagctggagacggaggaggagcgtgtggcccgcagccgggagatcttcgactcatacatcatgaaggagctgctggcctgctcgcatcccttctcgaagagtgccactgagcatgtccaaggccacctggggaagaagcaggtgcctccggatctcttccagccatacatcgaagagatttgtcaaaacctccgaggggacgtgttccagaaattcattgagagcgataagttcacacggttttgccagtggaagaatgtggagctcaacatccacctgaccatgaatgacttcagcgtgcatcgcatcattgggcgcgggggctttggcgaggtctatgggtgccggaaggctgacacaggcaagatgtacgccatgaagtgcctggacaaaaagcgcatcaagatgaagcagggggagaccctggccctgaacgagcgcatcatgctctcgctcgtcagcactggggactgcccattcattgtctgcatgtcatacgcgttccacacgccagacaagctcagcttcatcctggacctcatgaacggtggggacctgcactaccacctctcccagcacggggtcttctcagaggctgacatgcgcttctatgcggccgagatcatcctgggcctggagcacatgcacaaccgcttcgtggtctaccgggacctgaagccagccaacatccttctggacgagcatggccacgtgcggatctcggacctgggcctggcctgtgacttctccaagaagaagccccatgccagcgtgggcacccacgggtacatggctccggaggtcctgcagaagggcgtggcctacgacagcagtgccgactggttctctctggggtgcatgctcttcaagttgctgcgggggcacagccccttccggcagcacaagaccaaagacaagcatgagatcgaccgcatgacgctgacgatggccgtggagctgcccgactccttctcccctgaactacgctccctgctggaggggttgctgcagagggatgtcaaccggagattgggctgcctgggccgaggggctcaggaggtgaaagagagcccctttttccgctccctggactggcagatggtcttcttgcagaagtaccctcccccgctgatccccccacgaggggaggtgaacgcggccgacgccttcgacattggctccttcgatgaggaggacacaaaaggaatcaagttactggacagtgatcaggagctctaccgcaacttccccctcaccatctcggagcggtggcagcaggaggtggcagagactgtcttcgacaccatcaacgctgagacagaccggctggaggctcgcaagaaagccaagaacaagcagctgggccatgaggaagactacgccctgggcaaggactgcatcatgcatggctacatgtccaagatgggcaaccccttcctgacccagtggcagcggcggtacttctacctgttccccaaccgcctcgagtggcggggcgagggcgaggccccgcagagcctgctgaccatggaggagatccagtcggtggaggagacgcagatcaaggagcgcaagtgcctgctcctcaagatccgcggtgggaaacagttcattttgcagtgcgatagcgaccctgagctggtgcagtggaagaaggagctgcgcgacgcctaccgcgaggcccagcagctggtgcagcgggtgcccaagatgaagaacaagccgcgctcgcccgtggtggagctgagcaaggtgccgctggtccagcgcggcagtgccaacggcctctgacccgcccacccgccttttataaacctctaatttattttgtcgaatttttattatttgttttcccgccaagcggaaaaggttttattttgtaattattgtgatttcccgtggccccagcctggcccagctcccccgggaggggcccgcttgcctcggctcctgctgcaccaacccagccgctgcccggcgccctctgtcctgacttcaggggctgcccgctcccagtgtcttcctgtgggggaagagcacagccctcccgccccttccccgagggatgatgccacaccaagctgtgccaccctgggctctgtgggctgcactctgtgcccatgggcactgctgggtggcccatcccccctcaccaggggcaggcacagcacagggatccgacttgaattttcccactgcaccccctcctgctgcagaggggcaggccctgcactgtcctgctccacagtgttggcgagaggaggggcccgttgtctccctggccctcaaggcctcccacagtgactcgggctcctgtgcccttattcaggaaaagcctctgtgtcactggctgcctccactcccacttccctgacactgcggggcttggctgagagagtggcattggcagcaggtgctgctaccctccctgctgtcccctcttgccccaacccccagcacccgggctcagggaccacagcaaggcacctgcaggttgggccatactggcctcgcctggcctgaggtctcgctgatgctgggctgggtgcgaccccatctgcccaggacggggccggccaggtgggcgggcagcacagcaaggaggctggctggggcctatcagtgtgccccccatcctggcccatcagtgtacccccgcccaggctggccagccccacagcccacgtcctgtcagtgccgccgcctcgcccaccgcatgccccctcgtgccagtcgcgctgcctgtgtggtgtcgcgccttctcccccccggggctgggttggcgcaccctcccctcccgtctactcattccccggggcgtttctttgccgatttttgaatgtgattttaaagagtgaaaaatgagactatgcgtttttataaaaaatggtgcctga

SEQ ID NO: 54726 - DNA, 3517 bp, Homo sapiens
gcggcggcggcggcgccccgactgcagtcccggcgggagcggagccgagccggggccgggcccgagccggcgccatggggcggcgccgcctgtgagcggcggcgagcggaccgcgggcgccgagcagggccaggcgggaggcgtcggcgcccgaggccgagcgagccgcggccgggccgggccgagcgccgagcgagcaggagcggcggcggcggcggcggcggcgggaggaggcagcgccgccgccaagatggcggacctggaggcggtgctggccgacgtgagctacctgatggccatggagaagagcaaggccacgccggccgcgcgcgccagcaagaagatactgctgcccgagcccagcatccgcagtgtcatgcagaagtacctggaggaccggggcgaggtgacctttgagaagatcttttcccagaagctggggtacctgctcttccgagacttctgcctgaaccacctggaggaggccaggcccttggtggaattctatgaggagatcaagaagtacgagaagctggagacggaggaggagcgtgtggcccgcagccgggagatcttcgactcatacatcatgaaggagctgctggcctgctcgcatcccttctcgaagagtgccactgagcatgtccaaggccacctggggaagaagcaggtgcctccggatctcttccagccatacatcgaagagatttgtcaaaacctccgaggggacgtgttccagaaattcattgagagcgataagttcacacggttttgccagtggaagaatgtggagctcaacatccacctgaccatgaatgacttcagcgtgcatcgcatcattgggcgcgggggctttggcgaggtctatgggtgccggaaggctgacacaggcaagatgtacgccatgaagtgcctggacaaaaagcgcatcaagatgaagcagggggagaccctggccctgaacgagcgcatcatgctctcgctcgtcagcactggggactgcccattcattgtctgcatgtcatacgcgttccacacgccagacaagctcagcttcatcctggacctcatgaacggtggggacctgcactaccacctctcccagcacggggtcttctcagaggctgacatgcgcttctatgcggccgagatcatcctgggcctggagcacatgcacaaccgcttcgtggtctaccgggacctgaagccagccaacatccttctggacgagcatggccacgtgcggatctcggacctgggcctggcctgtgacttctccaagaagaagccccatgccagcgtgggcacccacgggtacatggctccggaggtcctgcagaagggcgtggcctacgacagcagtgccgactggttctctctggggtgcatgctcttcaagttgctgcgggggcacagccccttccggcagcacaagaccaaagacaagcatgagatcgaccgcatgacgctgacgatggccgtggagctgcccgactccttctcccctgaactacgctccctgctggaggggttgctgcagagggatgtcaaccggagattgggctgcctgggccgaggggctcaggaggtgaaagagagcccctttttccgctccctggactggcagatggtcttcttgcagaagtaccctcccccgctgatccccccacgaggggaggtgaacgcggccgacgccttcgacattggctccttcgatgaggaggacacaaaaggaatcaagttactggacagtgatcaggagctctaccgcaacttccccctcaccatctcggagcggtggcagcaggaggtggcagagactgtcttcgacaccatcaacgctgagacagaccggctggaggctcgcaagaaagccaagaacaagcagctgggccatgaggaagactacgccctgggcaaggactgcatcatgcatggctacatgtccaagatgggcaaccccttcctgacccagtggcagcggcggtacttctacctgttccccaaccgcctcgagtggcggggcgagggcgaggccccggtaaggagcccatgcgggggtccgggagccgggcttccgggtggctggccggcccggctcttacctgcaccacccatccctggccctgcagcagagcctgctgaccatggaggagatccagtcggtggaggagacgcagatcaaggagcgcaagtgcctgctcctcaagatccgcggtgggaaacagttcattttgcagtgcgatagcgaccctgagctggtgcagtggaagaaggagctgcgcgacgcctaccgcgaggcccagcagctggtgcagcgggtgcccaagatgaagaacaagccgcgctcgcccgtggtggagctgagcaaggtgccgctggtccagcgcggcagtgccaacggcctctgacccgcccacccgccttttataaacctctaatttattttgtcgaatttttattatttgttttcccgccaagcggaaaaggttttattttgtaattattgtgatttcccgtggccccagcctggcccagctcccccgggaggggcccgcttgcctcggctcctgctgcaccaacccagccgctgcccggcgccctctgtcctgacttcaggggctgcccgctcccagtgtcttcctgtgggggaagagcacagccctcccgccccttccccgagggatgatgccacaccaagctgtgccaccctgggctctgtgggctgcactctgtgcccatgggcactgctgggtggcccatcccccctcaccaggggcaggcacagcacagggatccgacttgaattttcccactgcaccccctcctgctgcagaggggcaggccctgcactgtcctgctccacagtgttggcgagaggaggggcccgttgtctccctggccctcaaggcctcccacagtgactcgggctcctgtgcccttattcaggaaaagcctctgtgtcactggctgcctccactcccacttccctgacactgcggggcttggctgagagagtggcattggcagcaggtgctgctaccctccctgctgtcccctcttgccccaacccccagcacccgggctcagggaccacagcaaggcacctgcaggttgggccatactggcctcgcctggcctgaggtctcgctgatgctgggctgggtgcgaccccatctgcccaggacggggccggccaggtgggcgggcagcacagcaaggaggctggctggggcctatcagtgtgccccccatcctggcccatcagtgtacccccgcccaggctggccagccccacagcccacgtcctgtcagtgccgccgcctcgcccaccgcatgccccctcgtgccagtcgcgctgcctgtgtggtgtcgcgccttctcccccccggggctgggttggcgcaccctcccctcccgtctactcattccccggggcgtttctttgccgatttttgaatgtgattttaaagagtgaaaaatgagactatgcgtttttataaaaaatggtgcctga

SEQ ID NO: 54727 - DNA, 2862 bp, Homo sapiens
tcgagctcggcctcgcttactacgtgctgaaggagctgctggctgctcgcatcccttctcgaagagtgccactgagcatgtccaaggccacctggggaagaagcaggtgcctccggatctcttccagccatacatcgaagagatttgtcaaaacctccgaggggacgtgttccagaaattcattgagagcgataagttcacacggttttgccagtggaagaatgtggagctcaacatccacctgaccatgaatgacttcagcgtgcatcgcatcattgggcgcgggggctttggcgaggtctatgggtgccggaaggctgacacaggcaagatgtacgccatgaagtgcctggacaaaaagcgcatcaagatgaagcagggggagaccctggccctgaacgagcgcatcatgctctcgctcgtcagcactggggactgcccattcattgtctgcatgtcatacgcgttccacacgccagacaagctcagcttcatcctggacctcatgaacggtggggacctgcactaccacctctcccagcacggggtcttctcagaggctgacatgcgcttctatgcggccgagatcatcctgggcctggagcacatgcacaaccgcttcgtggtctaccgggacctgaagccagccaacatccttctggacgagcatggccacgtgcggatctcggacctgggcctggcctgtgacttctccaagaagaagccccatgccagcgtgggcacccacgggtacatggctccggaggtcctgcagaagggcgtggcctacgacagcagtgccgactggttctctctggggtgcatgctcttcaagttgctgcgggggcacagccccttccggcagcacaagaccaaagacaagcatgagatcgaccgcatgacgctgacgatggccgtggagctgcccgactccttctcccctgaactacgctccctgctggaggggttgctgcagagggatgtcaaccggagattgggctgcctgggccgaggggctcaggaggtgaaagagagcccctttttccgctccctggactggcagatggtcttcttgcagaagtaccctcccccgctgatccccccacgaggggaggtgaacgcggccgacgccttcgacattggctccttcgatgaggaggacacaaaaggaatcaagttactggacagtgatcaggagctctaccgcaacttccccctcaccatctcggagcggtggcagcaggaggtggcagagactgtcttcgacaccatcaacgctgagacagaccggctggaggctcgcaagaaagccaagaacaagcagctgggccatgaggaagactacgccctgggcaaggactgcatcatgcatggctacatgtccaagatgggcaaccccttcctgacccagtggcagcggcggtacttctacctgttccccaaccgcctcgagtggcggggcgagggcgaggccccgcagagcctgctgaccatggaggagatccagtcggtggaggagacgcagatcaaggagcgcaagtgcctgctcctcaagatccgcggtgggaaacagttcattttgcagtgcgatagcgaccctgagctggtgcagtggaagaaggagctgcgcgacgcctaccgcgaggcccagcagctggtgcagcgggtgcccaagatgaagaacaagccgcgctcgcccgtggtggagctgagcaaggtgccgctggtccagcgcggcagtgccaacggcctctgacccgcccacccgccttttataaacctctaatttattttgtcgaatttttattatttgttttcccgccaagcggaaaaggttttattttgtaattattgtgatttcccgtggccccagcctggcccagctcccccgggaggggcccgcttgcctcggctcctgctgcaccaacccagccgctgcccggcgccctctgtcctgacttcaggggctgcccgctcccagtgtcttcctgtgggggaagagcacagccctcccgccccttccccgagggatgatgccacaccaagctgtgccaccctgggctctgtgggctgcactctgtgcccatgggcactgctgggtggcccatcccccctcaccaggggcaggcacagcacagggatccgacttgaattttcccactgcaccccctcctgctgcagaggggcaggccctgcactgtcctgctccacagtgttggcgagaggaggggcccgttgtctccctggccctcaaggcctcccacagtgactcgggctcctgtgcccttattcaggaaaagcctctgtgtcactggctgcctccactcccacttccctgacactgcggggcttggctgagagagtggcattggcagcaggtgctgctaccctccctgctgtcccctcttgccccaacccccagcacccgggctcagggaccacagcaaggcacctgcaggttgggccatactggcctcgcctggcctgaggtctcgctgatgctgggctgggtgcgaccccatctgcccaggacggggccggccaggtgggcgggcagcacagcaaggaggctggctggggcctatcagtgtgccccccatcctggcccatcagtgtacccccgcccaggctggccagccccacagcccacgtcctgtcagtgccgccgcctcgcccaccgcatgccccctcgtgccagtcgcgctgcctgtgtggtgtcgcgccttctcccccccggggctgggttggcgcaccctcccctcccgtctactcattccccggggcgtttctttgccgatttttgaatgtgattttaaagagtgaaaaatgagactatgcgtttttataaaaaatggtgcctga

SEQ ID NO: 54728 - DNA, 3260 bp, Homo sapiens
ccgtcagcactcctggggacgtgtccggaaatcatgagagcaggaagccacggccaggtggccgagggccatgctgggcacccaagcagccctgactggtgctgtgggcgggcaggccctcaacatatccttcctggaagaggacattaacgctcgtgatgtttccacacctaccctcacgggaccccagggagtggcggctgggtggggaggctcacgacagcatcatccttcccacattctgagtggcccctgagccctgattcttcttttccagccgataagttcacacggttttgccagtggaagaatgtggagctcaacatccacgtgagtgggcttgggtggggcatggaaagccacgcaccctgctgctcctctcccgggagctgggcctgtggcttggctgggagggggaggtcaggggatgtctgtcctttagcccccagggccgtggctatgggggtcagggccgggatcccagcatggggaggccggagcaggtaaatatgtggcaaggatggccaggacatgggtatggggaccctggcatggggccagcccctgctgcccaggtgcctctgccccagggctgggcagaggcagcctgtggtgaccgcagctgtcgctgcccctcagctgaccatgaatgacttcagcgtgcatcgcatcattgggcgcgggggctttggcgaggtctatgggtgccggaaggctgacacaggcaagatgtacgccatgaagtgcctggacaaaaagcgcatcaagatgaagcagggggagaccctggccctgaacgagcgcatcatgctctcgctcgtcagcactggggactgcccattcattgtctgcatgtcatacgcgttccacacgccagacaagctcagcttcatcctggacctcatgaacggtggggacctgcactaccacctctcccagcacggggtcttctcagaggctgacatgcgcttctatgcggccgagatcatcctgggcctggagcacatgcacaaccgcttcgtggtctaccgggacctgaagccagccaacatccttctggacgagcatggccacgtgcggatctcggacctgggcctggcctgtgacttctccaagaagaagccccatgccagcgtgggcacccacgggtacatggctccggaggtcctgcagaagggcgtggcctacgacagcagtgccgactggttctctctggggtgcatgctcttcaagttgctgcgggggcacagccccttccggcagcacaagaccaaagacaagcatgagatcgaccgcatgacgctgacgatggccgtggagctgcccgactccttctcccctgaactacgctccctgctggaggggttgctgcagagggatgtcaaccggagattgggctgcctgggccgaggggctcaggaggtgaaagagagcccctttttccgctccctggactggcagatggtcttcttgcagaagtaccctcccccgctgatccccccacgaggggaggtgaacgcggccgacgccttcgacattggctccttcgatgaggaggacacaaaaggaatcaagttactggacagtgatcaggagctctaccgcaacttccccctcaccatctcggagcggtggcagcaggaggtggcagagactgtcttcgacaccatcaacgctgagacagaccggctggaggctcgcaagaaagccaagaacaagcagctgggccatgaggaagactacgccctgggcaaggactgcatcatgcatggctacatgtccaagatgggcaaccccttcctgacccagtggcagcggcggtacttctacctgttccccaaccgcctcgagtggcggggcgagggcgaggccccgcagagcctgctgaccatggaggagatccagtcggtggaggagacgcagatcaaggagcgcaagtgcctgctcctcaagatccgcggtgggaaacagttcattttgcagtgcgatagcgaccctgagctggtgcagtggaagaaggagctgcgcgacgcctaccgcgaggcccagcagctggtgcagcgggtgcccaagatgaagaacaagccgcgctcgcccgtggtggagctgagcaaggtgccgctggtccagcgcggcagtgccaacggcctctgacccgcccacccgccttttataaacctctaatttattttgtcgaatttttattatttgttttcccgccaagcggaaaaggttttattttgtaattattgtgatttcccgtggccccagcctggcccagctcccccgggaggggcccgcttgcctcggctcctgctgcaccaacccagccgctgcccggcgccctctgtcctgacttcaggggctgcccgctcccagtgtcttcctgtgggggaagagcacagccctcccgccccttccccgagggatgatgccacaccaagctgtgccaccctgggctctgtgggctgcactctgtgcccatgggcactgctgggtggcccatcccccctcaccaggggcaggcacagcacagggatccgacttgaattttcccactgcaccccctcctgctgcagaggggcaggccctgcactgtcctgctccacagtgttggcgagaggaggggcccgttgtctccctggccctcaaggcctcccacagtgactcgggctcctgtgcccttattcaggaaaagcctctgtgtcactggctgcctccactcccacttccctgacactgcggggcttggctgagagagtggcattggcagcaggtgctgctaccctccctgctgtcccctcttgccccaacccccagcacccgggctcagggaccacagcaaggcacctgcaggttgggccatactggcctcgcctggcctgaggtctcgctgatgctgggctgggtgcgaccccatctgcccaggacggggccggccaggtgggcgggcagcacagcaaggaggctggctggggcctatcagtgtgccccccatcctggcccatcagtgtacccccgcccaggctggccagccccacagcccacgtcctgtcagtgccgccgcctcgcccaccgcatgccccctcgtgccagtcgcgctgcctgtgtggtgtcgcgccttctcccccccggggctgggttggcgcaccctcccctcccgtctactcattccccggggcgtttctttgccgatttttgaatgtgattttaaagagtgaaaaatgagactatgcgtttttataaaaaatggtgcctga

SEQ ID NO: 54729 - DNA, 3196 bp, Homo sapiens
gcggcggcggcggcgccccgactgcagtcccggcgggagcggagccgagccggggccgggcccgagccggcgccatggggcggcgccgcctgtgagcggcggcgagcggaccgcgggcgccgagcagggccaggcgggaggcgtcggcgcccgaggccgagcgagccgcggccgggccgggccgagcgccgagcgagcaggagcggcggcggcggcggcggcggcgggaggaggcagcgccgccgccaagatggcggacctggaggcggtgctggccgacgtgagctacctgatggccatggagaagagcaaggccacgccggccgcgcgcgccagcaagaagatactgctgcccgagcccagcatccgcagtgtcatgcagaagtacctggaggaccggggcgaggtgacctttgagaagatcttttcccagaagctggggtacctgctcttccgagacttctgcctgaaccacctggaggaggccaggcccttggtggaattctatgaggagatcaagaagtacgagaagctggagacggaggaggagcgtgtggcccgcagccgggagatcttcgactcatacatcatgaaggagctgctggcctgctcgcatcccttctcgaagagtgccactgagcatgtccaaggccacctggggaagaagcaggtgcctccggatctcttccagccatacatcgaagagatttgtcaaaacctccgaggggacgtgttccagaaattcattgagagcgataagttcacacggttttgccagtggaagaatgtggagctcaacatccacctgaccatgaatgacttcagcgtgcatcgcatcattgggcgcgggggctttggcgaggtctatgggtgccggaaggctgacacaggcaagatgtacgccatgaagtgcctggacaaaaagcgcatcaagatgaagcagggggagaccctggccctgaacgagcgcatcatgctctcgctcgtcagcactggggactgcccattcattgtctgcatgtcatacgcgttccacacgccagacaagctcagcttcatcctggacctcatgaacggtggggacctgcactaccacctctcccagcacggggtcttctcagaggctgacatgcgcttctatgcggccgagatcatcctgggcctggagcacatgcacaaccgcttcgtggtctaccgggacctgaagccagccaacatccttctggacgagcatggccacgtgcggatctcggacctgggcctggcctgtgacttctccaagaagaagccccatgccagcgtgggcacccacgggtacatggctccggaggtcctgcagaagggcgtggcctacgacagcagtgccgactggttctctctggggtgcatgctcttcaagttgctgcgggggcacagccccttccggcagcacaagaccaaagacaagcatgagatcgaccgcatgacgctgacgatggccgtggagctgcccgactccttctcccctgaactacgctccctgctggaggggttgctgcagagggatgtcaaccggagattgggctgcctgggccgaggggctcaggaggtgaaagagagcccctttttccgctccctggactggcagatggtcttcttgcagaagtaccctcccccgctgatccccccacgaggggaggtgaacgcggccgacgccttcgacattggctccttcgatgaggaggacacaaaaggaatcaagttactggacagtgatcaggagctctaccgcaacttccccctcaccatctcggagcggtggcagcaggaggtggcagagactgtcttcgacaccatcaacgctgagacagaccggctggaggctcgcaagaaagccaagaacaagcagctgggccatgaggaagactacgccctgggcaaggactgcatcatgcatggctacatgtccaagatgggcaaccccttcctgacccagtggcagcggcggtacttctacctgttccccaaccgcctcgagtggcggggcgagggcgaggccccgcagagcctgctgaccatggaggagatccagtcggtggaggagacgcagatcaaggagcgcaagtgcctgctcctcaagatccgcggtgggaaacagttcattttgcagtgcgatagcgaccctgagctggtgcagtggaagaaggagctgcgcgacgcctaccgcgaggcccagcagctggtgcagcgggtgcccaagatgaagaacaagccgcgctcgcccgtggtggagctgagcaaggtgccgctggtccagcgcggcagtgccaacggcctctgacccgcccacccgccttttataaacctctaatttattttgtcgaatttttattatttgttttcccgccaagcggaaaaggttttattttgtaattattgtgatttcccgtggccccagcctggcccagctcccccgggaggggcccgcttgcctcggctcctgctgcaccaacccagccgctgcccggcgccctctgtcctgacttcaggggctgcccgctcccagtgtcttcctgtgggggaagagcacagccctcccgccccttccccgagggatgatgccacaccaagctgtgccaccctgggctctgtgggctgcactctgtgcccatgggcactgctgggtggcccatcccccctcaccaggggcaggcacagcacagggatccgacttgaattttcccactgcaccccctcctgctgcagaggggcaggccctgcactgtcctgctccacagtgttggcgagaggaggggcccgttgtctccctggccctcaaggcctcccacagtgactcgggctcctgtgcccttattcaggaaaagcctctgtgtcactggctgcctccactcccacttccctgacactgcggggcttggctgagagagtggcattggcagcaggtgctgctaccctccctgctgtcccctcttgccccaacccccagcacccgggctcagggaccacagcaaggcacctgcaggttgggccatactggcctcgcctggcctgaggtctcgctgatgctgggctgggtggttggcgcaccctcccctcccgtctactcattccccggggcgtttctttgccgatttttgaatgtgattttaaagagtgaaaaatgagactatgcgtttttataaaaaatggtgcctga

SEQ ID NO: 54730 - DNA, 2620 bp, Homo sapiens
gcggcggcggcggcgccccgactgcagtcccggcgggagcggagccgagccggggccgggcccgagccggcgccatggggcggcgccgcctgtgagcggcggcgagcggaccgcgggcgccgagcagggccaggcgggaggcgtcggcgcccgaggccgagcgagccgcggccgggccgggccgagcgccgagcgagcaggagcggcggcggcggcggcggcggcgggaggaggcagcgccgccgccaagatggcggacctggaggcggtgctggccgacgtgagctacctgatggccatggagaagagcaaggccacgccggccgcgcgcgccagcaagaagatactgctgcccgagcccagcatccgcagtgtcatgcagaagtacctggaggaccggggcgaggtgacctttgagaagatcttttcccagaagctggggtacctgctcttccgagacttctgcctgaaccacctggaggaggccaggcccttggtggaattctatgaggagatcaagaagtacgagaagctggagacggaggaggagcgtgtggcccgcagccgggagatcttcgactcatacatcatgaaggagctgctggcctgctcgcatcccttctcgaagagtgccactgagcatgtccaaggccacctggggaagaagcaggtgcctccggatctcttccagccatacatcgaagagatttgtcaaaacctccgaggggacgtgttccagaaattcattgagagcgataagttcacacggttttgccagtggaagaatgtggagctcaacatccacctgaccatgaatgacttcagcgtgcatcgcatcattgggcgcgggggctttggcgaggtctatgggtgccggaaggctgacacaggcaagatgtacgccatgaagtgcctggacaaaaagcgcatcaagatgaagcagggggagaccctggccctgaacgagcgcatcatgctctcgctcgtcagcactggggactgcccattcattgtctgcatgtcatacgcgttccacacgccagacaagctcagcttcatcctggacctcatgaacggtggggacctgcactaccacctctcccagcacggggtcttctcagaggctgacatgcgcttctatgcggccgagatcatcctgggcctggagcacatgcacaaccgcttcgtggtctaccgggacctgaagccagccaacatccttctggacgagcatggccacgtgcggatctcggacctgggcctggcctgtgacttctccaagaagaagccccatgccagcgtgggcacccacgggtacatggctccggaggtcctgcagaagggcgtggcctacgacagcagtgccgactggttctctctggggtgcatgctcttcaagttgctgcgggggcacagccccttccggcagcacaagaccaaagacaagcatgagatcgaccgcatgacgctgacgatggccgtggagctgcccgactccttctcccctgaactacgctccctgctggaggggttgctgcagagggatgtcaaccggagattgggctgcctgggccgaggggctcaggaggtgaaagagagcccctttttccgctccctggactggcagatggtcttcttgcagaagtaccctcccccgctgatccccccacgaggggaggtgaacgcggccgacgccttcgacattggctccttcgatgaggaggacacaaaaggaatcaagttactggacagtgatcaggagctctaccgcaacttccccctcaccatctcggagcggtggcagcaggaggtggcagagactgtcttcgacaccatcaacgctgagacagaccggctggaggctcgcaagaaagccaagaacaagcagctgggccatgaggaagactacgccctgggcaaggactgcatcatgcatggctacatgtccaagatgggcaaccccttcctgacccagtggcagcggcggtacttctacctgttccccaaccgcctcgagtggcggggcgagggcgaggccccgcagagcctgctgaccatggaggagatccagtcggtggaggagacgcagatcaaggagcgcaagtgcctgctcctcaagatccgcggtgggaaacagttcattttgcagtgcgatagcgaccctgagctggtgcagtggaagaaggagctgcgcgacgcctaccgcgaggcccagcagctggtgcagcgggtgcccaagatgaagaacaagccgcgctcgcccgtggtggagctgagcaaggtgccgctggtccagcgcggcagtgccaacggcctctgacccgcccacccgccttttataaacctctaatttattttgtcgaatttttattatttgttttcccgccaagcggaaaaggttttattttgtaattattgtgatttcccgtggccccagcctggcccagctcccccgggaggggcccgcttgcctcggctcctgctgcaccaacccagccgctgcccggcgccctctgtcctgacttcaggggctgcccgctcccagtgtcttcctgtgggggaagagcacagccctcccgccccttcccctttttaaaaaataaatcgctgacaagtgtga

SEQ ID NO: 54731 - DNA, 1686 bp, Homo sapiens
gtggcatcgataaacaccggtgtttatcgatgccacctccctcaccatctcggagcggtggcagcaggaggtggcagagactgtcttcgacaccatcaacgctgagacagaccggctggaggctcgcaagaaagccaagaacaagcagctgggccatgaggaagactacgccctgggcaaggactgcatcatgcatggctacatgtccaagatgggcaaccccttcctgacccagtggcagcggcggtacttctacctgttccccaaccgcctcgagtggcggggcgagggcgaggccccgcagagcctgctgaccatggaggagatccagtcggtggaggagacgcagatcaaggagcgcaagtgcctgctcctcaagatccgcggtgggaaacagttcattttgcagtgcgatagcgaccctgagctggtgcagtggaagaaggagctgcgcgacgcctaccgcgaggcccagcagctggtgcagcgggtgcccaagatgaagaacaagccgcgctcgcccgtggtggagctgagcaaggtgccgctggtccagcgcggcagtgccaacggcctctgacccgcccacccgccttttataaacctctaatttattttgtcgaatttttattatttgttttcccgccaagcggaaaaggttttattttgtaattattgtgatttcccgtggccccagcctggcccagctcccccgggaggggcccgcttgcctcggctcctgctgcaccaacccagccgctgcccggcgccctctgtcctgacttcaggggctgcccgctcccagtgtcttcctgtgggggaagagcacagccctcccgccccttccccgagggatgatgccacaccaagctgtgccaccctgggctctgtgggctgcactctgtgcccatgggcactgctgggtggcccatcccccctcaccaggggcaggcacagcacagggatccgacttgaattttcccactgcaccccctcctgctgcagaggggcaggccctgcactgtcctgctccacagtgttggcgagaggaggggcccgttgtctccctggccctcaaggcctcccacagtgactcgggctcctgtgcccttattcaggaaaagcctctgtgtcactggctgcctccactcccacttccctgacactgcggggcttggctgagagagtggcattggcagcaggtgctgctaccctccctgctgtcccctcttgccccaacccccagcacccgggctcagggaccacagcaaggcacctgcaggttgggccatactggcctcgcctggcctgaggtctcgctgatgctgggctgggtgcgaccccatctgcccaggacggggccggccaggtgggcgggcagcacagcaaggaggctggctggggcctatcagtgtgccccccatcctggcccatcagtgtacccccgcccaggctggccagccccacagcccacgtcctgtcagtgccgccgcctcgcccaccgcatgccccctcgtgccagtcgcgctgcctgtgtggtgtcgcgccttctcccccccggggctgggttggcgcaccctcccctcccgtctactcattccccggggcgtttctttgccgatttttgaatgtgattttaaagagtgaaaaatgagactatgcgtttttataaaaaatggtgcctga

SEQ ID NO: 54732 - DNA, 1987 bp, Homo sapiens
cgccggctgctgcggcaccaggcccctgcctgcttagaagtgagcagctggctcgggtttaaggaactcaccctggatcacagccagaaagtggcggctctgggattcaaactcaggctggggccgggcatggtggctcacgcctgtaatcccagcactttgggaggccaaggagcgcagatcacttgaggtcaggagtttgagaccagcctggccaacatggtgaaaccctgtctctaccaaaaaataccaaaaaaattagccgggcatggtggcacgcgcctgtactcccagctacccgggaggctgaggcgggaggatcgtttgaacctgggaggtggaggttgcagtgagccaagattgtgccacagccctccagcctgggcaacagagtggagaccctgtctcaaaacaaaaaagaaacccaggtggggccggctgagtctcctctgtctctcgcctcagactacgccctgggcaaggactgcatcatgcatggctacatgtccaagatgggcaaccccttcctgacccagtggcagcggcggtacttctacctgttccccaaccgcctcgagtggcggggcgagggcgaggccccgcagagcctgctgaccatggaggagatccagtcggtggaggagacgcagatcaaggagcgcaagtgcctgctcctcaagatccgcggtgggaaacagttcattttgcagtgcgatagcgaccctgagctggtgcagtggaagaaggagctgcgcgacgcctaccgcgaggcccagcagctggtgcagcgggtgcccaagatgaagaacaagccgcgctcgcccgtggtggagctgagcaaggtgccgctggtccagcgcggcagtgccaacggcctctgacccgcccacccgccttttataaacctctaatttattttgtcgaatttttattatttgttttcccgccaagcggaaaaggttttattttgtaattattgtgatttcccgtggccccagcctggcccagctcccccgggaggggcccgcttgcctcggctcctgctgcaccaacccagccgctgcccggcgccctctgtcctgacttcaggggctgcccgctcccagtgtcttcctgtgggggaagagcacagccctcccgccccttccccgagggatgatgccacaccaagctgtgccaccctgggctctgtgggctgcactctgtgcccatgggcactgctgggtggcccatcccccctcaccaggggcaggcacagcacagggatccgacttgaattttcccactgcaccccctcctgctgcagaggggcaggccctgcactgtcctgctccacagtgttggcgagaggaggggcccgttgtctccctggccctcaaggcctcccacagtgactcgggctcctgtgcccttattcaggaaaagcctctgtgtcactggctgcctccactcccacttccctgacactgcggggcttggctgagagagtggcattggcagcaggtgctgctaccctccctgctgtcccctcttgccccaacccccagcacccgggctcagggaccacagcaaggcacctgcaggttgggccatactggcctcgcctggcctgaggtctcgctgatgctgggctgggtgcgaccccatctgcccaggacggggccggccaggtgggcgggcagcacagcaaggaggctggctggggcctatcagtgtgccccccatcctggcccatcagtgtacccccgcccaggctggccagccccacagcccacgtcctgtcagtgccgccgcctcgcccaccgcatgccccctcgtgccagtcgcgctgcctgtgtggtgtcgcgccttctcccccccggggctgggttggcgcaccctcccctcccgtctactcattccccggggcgtttctttgccgatttttgaatgtgattttaaagagtgaaaaatgagactatgcgtttttataaaaaatggtgcctga

SEQ ID NO: 54733 - DNA, 1437 bp, Homo sapiens
tttctataggggctaggtgaggctgggtgtgtcaccatccctggccctgcagcagagcctgctgaccatggaggagatccagtcggtggaggagacgcagatcaaggagcgcaagtgcctgctcctcaagatccgcggtgggaaacagttcattttgcagtgcgatagcgaccctgagctggtgcagtggaagaaggagctgcgcgacgcctaccgcgaggcccagcagctggtgcagcgggtgcccaagatgaagaacaagccgcgctcgcccgtggtggagctgagcaaggtgccgctggtccagcgcggcagtgccaacggcctctgacccgcccacccgccttttataaacctctaatttattttgtcgaatttttattatttgttttcccgccaagcggaaaaggttttattttgtaattattgtgatttcccgtggccccagcctggcccagctcccccgggaggggcccgcttgcctcggctcctgctgcaccaacccagccgctgcccggcgccctctgtcctgacttcaggggctgcccgctcccagtgtcttcctgtgggggaagagcacagccctcccgccccttccccgagggatgatgccacaccaagctgtgccaccctgggctctgtgggctgcactctgtgcccatgggcactgctgggtggcccatcccccctcaccaggggcaggcacagcacagggatccgacttgaattttcccactgcaccccctcctgctgcagaggggcaggccctgcactgtcctgctccacagtgttggcgagaggaggggcccgttgtctccctggccctcaaggcctcccacagtgactcgggctcctgtgcccttattcaggaaaagcctctgtgtcactggctgcctccactcccacttccctgacactgcggggcttggctgagagagtggcattggcagcaggtgctgctaccctccctgctgtcccctcttgccccaacccccagcacccgggctcagggaccacagcaaggcacctgcaggttgggccatactggcctcgcctggcctgaggtctcgctgatgctgggctgggtgcgaccccatctgcccaggacggggccggccaggtgggcgggcagcacagcaaggaggctggctggggcctatcagtgtgccccccatcctggcccatcagtgtacccccgcccaggctggccagccccacagcccacgtcctgtcagtgccgccgcctcgcccaccgcatgccccctcgtgccagtcgcgctgcctgtgtggtgtcgcgccttctcccccccggggctgggttggcgcaccctcccctcccgtctactcattccccggggcgtttctttgccgatttttgaatgtgattttaaagagtgaaaaatgagactatgcgtttttataaaaaatggtgcctga

SEQ ID NO: 54734 - DNA, 1766 bp, Homo sapiens
gcggcggcggcggcgccccgactgcagtcccggcgggagcggagccgagccggggccgggcccgagccggcgccatggggcggcgccgcctgtgagcggcggcgagcggaccgcgggcgccgagcagggccaggcgggaggcgtcggcgcccgaggccgagcgagccgcggccgggccgggccgagcgccgagcgagcaggagcggcggcggcggcggcggcggcgggaggaggcagcgccgccgccaagatggcggacctggaggcggtgctggccgacgtgagctacctgatggccatggagaagagcaaggccacgccggccgcgcgcgccagcaagaagatactgctgcccgagcccagcatccgcagtgtcatgcagaagtacctggaggaccggggcgaggtgacctttgagaagatcttttcccagaagctggggtacctgctcttccgagacttctgcctgaaccacctggaggaggccaggcccttggtggaattctatgaggagatcaagaagtacgagaagctggagacggaggaggagcgtgtggcccgcagccgggagatcttcgactcatacatcatgaaggagctgctggcctgctcgcatcccttctcgaagagtgccactgagcatgtccaaggccacctggggaagaagcaggtgcctccggatctcttccagccatacatcgaagagatttgtcaaaacctccgaggggacgtgttccagaaattcattgagagcgataagttcacacggttttgccagtggaagaatgtggagctcaacatccacctgaccatgaatgacttcagcgtgcatcgcatcattgggcgcgggggctttggcgaggtctatgggtgccggaaggctgacacaggcaagatgtacgccatgaagtgcctggacaaaaagcgcatcaagatgaagcagggggagaccctggccctgaacgagcgcatcatgctctcgctcgtcagcactggggactgcccattcattgtctgcatgtcatacgcgttccacacgccagacaagctcagcttcatcctggacctcatgaacggtggggacctgcactaccacctctcccagcacggggtcttctcagaggctgacatgcgcttctatgcggccgagatcatcctgggcctggagcacatgcacaaccgcttcgtggtctaccgggacctgaagccagccaacatccttctggacgagcatggccacgtgcggatctcggacctgggcctggcctgtgacttctccaagaagaagccccatgccagcgtgggcacccacgggtacatggctccggaggtcctgcagaagggcgtggcctacgacagcagtgccgactggttctctctggggtgcatgctcttcaagttgctgcgggggcacagccccttccggcagcacaagaccaaagacaagcatgagatcgaccgcatgacgctgacgatggccgtggagctgcccgactccttctcccctgaactacgctccctgctggaggggttgctgcagagggatgtcaaccggagattgggctgcctgggccgaggggctcaggaggtgaaagagagcccctttttccgctccctggactggcagatggtcttcttgcagaagtaccccctccccccggctggatccccccccaacgagaggggtaagggtgaaactgccgggctcgaaccccccttttttgaacaatttgtgggcttccctttctggttgggaggggatgggt

SEQ ID NO: 54735 - DNA, 1254 bp, Homo sapiens
gcggcggcggcggcgccccgactgcagtcccggcgggagcggagccgagccggggccgggcccgagccggcgccatggggcggcgccgcctgtgagcggcggcgagcggaccgcgggcgccgagcagggccaggcgggaggcgtcggcgcccgaggccgagcgagccgcggccgggccgggccgagcgccgagcgagcaggagcggcggcggcggcggcggcggcgggaggaggcagcgccgccgccaagatggcggacctggaggcggtgctggccgacgtgagctacctgatggccatggagaagagcaaggccacgccggccgcgcgcgccagcaagaagatactgctgcccgagcccagcatccgcagtgtcatgcagaagtacctggaggaccggggcgaggtgacctttgagaagatcttttcccagaagctggggtacctgctcttccgagacttctgcctgaaccacctggaggaggccaggcccttggtggaattctatgaggagatcaagaagtacgagaagctggagacggaggaggagcgtgtggcccgcagccgggagatcttcgactcatacatcatgaaggagctgctggcctgctcgcatcccttctcgaagagtgccactgagcatgtccaaggccacctggggaagaagcaggtgcctccggatctcttccagccatacatcgaagagatttgtcaaaacctccgaggggacgtgttccagaaattcattgagagagtggcattggcagcaggtgctgctaccctccctgctgtcccctcttgccccaacccccagcacccgggctcagggaccacagcaaggcacctgcaggttgggccatactggcctcgcctggcctgaggtctcgctgatgctgggctgggtgcgaccccatctgcccaggacggggccggccaggtgggcgggcagcacagcaaggaggctggctggggcctatcagtgtgccccccatcctggcccatcagtgtacccccgcccaggctggccagccccacagcccacgtcctgtcagtgccgccgcctcgcccaccgcatgccccctcgtgccagtcgcgctgcctgtgtggtgtcgcgccttctcccccccggggctgggttggcgcaccctcccctcccgtctactcattccccggggcgtttctttgccgatttttgaatgtgattttaaagagtgaaaaatgagactatgcgtttttataaaaaatggtgcctga

SEQ ID NO: 54736 - DNA, 1505 bp, Homo sapiens
gcggcggcggcggcgccccgactgcagtcccggcgggagcggagccgagccggggccgggcccgagccggcgccatggggcggcgccgcctgtgagcggcggcgagcggaccgcgggcgccgagcagggccaggcgggaggcgtcggcgcccgaggccgagcgagccgcggccgggccgggccgagcgccgagcgagcaggagcggcggcggcggcggcggcggcgggaggaggcagcgccgccgccaagatggcggacctggaggcggtgctggccgacgtgagctacctgatggccatggagaagagcaaggccacgccggccgcgcgcgccagcaagaagatactgctgcccgagcccagcatccgcagtgtcatgcagaagtacctggaggaccggggcgaggtgacctttgagaagatcttttcccagaagctggggtacctgctcttccgagacttctgcctgaaccacctggaggaggccaggcccttggtggaattctatgaggagatcaagaagtacgagaagctggagacggaggaggagcgtgtggcccgcagccgggagatcttcgactcatacatcatgaaggagctgctggcctgctcgcatcccttctcgaagagtgccactgagcatgtccaaggccacctggggaagaagcaggtgcctccggatctcttccagccatacatcgaagagatttgtcaaaacctccgaggggacgtgttccagaaattcattgagagcgataagttcacacggttttgccagtggaagaatgtggagctcaacatccacctgaccatgaatgacttcagcgtgcatcgcatcattgggcgcgggggctttggcgaggtctatgggtgccggaaggctgacacaggcaagatgtacgccatgaagtgcctggacaaaaagcgcatcaagatgaagcagggggagaccctggccctgaacgagcgcatcatgctctcgctcgtcagcactggggactgcccattcattgtctgcatgtcatacgcgttccacacgccagacaagctcagcttcatcctggacctcatgaacggtggggacctgcactaccacctctcccagcacggggtcttctcagaggctgacatgcgcttctatgcggccgagatcatcctgggcctggagcacatgcacaaccgcttcgtggtctaccgggacctgaagccagccaacatccttctggacgagcatggccacgtgcggatctcggacctgggcctggcctgtgacttctccaagaagaagccccatgccagcgtgggcacccacgggtacatggctccggaggtcctgcagaagggcgctgcctgtgtggtgtcgcgccttctcccccccggggctgggttggcgcaccctcccctcccgtctactcattccccggggcgtttctttgccgatttttgaatgtgattttaaagagtgaaaaatgagactatgcgtttttataaaaaatggtgcctga

SEQ ID NO: 54737 - DNA, 1326 bp, Homo sapiens
gcggcggcggcggcgccccgactgcagtcccggcgggagcggagccgagccggggccgggcccgagccggcgccatggggcggcgccgcctgtgagcggcggcgagcggaccgcgggcgccgagcagggccaggcgggaggcgtcggcgcccgaggccgagcgagccgcggccgggccgggccgagcgccgagcgagcaggagcggcggcggcggcggcggcggcgggaggaggcagcgccgccgccaagatggcggacctggaggcggtgctggccgacgtgagctacctgatggccatggagaagagcaaggccacgccggccgcgcgcgccagcaagaagatactgctgcccgagcccagcatccgcagtgtcatgcagaagtacctggaggaccggggcgaggtgacctttgagaagatcttttcccagaagctggggtacctgctcttccgagacttctgcctgaaccacctggaggaggccaggcccttggtggaattctatgaggagatcaagaagtacgagaagctggagacggaggaggagcgtgtggcccgcagccgggagatcttcgactcatacatcatgaaggagctgctggcctgctcgcatcccttctcgaagagtgccactgagcatgtccaaggccacctggggaagaagcaggtgcctccggatctcttccagccatacatcgaagagatttgtcaaaacctccgaggggacgtgttccagaaattcattgagagcgataagttcacacggttttgccagtggaagaatgtggagctcaacatccacctgaccatgaatgacttcagcgtgcatcgcatcattgggcgcgggggctttggcgaggtctatgggtgccggaaggctgacacaggcaagatgtacgccatgaagtgcctggacaaaaagcgcatcaagatgaagcagggggagaccctggccctgaacgagcgcatcatgctctcgctcgtcagcactggggactgcccattcattgtctgcatgtcatacgcgttccacacgccagacaagctcagcttcatcctggacctcatgaacggtggggacctgcactaccacctctcccagcacggggtcttctcagaggctgacatgcgcttctatgcggccgagatcatcctgggcctggagcacatgcacaaccgcttcgtggtctaccgggacctgaagggtgagcgcccctgctgtccccaggctggacctccgtggctgtcctctccttcctctcgacatcccggccaccaggcccagaggagtggggctcctgggacatggccgccccgtatctt

SEQ ID NO: 54738 - DNA, 560 bp, Homo sapiens
aggatgttggctggcttcaggtcccggtagaccacgaagcggttgtgcatgtgctccaggcccaggatgatctcggccgcatagaagcgcatgtcagcctctgagaagaccccgtgccagccaacatccttctggacgagcatggccacgtgcggatctcggacctgggcctggcctgtgacttctccaagaagaagccccatgccagcgtcgaccccatctgcccaggacggggccggccaggtgggcgggcagcacagcaaggaggctggctggggcctatcagtgtgccccccatcctggcccatcagtgtacccccgcccaggctggccagccccacagcccacgtcctgtcagtgccgccgcctcgcccaccgcatgccccctcgtgccagtcgcgctgcctgtgtggtgtcgcgccttctcccccccggggctgggttggcgcaccctcccctcccgtctactcattccccggggcgtttctttgccgatttttgaatgtgattttaaagagtgaaaaatgagactatgcgtttttataaaaaatggtgcctga

SEQ ID NO: 54739 - DNA, 311 bp, Homo sapiens
atccctctcccttcttatcacctgtgagaccctgtgccagccctgccagcttgtaggcctcagttcctccttggccaacttccctggggggtggcagttgcactgaccatccctacccagggccctgggtctgggcagcctgtggctgatggtattccggcatctctgtccacccatgtgcccctgccccatccacctggtaaagttactggacagtgatcaggagctctaccgcaacttccccctcaccatctcggagcggtggcagcaggaggtggcagagactgtcttcgacaccatcaacgctgaga

SEQ ID NO: 54740 - DNA, 483 bp, Homo sapiens
atcaagaagtacgagaagctggagacggaggaggagcgtgtggcccgcagccgggagatcttcgactcatacatcatgaaggagctgctggcctgctcgcatgtgagtgtcctcagctggccctgtgtgctggcccagagtcacctgcagattgggaggggaagagaggaccctgctgagaattcatggccacctctgtcttccccagcccttctcgaagagtgccactgagcatgtccaaggccacctggggaagaagcaggtgcctccggatctcttccaggtgtgtgcctcccggtccctccccaggcaaggtcaccttggacagcccctggtcaacaagcctggtcagccaggggtggggcctgggcaaccacggtctctcggggctcagtcaccaacttccagcttcctcccttagccatacatcgaagagatttgtcaaaacctccgaggggacgtgttccagaaattcattgagag

SEQ ID NO: 54741 - DNA, 201 bp, Homo sapiens
cagagccctagcaacagccctatagagggagggttctaggtatggggcaggcatgagcactgcttataaccaagcaaaacactccctctgtgccaacataggtggggcaggtcacgctggggtctgtttgccctgtctgcccgctgcagcctcctcggggagggccagggttgtctgtgcatcctgtgagccccagggtct

SEQ ID NO: 54742 - DNA, 142 bp, Homo sapiens
accacaaccagcctatacttgtgttacaaggttgtgtttatagagtttatcatcaaagtttgcgaatgaaagcaaatatgtgtgttatgaaacattttaaattataagcattctgtaaggataaataaagttgcgatgtgta

SEQ ID NO: 54743 - DNA, 591 bp, Homo sapiens
gtcccttaaattctgatcatgtaggacattcttctttgccctgggcctgggaaaatgcagcatgttccagagcaaaagtcctaatgaggggaactaaaccagtgggacccaaaccaatgtcctggctcactgaggacccgttagaaccaaatctctgggtgtggacaggctcccatacttttcaaaaattcccctgatgactaatgaacaaccagaggtaagaaccagtggcccagaggaataaccagcccagctgttgtacgagctcgctaagctggctcaggtcaatgttgaattctctgctaggcagctcctcataagaactggcagagatggttcttacacaacaacaggtgacaactccagactctgccggaagttccaggatctgggttcccggacaatgcatgacactcagtccagcattgcaggtggaagagcgacggtgaaaagaccaaagtcaattaaaatgtgttaaccaaaacaggaaacatgagtgaggtgattgagagtgtgtttaacttagatgtgtgattttatcaatactttcattgttcaaaaactcttattttttaaagatattttcaaaac

SEQ ID NO: 54744 - DNA, 538 bp, Homo sapiens
ccctgagcagagggacctgcacacagagactccctcctgggctcctggcaccatggccccactgaagatgctggccctggtcaccctcctcctgggggcttctctgcagcacatccacgcagctcgagggaccaatgtgggccgggagtgctgcctggagtacttcaagggagccattccccttagaaagctgaagacgtggtaccagacatctgaggactgctccagggatgccatcgtttttgtaactgtgcagggcagggccatctgttcggaccccaacaacaagagagtgaagaatgcagttaaatacctgcaaagccttgagaggtcttgaagcctcctcaccccagactcctgactgtctcccgggactacctgggacctccaccgttggtgttcaccgcccccaccctgagcgcctgggtccaggggaggccttccagggacgaagaagagccacagtgagggagatcccatccccttgtctgaactggagccatgggcacaaagggcccagattaaagtctttatcctc

SEQ ID NO: 54745 - DNA, 334 bp, Homo sapiens
agttgaattggaagtcaaaaaaatgagcttaaacacatttaataacatcattctaattaacccatttaacctattaaaattaaaagtttcaataataggcatgatgtataatgaaatatttcatctacaggatggaaacttcttatactcatggctaaaatgtaaaagaaggaaaaatagaagtaagaaagcaagatttatggtccagaataaagatatacaaggattattatgatctagtattgttttaatgaatctatatttctgacatttttctctaaggaaagaaatctcagttattcataaatatgaataaatttgtgaacttaacctg

SEQ ID NO: 54746 - DNA, 390 bp, Homo sapiens
agttgggaagaagcctgactcttgttgagtgagtctgtggaccgggcactgtgatgggcagtgtgcgtgcacaacgtcacttaatccttgcttaacccgtgaggcgggagctgtcatcgacccatttcatggatggaacagctaaggccaagagacatgaagtgacttgttcaaggtaacagcaaggaaaaggcaacaccactgtccgaacccaaaccatctggctgcaaaccacagcttcggagtcctgggggcccttgtgaaatatgtttgttgggtagccccagctttctgatcaattaaacagccaggcactcacccccctagcttgctacattctaaaatacctctccctcccttccctggtcccatgacttaaacggcaaagct

SEQ ID NO: 54747 - DNA, 928 bp, Homo sapiens
taaaaaaggatccgcttttggataaaggtttgaagggcagtcttactgatgcaatgaacatggtcacgagctccaaggtttttggcctgaactcctataggatgagagtgccatttgctgggagttaaggggatgtttttgagggcagtgtggggtgagatcagaagctgtgttttgaacatgttaacctgtaaggcaacctatgagtagtctgtggagttgaggaaaaatgatgtgggctgaagacacaattttggaattcagtgcttaaagtcattccacttggtaagatcacctggcactgactacagatggtgaggagaggttcgaaggttgagatctgggacattctgctgaatatgtattgagaacttgaggaggaactcgtaaaggagatggagaaggagaggcagatggagaaccagtgtagtaggtgtccaaaagccaaacacaggaagtgcttcagaaaggaggggaactctgtcaaatgctgctgatacactgagtaagaagagactagagaacagatcatcatattatgcaaggaaaagatcagaggtgacttccacaagaaggttaattcccactgtcgctgccttacctagactcctgtactagtcctgcaactgcactcttttgctctagtactcctgccattcaaacatgtcctctatattacttccagtgtttgtttgttccctccctcccttcctctttttttcttttttgagacggggtcttgctctgttgcccaggctggagtgcagtggcttgatcgtggttcactgcagcctcgcctcccagactcaatctatcctcccacctcagcctcctgagcagctgggattgttaaaatgagtattaccatttatattctaaacttaattttgacaggaataaaattgaccagtttcactgtttgacatgt

SEQ ID NO: 54748 - DNA, 465 bp, Homo sapiens
agatgcaacctattgataatagtttctaatagaaagaactttaaaaattcttttagttctgtgctgcagtaaatatagagcctaaaatacagtatagttttgggtatacagtaactaacatctattatttccttctaatatatttatttattgatattattcattgtatatatttttaactggataaacatcaacatttatgacaggaattttccatgctggggaatttctcattttgatgtttttattaattgctaactcttgtgggatttcttttttcaagtaggacttatttcagtagtttcatggaaaaaaatcttagaattgtactgttgattttcagtaagtaaagataaatcttcctttgtctgctttacatcatgtacattctaccctttaagaatgagttccatttctttttaagtgagatttaagtaaaactgcatggcaaaatgaagatactgt

SEQ ID NO: 54749 - DNA, 314 bp, Homo sapiens
tatggaatacatgtgatattttgctaagtgcatagaatgtgcggtgatcaagtcagggtatttcctcatgttctcacttataactgggagctgaatgctgagaacacatggacacatagagggaaacaacacacaccagtgtctgttggagagtggagggtgggaggaaggagaggatcaggaaaaataactaatggataccaagcttaatacctgggtgatgaaatcatctgtacaacaaacccccatgaaacatgtttacctgtatgacaaacccacacatcctgcacgtgtactcaatgaacttaaaagtt

SEQ ID NO: 54750 - DNA, 785 bp, Homo sapiens
taaaggtttatgtaagttttgatatctggaaatcttaactctcccacttaactcttcttcagaatttccttgactatttttggtctttgtatgtccctatgaagtttaggatgaacttaccaaattataggaccaactctttagagattttgactagaagtgatatgtgcatccttctttttctttttctttttcctttcttgagacaaggtctcactctgtcacccaggctggagtgtggtggtgcaatcacagctcaccacagcctccatctcccaggcttaaactatcctcctccctcagtcccctgagtagctgggaccatgggcaggcaccaccatgcctggctaattttttatttttttgtagaaatggggtctcactatgttgcccagactggtcttgaactcctggactaaagtgatctgcccactccgaactcccaaagtgctgagattacataagcataagacactgtgcctggccaatgcatcctgctttttctaaaccaccccaagtcatttttggaaaaagacagaagacagataatataacaatagagaaaaatatatatatataactagaaaaaatactggtgttactaagattatttctacttttatttttccaagttttaaattttattataaatatttacttcatgggaaatatatttagagttttaatttttattataaagaaaatatagatagaaaccaaagtaatgaatatactttaaataattcagacctcaagatccatatgaattacctggccagcctgaa

SEQ ID NO: 54751 - DNA, 302 bp, Homo sapiens
ggtccatggtcttcagattctcccagaacctaatttaaagctcagatactcgtatccccacccccaggactttgatttgatgggactggcgcggggtccaggaatctgcactgtgatgctctccccgcagagtgcgctttgcgcctggcaggaggggctcaaagatgtgtctgtcaagtgaacgaactaacaggactcatgagggactcagctttgactacggtgggcaggcctgcagcgttcacattttcccgatgatttctgtgtgggctggactcccccgcccgccgacaccagacaca

SEQ ID NO: 54752 - DNA, 373 bp, Homo sapiens
agaggacggaggctagcgcgggagcaatctctgccatgggacttggggtcccctttatcccctcagaggaacagcctgagtgcagccgctccatcctcagggtgtcggggacattggggccctccagctcccaaacatttgcgccatggtgaggtgacggtttgcagacagggctgcttctgcaggagcttaaactccaggagaacagggagtggtctgaatgcctgggcaccccagcacccagcagtgactgagctgtggctggaaggagagggggtggatgccgagaatcaaggacgggtgcagttcttagtcctctcctctaagttcttcagactgtgggcccgtgaacttgtgagccaaggagagtcct

SEQ ID NO: 54753 - DNA, 595 bp, Homo sapiens
tatgccaccaggcaggagccaacagcaatttaagctccaacctggctcaggccaggcctcctgagctagagggaaggaaagctgcaacacctcggtgtactcacacgacgttcacaaaagcaagcagggctgatgggcaccccccagcccctgggagctctgctcatgaccgctcacagggtaccgagtctttgccttttgtgtgtgcgcatgctgccctcttaactgcttttagtattcagaaaggttccatttatgttttactcctgaaagtgaaaccctcttaggcaacttgtttcatattctgggcattttagtagctacagtattttgcatttaaaatgtaattactcttagtattgtacagccctataatgtatgagaactagtttcacatcctttgaaactaatctctttcattggggaggatataacttttgactttacacaggtggactttgaatccatttttatagaatttttttccactgtaacttgacctatattatgcaagaaaatcccaaaaatatgttttaagggagactacacagaccttgtgatttggtctgagctagttgctgagttgactggagcc

SEQ ID NO: 54754 - DNA, 342 bp, Homo sapiens
cacagttccacagactcgtcctcttcccttccagccatgttctcccctatttctttttcttttgagacagagtcttgctctgtttcccaggctggagtgcagtggcagaatcttggctcactgcaacctccacctcccaggttcaagcagttctcatgcctcagcctcccaagtagctgggattacaggtgcgcacccacgctgggctaatttttgtatttttagtagagactgggtttcaccatgttggccaggctggtctcaaattcctgacctcaggtgatccacccccttcagcctcccaaagtgctgggattacaggtgtgagccactgctcccacc

SEQ ID NO: 54755 - DNA, 200 bp, Homo sapiens
gggtgctctaggcacccccagtagaacctggatatccccactcccaccaagagggcctgatgtccccgtacttagcgtggtaggcatgatctgtgctccgggcctggggtcctagccttgaaatcactgtctgccttccagggtggtctagaagcccctattagggactcaatttggggagttacaggtcgttgcttctg

SEQ ID NO: 54756 - DNA, 292 bp, Homo sapiens
aaattcagaggcaatgacacagggacttggagagacagtgtggaaaaataagcccatggtgggcttattttaataaatacagcagattaaaaggtgactggttcctcctttcttgttcatataagaggcaccattttgtaatgctggcttatagcatttccaaacccaattttattttttccatttttatgaaggaggtgttttcatttactgggaaaagagctagggcaagtaggcctccagccatggcaggtaatattctaggtttctatgaaataagttggtgcatgaa

SEQ ID NO: 54757 - DNA, 703 bp, Homo sapiens
acacgcggcgccccattaaagcggccgtcccgggcgcgcgcctcattcgaggcgacgggctccgggccctgatagatggggtgcggggacggagacaaatgacggcctttgggctcggaatacccacctttctggtaatgcagcccagcgggtcccagcctcgttttccagccctcactcaaaatggagtcgctctggttcgaacgcctctgacaagtgtgtacctacgtgtcagggagcctgctcacatgaccgtgtggagaaagttctttccctgaggaccatctggagtggacgcgtgcactacccctctctgaatacaccctccccacgaggccctctggagcatcctgtagagccagcccctacccagagaccctgagcccagagaatgcgctgggtggtgagcctggggacgaatgcagagccctaggtctcctctccagaaagaccggattttgccatgttggccaggctggtcttgaactcctgacctcaagtgatccacctgcctcggcctcccaaagtgcagggattacaggtgtgagccactgcacccggcctcaggcaggtatttttaccagccgaatactcttgcactgtgcactcttcgtgttcatcatcagtcccccggatgggtgtttaaggcatttccaaagctctgttattaaaaacacgatgcaatgagtttctttcagcattt

SEQ ID NO: 54758 - DNA, 799 bp, Homo sapiens
acacgcggcgccccattaaagcggccgtcccgggcgcgcgcctcattcgaggcgacgggctccgggccctgatagatggggtgcggggacggagacaaatgacggcctttgggctcggaatacccacctttctggtaatgcagcccagcgggtcccagcctcgttttccagccctcactcaaaatggagtcgctctggttcgaacgcctctgacaagtgtgtacctacgtgtcaggcccatccttcctgcaggcctttgtcttggtgtcaccctgcctgagctggccccaaccacagtagcaacagtgatgctgatgtgtgactgctgccaggagcctgctcacatgaccgtgtggagaaagttctttccctgaggaccatctggagtggacgcgtgcactacccctctctgaatacaccctccccacgaggccctctggagcatcctgtagagccagcccctacccagagaccctgagcccagagaatgcgctgggtggtgagcctggggacgaatgcagagccctaggtctcctctccagaaagaccggattttgccatgttggccaggctggtcttgaactcctgacctcaagtgatccacctgcctcggcctcccaaagtgcagggattacaggtgtgagccactgcacccggcctcaggcaggtatttttaccagccgaatactcttgcactgtgcactcttcgtgttcatcatcagtcccccggatgggtgtttaaggcatttccaaagctctgttattaaaaacacgatgcaatgagtttctttcagcattt

SEQ ID NO: 54759 - DNA, 847 bp, Homo sapiens
cgctcttggattttcatgcctgctgccagcacccagggggagctccggaaatgtctgctgggggctcggaatacccacctttctggtaatgcagcccagcgggtcccagcctcgttttccagccctcactcaaaatggagtcgctctggttcgaacgcctctgacaagtgtgtacctacgtgtcaggcccatccttcctgcaggcctttgtcttggtgtcaccctgcctgagctggccccaaccacagtagcaacagtgatgctgatgtgtgactgctgccaggagcctgctcacatgaccgtgtggagaaagttctttccctgaggaccatctggagtggacgcgtgcactacccctctctgaatacaccctccccacgaggccctctggagcatcctgtagagccagcccctacccagagaccctgagcccagagaatgcgctgggtggtgagcctggggacgaatgcagagccctaggtctcctctccagaagttggagtgccatggtgtggtcatagcccactgaagcctcaaacctctgggctgaagccatccttccgcctcagcctcccaagtagctgggaccataggtgcatggcactgtgcctggcactgtctgaatgcatacagctgcgtagcatcgtggtaagaacacccgccctgacatcacacagacctgcatccacgtcccagctgagcctcagttctcacatctgcaaaatggggagaacaacagcagcagcgtcctgaggctggggtgaggaccgagtgaaaaacctttgtcgcatctttgggcatcgcaggagttcaataaatgttagctatcgttgtcactttgtattat

SEQ ID NO: 54760 - DNA, 673 bp, Homo sapiens
cgctcttggattttcatgcctgctgccagcacccagggggagctccggaaatgtctgctgggggctcggaatacccacctttctggtaatgcagcccagcgggtcccagcctcgttttccagccctcactcaaaatggagtcgctctggttcgaacgcctctgacaagtgtgtacctacgtgtcaggcccatccttcctgcaggcctttgtcttggtgtcaccctgcctgagctggccccaaccacagtagcaacagtgatgctgatgtgtgactgctgccaggagcctgctcacatgaccgtgtggagaaagttctttccctgaggaccatctggagtggacgcgtgcactacccctctctgaatacaccctccccacgaggccctctggagcatcctgtagagccagcccctacccagagaccctgagcccagagaatgcgctgggtggtgagcctggggacgaatgcagagccctaggtctcctctccagaaagaccggattttgccatgttggccaggctggtcttgaactcctgacctcaagtgatccacctgcctcggcctcccaaagcgcttggataccatgagtgggttaatgtatgatacctgatgcatgcataaaaacctgacaggtactctaaatcggggacctatttgcttgcatattcaa

SEQ ID NO: 54761 - DNA, 750 bp, Homo sapiens
cgctcttggattttcatgcctgctgccagcacccagggggagctccggaaatgtctgctgggggctcggaatacccacctttctggtaatgcagcccagcgggtcccagcctcgttttccagccctcactcaaaatggagtcgctctggttcgaacgcctctgacaagtgtgtacctacgtgtcaggcccatccttcctgcaggcctttgtcttggtgtcaccctgcctgagctggccccaaccacagtagcaacagtgatgctgatgtgtgactgctgccaggagcctgctcacatgaccgtgtggagaaagttctttccctgaggaccatctggagtggacgcgtgcactacccctctctgaatacaccctccccacgaggccctctggagcatcctgtagagccagcccctacccagagaccctgagcccagagaatgcgctgggtggtgagcctggggacgaatgcagagccctaggtctcctctccagaaagaccggattttgccatgttggccaggctggtcttgaactcctgacctcaagtgatccacctgcctcggcctcccaaagtgcagggattacaggtgtgagccactgcacccggcctcaggcaggtatttttaccagccgaatactcttgcactgtgcactcttcgtgttcatcatcagtcccccggatgggtgtttaaggcatttccaaagctctgttattaaaaacacgatgcaatgagtttctttcagcattt

SEQ ID NO: 54762 - DNA, 782 bp, Homo sapiens
cgctcttggattttcatgcctgctgccagcacccagggggagctccggaaatgtctgctgggggctcggaatacccacctttctggtaatgcagcccagcgggtcccagcctcgttttccagccctcactcaaaatggagtcgctctggttcgaacgcctctgacaagtgtgtacctacgtgtcaggcccatccttcctgcaggcctttgtcttggtgtcaccctgcctgagctggccccaaccacagtagcaacagtgatgctgatgtgtgactgctgccaggagcctgctcacatgaccgtgtggagaaagttctttccctgaggaccatctggagtggacgcgtgcactacccctctctgaatacaccctccccacgaggccctctggagcatcctgtagagccagcccctacccagagaccctgagcccagagaatgcgctgggtggtgagcctggggacgaatgcagagccctaggtctcctctccagaagtaagtatggggtttgtgtaaattgcttggtcaggagggcgggacctggggtcttcactaggcttcccaaaaactgggttgagcacatagtaggtgctcactaaataactgttgaaatagataagcaaggagccactgcacccggcctcaggcaggtatttttaccagccgaatactcttgcactgtgcactcttcgtgttcatcatcagtcccccggatgggtgtttaaggcatttccaaagctctgttattaaaaacacgatgcaatgagtttctttcagcattt

SEQ ID NO: 54763 - DNA, 139 bp, Homo sapiens
aaaaaacctaatcttttgctatctccatcttgttgatcatcttttcttatccatattttaaaaatcttagtcaacaaaaattattttcagcaaatatttactattttaagtcttagaaatcaagaaaaaagaattaaat

SEQ ID NO: 54764 - DNA, 373 bp, Homo sapiens
ccccaattataagtataatttagttgtacgaatgatgcaagactgtttgttttaaaaaaatcacaccaggccgggcgtggtggctcacgcctgtaatcctagcacttcaggagaccaaggtggtgaggccaagagttcgagaccaacctggccaacacagatccccatctctaaatataaaaaaaaataataataataaatcatactagaaatagaaaatgtatttttgataaattgaaaactatagatcataagcaaactagcaacggcttaattttccattttctgttaaatgttttgttatgcactgacattagcaacattaatgttgaaagcttacttgtctgtttaggctacctcacggcatctcaca

SEQ ID NO: 54765 - DNA, 445 bp, Homo sapiens
tagactcttctggagaggcattctgtggaaagaacaggcccctggtcaacttagattccacttaatggagaaatgtttcagacctctcacaagaaaaagacactagagctgaactcgcgcaggtcagtgcctgtcagtgaagaagaaagagagcattgaataagatttttaaagagtgctagggtttattgtgcacaggtaagttgccctgttgacctgaagtctcggttggtgggtcaggtcaccttcaagatctgggaggactgctgagtgtggacttcatgtttgaagttctcatcacgcaggaggccggcccttttggatgagctcaggtccgagtcagaagaccccttctgtgttcgcaaaggagaggtctcagcagacagtagagagatgagtaatgggcatgagagtgtcggaagcccacagacgattctcagagcag

SEQ ID NO: 54766 - DNA, 434 bp, Homo sapiens
tggtcgatctctagcaggatcccttcgattggcgggcacttagattccacttaatggagaaatgtttcagacctctcacaagaaaaagacactagagctgaactcgcgcaggtcagtgcctgtcagtgaagaagaaagagagcattgaataagatttttaaagagtgctagggtttattgtgcacaggtaagttgccctgttgacctgaagtctcggttggtgggtcaggtcaccttcaagatctgggaggactgctgagtgtggacttcatgtttgaagttctcatcacgcaggaggccggcccttttggatgagctcaggtccgagtcagaagaccccttctgtgttcgcaaaggagaggtctcagcagacagtagagagatgagtaatgggcatgagagtgtcggaagcccacagacgattctcagagcag

SEQ ID NO: 54767 - DNA, 382 bp, Homo sapiens
ctgcccccagctttcctgaatggagagcgtgcattcatttcctaatatgccacgatccttgggaagatttcttttgctttagtttgctgtcaggcctggaagggaaggtgaagtggggagtcagtgaggagggggctgggccacctggtgggatgttgggaactattttctgtgcagaggccaaggctggggctgggggtgggacacatggaaatcaaacatgtacttcacagtttggtcctgggctgacctgtttataataaaaacatttggtttgacttccacagactccaagccatgacgtcaatgttgatgcatttcaggccacattccttttagtctccggagaagttctttacaaaaagcatgaaaggtggaatca

SEQ ID NO: 54768 - DNA, 207 bp, Homo sapiens
cccagctgggaggaagtttaataaatgtaataaataattgccaaatgaaaaaacaattacatctgcttcttccataagaagcaaaatagagagagttggatgacagaaaatccagaccactctataatgtaaagggaattctttcacataagatatgatacttatgttaatcctaaaggctacatatgattagaaagagagagaaag

SEQ ID NO: 54769 - DNA, 364 bp, Homo sapiens
gaccccaggtgatctgcccacctcggcctcccaaagtgctgggattacagtcgtggccaccacgccagcctcacatttaaaatcttcatgtcaaagcatttgtagtctcctctcactcacttgccagatttatggaaatctatttatggcaaaggaaccacaaaacatttgtttttttttgttgcgtctttttacaatcccctagagaagctcactttaaaaacatatttattttgatgaaactaaggttccaatcagtatggttttttttgagacagggtcttgctctgtcacccaggttggagtacagtggcgcaatctcggctcattgcaacctccagctccaaggctcaagtagttctcc

SEQ ID NO: 54770 - DNA, 305 bp, Homo sapiens
tcagggttcctccctgtgggcacattttctcccggtctagaggatggagtgtaaaaagaatggctgtgcttcagtcaggagcaggccgaggcagacatccagtacagcatgacacagcgggtctagagcacaggcacacaactctgtgcattatgtgatcatatttatgtagccatttaaagtaacctgtttgtgtgagcttatacctggctttgagccactattgtctataagtcatataactgcactgctgactctgtaggagagagagagaataaagccatgtcccaactgcctacggtccc

SEQ ID NO: 54771 - DNA, 345 bp, Homo sapiens
agtagaggccgcttgtcaactcctagtcccgacaagagggaagcttaaaaaggctgtttgtagtcctatcgaccgttttggcacgtagacactttagttttcgtgttacaggcatgattgttgtgttgtactcccttaagcctaatttaaaataatccgctagtgactgttagttttcaagggctccatttgtttcgctgattaataatagactggtattgtggtagtttgggtctggtcctatattagatttttggatttatccctccggtagattgttctggttgttggatgtgttcgcaattgccgttgtatttgtaaactttagagatgtcacataagatc

SEQ ID NO: 54772 - DNA, 364 bp, Homo sapiens
acagattactcaggcattgtggaatgttcctgtagtctcaggaagttggaggctgacgtaagattattccttgagttccccaggaacttgaggctgcattgagctataatcatggtattgtattcctgtctgggtgagagagtaagacctctttttagaatttcaaatttattttagatttaggaggtacctacacaggttttttacatgggtattttgcataatgctgaggtttgaagtatgagtaattccatcaatcaggtagtgagcatagtactaagtagacagtttttcagttcttggtccctccctctctccaccctctaagagttgtctattatttttgtttttctgtccatgtgta

SEQ ID NO: 54773 - DNA, 232 bp, Homo sapiens
ccttatgggttctgaggaccacaatcacaaaccctccatcttcctcaacctcccatttcatctctatccaccactattgatgttataattattcctttaggagacaaatgtattattctcaaactattatttataacaagatctaaattggagacgtccagtttttctgggtttttttctctctttaagactagtcaagtgcagcagtgagaagaagagaaagagaataatc

SEQ ID NO: 54774 - DNA, 386 bp, Homo sapiens
tcagacttaaggtggataggaagtggggacatgtgtgtcttgtgatcaatcaggagttggttgtcccatcaacagaaacaggttaaaataaagccccagggccccggctggaactaccaacctttctattaacagcagaatgctctaacgaattgcgctgcaggtacacgttccgtgccttcttctgggcgctataggaagggtgcactcagcaaactccccatcccctcaatcttcaggggccctcctggcaggacgactgtgcaagttccaggtccttggaaaaccggagagattagagcggtgaattgtagtgttggacacctgcgcgttgggatattctagagcacgaaggacagccgaatggccttcgcccgccctgcccc

SEQ ID NO: 54775 - DNA, 195 bp, Homo sapiens
tggtttctagctcggggccacacaggggcctgagctcttgctgcctttgcagaccaccagcatgcaccccaaaaacggggactgggaggctcccctcagctactagggcagaagcgctatgtacagctctccctgtagcctcctgcacaggtaggatgtccacttgctccatcctggccgtttctgacgagtgct

SEQ ID NO: 54776 - DNA, 600 bp, Homo sapiens
gatgcagtatttaagctctcaactgtttgtatttggcacattatgtttttacctaatactttaacttgctttctcacatcgtggctgccccaccccaacccccccggcagaaatgattgtcccttttatggatgaggagatggaggcccaggaagtaatctgccaacagccctaccaagcccaggcagccggctggacctccgtgtctgcatgtgaggtcagagatggtcccactgactccgtcctgctggggccactggggacatctgatagggagggatccgtccacagctctgcccagagtgacctctgacatggttcagtctgcaaagctccagcatgggcagccataaagctgagagagtgcagattccagggaagattgagccgtttatcgcaggaaagcctccatcattgttgtcaacctaaacctctggcaccgtgcgtgacccgcagctccagattctgatctgagcctctaggctccgggatggagaaaggggacccgatcctcccaggcagaggcgagaggagaccagcggtgagcacttggtgtctctgccactcgcctcttggtttgtttttgatttttctattaaa

SEQ ID NO: 54777 - DNA, 3345 bp, Homo sapiens
atggcctgtccttggaaatttctgttcaagaccaaattccaccagtatgcaatgaatggggaaaaagacatcaacaacaatgtggagaaagccccctgtgccacctccagtccagtgacacaggatgaccttcagtatcacaacctcagcaagcagcagaatgagtccccgcagcccctcgtggagacgggaaagaagtctccagaatctctggtcaagctggatgcaaccccattgtcctccccacggcatgtgaggatcaaaaactggggcagcgggatgactttccaagacacacttcaccataaggccaaagggattttaacttgcaggtccaaatcttgcctggggtccattatgactcccaaaagtttgaccagaggacccagggacaagcctacccctccagatgagcttctacctcaagctatcgaatttgtcaaccaatattacggctccttcaaagaggcaaaaatagaggaacatctggccagggtggaagcggtaacaaaggagatagaaacaacaggaacctaccaactgacgggagatgagctcatcttcgccaccaagcaggcctggcgcaatgccccacgctgcattgggaggatccagtggtccaacctgcaggtcttcgatgcccgcagctgttccactgcccgggaaatgtttgaacacatctgcagacacgtgcgttactccaccaacaatggcaacatcaggtcggccatcaccgtgttcccccagcggagtgatggcaagcacgacttccgggtgtggaatgctcagctgtgcatcgacctgggctggaagcccaatggccgtgaccctgagctcttcgaaatcccacctgaccttgtgcttgaggtggccatggaacatcccaaatacgagtggtttcgggaactggagctaaagtggtacgccctgcctgcagtggccaacatgctgcttgaggtgggcggcctagagttcccagggtgccccttcaatggctggtacatgggcacagagatcggagtccgggacttctgtgacgtccagcgctacaacatcctggaggaagtgggcaggagaatgggcctggaaacgcacaagctggcctcgctctggaaagaccaggctgtcgttgagatcaacattgctgtgctccatagtttccagaagcagaatgtgaccatcatggaccaccactcggctgcagaatccttcatgaagtacatgcagaatgaataccggtcccgtgggggctgcccggcagactggatttggctggtccctcccatgtctgggagcatcacccccgtgtttcaccaggagatgctgaactacgtcctgtcccctttctactactatcaggtagaggcctggaaaacccatgtctggcaggacgagaagcggagacccaagagaagagagattccattgaaagtcttggtcaaagctgtgctctttgcctgtatgctgatgcgcaagacaatggcgtcccgagtcagagtcaccatcctctttgcgacagagacaggaaaatcagaggcgctggcctgggacctgggggccttattcagctgtgccttcaaccccaaggttgtctgcatggataagtacaggctgagctgcctggaggaggaacggctgctgttggtggtgaccagtacgtttggcaatggagactgccctggcaatggagagaaactgaagaaatcgctcttcatgctgaaagagctcaacaacaaattcaggtacgctgtgtttggcctcggctccagcatgtaccctcggttctgcgcctttgctcatgacattgatcagaagctgtcccacctgggggcctctcagctcaccccgatgggagaaggggatgagctcagtgggcaggaggacgccttccgcagctgggccgtgcaaaccttcaaggcagcctgtgagacgtttgatgtccgaggcaaacagcacattcagatccccaagctctacacctccaatgtgacctgggacccgcaccactacaggctcgtgcaggactcacagcctttggacctcagcaaagccctcagcagcatgcatgccaagaacgtgttcaccatgaggctcaaatctcggcagaatctacaaagtccgacatccagccgtgccaccatcctggtggaactctcctgtgaggatggccaaggcctgaactacctgccgggggagcaccttggggtttgcccaggcaaccagccggccctggtccaaggcatcctggagcgagtggtggatggccccacaccccaccagacagtgcgcctggaggccctggatgagagtggcagctactgggtcagtgacaagaggctgcccccctgctcactcagccaggccctcacctacttcctggacatcaccacacccccaacccagctgctgctccaaaagctggcccaggtggccacagaagagcctgagagacagaggctggaggccctgtgccagccctcagagtacagcaagtggaagttcaccaacagccccacattcctggaggtgctagaggagttcccgtccctgcgggtgtctgctggcttcctgctttcccagctccccattctgaagcccaggttctactccatcagctcctcccgggatcacacgcccacggagatccacctgactgtggccgtggtcacctaccacacccgagatggccagggtcccctgcaccacggcgtctgcagcacatggctcaacagcctgaagccccaagacccagtgccctgctttgtgcggaatgccagcggcttccacctccccgaggatccctcccatccttgcatcctcatcgggcctggcacaggcatcgcgcccttccgcagtttctggcagcaacggctccatgactcccagcacaagggagtgcggggaggccgcatgaccttggtgtttgggtgccgccgcccagatgaggaccacatctaccaggaggagatgctggagatggcccagaagggggtgctgcatgcggtgcacacagcctattcccgcctgcctggcaagcccaaggtctatgttcaggacatcctgcggcagcagctggccagcgaggtgctccgtgtgctccacaaggagccaggccacctctatgtttgcggggatgtgcgcatggcccgggacgtggcccacaccctgaagcagctggtggctgccaagctgaaattgaatgaggagcaggtcgaggactatttctttcagctcaagagccagaagcgctatcacgaagatatctttggtgctgtatttccttacgaggcgaagaaggacagggtggcggtgcagcccagcagcctggagatgtcagcgctctga

SEQ ID NO: 54778 - DNA, 219 bp, Homo sapiens
gagagaagaggtaaagcaaattcaagtctaagtagaattccatgctagacaggccaccaaagaggcccacatcaataatccatatttaggcggtgatgtctgtgcattatttcttaagccctctaggaaaaatgattccacagcagtgaggaaatggagccagaatgacagctgcctcccatcggagccaaggttttggtggggtccacacagatgggt

SEQ ID NO: 54779 - DNA, 678 bp, Homo sapiens
cagaatgccaattacatgttttttactcctgaggagtaactttggttactttatattcattagaaaaaatacagtggaaaatttaactttagcaatgaaaatgcttaacatggtcaaatttttgttcactgatcttttttattgaatgggtaaagccaatgtttacactgcatatgataaatgttttgctttctttgatcaaatttacattcaaagagctattataagaaacattctataaaaattccaatatgttgttaaagtagattttgattgttatttatatcacatgtaggtctgttgcttaatctttgtcacgtaaattataaacatattttctgggtattgcttgtcttaaacagtcttgaaaatgtatctggctgaataattgcctgtcacaatatttaaatgcaagactaagtattcctctgcctgcgcaccccacccccatttaatgggataatagaacataaatgtcatttgtgcatttagttgattaaatgtcactcgtttatgattgtacaactggtctatacaatgtaatggtctctgtagtaaagtaacaatacatttttagtggcattatcagtgttggtaaaataaactcaccgttatattaactaaactgtgcaaacagatttacttgtcatgtatatgttcagataactgcataaaaat

SEQ ID NO: 54780 - DNA, 467 bp, Homo sapiens
tcactcagctctccttgggtacttttgggaccatagacgaaaaggaagctaataaatttgaacaggcagcaaacctctgatgttcatcacattggcacccagcccttgagtaactaaggtaaccaggcacgagactgaattctgagccccaggtagagaaataaaactagagacttcctatcaggatggagctaatattagaatatgattcccgattaacatcacttgcattttatctacttttgaaagccctaaaatctgtttgcttctgttatgtctagatgggcaagttcacaccagataattcattctacagcatatctacaggattaaaaaaacagctctaaagcttaaatttctattttttattcagttattaggagaaaaaagttgattaaaatgtcaaggtcttttaagtaactattaatttttgaatttcaatcatttttatttacctctgcagagaa

SEQ ID NO: 54781 - DNA, 376 bp, Homo sapiens
agcatagggacgacaggagccaggacccgtgtaggagatggttctcgccatgctgggggctctgcacccccgggctgggctcagcctcttcctccacctcatcctggcagtggcactgcttcgctcccagcctctgaggtctcagcggtctgttcctgaggcattttccgcccccctggaactctcgcagccactttccggcctggtggatgactatggcatcctccccaagcacccaaggccgcgagggcctcgacccctcctgtctagggcccagcagcgcaagcgggacgggcccgaccttgccgagtattactatgatgcacacctatgacccaaggccctcataaagataccatgtgtgacaaaaaaaaaa

SEQ ID NO: 54782 - DNA, 330 bp, Homo sapiens
ttcctttctctgacagaccacttatggcccaaagagtaagtgccagcctggtcttcaagctctcagaccactggctttgcattctaggtcattctgctggacttacagagagctgaggccatggtgatggaggcagcagggcactgggtgctggccagtggctcttcggcccataacatttcttgggaaagccagcttgaattcatagaatgcaactacccctcccagccgaagtccttcaagttcaagactcccatcctctgggcagcctcctgacagtcagccctgtccatcttcctccatctgaaccccaaagcccagtctgcctgt

SEQ ID NO: 54783 - DNA, 3181 bp, Homo sapiens
ttgagtttgaggtaacaaacctgcaaattctttttcatttccaaagccttccctcaggacaaagtccaaaatgtcttatttagacctagttttaaataggaggaataatggcaagcacagttcccatctcatcacctgatgggagcacactgggctttcatgaaggactcagcataaggaccagaaaggaccatgatcaggccaaccttttccccttaaagatgaggcttgagaggacaggacagtggcttgagtcccctgcagatttaaggtcctggtcccctctgccgcaccagctgactcacaacctactgctggattcatcaggaggacaaggacctggcatcagttagggtgagtgggacagatgcttgcatttgcgttaccctttggggacctaaagggtgattttgttatggctgtcacagccttgggccttgtctcatcttttgactacggaagtacacaccagtggctctgtgcccacctgacaggtgaataaacctctgcagtaagtgtgggggcatccccaggaccccccagtgcatcagttggagaacaggagcagatataaggggacctgactcccagcccgaggcccctttgtcttgccatgtgattccagtttctccatggtaaatgggcttgggtttaacctattaaacctatttaagccctgctagaaagcataacaggagctaactaatatgagtattttcacccaagagtctcccagtccaagcattacacataattcagaggcaaagcctggggctggtggctggaagtgctatcctggttagagtgtctttgatgatactcattgttcattgaagatgagtgtgggaaaggtaccccaggattaaaattgtttcagatgtattaatattcctgttctccttgtagaccactgttgaaaaaacacacaagtcgtttttaaaaccacagtggacactcactgccttacccagatcattcctcctggggatctctttcttgtcaccagctgctgaccccagcaagttgggagacaaatctggagcagcataactcactaaagctgggtgtctaaggctccagctggaaaaagtctcttagctaccgctgcccatggcatttggagtttttaaatacgatacagaacataatctattctgccccaccccaacacacacctcataactactcttccgttccccacctgacaggaggatgacctggccttcgacagttgctcaaagccaactccccctgcactgcctgactgggtgcagaggacactcactccaccctcctagcagtccttcgatgactggcccaggcctctctgtagcagctactggcgagcatttccccaggccgtagccagggccatgcgtccgccttcctcctgctggtgcccaccctatgtgtgccccaccccctttccccagaggctgagttgggagcatgttaggaacactagctagttgctcctgaacacagccctatgaaatagggagtctgcagctccaaggtaaggtggttaagccaccctccctccagggcccaggtgtgtgaggagaggctggggacactcacaatgacctccatgatgggccagccaccacccctttctgatgcccactctgggtgctgggtgagaagctgatcctctcagggggagccccacacagaggaagccgtggcagagttgatatatggtttcactccctagcccccaggtgggactggctggtcttggtcccagggattcttcataggactagtgagcaccccacagggccatatcacaggcatcctctctccttacttctgctttcccttcccctgttaggttcgaacgatacaggtctggccgatccgttcaaaatgccagtaatggagtaagtattccttcagaatcctgtcatctcctgaggccagacctacccctccacgttttggaggctggagagacctccagtttttctaactggttttgaaatatttgggaaattgaagaggcaagctctggttgatgggatactagggcagagctagcaggcacccctgatgggaaggtggcaagcaagccctaagtttgcatctcccaggacagtcactgttgactcagcaacccctccttctagtggggacggggaggaggcagtgagcagggctcactgacatccaggcccaccatggacctggaaggcaggtgggggaagtggccttgcttctgtactagagcagcgctgatacttttcttcttggaaccctgcatagttgccttgccagcttctacctcagagcctgactccagggttctggggcttatggccaatctcatgttctgacaggtactgaatgaagtaaccgaagacaacttaatagacctggggccagggtctccagccgtggtgagcccaatggtggggaacacagcgcccccatcttccctctcctcccagcttgcaggcttaggtgagtgtctcacagggacaaaagggcctacctacttcctaccactggcctcccttgcaggccacctctctttctttcttggaagacccaaagagagtcttttgggaaatacatgtgaaagtgtattcctgagtcctagccagttgtaccaccttaccttcaattcataccttttttccccctaaatttgaagtttaaaatctatgttggaaagcagggatgggggaaattccaatgaattaaagaaaggtcacggccgtgcgcagtggctcacgcccgtaatcccagcactatgggaggccgaggtgggtggatcacctgaggtcaggagtttgagaccagcctgaccaacatggcgaaacccagtctctactaaaaatacaaaaattagcaggcgtggtggtgggcggctgtagtcccagctacttgggagactgaggcaggagaatggcgtgaacccgggaggcggagcttgcagtgagccgacatcgctctactacactccagcctgggtgacagagcgagactctgtctcaaaaaaaaaaaaaaaatcaaattggattctgctacctctcttcttaaaaaaggtatagtaggccaggcatagtggctcacgcctgtaatcccagcactctgggaagccaaggcaggcggattgcttgagtccaggagttcaagaccagcctgggcaacatagcaaaacctcatctctact

SEQ ID NO: 54784 - DNA, 1433 bp, Homo sapiens
ggcagcgggaggacagcgcgctcggcggcgggagagcgggacggcccagccgcggcgccttcagctcatcggttgcccgcaggcgccggccgagtccttcctgccgggcaggaagccctgcctcgtggggggcaaggtcgagccgttggcgcgccgggatccggctcgagccaactgaggaccgggcacccgcaggacgtgtcaggaggtgtcgaaggcccgctgtggggcggccacgcgcgttcccgtccgttccccgcggcgtcccgcgcttgtcccgggtcccgctcggctcacgggaccctccaggcccccggggctgtggcagcacgcgggtcccgagcgtgggcttccttggggccgagagcttggagcgccccaggcggccccccgcctccctgcaggacgccgccctcgcgtctccgctgcagagaagcccttgctgcccgcctctcgcgggctctgggctctttctcaccagggaccgagctctcattcgttcagccttccccgggcaagatgcacctcctgtccaagtctctcgcccttccgcctgccgcagaccgaaggtcacgcatctccagctggaatgctgcaaaagtgacgcttttcatcatgggtgcaaagtgtacagcgtgcaatgtggacttgttccctcttacaacgagtagaagaccctctctggggagaaaagaaaggtctgaagaaccgattcccatgagagaaccctaagaagacagcaacagagggccagacgcgcccctggaactggaccctggactggggcgggagggccacagccttgggagcccaggtccctgcccgcgcctccgacagtcccgcgccgccgccacccggcatctgcctctgggcctccacatctcgtgcctggaaccgcgttcattgcgcactgcaccagtaaacacctgaacactcccaccacatgctgcacgtttatttgtaacaaattagaagctgttgtaaaagataaaaattaaaacacttagactgggtgggcgagaggctcatgaatgtaatcccagcactttgggaggccaaggcaggaggattgtttgagtccaggagtttcagaccagcctgagcaacatagttagaaccgtgtcgactaaaaattttttttaaaaattagccgggcgtggtggccggcgcctgtggtaccagctactcgggaggctgaggcggggggaccacttgagctcgggaggcggaggctgcagtgagccgagattggcactgcactccagcctgggtgacagagattctgtcgcaaaacaaaaacaacaacaacaacacacaccacacacacacacatctaaaagagatgatgtagaagtacaagtaaccgtttccctctgcatcccagtggaacgtcgtgggtcttctgaagaccctctcttgccctgcaggctccg

SEQ ID NO: 54785 - DNA, 829 bp, Homo sapiens
tttaattaccccagtttattggagaacattgagaatggccatcccacagaaaactatatagaccaatttcttaccctgttatctgtgtgccacactgttatccctggaaatattataatctaccaggcttcctccccggatgaagcagctttagtgaaaggagcaaaaaaacttggctttgtttccctacaggaacaccatactctgtcaccgtagaagccatgggtgaaaaaatcacttttgaaattcttaatgtcctggagttctctagtaatagaaaaaggaggctgggcacggtggctcacgcctgtaatcccagcactttgggaggctgaggtgggtggatcacgaggtcaggagttcgagaccatcctggctaacatggtgaaaccccccatctctactaaaaatacaaaaaattagccgggtctggtgtcacacacctgtagtcccagctactcaggaggctgaggcaggagaatcacttgaaccagggaggcggaggttgcagtgagccgggattgcgccactgcactccagcctgggcaacagagactctgtctcaaacaaacaaacaaaaaaaaagaaagagagaaagaaaaaggatgtccgtaattgtccgaactcctatgggacagctccagctgtattgcagaggggctgatgaagagaataattccccaatcacccaagttgcccttcaacaatgtcttcatcaacagctttcttgatctaaatgtcccacgtgggtatgcattttctcaaacagaagcatccgtggtcacgcaggaagaactagtccgttcttatgacactactaaaaataaac

SEQ ID NO: 54786 - DNA, 328 bp, Homo sapiens
gttcaaagtgatttgcctaattcatttaaagcatatttagttttttttaaattgagtgtattttatctagatatttttaaaaggcagcatctaaccttggattttataaatacatctaaatttgttatttccagaatgcttcaaaacagatctctgtagcctcgtgctttgttattgttaggttttttttttttgttttgagacagggtcttgctctatctggagtgcagtggcacagtcatagctcactgtaccctcaaactcctaaactcaagtaatcctcccatctcagcctcctgagtagttgggaccacagtcatgcaccagc

SEQ ID NO: 54787 - DNA, 203 bp, Homo sapiens
tggggggaagagcagtttggagagttacggggaatttcttttggacctgatagttgcagaacagtatatagaggatgacatgttcctatttttgtagataacagaattatagtctacccaaaggaaaaactaggagccatatatgtcaggtttattaactgtgtgccacactttccttatctgttaggtagtgatagcaaagg

SEQ ID NO: 54788 - DNA, 201 bp, Homo sapiens
ttaacaagcttcactaactagcctttttatgccattattgccttttcacaagttgcttcccctagagactcagagtcttttcctttgtcttgccatttctttaaaaatttactattctattcttagttgaagatgctatataagccacttctaggagaactactttatttcctgtctcccatgtatatataaaatattcat

SEQ ID NO: 54789 - DNA, 168 bp, Homo sapiens
gccttcggagcttttaaaactcattgagaacaaagtgctgatgttgggcaagggtgtttcctccttccctccgtttgctgggggctctcttagatgataatagggcaggcctgtgatgtggtggcaaagttcaagaatacatattcagattttattcccatagccaaa

SEQ ID NO: 54790 - DNA, 202 bp, Homo sapiens
gcatctaacatttaatacttctaatattgctgtgggctagaaactagagagaaaagtttaactgcatattaaatcagagctgagattcttaaaaagttttacctggtgtttaagggccttttctactctaaatctggagttgaattaaagctgttggaagccaggtttctgaatatttggcttattgcttattatggtaaaa

SEQ ID NO: 54791 - DNA, 1510 bp, Homo sapiens
agcggctttcaggccttgaatccagtgggattgagaactttctaagagtggtgcggctcttgacaacatgtgggctccaccagcagcaatcatgggggatgggcccaccaagaaggtgggcaaccaggcccccctgcagacacaggccctccagactgcctctttaagggatggcccggcgaagcgggccgtgtgggtccgccatacgagttcagagccacaagaacctactgaatcaaaggcagccaaggagaggcccaagcaggaggtgaccaaagcagtggtcgtggacctgggcactggctactgtaaatgtggctttgccggcctgccaagacccacccacaagatctcaacaacggtgggcaagccctacatggagaccgccaagactggggataatcgcaaggagacattcgtggggcaggaactcaacaacacaaacgttcatctcaagctggttaaccctctgcgacatggcatcatcgtggactgggatacagtgcaggatatctgggaatatctcttccgacaagagatgaagatcgccccggaggagcatgcggtcttggtttcagacccgccactgagcccacacaccaacagagagaaatatgctgaaatgctgtttgaagccttcaacacccctgcaatgcacatcgcctaccagtcgcgcctgtccatgtactcctatggaaggacctccggcctggtggtggaggtgggccatggcgtgtcctacgtggtccccatctacgagggttatcctttgcccagcatcaccggaaggctggactacgcgggctctgacctgacagcctacctgctgggcctgctgaacagtgcggggaacgaattcacccaggaccagatgggcatcgtggaggacatcaagaagaaatgctgctttgtggccctggatcccattgaggagaagaaagtccctctcagtgagcatacgatccgctacgtgctgccggatgggaaggagattcagctgtgccaggaacggttcctctgctcggagatgttcttcaagccatctctcatcaagtccatgcagctgggcctccacacccaaaccgtgtcctgccttaacaagtgtgacatcgccctcaaacgggacctcatggggaacatcctgctctgcgggggcagcacgatgctcagtggcttccctaaccgtctgcagaaggagctaagcagcatgtgtcccaatgacaccccgcaggtaaacgtgctgcctgaaagagacagtgccgtgtggaccggtggctccatcctggcctcacttcagggtttccaaccattgtgggtccaccgctttgagtacgaggaacacgggcctttcttcctctacagaaggtgcttctgaacggcgacgaggatggacactgcactggcagtgcctaccctcgacagggtgagcgcactcctacacacagggggtggagccggcgcttattcctgtagcattaaacacccctcatatgcccctccaaaatgtgtt

SEQ ID NO: 54792 - DNA, 783 bp, Homo sapiens
tctgagctggcgagttagaagaatggaaggtaaggggaaggtctgtcatctacccaggacattcccatgatgagtacaggtcagattgtgccacaaggtgggcctccacgtccctgccctggccctctttcttctgtcactaaccctggttatcattttacaggcttgtaactggatattctaccagagctctcactatattgtcaagcctaagattgaaaaactggaggctttattagtgtttttatatagaaaacagttattacatatgtgttaagtcatttcttaagaattttctaaaatgccaactatcacaggattatttcaagctagtcattgaggtatatgacaaaatgtaaataacaaaaaactgaaatctaccaaaagagcatggagatttttcttaaataataatattgtgctctccacctcacccttgtgtaaaccctcaggtcaggttggttcccctgggtcacaaaatggtaaatgttccatactgacatgccggaggcagcctgacccgttatttggaaagaatttgtgaattatttctgggtttgtgttttgcctaagagctgatcttattttcctgaaaaaaaaaaaaaaaaaacaaaaaaaaaaacaacaaaaaaaacaaaaaaagaaaaaaagaaaaaaaaacaaaacaaaaagacaaagcacaaaccaaacccagatacacacagcaccccacaacatcaccacagactcccccgcgacagaccgaacaacaaaaccacgcaccgcaccagtcagcaccactac

SEQ ID NO: 54793 - DNA, 1657 bp, Homo sapiens
tctgagctggcgagttagaagaatggaaggtaaggggaaggtctgtcatctacccaggacattcccatgatgagtacaggtcagattgtgccacaaggtgggcctccacgtccctgccctggccctctttcttctgtcactaaccctggttatcattttacaggcttgtaactggatattctaccagagctctcactatattgtcaagcctaagattgaaaaactggaggctttattagtgtttttatatagaaaacagttattacatatgtgttaagtcatttcttaagaattttctaaaatgccaactatcacaggattatttcaagctagtcattgaggtatatgacaaaatgtaaataacaaaaaactgaaatctaccaaaagagcatggagatttttcttaaataataatattgtgctctccacctcacccttgtgtaaaccctcaggtcaggttggttcccctgggtcacaaaatggtaaatgttccatactgacatgccggaggcagcctgacccgttatttggaaagaatttgtgaattatttctgggtttgtgttttgcctaagagctgatcttatttctgatttgtgtgtgtgtggtttataaattttactacgtgtaacaaaagtctgcttttccagcatgagcacactggagccctctgctcactggcacttcctgactcaaaggcactaacagtgctcatgtgccttccagacggttcaaggcagaggccactgtgctcagtgtagtctgtgatgaatagtttaagtgttcagaaattggtaaaccaacacacgggatacaataactctctgttaaccagaacaccgtcatttgaccaagccctacaagagtttaccacactagatgttctgtgaatcctcgagtcagttccattgagaggggcctgtctccagggccaggctatttacttgggaaagtatttttcttacagttcttggccacagtttttttgctgagggtttctgtctgggcctatcaggtccatacttagaccctgagcatcttcttcattcagatttgaagtggcttattaaattagcaccaaatatcagtgggactgtagaaggtaacctgaacacgtagtaccattgactctcgttgaataactttatatttccataatcctgaattgtgtagatagttttctagctctcgggtccctttattgctttttaaaatagggtttgaaacatgccacaggaaggttgctctccaaaaatacacagtgcagtgcaagaaaatgctatctcattggcctactctcctatgaattgctaaagtgcccacttcacatatgtgtataaacctttataaaccagtatttcacttttaaaaagacaaggcatctctacccattaactctgcaagccaatccacttgcaccattccgcttgaccctcctctctcctggcttgggtcaaccagccaggcacctgtgacacgagtgctgctctccaggatctccactaacatgttccaggttggagtgaggacgcgctatgtgctcacactcatgttgacatgagcaaagatgatactctgtaaacaaggcccttctgaccggactcagtgcgtgtgatggtgagtgcaatgaggacagggtggatcttttggactaaagac

SEQ ID NO: 54794 - DNA, 1102 bp, Homo sapiens
gattaaacttactaatgtagcccttcccacacttctgacatttatacagttcttcttctctataggctctctgatgtgaatggccctgtgaattcatataaaatctcttcccacatccgtcgcacttgaatgttgtttctccattgtggacccgctgatgtcttgaaagacatgaggaccacctgaagcccttcccacatacattacaattatatggtttgtctcctgtatggtccatctgatgcttacaaagatcttgcctacaagtgaagctccttccacattcttcacatttgtatagtttctcttttgtgtggtccatgcaatgactattaagtgctgatctctgaccaaagctattactacaggtatcacatctaaatgatttctcttgcatgtggaccatggaatgcctattaagatttgatctactatggaagctcttaccacatatataacatttgaatggcttctccccagtatggattctttgatgttcccgaagctgggaattgtgaatgaaggccttcccacattcctcacaaatatgaggtttttctcctgtgtgtaatttgcaatgaacatacattcctgatctacggctgaaacttttcccacactgctcacatttgaatggtttctctccagtgtggattctctgatgagtttgcagttgtgagttctgactaaatgccttactacacacatcacacttatagcgtttctctcccatgtgaactttctgatgaagacaaagagctgagctataacagaatctcttcctgtactcattacatgtatgggatatctttcctgagtgtaattgttgatgaagatcaaggatggagacatcactgaagaattttttacacttcccatgctcagaaggtgtctctcctatgtgaattatagatagtcctgcgtcaacctgggaggggacatcaccttgtgtggagaactgagagctacttatggagtcttgaggtctagttaactcacttgcagtttgttcccagatttgctggcaagaccactcttcatgtggtcctgtttctggaacagactccaactcagtttggatcttgcctcctataaggacaca

SEQ ID NO: 54795 - DNA, 381 bp, Homo sapiens
gcagtgtgtccctctgccctcctttttggctaaggccagctccttcatctactcgctggctcggggtgctgttcctacaatgctcctttctgcctctgatgatttacttctttatcacggcttattcccgaaagaaaggcagctgttgttgctctagaaacttctatctgctgcctccttctgtcctttgctcctcttagagcaaacatggctgggctatgtcctctctcccttcagggtatcccctcccctgctctatccccatgccaccagatcgccatgtccagcctcagtttccccatcaggccccactcagcagcatctcacacagctcaccacactctcctcgagttttcattttgcaaattttcgcacctacaa

SEQ ID NO: 54796 - DNA, 306 bp, Homo sapiens
tttcactttgcttttctgcctttaagagatacatacggacaggcctagtggctcacacatgtatcccaacactttgggaggccaaggtaggaggatcacttgaggccaggagtctgagaccagcctaggcaacatagcaagaccccatcatttaaaaaaaaaaaagaaagaaaaaaaaaagaaagaaagaaaaaagaaaaattagctgggcatggtggtgcatgcctatagtcctagctactcaggaggctgaggcaggagaatcacttgagcccaggagttcaaggcctagtagtgagctatgat

SEQ ID NO: 54797 - DNA, 366 bp, Homo sapiens
gaggttggactgtggtgcaggaaagcctcaagtagaggagggttgaggcttcagtccagcacctttctcgggtcacggcctcctcctggctcccaggaccccaccataggcagaggcaggccttcctacaccctactccctgtgcctccagcctcgactagtccctagcactcgacgactgagtctctgaggtcacttcaccgtggtctccgcctcacccttggcgctggaccagtgagaggagagggctggggcgctccgctgagccactcctgcgcccccctggccttgtctacctcttgccccccgagggtttagtgtcgagctcaccccgatcctcccacaataaaggcttctcaatccgca

SEQ ID NO: 54798 - DNA, 870 bp, Homo sapiens
tttctcgggtcacggcctcctcctggctcccaggaccccaccataggcagaggcaggccttcctacaccctactccctgtgcctccaggctcgactagtccctagcactcgacgactgagtctctgaggtcacttcaccgtggtctccgcctcacccttggcgctggaccagtgagaggagagggctggggcgctccgctgagccactcctgcgcccccctggccttgtctacctcttgccccccgaagggttagtgtcgagctcactccagcatcctacaacctcctggtggccttgccgcccccacaaccccgaggtttaaagccaggtacacgaggcaggggacacaccaaggatggagatgttccaggggctgctgctgttgctgctgctgagcatgggcgggacatgggcatccaaggagccgcttcggccacggtgccgccccatcaatgccaccctggctgtggagaaggagggctgccccgtgtgcatcaccgtcaacaccaccatctgtgccggctactgccccaccatgacccgcgtgctgcagggggtcctgccggccctgcctcaggtggtgtgccactaccgcgatgtgcgcttcgagtccatccggctccctggctgcccgcgcggcgtgaaccccgtggtctcctacgccgtggctctcagctgtcaatgtgcactctgccgccgcagcaccactgactgcgggggtcccaaggaccaccccttgacctgtgatgacccccgcttccaggactcctcttcctcaaaggcccctccccccagccttccaagtccatcccgactcccggggccctcggacaccccgatcctcccacaataaaggcttctcaatccgc

SEQ ID NO: 54799 - DNA, 246 bp, Homo sapiens
ccccttactgttctcgtgacagtgagtgagccctcgtgggatctgcttgttgaaaagtgtgcagcacctcccgcttcactctctctgtctctcctgctccaccatggccagacgtgcctgcttcccccttgccttctgcatgattgtcagtttcctgagcccctccccccagccttccaagtccatcccgactcccggggccctcggacaccccgatcctcccacaataaaggcttctcaatccgc

SEQ ID NO: 54800 - DNA, 935 bp, Homo sapiens
gaggttggactgtggtgcaggaaagcctcaagtagaggagggttgaggcttcagtccagcacctttctcgggtcacggcctcctcctggctcccaggaccccaccataggcagaggcaggccttcctacaccctactccctgtgcctccagcctcgactagtccctagcactcgacgactgagtctctgaggtcacttcaccgtggtctccgcctcacccttggcgctggaccagtgagaggagagggctggggcgctccgctgagccactcctgcgcccccctggccttgtctacctcttgccccccgagggtttagtgtcgagctcaccccagcatcctatcaacctcctggtggccttgccgcccccacaaccccgaggtataaagccaggtacacgaggcaggggacacaccaaggatggagatgttccaggggctgctgctgttgctgctgctgagcatgggcgggacatgggcatccaaggagccgcttcggccacggtgccgccccatcaatgccaccctggctgtggagaaggagggctgccccgtgtgcatcaccgtcaacaccaccatctgtgccggctactgccccaccatgacccgcgtgctgcagggggtcctgccggccctgcctcaggtggtgtgcaactaccgcgatgtgcgcttcgagtccatccggctccctggctgcccgcgcggcgtgaaccccgtggtctcctacgccgtggctctcagctgtcaatgtgcactctgccgccgcagcaccactgactgcgggggtcccaaggaccaccccttgacctgtgatgacccccgcttccaggactcctcttcctcaaaggcccctccccccagccttccaagcccatcccgactcccggggccctcggacaccccgatcctcccacaataaaggcttctcaatccgca

SEQ ID NO: 54801 - DNA, 979 bp, Homo sapiens
ccacttccggccgggaccccggaggcggaggcagcgaaggcggagggggcggcgggggcggcggcggcggcggcggcggcggcgtagccgtagaggtgcacagagaacacccctagcatgaacagtgtgaggattccaccagctttttcaccatgaaggagacagaccgggaggccgttgcgacagcagtgcaaagggttgctgggatgctccagcgcccggaccagctggacaaggtggagcagtatcgcaggagagaagcgcggaagaaggcctccgtggaggccagattgaaggccgccatccagtcacagttggacggggtgcgcacaggcctcagccagctccacaacgccctgaatgacgtcaaagacatccagcagtcgctggcagacgtcagcaaggactggaggcagagcatcaacaccattgagagcctcaaggacgtcaaagacgccgtggtgcagcacagccagctcgccgcagccgtggagaacctcaagaacatcttctcagtgcctgagattgtgagggagacccaggacctaattgaacaaggggcactcctgcaagcccaccggaagctgatggacctggagtgctcccgggacgggctgatgtacgagcagtaccgcatggacagtgggaacacgcgtgacatgaccctcatccatggctactttggcagcacgcaggggctctctgatgagctggctaagcagctgtggatggtgctgcagaggtcactggtcactgtccgccgtgaccccaccttgctggtctcagttgtcaggatcattgaaagggaagagaaaattgacaggcgcatacttgaccggaaaaagcaaactggctttgttcctcctgggaggcccaagaattggaaggagaatcgctggaacccacaaggcagaggttgcagcgagccgagtacacaccactgcactccagcctgggcgacagagcaagactccgtctc

SEQ ID NO: 54802 - DNA, 914 bp, Homo sapiens
caaggtctgattaggttaccccgacgggtagctcactgcagcgcagccagcagcctttaactcctgggctcaggtggtctccctgcctcagcctcctaatgagccatattttaaagcctgaggtgaagttattttttgatccatttaaagtaatcaacctctctgtccttccattagtctggatcgtctaaagattgttttatttttagaggctcatccggtcagatgttagtgatgtgaaatttcaggccaggcgtgacgtcagcgtggcatttgaaacagctccatgttgcccttagtgctgtctgaccgaagcctgtctgtcctcagatataaagatgaagcgcagctgtataaagaagagcacctgaggaatcggcagcaccctcactgctacgttcagtacatgatcgccatcatcaacaactgccagaccttcaaggaatccatagtcagtttaaaaagaaagtatttaaagaatgaagtggaagagggtgtgtctccgagccagcccagcatggacgggattttagacgccatcgcgaaggagggctgcagcggtttgctggaggaggtcttcctggacctggagcaacatctgaatgaattgatgacgaagaagtggctattagggtcaaacgctgtagacattatctgtgtcaccgtggaagactatttcaacgattttgccaaaattaaaaagccgtataagaagaggatgacggccgaggcgcaccggcgcgtggtggtggagtacctgcgggcggtcatgcagaagcgcatttccttccggagcccggaggagcgcaaggagggtgccgagaagatggttagggaggcagagcagctgcgcttcctgttccggaagctggcgtccgtttgcgggaagacaatgcaatcacatcctgtggtca

SEQ ID NO: 54803 - DNA, 413 bp, Homo sapiens
cacgctgtatttgtcttcactgagggtcctggtgcagctgcccacaggcctggccaaggtgctgggggaaagctcccgaaatgagaaaccagccctgtcttggggagagatgtgcctttgaggctgacatctacatgctgggtggtctgggacccacatctagaatcttcgcaatgtccatgtctctcatgcctgtgaaacgcccctgctctccccttaaaggtataacttctgcatgtttgtgttacgaaggtttgtttatcttatcaaggagttcctcatcctagttcagctttctttgaggtttcctggattaatgatctcagaggctctgcttgtagctccactgtgatcacctgatagtttgggggaggttttgtacctaacatttctaccgtcctaacaactcctgc

SEQ ID NO: 54804 - DNA, 336 bp, Homo sapiens
tcgagaggatcccgtgtcaggcactgaacgctctagccacggaagctgatggacctggagtgctcccgggacgggctgatgtacgagcagtaccgcatggacagtgggaacacgcgtgacatgaccctcatccatggctactttggcagcacgcaggggctctctgatgagctggctaagcagctgtggatggtgctgcagaggtcactggtcactgtccgccgtgaccccaccttgctggtctcagttgtcaggatcattgaaagggaagagaaaattgacaggcttcagtgcctgaccaggcttcagtgcctgaccaggcttcagtgcctgacc

SEQ ID NO: 54805 - DNA, 350 bp, Homo sapiens
  misc_feature (8)..(8): n is a, c, g, or t
  misc_feature (19)..(19): n is a, c, g, or t
  misc_feature (22)..(22): n is a, c, g, or t
  misc_feature (24)..(24): n is a, c, g, or t
ggcggcgncggcggcgtantangnagggtgcacagagaacacccctagcatgaacagtgtgaggattccaccagctttttcaccatgaaggagacagaccgggaggccgttgcgacagcagtgcaaagggttgctgggatgctccagcgcccggaccagctggacaaggtggagcagtatcgcaggagagaagcgcggaagaaggcctccgtggaggccagattgaagagagcggatctgaagctcaggtgccgattctgtcctgtgggtcagccgtcctggggccaagtgtggtgctggctgaacagcaggaactcccccgccccaagccagtgaagtcctgaccgttc

SEQ ID NO: 54806 - DNA, 2798 bp, Homo sapiens
  misc_feature (20)..(20): n is a, c, g, or t
  misc_feature (23)..(23): n is a, c, g, or t
gaggcggaggcagcgaaggnggnagggggcggcgggggcggcggcggagggggcggcgggggcggcggcggcggcggcggcggcggcgtagccgtagaggtgcacagagaacacccctagcatgaacagtgtgaggattccaccagctttttcaccatgaaggagacagaccgggaggccgttgcgacagcagtgcaaagggttgctgggatgctccagcgcccggaccagctggacaaggtggagcagtatcgcaggagagaagcgcggaagaaggcctccgtggaggccagattgaaggccgccatccagtcacagttggacggggtgcgcacaggcctcagccagctccacaacgccctgaatgacgtcaaagacatccagcagtcgctggcagacgtcagcaaggactggaggcagagcatcaacaccattgagagcctcaaggacgtcaaagacgccgtggtgcagcacagccagctcgccgcagccgtggagaacctcaagaacatcttctcagtgcctgagattgtgagggagacccaggacctaattgaacaaggggcactcctgcaagcccaccggaagctgatggacctggagtgctcccgggacgggctgatgtacgagcagtaccgcatggacagtgggaacacgcgtgacatgaccctcatccatggctactttggcagcacgcaggggctctctgatgagctggctaagcagctgtggatggtgctgcagaggtcactggtcactgtccgccgtgaccccaccttgctggtctcagttgtcaggatcattgaaagggaagagaaaattgacaggcgcatacttgaccggaaaaagcaaactggctttgttcctcctgggaggcccaagaattggaaggagaaaatgttcaccatcttggagaggactgtgaccaccagaattgagggcacacaggcagataccagagagtctgacaagatgtggcttgtccgccacctggaaattataaggaagtacgtcctggatgacctcattgtcgccaaaaacctgatggttcagtgctttcctccccactatgagatctttaagaacctcctgaacatgtaccaccaagccctgagcacgcggatgcaggacctcgcatcggaagacctggaagccaatgagatcgtgagcctcttgacgtgggtcttaaacacctacacaagtactgagatgatgaggaacgtggagctggccccggaagtggatgtcggcaccctggagccattgctttctccacacgtggtctctgagctgcttgacacgtacatgtccacgctcacttcaaacatcatcgcctggctgcggaaagcgctggagacagacaagaaagactgggtcaaagagacagagccagaagccgaccaggacgggtactaccagaccacactccctgccattgtcttccagatgtttgaacagaatcttcaagttgctgctcagataagtgaagatttgaaaacaaaggtactagttttatgtcttcagcagatgaattctttcctaagcagatataaagatgaagcgcagctgtataaagaagagcacctgaggaatcggcagcaccctcactgctacgttcagtacatgatcgccatcatcaacaactgccagaccttcaaggaatccatagtcagtttaaaaagaaagtatttaaagaatgaagtggaagagggtgtgtctccgagccagcccagcatggacgggattttagacgccatcgcgaaggagggctgcagcggtttgctggaggaggtcttcctggacctggagcaacatctgaatgaattgatgacgaagaagtggctattagggtcaaacgctgtagacattatctgtgtcaccgtggaagactatttcaacgattttgccaaaattaaaaagccgtataagaagaggatgacggccgaggcgcaccggcgcgtggtggtggagtacctgcgggcggtcatgcagaagcgcatttccttccggagcccggaggagcgcaaggagggtgccgagaagatggttagggaggcagagcagctgcgcttcctgttccggaagctggcgtccggtttcggggaagacgtggacggatactgcgacaccatcgtggctgtggccgaagtgatcaagctgacagacccttctctgctctacctggaggtctccactctggtcagcaagtatccagacatcagggatgaccacatcggtgcgctgctggctgtgcgtggggacgccagccgtgacatgaagcagaccatcatggagaccctggagcagggcccagcacaggccagccccagctacgtgcccctcttcaaggacattgtggtgcccagcctgaacgtggccaagctgctcaagtagcctccgccggcctgccctgctcgcccctccacagcctcggtccctgcctttagaaacgcgggacagctgattgctctccttggccacacgtgctccttttagctgcacggcctgtctttaggtgccagtgtgatgcaccgggtgtgcgtcgagtgagcgtcccgaggccacgtgcggaggcccctcactgtgctgtcaaaggcctgtgggtgcagggctctgccgcacagcctctcttgggtgcttgtttgttgcagtggttgaaagtgtgtggggcacagaggacgtgcacctccctgccctcctcctccctgggccttcaccgcaccccatctgcttaagtgctcggaaccccgtcacctaattaaagtttctcggcttcctcagagaaaaaaaaaaaaaaa

SEQ ID NO: 54807 - DNA, 2784 bp, Homo sapiens
ggctgtactggtccggaattttttggaatgcggagggggcggcgggggcggcggcggcggcggcggcggcggcgtagccgtagaggtgcacagagaacacccctagcatgaacagtgtgaggattccaccagctttttcaccatgaaggagacagaccgggaggccgttgcgacagcagtgcaaagggttgctgggatgctccagcgcccggaccagctggacaaggtggagcagtatcgcaggagagaagcgcggaagaaggcctccgtggaggccagattgaaggccgccatccagtcacagttggacggggtgcgcacaggcctcagccagctccacaacgccctgaatgacgtcaaagacatccagcagtcgctggcagacgtcagcaaggactggaggcagagcatcaacaccattgagagcctcaaggacgtcaaagacgccgtggtgcagcacagccagctcgccgcagccgtggagaacctcaagaacatcttctcagtgcctgagattgtgagggagacccaggacctaattgaacaaggggcactcctgcaagcccaccggaagctgatggacctggagtgctcccgggacgggctgatgtacgagcagtaccgcatggacagtgggaacacgcgtgacatgaccctcatccatggctactttggcagcacgcaggggctctctgatgagctggctaagcagctgtggatggtgctgcagaggtcactggtcactgtccgccgtgaccccaccttgctggtctcagttgtcaggatcattgaaagggaagagaaaattgacaggcgcatacttgaccggaaaaagcaaactggctttgttcctcctgggaggcccaagaattggaaggagaaaatgttcaccatcttggagaggactgtgaccaccagaattgagggcacacaggcagataccagagagtctgacaagatgtggcttgtccgccacctggaaattataaggaagtacgtcctggatgacctcattgtcgccaaaaacctgatggttcagtgctttcctccccactatgagatctttaagaacctcctgaacatgtaccaccaagccctgagcacgcggatgcaggacctcgcatcggaagacctggaagccaatgagatcgtgagcctcttgacgtgggtcttaaacacctacacaagtactgagatgatgaggaacgtggagctggccccggaagtggatgtcggcaccctggagccattgctttctccacacgtggtctctgagctgcttgacacgtacatgtccacgctcacttcaaacatcatcgcctggctgcggaaagcgctggagacagacaagaaagactgggtcaaagagacagagccagaagccgaccaggacgggtactaccagaccacactccctgccattgtcttccagatgtttgaacagaatcttcaagttgctgctcagataagtgaagatttgaaaacaaaggtactagttttatgtcttcagcagatgaattctttcctaagcagatataaagatgaagcgcagctgtataaagaagagcacctgaggaatcggcagcaccctcactgctacgttcagtacatgatcgccatcatcaacaactgccagaccttcaaggaatccatagtcagtttaaaaagaaagtatttaaagaatgaagtggaagagggtgtgtctccgagccagcccagcatggacgggattttagacgccatcgcgaaggagggctgcagcggtttgctggaggaggtcttcctggacctggagcaacatctgaatgaattgatgacgaagaagtggctattagggtcaaacgctgtagacattatctgtgtcaccgtggaagactatttcaacgattttgccaaaattaaaaagccgtataagaagaggatgacggccgaggcgcaccggcgcgtggtggtggagtacctgcgggcggtcatgcagaagcgcatttccttccggagcccggaggagcgcaaggagggtgccgagaagatggttagggaggcagagcagctgcgcttcctgttccggaagctggcgtccggtttcggggaagacgtggacggatactgcgacaccatcgtggctgtggccgaagtgatcaagctgacagacccttctctgctctacctggaggtctccactctggtcagcaagtatccagacatcagggatgaccacatcggtgcgctgctggctgtgcgtggggacgccagccgtgacatgaagcagaccatcatggagaccctggagcagggcccagcacaggccagccccagctacgtgcccctcttcaaggacattgtggtgcccagcctgaacgtggccaagctgctcaagtagcctccgccggcctgccctgctcgcccctccacagcctcggtccctgcctttagaaacgcgggacagctgattgctctccttggccacacgtgctccttttagctgcacggcctgtctttaggtgccagtgtgatgcaccgggtgtgcgtcgagtgagcgtcccgaggccacgtgcggaggcccctcactgtgctgtcaaaggcctgtgggtgcagggctctgccgcacagcctctcttgggtgcttgtttgttgcagtggttgaaagtgtgtggggcacagaggacgtgcacctccctgccctcctcctccctgggccttcaccgcaccccatctgcttaagtgctcggaaccccgtcacctaattaaagtttctcggcttcctcagagaaaaaaaaaaaaaaa

SEQ ID NO: 54808 - DNA, 3020 bp, Homo sapiens
  misc_feature (20)..(20): n is a, c, g, or t
  misc_feature (23)..(23): n is a, c, g, or t
gaggcggaggcagcgaaggnggnagggggcggcgggggcggcggcggagggggcggcgggggcggcggcggcggcggcggcggcggcgtagccgtagaggtgcacagagaacacccctagcatgaacagtgtgaggattccaccagctttttcaccatgaaggagacagaccgggaggccgttgcgacagcagtgcaaagggttgctgggatgctccagcgcccggaccagctggacaaggtggagcagtatcgcaggagagaagcgcggaagaaggcctccgtggaggccagattgaaggccgccatccagtcacagttggacggggtgcgcacaggcctcagccagctccacaacgccctgaatgacgtcaaagacatccagcagtcgctggcagacgtcagcaaggactggaggcagagcatcaacaccattgagagcctcaaggacgtcaaagacgccgtggtgcagcacagccagctcgccgcagccgtggagaacctcaagaacatcttctcagtgcctgagattgtgagggagacccaggacctaattgaacaaggggcactcctgcaagcccaccggaagctgatggacctggagtgctcccgggacgggctgatgtacgagcagtaccgcatggacagtgggaacacgcgtgacatgaccctcatccatggctactttggcagcacgcaggggctctctgatgagctggctaagcagctgtggatggtgctgcagaggtcactggtcactgtccgccgtgaccccaccttgctggtctcagttgtcaggatcattgaaagggaagagaaaattgacaggcgcatacttgaccggaaaaagcaaactggctttgttcctcctgggaggcccaagaattggaaggagaaaatgttcaccatcttggagaggactgtgaccaccagaattgagggcacacaggcagataccagagagtctgacaagatgtggcttgtccgccacctggaaattataaggaagtacgtcctggatgacctcattgtcgccaaaaacctgatggttcagtgctttcctccccactatgagatctttaagaacctcctgaacatgtaccaccaagccctgagcacgcggatgcaggacctcgcatcggaagacctggaagccaatgagatcgtgagcctcttgacgtgggtcttaaacacctacacaagtactgagatgatgaggaacgtggagctggccccggaagtggatgtcggcaccctggagccattgctttctccacacgtggtctctgagctgcttgacacgtacatgtccacgctcacttcaaacatcatcgcctggctgcggaaagcgctggagacagacaagaaagactgggtcaaagagacagagccagaagccgaccaggacgggtactaccagaccacactccctgccattgtcttccagatgtttgaacagaatcttcaagttgctgctcagataagtgaagatttgaaaacaaaggtactagttttatgtcttcagcagatgaattctttcctaagcagatataaagatgaagcgcagctgtataaagaagagcacctgaggaatcggcagcaccctcactgctacgttcagtacatgatcgccatcatcaacaactgccagaccttcaaggaatccatagtcagtttaaaaagaaagtatttaaagaatgaagtggaagagggtgtgtctccgagccagcccagcatggacgggattttagacgccatcgcgaaggagggctgcagcggtttgctggaggaggtcttcctggacctggaggtgggcctggctctttcctcctgccgttttctgggccgaagcacagtgcttcctcactgccctctgggacacaggctgtgaactgtaccgtgcggatgccgtctggggagccgggctgtgcacttgcattccgatcagatcgcttaaagcgcctccgttttcggtgacgctgcttcgtatgatgcagggtccttcttacgcacaattcagtagattcaccctcaacatctgaatgaattgatgacgaagaagtggctattagggtcaaacgctgtagacattatctgtgtcaccgtggaagactatttcaacgattttgccaaaattaaaaagccgtataagaagaggatgacggccgaggcgcaccggcgcgtggtggtggagtacctgcgggcggtcatgcagaagcgcatttccttccggagcccggaggagcgcaaggagggtgccgagaagatggttagggaggcagagcagctgcgcttcctgttccggaagctggcgtccggtttcggggaagacgtggacggatactgcgacaccatcgtggctgtggccgaagtgatcaagctgacagacccttctctgctctacctggaggtctccactctggtcagcaagtatccagacatcagggatgaccacatcggtgcgctgctggctgtgcgtggggacgccagccgtgacatgaagcagaccatcatggagaccctggagcagggcccagcacaggccagccccagctacgtgcccctcttcaaggacattgtggtgcccagcctgaacgtggccaagctgctcaagtagcctccgccggcctgccctgctcgcccctccacagcctcggtccctgcctttagaaacgcgggacagctgattgctctccttggccacacgtgctccttttagctgcacggcctgtctttaggtgccagtgtgatgcaccgggtgtgcgtcgagtgagcgtcccgaggccacgtgcggaggcccctcactgtgctgtcaaaggcctgtgggtgcagggctctgccgcacagcctctcttgggtgcttgtttgttgcagtggttgaaagtgtgtggggcacagaggacgtgcacctccctgccctcctcctccctgggccttcaccgcaccccatctgcttaagtgctcggaaccccgtcacctaattaaagtttctcggcttcctcagagaaaaaaaaaaaaaaa

SEQ ID NO: 54809 - DNA, 2583 bp, Homo sapiens
  misc_feature (20)..(20): n is a, c, g, or t
  misc_feature (23)..(23): n is a, c, g, or t
gaggcggaggcagcgaaggnggnagggggcggcgggggcggcggcggagggggcggcgggggcggcggcggcggcggcggcggcggcgtagccgtagaggtgcacagagaacacccctagcatgaacagtgtgaggattccaccagctttttcaccatgaaggagacagaccgggaggccgttgcgacagcagtgcaaagggttgctgggatgctccagcgcccggaccagctggacaaggtggagcagtatcgcaggagagaagcgcggaagaaggcctccgtggaggccagattgaaggccgccatccagtcacagttggacggggtgcgcacaggcctcagccagctccacaacgccctgaatgacgtcaaagacatccagcagtcgctggcagacgtcagcaaggactggaggcagagcatcaacaccattgagagcctcaaggacgtcaaagacgccgtggtgcagcacagccagctcgccgcagccgtggagaacctcaagaacatcttctcagtgcctgagattgtgagggagacccaggacctaattgaacaaggggcactcctgcaagcccaccggaagctgatggacctggagtgctcccgggacgggctgatgtacgagcagtaccgcatggacagtgggaacacgcgtgacatgaccctcatccatggctactttggcagcacgcaggggctctctgatgagctggctaagcagctgtggatggtgctgcagaggtcactggtcactgtccgccgtgaccccaccttgctggtctcagttgtcaggatcattgaaagggaagagaaaattgacaggcgcatacttgaccggaaaaagcaaactggctttgttcctcctgggaggcccaagaattggaaggagaaaatgttcaccatcttggagaggactgtgaccaccagaattgagggcacacaggcagataccagagagtctgacaagatgtggcttgtccgccacctggaaattataaggaagtacgtcctggatgacctcattgtcgccaaaaacctgatggttcagtgctttcctccccactatgagatctttaagaacctcctgaacatgtaccaccaagccctgagcacgcggatgcaggacctcgcatcggaagacctggaagccaatgagatcgtgagcctcttgacgtgggtcttaaacacctacacaaggtgaggacacatggtcccaggcggggctgggactggcacatggccaccccactggggaggagaccactacatcacctccctggcttccagcatcccgggtttggtttctcttcaccaatatcctatagcaatataaagatgaagcgcagctgtataaagaagagcacctgaggaatcggcagcaccctcactgctacgttcagtacatgatcgccatcatcaacaactgccagaccttcaaggaatccatagtcagtttaaaaagaaagtatttaaagaatgaagtggaagagggtgtgtctccgagccagcccagcatggacgggattttagacgccatcgcgaaggagggctgcagcggtttgctggaggaggtcttcctggacctggagcaacatctgaatgaattgatgacgaagaagtggctattagggtcaaacgctgtagacattatctgtgtcaccgtggaagactatttcaacgattttgccaaaattaaaaagccgtataagaagaggatgacggccgaggcgcaccggcgcgtggtggtggagtacctgcgggcggtcatgcagaagcgcatttccttccggagcccggaggagcgcaaggagggtgccgagaagatggttagggaggcagagcagctgcgcttcctgttccggaagctggcgtccggtttcggggaagacgtggacggatactgcgacaccatcgtggctgtggccgaagtgatcaagctgacagacccttctctgctctacctggaggtctccactctggtcagcaagtatccagacatcagggatgaccacatcggtgcgctgctggctgtgcgtggggacgccagccgtgacatgaagcagaccatcatggagaccctggagcagggcccagcacaggccagccccagctacgtgcccctcttcaaggacattgtggtgcccagcctgaacgtggccaagctgctcaagtagcctccgccggcctgccctgctcgcccctccacagcctcggtccctgcctttagaaacgcgggacagctgattgctctccttggccacacgtgctccttttagctgcacggcctgtctttaggtgccagtgtgatgcaccgggtgtgcgtcgagtgagcgtcccgaggccacgtgcggaggcccctcactgtgctgtcaaaggcctgtgggtgcagggctctgccgcacagcctctcttgggtgcttgtttgttgcagtggttgaaagtgtgtggggcacagaggacgtgcacctccctgccctcctcctccctgggccttcaccgcaccccatctgcttaagtgctcggaaccccgtcacctaattaaagtttctcggcttcctcagagaaaaaaaaaaaaaaa

SEQ ID NO: 54810 - DNA, 1386 bp, Homo sapiens
  misc_feature (33)..(33): n is a, c, g, or t
gtgaccctgaggttacgattgcattgtcttccngatgtttgaacagaatcttcaagttgctgctcagataagtgaagatttgaaaacaaaggtactagttttatgtcttcagcagatgaattctttcctaagcagatataaagatgaagcgcagctgtataaagaagagcacctgaggaatcggcagcaccctcactgctacgttcagtacatgatcgccatcatcaacaactgccagaccttcaaggaatccatagtcagtttaaaaagaaagtatttaaagaatgaagtggaagagggtgtgtctccgagccagcccagcatggacgggattttagacgccatcgcgaaggagggctgcagcggtttgctggaggaggtcttcctggacctggagcaacatctgaatgaattgatgacgaagaagtggctattagggtcaaacgctgtagacattatctgtgtcaccgtggaagactatttcaacgattttgccaaaattaaaaagccgtataagaagaggatgacggccgaggcgcaccggcgcgtggtggtggagtacctgcgggcggtcatgcagaagcgcatttccttccggagcccggaggagcgcaaggagggtgccgagaagatggttagggaggcagagcagctgcgcttcctgttccggaagctggcgtccggtttcggggaagacgtggacggatactgcgacaccatcgtggctgtggccgaagtgatcaagctgacagacccttctctgctctacctggaggtctccactctggtcagcaagtatccagacatcagggatgaccacatcggtgcgctgctggctgtgcgtggggacgccagccgtgacatgaagcagaccatcatggagaccctggagcagggcccagcacaggccagccccagctacgtgcccctcttcaaggacattgtggtgcccagcctgaacgtggccaagctgctcaagtagcctccgccggcctgccctgctcgcccctccacagcctcggtccctgcctttagaaacgcgggacagctgattgctctccttggccacacgtgctccttttagctgcacggcctgtctttaggtgccagtgtgatgcaccgggtgtgcgtcgagtgagcgtcccgaggccacgtgcggaggcccctcactgtgctgtcaaaggcctgtgggtgcagggctctgccgcacagcctctcttgggtgcttgtttgttgcagtggttgaaagtgtgtggggcacagaggacgtgcacctccctgccctcctcctccctgggccttcaccgcaccccatctgcttaagtgctcggaaccccgtcacctaattaaagtttctcggcttcctcagagaaaaaaaaaaaaaaa

SEQ ID NO: 54811 - DNA, 2727 bp, Homo sapiens
  misc_feature (20)..(20): n is a, c, g, or t
  misc_feature (23)..(23): n is a, c, g, or t
gaggcggaggcagcgaaggnggnagggggcggcgggggcggcggcggagggggcggcgggggcggcggcggcggcggcggcggcggcgtagccgtagaggtgcacagagaacacccctagcatgaacagtgtgaggattccaccagctttttcaccatgaaggagacagaccgggaggccgttgcgacagcagtgcaaagggttgctgggatgctccagcgcccggaccagctggacaaggtggagcagtatcgcaggagagaagcgcggaagaaggcctccgtggaggccagattgaaggccgccatccagtcacagttggacggggtgcgcacaggcctcagccagctccacaacgccctgaatgacgtcaaagacatccagcagtcgctggcagacgtcagcaaggactggaggcagagcatcaacaccattgagagcctcaaggacgtcaaagacgccgtggtgcagcacagccagctcgccgcagccgtggagaacctcaagaacatcttctcagtgcctgagattgtgagggagacccaggacctaattgaacaaggggcactcctgcaagcccaccggaagctgatggacctggagtgctcccgggacgggctgatgtacgagcagtaccgcatggacagtgggaacacgcgtgacatgaccctcatccatggctactttggcagcacgcaggggctctctgatgagctggctaagcagctgtggatggtgctgcagaggtcactggtcactgtccgccgtgaccccaccttgctggtctcagttgtcaggatcattgaaagggaagagaaaattgacaggcgcatacttgaccggaaaaagcaaactggctttgttcctcctgggaggcccaagaattggaaggagaaaatgttcaccatcttggagaggactgtgaccaccagaattgagggcacacaggcagataccagagagtctgacaagatgtggcttgtccgccacctggaaattataaggaagtacgtcctggatgacctcattgtcgccaaaaacctgatggttcagtgctttcctccccactatgagatctttaagaacctcctgaacatgtaccaccaagccctgagcacgcggatgcaggacctcgcatcggaagacctggaagccaatgagatcgtgagcctcttgacgtgggtcttaaacacctacacaagtactgagatgatgaggaacgtggagctggccccggaagtggatgtcggcaccctggagccattgctttctccacacgtggtctctgagctgcttgacacgtacatgtccacgctcacttcaaacatcatcgcctggctgcggaaagcgctggagacagacaagaaagactgggtcaaagagacagagccagaagccgaccaggacgggtactaccagaccacactccctgccattgtcttccagatgtttgaacagaatcttcaagttgctgctcagataagtgaagatttgaaaacaaaggtactagttttatgtcttcagcagatgaattctttcctaagcagatataaagatgaagcgcagctgtataaagaagagcacctgaggaatcggcagcaccctcactgctacgttcagtacatgatcgccatcatcaacaactgccagaccttcaaggaatccatagtcagtttaaaaagaaagtatttaaagaatgaagtggaagagggtgtgtctccgagccagcccagcatggacgggattttagacgccatcgcgaaggagggctgcagcggtttgctggaggaggtcttcctggacctggagcaacatctgaatgaattgatgacgaagaagtggctattagggtcaaacgctgtagacattatctgtgtcaccgtggaagactatttcaacgattttgccaaaattaaaaagccgtataagaagaggatgacggccgaggcgcaccggcgcgtggtggtggagtacctgcgggcggtcatgcagaagcgcatttccttccggagcccggaggagcgcaaggagggtgccgagaagatggttagggaggcagagcagctgcgcttcctgttccggaagctggcgtccggtttcggggaagacgtggacggatactgcgacaccatcgtggctgtggccgaagtgatcaagctgacagacccttctctgctctacctggaggtctccactctggtcagcaagtatccagacatcagggatgaccacatcggtgcgctgctggctgtgcgtggggacgccagccgtgacatgaagcagaccatcatggagaccctggagcagggcccagcacaggccagccccagctacgtgccctgctcgcccctccacagcctcggtccctgcctttagaaacgcgggacagctgattgctctccttggccacacgtgctccttttagctgcacggcctgtctttaggtgccagtgtgatgcaccgggtgtgcgtcgagtgagcgtcccgaggccacgtgcggaggcccctcactgtgctgtcaaaggcctgtgggtgcagggctctgccgcacagcctctcttgggtgcttgtttgttgcagtggttgaaagtgtgtggggcacagaggacgtgcacctccctgccctcctcctccctgggccttcaccgcaccccatctgcttaagtgctcggaaccccgtcacctaattaaagtttctcggcttcctcagagaaaaaaaaaaaaaaa

SEQ ID NO: 54812 - DNA, 1581 bp, Homo sapiens
caaggtctgattaggttaccccgacgggtagctcactgcagcgcagccagcagcctttaactcctgggctcaggtggtctccctgcctcagcctcctaatgagccatattttaaagcctgaggtgaagttattttttgatccatttaaagtaatcaacctctctgtccttccattagtctggatcgtctaaagattgttttatttttagaggctcatccggtcagatgttagtgatgtgaaatttcaggccaggcgtgacgtcagcgtggcatttgaaacagctccatgttgcccttagtgctgtctgaccgaagcctgtctgtcctcagatataaagatgaagcgcagctgtataaagaagagcacctgaggaatcggcagcaccctcactgctacgttcagtacatgatcgccatcatcaacaactgccagaccttcaaggaatccatagtcagtttaaaaagaaagtatttaaagaatgaagtggaagagggtgtgtctccgagccagcccagcatggacgggattttagacgccatcgcgaaggagggctgcagcggtttgctggaggaggtcttcctggacctggagcaacatctgaatgaattgatgacgaagaagtggctattagggtcaaacgctgtagacattatctgtgtcaccgtggaagactatttcaacgattttgccaaaattaaaaagccgtataagaagaggatgacggccgaggcgcaccggcgcgtggtggtggagtacctgcgggcggtcatgcagaagcgcatttccttccggagcccggaggagcgcaaggagggtgccgagaagatggttagggaggcagagcagctgcgcttcctgttccggaagctggcgtccggtttcggggaagacgtggacggatactgcgacaccatcgtggctgtggccgaagtgatcaagctgacagacccttctctgctctacctggaggtctccactctggtcagcaagtatccagacatcagggatgaccacatcggtgcgctgctggctgtgcgtggggacgccagccgtgacatgaagcagaccatcatggagaccctggagcagggcccagcacaggccagccccagctacgtgcccctcttcaaggacattgtggtgcccagcctgaacgtggccaagctgctcaagtagcctccgccggcctgccctgctcgcccctccacagcctcggtccctgcctttagaaacgcgggacagctgattgctctccttggccacacgtgctccttttagctgcacggcctgtctttaggtgccagtgtgatgcaccgggtgtgcgtcgagtgagcgtcccgaggccacgtgcggaggcccctcactgtgctgtcaaaggcctgtgggtgcagggctctgccgcacagcctctcttgggtgcttgtttgttgcagtggttgaaagtgtgtggggcacagaggacgtgcacctccctgccctcctcctccctgggccttcaccgcaccccatctgcttaagtgctcggaaccccgtcacctaattaaagtttctcggcttcctcagagaaaaaaaaaaaaaaa

SEQ ID NO: 54813 - DNA, 2143 bp, Homo sapiens
  misc_feature (20)..(20): n is a, c, g, or t
  misc_feature (23)..(23): n is a, c, g, or t
gaggcggaggcagcgaaggnggnagggggcggcgggggcggcggcggagggggcggcgggggcggcggcggcggcggcggcggcggcgtagccgtagaggtgcacagagaacacccctagcatgaacagtgtgaggattccaccagctttttcaccatgaaggagacagaccgggaggccgttgcgacagcagtgcaaagggttgctgggatgctccagcgcccggaccagctggacaaggtggagcagtatcgcaggagagaagcgcggaagaaggcctccgtggaggccagattgaaggccgccatccagtcacagttggacggggtgcgcacaggcctcagccagctccacaacgccctgaatgacgtcaaagacatccagcagtcgctggcagacgtcagcaaggactggaggcagagcatcaacaccattgagagcctcaaggacgtcaaagacgccgtggtgcagcacagccagctcgccgcagccgtggagaacctcaagaacatcttctcagtgcctgagattgtgagggagacccaggacctaattgaacaaggggcactcctgcaagcccaccggaagctgatggacctggagtgctcccgggacgggctgatgtacgagcagtaccgcatggacagtgggaacacgcgtgacatgaccctcatccatggctactttggcagcacgcaggggctctctgatgagctggctaagcagctgtggatggtgctgcagaggtcactggtcactgtccgccgtgaccccaccttgctggtctcagttgtcaggatcattgaaagggaagagaaaattgacaggcgcatacttgaccggaaaaagcaaactggctttgttcctcctgggaggcccaagaattggaaggagaaaatgttcaccatcttggagaggactgtgaccaccagaattgagggcacacaggcagataccagagagtctgacaagatgtggcttgtccgccacctggaaattataaggaagtacgtcctggatgacctcattgtcgccaaaaacctgatggttcagtgctttcctccccactatgagatctttaagaacctcctgaacatgtaccaccaagccctgagcacgcggatgcaggacctcgcatcggaagacctggaagccaatgagatcgtgagcctcttgacgtgggtcttaaacacctacacaagtactgagatgatgaggaacgtggagctggccccggaagtggatgtcggcaccctggagccattgctttctccacacgtggtctctgagctgcttgacacgtacatgtccacgctcacttcaaacatcatcgcctggctgcggaaagcgctggagacagacaagaaagactgggtcaaagagacagagccagaagccgaccaggacgggtactaccagaccacactccctgccattgtcttccagatgtttgaacagaatcttcaagttgctgctcagataagtgaagatttgaaaacaaaggtactagttttatgtcttcagcagatgaattctttcctaagcagatataaagatgaagcgcagctgtataaagaagagcacctgaggaatcggcagcaccctcactgctacgttcagtacatgatcgccatcatcaacaactgccagaccttcaaggaatccatagtcagtttaaaaagaaagtatttaaagaatgaagtggaagagggtgtgtctccgagccagcccagcatggacgggattttagacgccatcgcgaaggagggctgcagcggtttgctggaggaggtcttcctggacctggagcaacatctgaatgaattgatgacgaagaagtggctattagggtcaaacgctgtagacattatctgtgtcaccgtggaagactatttcaacgattttgccaaaattaaaaagccgtataagaagaggatgacggccgaggcgcaccggcgcgtggtggtggagtacctgcgggcggtcatgcagaagcgcatttccttccggagcccggaggagcgcaaggagggtgccgagaagatggttagggaggcagagcagctgcgcttcctgttccggaagctggcgtccggtttcggggaagacaatgcaatcgtatcctctaggtacctcacatccg

SEQ ID NO: 54814 - DNA, 1170 bp, Homo sapiens
  misc_feature (392)..(392): n is a, c, g, or t
tttcagaagaaacgttttattatttttttgtcgaagaaaaaaagccatataaatattagagtataaaacttgcgtgagacacaggaagagggtggggtgggagctacgtgactatgcgaagagaagcgcttataggagaagtcagtacgggggagggggtcgccttagcgcgtggacacagcacaaaacacaacacgggccgccgcgggcagatcaaggacagacggctgcgcggagcccgccggccgctggcccacccgccatcacgtaaaagcacaccgcactacactactggctattctacaccagccgaaagagggagggggcgctacactactgtaagggcaggtctggggttctctggcagccccgctggatggccggggacccangggcagaagggggtgccgagaagatggttagggaggcagagcagctgcgcttcctgttccggaagctggcgtccggtttcggggaagacgtggacggatactgcgacaccatcgtggctgtggccgaagtgatcaagctgacagacccttctctgctctacctggaggtctccactctggtcagcaagtatccagacatcagggatgaccacatcggtgcgctgctggctgtgcgtggggacgccagccgtgacatgaagcagaccatcatggagaccctggagcagggcccagcacaggccagccccagctacgtgcccctcttcaaggacattgtggtgcccagcctgaacgtggccaagctgctcaagtagcctccgccggcctgccctgctcgcccctccacagcctcggtccctgcctttagaaacgcgggacagctgattgctctccttggccacacgtgctccttttagctgcacggcctgtctttaggtgccagtgtgatgcaccgggtgtgcgtcgagtgagcgtcccgaggccacgtgcggaggcccctcactgtgctgtcaaaggcctgtgggtgcagggctctgccgcacagcctctcttgggtgcttgtttgttgcagtggttgaaagtgtgtggggcacagaggacgtgcacctccctgccctcctcctccctgggccttcaccgcaccccatctgcttaagtgctcggaaccccgtcacctaattaaagtttctcggcttcctcagagaaaaaaaaaaaaaaa

SEQ ID NO: 54815 - DNA, 1877 bp, Homo sapiens
  misc_feature (20)..(20): n is a, c, g, or t
  misc_feature (23)..(23): n is a, c, g, or t
gaggcggaggcagcgaaggnggnagggggcggcgggggcggcggcggagggggcggcgggggcggcggcggcggcggcggcggcggcgtagccgtagaggtgcacagagaacacccctagcatgaacagtgtgaggattccaccagctttttcaccatgaaggagacagaccgggaggccgttgcgacagcagtgcaaagggttgctgggatgctccagcgcccggaccagctggacaaggtggagcagtatcgcaggagagaagcgcggaagaaggcctccgtggaggccagattgaaggccgccatccagtcacagttggacggggtgcgcacaggcctcagccagctccacaacgccctgaatgacgtcaaagacatccagcagtcgctggcagacgtcagcaaggactggaggcagagcatcaacaccattgagagcctcaaggacgtcaaagacgccgtggtgcagcacagccagctcgccgcagccgtggagaacctcaagaacatcttctcagtgcctgagattgtgagggagacccaggacctaattgaacaaggggcactcctgcaagcccaccggaagctgatggacctggagtgctcccgggacgggctgatgtacgagcagtaccgcatggacagtgggaacacgcgtgacatgaccctcatccatggctactttggcagcacgcaggggctctctgatgagctggctaagcagctgtggatggtgctgcagaggtcactggtcactgtccgccgtgaccccaccttgctggtctcagttgtcaggatcattgaaagggaagagaaaattgacaggcgcatacttgaccggaaaaagcaaactggctttgttcctcctgggaggcccaagaattggaaggagaaaatgttcaccatcttggagaggactgtgaccaccagaattgagggcacacaggcagataccagagagtctgacaagatgtggcttgtccgccacctggaaattataaggaagtacgtcctggatgacctcattgtcgccaaaaacctgatggttcagtgctttcctccccactatgagatctttaagaacctcctgaacatgtaccaccaagccctgagcacgcggatgcaggacctcgcatcggaagacctggaagccaatgagatcgtgagcctcttgacgtgggtcttaaacacctacacaagtactgagatgatgaggaacgtggagctggccccggaagtggatgtcggcaccctggagccattgctttctccacacgtggtctctgagctgcttgacacgtacatgtccacgctcacttcaaacatcatcgcctggctgcggaaagcgctggagacagacaagaaagactgggtcaaagagacagagccagaagccgaccaggacgggtactaccagaccacactccctgccattgtcttccagatgtttgaacagaatcttcaagttgctgctcagataagtgaagatttgaaaacaaaggtactagttttatgtcttcagcagatgaattctttcctaagcagatataaagatgaagcgcagctgtataaagaagagcacctgaggaatcggcagcaccctcactgctacgttcagtacatgatcgccatcatcaacaactgccagaccttcaaggaatccatagtcagtttaaaaagaaagtatttaaagaatgaagtggaagagggtgtgtctccgagccagcccagcatggacgggattttagacgccatcgcgaaggagggctgcagcggtttgctggaggaggtcttcctggacctggagcaacatctgaatgaattgatgctggacgacggggatccttgaacgtaatgaccctgatacgatctgcc

SEQ ID NO: 54816 - DNA, 1776 bp, Homo sapiens
  misc_feature (20)..(20): n is a, c, g, or t
  misc_feature (23)..(23): n is a, c, g, or t
gaggcggaggcagcgaaggnggnagggggcggcgggggcggcggcggagggggcggcgggggcggcggcggcggcggcggcggcggcgtagccgtagaggtgcacagagaacacccctagcatgaacagtgtgaggattccaccagctttttcaccatgaaggagacagaccgggaggccgttgcgacagcagtgcaaagggttgctgggatgctccagcgcccggaccagctggacaaggtggagcagtatcgcaggagagaagcgcggaagaaggcctccgtggaggccagattgaaggccgccatccagtcacagttggacggggtgcgcacaggcctcagccagctccacaacgccctgaatgacgtcaaagacatccagcagtcgctggcagacgtcagcaaggactggaggcagagcatcaacaccattgagagcctcaaggacgtcaaagacgccgtggtgcagcacagccagctcgccgcagccgtggagaacctcaagaacatcttctcagtgcctgagattgtgagggagacccaggacctaattgaacaaggggcactcctgcaagcccaccggaagctgatggacctggagtgctcccgggacgggctgatgtacgagcagtaccgcatggacagtgggaacacgcgtgacatgaccctcatccatggctactttggcagcacgcaggggctctctgatgagctggctaagcagctgtggatggtgctgcagaggtcactggtcactgtccgccgtgaccccaccttgctggtctcagttgtcaggatcattgaaagggaagagaaaattgacaggcgcatacttgaccggaaaaagcaaactggctttgttcctcctgggaggcccaagaattggaaggagaaaatgttcaccatcttggagaggactgtgaccaccagaattgagggcacacaggcagataccagagagtctgacaagatgtggcttgtccgccacctggaaattataaggaagtacgtcctggatgacctcattgtcgccaaaaacctgatggttcagtgctttcctccccactatgagatctttaagaacctcctgaacatgtaccaccaagccctgagcacgcggatgcaggacctcgcatcggaagacctggaagccaatgagatcgtgagcctcttgacgtgggtcttaaacacctacacaagtactgagatgatgaggaacgtggagctggccccggaagtggatgtcggcaccctggagccattgctttctccacacgtggtctctgagctgcttgacacgtacatgtccacgctcacttcaaacatcatcgcctggctgcggaaagcgctggagacagacaagaaagactgggtcaaagagacagagccagaagccgaccaggacgggtactaccagaccacactccctgccattgtcttccagatataaagatgaagcgcagctgtataaagaagagcacctgaggaatcggcagcaccctcactgctacgttcagtacatgatcgccatcatcaacaactgccagaccttcaaggaatccatagtcagtttaaaaagaaagtatttaaagaatgaagtggaagagggtgtgtctccgagccagcccagcatggacgggattttagacgccatcgcgaaggagggctgcagcggtttgctggaggaggtcttcctggacctggagcaacatctgaatgaattgatgctggacgacggggatccttgaacgtaatgaccctgatacgatctgcc

SEQ ID NO: 54817 - DNA, 206 bp, Homo sapiens
atcctgaggagtcaggtgaagagggaggttcccagtcaggaaggggctcagccagaatccagctgctcccagcgccgcgggacagccgagggcggctcctcacattgctgctgccttccagggtttcggggaagacgtggacggatactgcgacaccatcgtggctgtggccgaagtgatcaagctgacagacccttctctgctct

SEQ ID NO: 54818 - DNA, 299 bp, Homo sapiens
aggtgtgttgttaccccattttacaggtgaggacacatggtcccaggcggggctgggactggcacatggccaccccactggggaggagaccactacatcacctccctggcttccagcatcccgggtttggtttctcttcaccaatatcctatagcagtgagtctttcaaaaataaacagttacaagtctagatagttcgaggaaactccatcatcctttttgtatcctagtacgaggctttgtcacttcacttaagggaccatgaaccactctgtgcgtggattaatttgaagtagtgt

SEQ ID NO: 54819 - DNA, 229 bp, Homo sapiens
cacttgcattccgatcagatcgcttaaagcgcctccgttttcggtgacgctgcttcgtatgatgcagggtccttcttacgcacaattcagtagattcaccctgtaagtattaaagacatcagacaatttagtggattacaaaatagaaaccgatatgtagggacctgtcaaaaagtcaaattgagagtgcacacacacacacatcctcacatagatcagtttcgctttt

SEQ ID NO: 54820 - DNA, 330 bp, Homo sapiens
gacaagcagtaaacaaatcggatggcgagaggtgctatggaagaaagataagggcaaggatagggctggagtgttctaggcagcattataacctcccaaagggtcactgagaaaggctgtactgaggtgacagagggatacagactttaaagtgacgagaggctggcgtggtggctcacacctaaaatctcagcactttgggaggccgaggaggcaggactgcttgagaccaggagcttgagaacagtcagggtgacatagcaagatcctgtctctacaaaaaaatttaaaatgaaaaaattagcctggcttggtggcagaggtgggagg

SEQ ID NO: 54821 - DNA, 336 bp, Homo sapiens
ttggacactatctagttcccattgctggagtcagggtacagatggctaggaggtcaatcatgaaggacttggccaagggaggttccaatgctggtcctcagttaaagggaatgtttttctagtgagatgaaaacaaagcaagatctgactgttgatatggaccacagtccaagacagaggatagcagttggtattagaggaaatgctccttgtattagatctgatgagttactgcaatcaataagcacaattttagaaaagggatttgatccagcactttgggagacgaaggcaagtggattgcttgaggccaggaatttaagaccaggctaggca

SEQ ID NO: 54822 - DNA, 851 bp, Homo sapiens
gtaatcagtgtaaatgtatgggtgttttaagaaatatggaccagaaaagaaacataagcagtatttattttgtgaagtaattcattgatccaaaccaaactttttagttttagaacattaaaatatgtatatgtaagttgttgcttatacacttgtctgtgtccactagaggtaaataagaacaaagttatgtctgttaagttagctttgctccttcccttgatgactctcttcccttttctttgtttattctctttctctccttgggaagggaaaatagtttgactaccagtctactatagtcctggttctggtattaccatctatactgcttagggttctccagagatgcagaaccaacaaggtgtttatacatagatggagagtgatttatttaaggaattggcacatgcagttgtggaggcttggtaaatccaaaatctgcagagcaggctacaggctggagacccaggaaaaagttttagctctagtccaaagacagtctgctggcagaattccttcttgctcaggggaggtcagtcttgttctatgaaggcattcaactgattcgatgaggcatatccatgttaaggatagtccttatgtgttttactcaaagtccactgatttaaatgttaatctcatccaacaaaacattcacggaaacattcagaataatgtttgaccaaacatctgggcactatggtccagccaaatttacacatcaaattattcatccttggctgggcatggtgtcacgcctgtaatcccagcactttgggaggcgggcagatcatgaggtcaggagattgagaccatcctggctaacatggtgaaaccctatctctact

SEQ ID NO: 54823 - DNA, 706 bp, Homo sapiens
atggagagaaattgatagtggcgatagacagcaaagtctccaggagccagacttcctcggggtgagtcacagatctgtcactttccagctgtgtgaccttggaaaacttacttaacctctctgtgccaccgtttcttcatctgatcacgggatcataatactggctgcctcatacagttgttctgaggattcaatgaaatgtattaggtacttggagcagtgtcttccatggattaagagccacagaagggtttgacaaataagtttaaaaactaatctagtaagtttccggggggaaatgtcttgaaatttattagagacaacctttattcagtcttcctcttgttcaaaatagacttagaaaattagtcgggtgtggtggtgcacacctgtagccccagctacttgggaggctgaggcgggaggatcacttgatttcctttttgacttcttgatgcttttattaatgatgatgccaaaagatttctggagaatcagccaggcgcagtggctcacgtctgtaatcccagtactttgggaggctgaggcgggcagatcacctgagttcaggagttcagatcagcctggccaacatggcgaaaccccatctgtactaaaaatacaaaaattagctgggcatgatggcacacaccgagactgtggcactgcactccagcctgggtaacagagggagactccgtctcaa

SEQ ID NO: 54824 - DNA, 307 bp, Homo sapiens
acaaatgttagctttctctggcctagaaaaagaataggatcatcaagtcataaaacgaagtatgtgatttcagcacctccacaaaatggcttcatcaaagaagagaatcccatcacatgttacctctcctctctaggttcttcagctggggctttgccctcccctctacctatggcagaacccactgactcgtggtctttccagcacttccacttgcctccattagacacttaaccccgctgcccgctgcctcatgccagggagggccaatctccagacagtgctcctgctggctgtatgatgactg

SEQ ID NO: 54825 - DNA, 1180 bp, Homo sapiens
gttatcaaatatatcttttatagttgagtttggtgtcacacttaggccttcttcaatccatttgctttaagagtttaggtttttggtagttttatcttttcctatttaaatcttctagtggagggcagaaaactgggttttccatttggttaccagttgttgtcccaattccacttacaaaataatgtctttccttgccaatttcaaatatcatttttatcctatatgaattttttaaagtattagggtattctgacatcttactatgttacattgaccttactagacacaagaaccatagcttctttacatattatttctaaaaattttgttattacaaatgggggtctttgttcttccaacagacttggtcactaagtgttactgatttctgtttattaatgctgtaccaaatcaccttgctgaaattgctttagatagttctcttgaggttttagttgtatataaccaactacttagaaaaacaaaacctcttaaatacacccaaggagatccagtatagtattgaagtgtacaatttcagtatgttcacacaatggaacataatacatagcagtcaaaatgaactatacttaacatgtgtcaacaggggtagatcagaatattaaatgaaaaaaagcaaagggcctttgtctcctggcacccggatactgagctcagtttccgtcttcactgttccatctcctccatccactactccaggatctcataggtgactctaccacagcccctgttgtcctgtgagctgcaggcactgggaaatccacagggaggatgccagaacatctggagcctgcgaaatggtattttcttatttaaaacaggatcatcatggtagacgggaggcatggtgggaggggggcgagggataaaagattacaaatagggtgcagtgtacactgcttgggtgatgggtccaccaaaatcccacaaatcaccactaaagaacttaatcatgtaaccaaacaccacctgttccccaataagctatggaaaaataaaaataaaaaaagcaaagttacagaattgtccaaatacataccatctatgtttcacaaacactaaatacatttcattatccccctaacgaagggactaagtttcttagttcctaatgtcataaaggtttacagattgataacaaatatgtagcaaaagt

SEQ ID NO: 54826 - DNA, 482 bp, Homo sapiens
aaatattcacaaaaacatggataaaataatcacaatggtgattacttcttaaggctgggagggagaagaaaaaaacaccgaagcaaatatagcaaaagtaaaatatttgttaagtcggggtgggtgcacagctgttcattacaaaagtctaggtgctattgtgaatgtctgaaacatttaagaggcttgtagagaaatattttttcttttaatattttactgcactgaagagaaatacttttgactgaattatcttctggcattctgtaatttttaatctcaaaagaatcaatgtgggcctgacaaaaagggagatttcactgattttggcaagttcctaaaatgttttgtcttctttgcacatcttagtagcaggagttacccccatttgtctgcttcctgctactagaatgtaagctctgagtgtaagctctgagtgaaagcatttttccattatattcagttacactcctacagtctta

SEQ ID NO: 54827 - DNA, 357 bp, Homo sapiens
tccaaatacataccatctatgtttcacaaacactaaatacatttcattatccccctaacgaagggactaagtttcttagttcctaatgtcataaaggtttacagattgataacaaatatgtagcaaaagtacaaaaacatgggtaaaatattcacaaaaacatggataaaataatcacaatggtgattacttcttaaggctgggagggagggaggattacaaacgacaaagtacacaaagagagcttcaatttcggtgtattttaagaaaaaaacaccgaagcaaatatagcaaaagtaaaatatttgttaagtcggggtgggtgcacagctgttcattacaaaagtctaggtgcta

SEQ ID NO: 54828 - DNA, 208 bp, Homo sapiens
attttttgagacagggtctggctctatcacccaggctgcagtgcagtggtgggatatcaactcactgtaaactccacctccctactcattctgcttgatttaaaaaaaaaatttaatccttttgttaaatttatctgataaaattctgaatttcttctctgtgttatcttgaatttctttgagttgcctcaaaacagctattttgaat

SEQ ID NO: 54829 - DNA, 983 bp, Homo sapiens
attactatgcagacgcagccgagggcgcgctcgcgctcccgggagggcgggagcgagcggcgtgtcccgttgggtctctccgctcccggggaaatggacaggccggttggggtgggggtcggctggcaaacagtggtcgggagcattgggcgggcgcgcgcacgagggcaagcacgcgcgggagggagggacggttcctgggcaacggcccctccttggcgcgggatccgcgcagagtctgcctgggtcgcacgcgtctccgcccctcgcggtgcctcctccttcctgtcacctcggttccgccctgggtggggagaagccctgctgcaccactcgggcttcccagagcggggctggcccgcgggggaaactgaggcccgggaccccgaccggcgcctgcactgcgctggtaggagtgctgtcaccgacgtcgtagagccgccgagggtgtttctgtagggtaaacatgaagcctcggctatattccaggcattttcacttggaaacattttacataaagtatttgaaggtctagataaagaataacagagtgatccatactacatgatgaggagctgtccaaacaccatgcagatgctcctaggattcttaaactagccaaaaataattccaggcattgtcagatataggataagtacatgaagacagcattagtcgcagtagcgaagacacggaaacaacctaagtgttcaccaacagatgaatggatgaagcaaatgtagcatatatacacagtggaatactattcagcctttaaaaagaaggaaatctggctaactgcaacaacatggatgaacctggaggatattatataagtgaaataagccaggcatggaaagtttttgtagagatgaagtcttgctgtgttgcccaggctggtctccaactcctgtactcaagctagcttcctgctttggcctcccaaactgctggaattaaggtgtgcactagccacattttaa

SEQ ID NO: 54830 - DNA, 1108 bp, Homo sapiens
attactatgcagacgcagccgagggcgcgctcgcgctcccgggagggcgggagcgagcggcgtgtcccgttgggtctctccgctcccggggaaatggacaggccggttggggtgggggtcggctggcaaacagtggtcgggagcattgggcgggcgcgcgcacgagggcaagcacgcgcgggagggagggacggttcctgggcaacggcccctccttggcgcgggatccgcgcagagtctgcctgggtcgcacgcgtctccgcccctcgcggtgcctcctccttcctgtcacctcggttccgccctgggtggggagaagccctgctgcaccactcgggcttcccagagcggggctggcccgcgggggaaactgaggcccgggaccccgaccggcgcctgcactgtgcgacccgcgtagaaataggcgcccgaggggcccccagcgcaacgcgggagcccggcccagcccgggggtcctgtggtgaactagcgtctgggctctgccggcttgaagtccgctgagcgcctcgccgcgcacctctagaccccgagtccccgatctagggcctccttgtagccctaggtagcgccctctaagcttgtttctgtttttaggcgctggtaggagtgctgtcaccgacgtcgtagagccgccgagggtgtttctgtagggtaaacatgaagcctcggctatattccaggcattttcacttgggtattgtgcaggaaaaaaaactacttctgcaactaaggaatgtaaagtcttaacaacggatgatttttttccaagtacagttgtatttgattggaatcatttgcagatccaacaacaaatcttgaaatagggggaaaatacaggagctgtccaaacaccatgcagatgctcctaggattcttaaactagccaaaaataattccaggcattgtcagatataggataagtacatgaagacaggtaagtcatcccaagactataacgctggggaatagataaccctggagtacaagggggaaaacttctgtctcaggagactagagttgggactccaggaacacaggggttcattacaggagcttgaacaaagagaggagtcaagaccccatctca

SEQ ID NO: 54831 - DNA, 1152 bp, Homo sapiens
attactatgcagacgcagccgagggcgcgctcgcgctcccgggagggcgggagcgagcggcgtgtcccgttgggtctctccgctcccggggaaatggacaggccggttggggtgggggtcggctggcaaacagtggtcgggagcattgggcgggcgcgcgcacgagggcaagcacgcgcgggagggagggacggttcctgggcaacggcccctccttggcgcgggatccgcgcagagtctgcctgggtcgcacgcgtctccgcccctcgcggtgcctcctccttcctgtcacctcggttccgccctgggtggggagaagccctgctgcaccactcgggcttcccagagcggggctggcccgcgggggaaactgaggcccgggaccccgaccggcgcctgcactgtgcgacccgcgtagaaataggcgcccgaggggcccccagcgcaacgcgggagcccggcccagcccgggggtcctgtggtgaactagcgtctgggctctgccggcttgaagtccgctgagcgcctcgccgcgcacctctagaccccgagtccccgatctagggcctccttgtagccctaggtagcgccctctaagcttgtttctgtttttaggcgctggtaggagtgctgtcaccgacgtcgtagagccgccgagggtgtttctgtaggaaacattttacataaagtatttgaaggtctagataaagaataacagagtgatccatactacatgatgaggagctgtccaaacaccatgcagatgctcctaggattcttaaactagccaaaaataattccaggcattgtcagatataggataagtacatgaagacagcattagtcgcagtagcgaagacacggaaacaacctaagtgttcaccaacagatgaatggatgaagcaaatgtagcatatatacacagtggaatactattcagcctttaaaaagaaggaaatctggctaactgcaacaacatggatgaacctggaggatattatataagtgaaataagccaggcatggaaagtttttgtagagatgaagtcttgctgtgttgcccaggctggtctccaactcctgtactcaagctagcttcctgctttggcctcccaaactgctggaattaaggtgtgcactagccacattttaa

SEQ ID NO: 54832 - DNA, 634 bp, Homo sapiens
agcctggccctagggtggcggaggccacaacggagcccccagccggttggaaagaggcttcctatgctctcctttccatgccactgcggaagtgctagggaacaggaagaccagggcattgccaagtgaataataacaaccatgtgtgcggcgttcacgataccccaggctcagtgagccttttactcagggtctcatgtgatgctgaaaacaatcccatgaagtttagaagcctgtgcacacgaagagacgtggtgtttccctattgatccaaactgcatgctgacctgttcctgccagggctgcgctcctcctgctttgccctggctctcccgttctgcactccctcttctaccgggaattcctggaagcaccttttattcacagtgcctgctttgaatagatacaaatacaatttgtatcttatgtagtccattccacacaattgaaaatataatgtaataaaaatcagaaaagtaaatccaggaaagtctctaacacatattagggcctcaataaatggaccctaagagggtggggaaatggctttggtttttaactgtgcttcttttgagcttgatgctgttaacttagtacaatctatcaataaatatcgtcatcaagaaaatattaa

SEQ ID NO: 54833 - DNA, 356 bp, Homo sapiens
ggtaaatatatgtttaactttataagacactgtcaaatcctttctcagagtggctgtcctgttcagcattttcaacagcaatgtatgggagtccagttgctctgcatcttcaccagtgcttagtattgtcagtttgtttgtttgtttgtttgttttttagagacaaagtctcactctgttactcaggctgtagtgcagtggcatgatcacagctcactacagccttgacctccctggctcaagcaatcctcctacctcacctgggactgaggtgcacgccacccccaccccagtggttttttaaaattccttgtagagatggggtctcactgtgttgcttagactggtgtcagact

SEQ ID NO: 54834 - DNA, 303 bp, Homo sapiens
ataataatgacatgtatacatggtttctggtatcagctttctgttctactcctttccatcctagtttatcccttaaaagaatatattaactttgtatccattaaattattaatctattttatatcctggcactgtaagaaaatgacattttctgacctcttttttcctttggctttcaatctcaattttacatttcccaattttcatttttgaagttacatttgtgcatttgaagactgatactatttaccttttgttctctaaacaaaatgaggatgtctgccattatttattgattaagtg

SEQ ID NO: 54835 - DNA, 366 bp, Homo sapiens
gaaggaataaaagaaaaatccaaaatgaagagtattatacaagacaactagtcaatagtcttcaaagtgtcaaggtcatgaaaaattgaggaagcatcccagactgaaggggactaaagaaaagtgacaactaaatgtaatgggtgattctggattagatcctggaattgaaaaagaacattcatggaacaactgacaaatttgaataaggtctgtagatcagtaacagtattgcatcagtgttaatctcctggtttagatcatgtcctaatggaaatgtttgtactatttttgtgactcttaagaatgtgggtggaggacacggatgagacctacttgcatcgacaacaaggcgttctacggaca

SEQ ID NO: 54836 - DNA, 1599 bp, Homo sapiens
actcttgaggatccctgttctgcgcaaagactcgtgagctcaaatttcatcactcaccagaggacccacacaggggtgaagccttacaggtgtaatgactgtggggagagttttagccagagctcggatttgattaagcaccaacgaacccacacgggagaacggcccttcaaatgcccggagtgcgggaagggcttcagagatagttctcattttgtagctcacatgagcactcattcaggagagaggcctttcagttgtcctgactgccacaaaagcttcagtcagagctcacatttggtcacgcaccaaagaacacacacaggtgagagaccttttaagtgcgaaaactgtgggaaaggattcgccgacagctccgccctcattaagcaccaacgaatccacaccggagaaagaccctacaaatgtggagagtgtgggaagagcttcaatcagagctcccactttattacccatcagcgaatccacttaggagacaggccctatcgatgtcctgagtgtggcaagaccttcaatcagcgttcccatttcctcacacaccagagaacgcatacaggagaaaaacctttccactgtagtaaatgtaacaagagcttccgtcagaaagcgcatcttttatgccatcaaaacacccatttgatttaggaagtagtctttggtgttcagctgctcccttgcacattttcattgctactgtcttcaagcaccccaaatagagaaaacctgggcgtcagtggctcaatttgggccctgatctattctccctctttcttgtctatgttataacagagaggataaacttaaagggtccaaataacggtccgaatacaaaaggcattccttcagtgtgtgactgactcttagggaaatgtgagtttaatagttgatgcccgccaggcgtggtggctcacccctgtaatcccagcacttttgggaggccaaggtgggtggatcacttgaggtcaggagttgagaccagcctggtgagcatggtgaaacctcatctctactaaaaatgcaaaaattagctgggcatggtggcacgtgcctgtagtcccagctactcgggaggccgaggcagaagaatcatttgaactcagaaggtgcaggttgcagtgagttgagatcatgccactgcactccagcctggcaacagagagagactctgtctccaaaaaaattaaaaagttgatgcctagttactaaatgagaagtgagaaaaatgtggcctagagatcacatgttcaccacctagtacagtgcctggcacaacatagatgctcaataactaaatggtcccatcattattaatgattaatagttgaggtcttatataaaggctttaatgcagtacctggcccttaaaagacactcagtacaagattggtggcttttatcagtcttattactcaattagaaatttattagtgtagtccccccgccccaaactcagaacgtgaaagaaattagattggaactagaaggtttggggttggaatacacaaattgaataaaatggaaatgcactgccagttcagtgctgtgcaggcattagtcaccagaggtctcactgccatg

SEQ ID NO: 54837 - DNA, 981 bp, Homo sapiens
  misc_feature (949)..(949): n is a, c, g, or t
  misc_feature (956)..(956): n is a, c, g, or t
  misc_feature (980)..(980): n is a, c, g, or t
actcttgaggatccctgttctgcgcaaagactcgtgagctcaaatttcatcactcaccagaggacccacacaggggtgaagccttacaggtgtaatgactgtggggagagttttagccagagctcggatttgattaagcaccaacgaacccacacgggagaacggcccttcaaatgcccggagtgcgggaagggcttcagagatagttctcattttgtagctcacatgagcactcattcaggagagaggcctttcagttgtcctgactgccacaaaagcttcagtcagagctcacatttggtcacgcaccaaagaacacacacaggtgagagaccttttaagtgcgaaaactgtgggaaaggattcgccgacagctccgccctcattaagcaccaacgaatccacaccggagaaagaccctacaaatgtggagagtgtgggaagagcttcaatcagagctcccactttattacccatcagcgaatccacttaggagacaggccctatcgatgtcctgagtgtggcaagaccttcaatcagcgttcccatttcctcacacaccagagaacgcatacaggagaaaaacctttccactgtagtaaatgtaacaagagcttccgtcagaaagcgcatcttttatgccatcaaaacacccatttgatttaggaagtagtctttggtgttcagctgctcccttgcacattttcattgctactgtcttcaagcaccccaaatagagaaaacctgggcgtcagtggctcaatttgggccctgatctattctccctctttcttgtctatgttataacagagaggataaacttaaagggtccaaataacggtccgaatacaaaaggcattccttcagtgtgtgactgactcttagggaaatgtgagtttaatagttgatgcccgccaggcgtggtggctcacccctatggtctcacganttcagcntggacttaaccaggatgaactggna

SEQ ID NO: 54838 - DNA, 468 bp, Homo sapiens
gctccacactccagggatagccttggaacgccaggcagttcagagagcctgaggtctggtcttggagacctgggttccaatcccagctttgccacattccagccatgtggccttgggcccttagcctttgttcctgtaaaatgggaccactgagagcccgatctcagggttttatgaggaggaacgatgagagggctgtgctgggcttcctgaagccctgtgtggcctggaaagcactcaatagatgataactcagtgtaatgatttcttctagcagatggggaaagcgagagttaaagaggcccgatcatttcactcactcattcctcaaacgttattaagcacctgctatgcaccaggtgctttgttttgtatccattaactcagggttcagcaaactacagcctccaggccaaatctggttcacagcctgtttttataaataaagttttattggcacacagtatg

SEQ ID NO: 54839 - DNA, 419 bp, Homo sapiens
caaggtgagtatgcatggatcccacgaagtcaatgcaaaagcaatttgaaaatccctgcttttcaaataggtgtaagggtttctgtccatgacaaggctgttctacttcagtcttttaaccatgtatccacacagtcccagagatggtcactagtgtcttcctcacctttaacttcctccttggaaataattttcacatgctacgttcttgacctaccaggacaaattctatgaattcttcacgtatgtgtcctgggaaggaatagccaaaagctttgacaagaataactaagtctgggctgggtgtgatggctcatgcctgtaatcccaacactttgggaggccaaggcaggtggatcacgaggtcaggagttcgagaccatcctggccaagatggtgaaaccccatctctactaaaa

SEQ ID NO: 54840 - DNA, 168 bp, Homo sapiens
cccaatgggtgactcagactcccatggcacctgctccttctgtttctcccttcgccatatatatgagctcatgggaaacgctgtgacctcttacagaggaggaaagttcatggacttctagcttctagaactgtgatacaataaactcctgttgcttatctactcctc

SEQ ID NO: 54841 - DNA, 414 bp, Homo sapiens
gatgggaagctctactggcagtgctggaatcaaatcattactatttgcctctataggaggtttcattaggcatcttcttcattatgagtgcaatataatcaaacacttatcagtacaaggcagagagaccgggactagctgcctacacatcctcaatgagctttaggaaatgtgaaggaaacatggactgaaaatcttctggtggcaggtactctcatgtgttgtcctatctgatgctctcaacaacctctaggggtagatattgtgaccctcatcttgcagaagccttggctcaagtatatgctcagaatcacagagctggaagataaacttgggtctctctagtgccagagcccatgccctctgatctctcaagggcagagtattacctttctctttttattataatctaaa

SEQ ID NO: 54842 - DNA, 277 bp, Homo sapiens
gccccccgagactggagtgtcccatctctgcccggagcctccagagactcgcgtatctcatctccgcccagagcctcctgagactggagtgtcccatctccgcccagagcctcccaagactcggatgtacagtctccgcccggagcctcccaatactggagtgtcccatctctgcccagagcctcccaagactcgggtgtccagtctccccccggagccccccgagactggagtgtcccatctctgcccggagcctccagagactcgcgtatctcat

SEQ ID NO: 54843 - DNA, 240 bp, Homo sapiens
tttgttagtgttttctacactacactcaagttcattcagcatgtcatttcaacaacatgtgacgtgtcaacttcaaaaattaaacaaaccagaaaacacaacacttgcactacaaagaacttgttttattctcaaccttctatgctagctaaacttctctgaattttgttccccacacatcccacatctggctcaattccagcttctgttttctgtttattcatccaaaatgtattttat

SEQ ID NO: 54844 - DNA, 263 bp, Homo sapiens
aaattcttccagcggaaacagaaaatcaaataccgcatgttctcattcataagtgggagctaaatagcgggtacgcatggtcataaaggtggaaacaatagacgtcagggacttcaaaaaggggagagaggaagaggaggaggaggcaagggttgaagaatacctgttgggtcctatgttcaccatttgggtgatgagttaaatagaagtctaaaccccgcttacacaatatatccatgtaacaaacttgcacaggtacccct

SEQ ID NO: 54845 - DNA, 287 bp, Homo sapiens
gttggtggtagaagagtctgtcttagggtgtgagtaggtgggtgggtaaacagtgagaagttctacagaggaaaatggtgcaaacctggcctaggctaggcagacatgctaacaggcattgatggccactttacagagacagcctgccgtgtgtacctcacagcaaacacctgacattttccggggaatccataaataactgacttttccaatgatggcctagccagtggcccaaaggcagagagcctgcctgggcctctccgttagctgccagctgatcagcagct

SEQ ID NO: 54846 - DNA, 233 bp, Homo sapiens
ggagaggtgctatgcttcatatttatggggttaattatttgtacgctcacttgatagatgaggaaactgaggcacagagtgtaagcaacttgccgacagtcacacagctagtaagcagtagagctgggaggcaaagccagccatctgacttaaccaggttctccatggatggaaatcataactatagccatttaaagcatggaatgggtaagatcacccaaggacagtgcacc

SEQ ID NO: 54847 - DNA, 530 bp, Homo sapiens
ccaaattatataagtttcagaccctcaaaatggatctacctgtatctaaagccctagacacttcgccacccttgttacattttcaagaccacagcatgttcagtggtgagacaagtcttgttcccaccaattcccaagcagcactggcaatgatgaactcttggatctccaatccccagatggccgaatcttgcagacagagaccacagaggcaggggtccacctgggtgcgtcctcatatccagcaggaagttcacagagcagaccatgcccctacaggaccctagtggcactcacacccacacaaggaaaagaacatgcacaactatcacacaactatctttctgccatttgtgacctctactgaaatccaccttccaatccaatttatgtatttcgtgatacagagcctcagacatcacagcacgtccaagtggtaagacgcaggcaggtggactgaaactgctttctaaaaggtaatgctgcttgcaagaatgacaaaaacggccaggcgcagtaatcccagcact

SEQ ID NO: 54848 - DNA, 313 bp, Homo sapiens
  misc_feature (49)..(49): n is a, c, g, or t
  misc_feature (272)..(272): n is a, c, g, or t
cgagtagctgggaggtgaagggtgaaggttgcagcgagccaagattgtnccactgcactccagcctaggtgacagagggagactcagtcaaaaaaaaaaaaaaaaacaagcccccgtgctttgaggagatgatcatagcctgctcctggggaactatgctagtggctggatagcaagcactgacctagaggttgctcctaggaataaaaaattaagattatccatagaagacaaagaaaaaaatacttcgctaatagtgggccatacatgangatgagaaagggaacttcaaattcaaactgtgatagaaatt

SEQ ID NO: 54849 - DNA, 289 bp, Homo sapiens
gtcccctgccctcaaacaccacattcctgtttggctctgtacctttgcttgggtggtttctctacttgaaatgcccttcttccttttctctgcatcatgagtttctcatcattcttcaggaactcacacaagtcactgtgtctgtgatgcctttggcaactgggctcttcattccttcttatcaggctataacatgacctgtattttaactacttatccagtaccacaccctttcaaagttgatttagtggcaacttacaaacatacataaagcagtaaaaaaagaatt

SEQ ID NO: 54850 - DNA, 325 bp, Homo sapiens
tattttttgtatagacagggtcttgttatgttgccccgactggtctcgaacccctagtctcaagccatccccctgccttggccttccattcctctactttataccacggttattcaccaagcttgtctttgttcagtgtacttcctcatggaaaaactgaggtgatatttaccctggtttttctaccagtgtgtaactgtcgctagtaccagctcaaaaaataagaaatgaataaatgagtgatgactatcactatgttgctcaggctggacttgaacccctgggttccagtgatcctcccacctcagcctcccaagtagctggg

SEQ ID NO: 54851 - DNA, 294 bp, Homo sapiens
caaaatcattccaatattgaaaaaaaaaggttcagctaactccattcccctgatatattcagttctcagtgccccttggcttcccaatttaagtcaatgtaatcacaatgcacacaaggctcttccactcagaatcttcttgactggagaatggaaatcattggagaggggctgccctaaaggtttgtagacaaggttttgaagaatcgagctacaatgcttatcaatgtctgtctggaagaaagcctacgtctctttctaaagccagcctgtcaccatttctgagccatcaat

SEQ ID NO: 54852 - DNA, 791 bp, Homo sapiens
ctgttgtgtacattttatcactcaaaaaacctcagccgtgggtcgggcgcagtggctaacatgctgaaaccctgtttctactaaaaatacaaaaaattagccgggtgtggtggtgagcctgcaatcccagctactcgggaggctgaggcaggagaattgtttgaacccgggaagagaaggttgtagtgagccgaggctgcgccactgcacaccagcctgggcgacagagcaactctgtcttaaaaaacaacaacaacaaaaacaaaaaaaaccccaatactgggtgtattagcctttccctcttacccccttttctgatcccagggttaaaaagcagccagtagcggccctgcaggaatgggcatccatagaatgagaaggggcttctagaactagcctgggagcacagaaggaagctcctctcattcaaatttatccgaacaggctttgcagaagggtagtttcatgatttctgcacattccttcactctgaaatctgtgtcgtgcccctggcactgactgtgcacctggcactgtggatgtggagcaggatccgtgatcgtggagcaggatccgtgatcgtgaggtaggaggtgggactcgactccagaggcggggttcagatgccagaccgaattgaggactagctgatacagggatggggcagaagcagcgttctgcaaggcacgcccaccagtgtgccttgttagtttactgtcgccatggccacacccggagttactgcctctttccatggccgtgacctgacaacccaaaagccaccacccttt

SEQ ID NO: 54853 - DNA, 5538 bp, Homo sapiens
ttgtttattctgttcactgctgtatatctgcagccctgggcacgtagtaggtgcttgataaatagttgttgacttgacttgttagcagctggtagaagcttcccctaatgtttcattctccaggctttattttgagtgaagttgaggccagaaggcctcagtatcctcttccagggatgctgggaactgtagactggatgaccgtgagcttttcagtgtgtgtgtgtgtgtgtgtgttttttttttttttttttgaagctggaagaaactgtacagaaaagaggcccattttgcagatatggagaccaaggtccagagggaccagggccttgccttctacggcacctttgatgggagaatccgtaggcttgatgttgaggtccttcggtttgtctttctgccttttcattgcaattccagggggagagggaccctctggcctcacccttggctctgacctcagtgcggtcagtaaagtctgcctttccctctaactttcacctctttctccccactgcctacgtgcctgccctctgcccactgaaagtgggagcatcagaagggagctgtgcccccaacccccatgtgagggacagatcagcaaaagcctcaaagtccgtgggccgtgtgtctcccatctcattgtggctgggcccccgggcaaggacaccgtgcctcgggagtgagtcactctctctctgtgccaggcaggagctccagggactaggggtgacccaagagtgaaggcctgatggggaggaggacccggcatgacagcccttggcttgctgggggaggagagtggaaacttttacatttgtttctcgctttcaacccagtaagtaggaatcagcctaacagatcagcaagagcctcaaaccttggctcgttctgttcaagaagacagaaaccacaaaggcaaggagagctggagttggctccataacaaagtgacccttgagcgtggaaaagcagaccagcaaccagcctcgccataaaccagtctgaaaggcgagtgggtgacctgggaaaacgcacttgtggcccagttgacaattgaagggttaaatgaccttaataagccgaagtagctgtgaatcagtgagaaactgtgactgcctcaaggggaaaaggtgcaaagaacaaaagagaaatacagtgaaaaactgtcagcttctcaaaaatcaaagagatgtaaattagaacagggggtgcagtttttcacctggagaactcgcagaggtttaaataagatcgtacattttacgaagaaggcatctgtagcacccttatgaatgctttcccttctgggtgcataatcgccctcctctaaattggatgctcttggggtgacctcacctggttctctctccccatcaccctgtatcccttgagaatatctgtagtgacagctcctgagcacctgttgtgtatcatgcattctatacatactgtctcattctgggggttccattgttccacttcgcagaggcaaaaactgaggcgcagaatgatgaaatgacttcggcgaggtaccccagtaggtaatggagctggcatctgaacctagggtaaccagcctcaagcccatgctctcctttttttgcttattttccaccactgtttggtccctggctctcccagagggacatggcactggctgggcctcaggggatcctggcttctcttgaattcagtgttaccttccagctgccgagacctgcaggaactgattccacaggacagtcctgccaaggaggcaagcgggccagagagaggcggcagcaactttctgacaggtgccggggaagtcccgatttgcaatgcttgcccgtttctactgtgtaaatacttacactatggccaaagtgagatgcttaaatgcagagtttggaaaagatgggcacagttggcttctgggagctggaaagagctggcttagccatagcttcaccactgcccaggtgggtgactttgacctggtgtcaacctctctgagactcggttttctcatctgtaaaatgggagcagtatttgctgcatagggtggttgattgtgaggattaaatgagtgaatgtgtgtctagcgcctgtactgtggtaggtgctgtctaagcgttcgttatgagtgcacttaactttcattcattcattcattcattcattcattcagctttcactaacttcttcagccctccagcatctgtctgtcaaagccaactgtccaccaggcctgtgctagaatcttccttttccctctctcccttggagtatcaatgggggaagggggatggcctcaccccttctgcagacgggcttgtctggatccttgtttgctgtgatttgagccaaggacagatgtagtttttttgtgttttttagaaatttccacttgtgtggctgcctcccttggtgtagccacagagggggtggagaaggcgcatcctctgggggtcgtggaccttccaaaagccaatcctagcaccccgtgttgtcagtttagaggcagtggcctgggaactggcagtagacttccgggatggctgtcgtggggccagtgctgtgcgggggaagcacactcgcggtgaacctggcttggctgcttctcagtggactgccttgggcaaaccactgctccgttctgagcctcggtgtatttttttagtctataaaatgtgctaacaatggcctcctggcaggtggtgggaccgctagttttgaagaagccgaggtggaaacgccagggagccccaccctacccctgtgggacattgagagtctccagactgatccccttcttcctggaggccccagcaggtccctgggaggagaaccagggatggcctgaggaaaggctctccctggcaaaaacgcggtcctgtttgaacttggttctctgttaacatgtgctgaaaggagacgccggtgctctgtctctagcgatccctggttccaggtccccattctgttcccaatccaagcctttgggtcgttagtcctccaccaaggccaccagtgatcaggacctctgtttccagagccctcctgtgtcccaggtgcgtgactgggacaagtctgagaaatgatcacagcccagaggagcctgcggacacgtgatgatgaaatgtcccatggggtcgtgaaacagaaaagggacattagagaaaaaaactgaggaactctgaatcaactgtggactttagcaataaaatgttttaatattatttcattagttgtaacaaattcaccacactaatgtcagatgtaaatagtcggaaaatgaggtgtgggtatgcgtatgggaactctaggtactaactcagcagtttttctgtaaatctgaagctattctcaaaaataaaatctgttaaagaaaaaaaagacagacgggtgcagtgactcatgcctacaatcccagcatttgggaggctcaggtgggaggattgcttgaggccaggagtttgagaccagcttgggcaacatagtgagaccctgtctctagcaaaactaaaaaattagctagatgcagtggtgtgtgcctatagttccagttactcaggaggctgaggtgagagatcttttgagcccaggaatttgaggctgcagcgagcagggatcacgtcactgcattccagcctggataatagagtgagaccctatgtcatttaggaaagagcccagcgcagtggctcacatctgtaatctcagcattttgggaggcccagatgggagcccaggagtttgagaccagtttgggcaacatagtgagatctcatctctaccaaaaaaaaaaaaaaaaagaaaaattaagaaaagaaaagaaaaaaaaggccttccaaagagttgcaggctcacaggggatcttggtacagacgagcaagcggtcccttccttggtgtgtgtaggacatggcttagtgagcacgtcgtgcaccttgcgtgtgtcccattcagcaccatggctgctcataccctgcctcgaccgtgcgcgggagccctgcttccctggctggaagcctctcccttgatgcccaggagaaatagcctcttgcactaacaagggtggatctgtgcttaaattacctcttacctggttcatcccaactctcttccagccctttcctctgcccccacccagctgccctcagccttcagcctcactggaggaagggtgtctcggaagagttgcatcatgagacccttggtggagtcgctcaccaggacggccttggccccgaccctggcaccagcccagggtgactttgatgtcgtgttctggcgcgtccttgggcccatttccctcctgtctcccgggggctcttttgcatgttcttcccaaggcttcagagaccttcagctccgcgtctgaagcagccatctctttcttggatctcaagagtggtgatttctggcaactgcctcagactccatttctcatctctgtctacaaaactagcctggagttgggctgtcgggttggcctggacatcctctgagcagcgattggcccttgccctgtttctgtgaatgaacgcggtcgctcttggaaagagcccccaccaccttgcagatgtgctggggtagggtgggggcgtgcgaggttggattacatgagactttgggttctttcctgcagtcattcctaagcggtacttctctgcatctggcctttaacagtgagtggacggggccagtgttcttggagcacctactgtgtgcttgctctgttagttctttgtttccttccctgacgggagttaggccttgccacccttatgttacagacggggagactggggctctgagaagcgacttccccagggtgcccggcccgcacatggtcgagcgggggtctcaaatcccgttgagtcttacttcaagtccaggctccttgatcgctggccctgcttgccctggtggcccacagtcccagagtcagtggcgccaaggtccctcaggctggttgtgaaatcagtttgagtgcagaatgacggcggttcacatcgagcttggtgcccaccctgctagcctgcctgggacttccccagcattagcaccagcatcagtcctgcctcccaggaaccccctccgtctcagacacacctccatgattggtccctgcctcacatcccagtttcttcaaatatcagcaagtttcacactgagagagaaatgtagataaccaataataaaatgaaatgacctctggtccctattgtcagagccataatagtgacattacaaaaatgcacctttagaccaggtgcagtagctcatgcctgtaatcccagcacttcgggaggccgaggcaggtggaacacttgagatcaggagttggagaccaggctggccaacacggtgaaaccccgtctctactaaaaatacaaacgttagccgggcgtggtggcgggcacctgtaataccaactgttcgggagggtgagtcaagagaattgcttgaacctgggaggtggaggttgcagtgagccgagatcgcgtcactgcactccagcctggacaacagagctagactccatctc

SEQ ID NO: 54854 - DNA, 310 bp, Homo sapiens
aaaattctgtttctgtcacagagctgtgacagagagcatcaatcaactcatcactctgtgtacccaacaagctccgggccagaaagagtgcgataatgccctgcgggagctcgagactgtgaaggggatgttggacaatcctaatgaacctgttagtgacctctcttactttgactgcattgagagtgtgatggaaaactccaaggttctgggtgaatcgatggcagggatttcacagaatgccaagaccggagacctccctgcctttggggaatgtgtggggattgcatccaaggctctctgtgggctg

SEQ ID NO: 54855 - DNA, 2576 bp, Homo sapiens
ttgaaaatagcacaatacaggaatctgcagccatccagcaagctcatgtcaaactgaaggagcacctaaatcataatccatctccatcttcagtagtatttgtgcaggaagggccaccattcagcacacaccaggtggatgccaacataaaatgccagaccagttcacgtgagaatatcttgccgtcagaacagatgggattcctcatttcagaaatggggcctgctagcaagcctagtgaagacacaggtttagccactccagccagatacagagagcacagaagcaactcacaacaaggaaagtcccctgatcttcatctgctggtggacgtgggctgcaagcaggagcgctttccaaaggaggaagaattaaaagagtgaggaatggatgacaaatgtgacattgtgcactagctgtagctggaggcagactagccttgcacatgacaaactgttgggattttttcagttctgttaaggaaaaaaaagtattttttgtttcgttaattgagaattttgttaattgagaattgggaatttgtatgtactacagtggttcagttcagattatctgccttgacaaactactgaacatctagcagccacgttttttggctgcccagatcccttttaaatgaaaagttctgaccttctgttatagtcaaggagcatctaaaaactgctccatctatggtactaagaataatctgtgtgtgtgctgatttgttgtcttgccactcaaactgtagtcagcacaactttagtggggaattcagtctctctgattcaagtcacagtgtgatccttttagaggagattgtgtgagaaacaaaggcatgtgaggtcaccagcatcacaggtctaaatgcatcaggaattccagggaagaaactctggagaagagctaattttctaagtgattaaccaggaaattctcttacttcctaacccagcattctgttttaagagcaaggcatccggacttggaccatctatcacacttaacagcccctgattcttttatattaatggaagcattcttctattttcatatctttctttaattttaatgatacattatcataaatggtaaaaagattttattaatatatcacttatttaaatgtctttaaagaaagtatttaacttgtttaatataattgtatttataaatgctgatagatttaaaggttttaaagttttatatttttattattgcaggatagaaggataaaggatgcatgtgtagtatttttattttgaaaggaaaatgtacaatgtgtgaacaaaaacattaagagatttaatatactattttcttattttagatttttacattcaataagtataaattctcatctatataaggtattgtgtgcaaatttgggaaaaaactgattagcagccatttagtagaagctatgcctctgatttttaaagaatggtttcaatctggtttaagcttctgagagaattttggataatgggatagatggtaacatttttttcttatccctgttacaggattctagatttgtgcagtaggattgtgggactgtgttttaggagagaaggatgtcttggatgtccagtttctgtggttaatcccttacttgcttatccagtgacagcaagaaactttctgatttaaagtctttcaattgaccaaaactttcttattggattctgtttcagttctcctattaagcactgcagaaacgaaaggaaagcctaggaatatgaaactaattaaaaaggcacttggtgatatgacatagtactatgctagccgttgtggatgtaacagttcatttcttatactgcattgtgccttcccaatgatgtcaaaccctagaaatattacagagatctacttttctggaaaagggtgagctctgtattgatctgcagtgactctgtttagatattaaagtaggttctgaaaagcgacctgtgtggtccctctgattagactagttaatgtctatgtgatgggcatttatttatctttattagcaaggtttaaaagagcaaattatcaagacacctatatcttttggccagactatataatattttgtcagagtatgtgaagaggagacccaatttccaaatgaaggaactttgctttttctctgtcatgttgaagagctaatatactgtgtagattttcccctaaatatggctttcttagctttatagatgttgagataatatcttttgaggaacacatgtcaagcaggaaccttggcatagatttggtttcagttgttttaaggcttaattaatgaaatgccttaatcagctttccaaacatttttatatatgaatacagcagaccaaggagctggatctcctgctatccttacacgccttgtatctatcaactaaagctgtcattaatgacttgggcaaaatggcaagaggtataataaagtcttcctgtgaattagccagtagggtctgacacaactagtcaactaacaaggttcctgactagtacctcagtatttcagcaccttaagcactgataaatttcaatcagtcaacaataaagtgagtgttccaactaga

SEQ ID NO: 54856 - DNA, 365 bp, Homo sapiens
gtgaggagcattggttaaaaaagaccataagttgttcattgtaatcatggggaggagggaagtaatttgcttgtatttctgctatgttatttttctacggactgtacattgtgaatacttggtgcacttactgaactgataaagataaattcatacttgtaggaccatttgatcattattcctacagagcagtgttagtgatgaggaaaagtaagatctgggaatataatttccacatatacatgaataatctgttttttgttaatttatattttataactgtagttgtactctaagattgtattttgtcaatggaagttaattttgttggaaatgtttgaatataatactgatgtctattattt

SEQ ID NO: 54857 - DNA, 365 bp, Homo sapiens
agcctgcaggtctctgcccacattcccattcccctgtcccattcaactttgccaggatccatcctggcctgggatttggaggcaaggtggagaggtgaattttatagtgaaatctttagacctccaaacagcacagatcccgcagggcacatcagagggagttgcttttgtcatgtgaggtgacgggcaccaagagatccatcatgtctaaattctccctaatagttctccttctttagggtcagcattgcctctccagactccacagcttcaatcagctcacatttggggaaggaaattatgccctcagccccttgcttctcaaggaagggagcttgcctgagaccatagagagggccaggctg

SEQ ID NO: 54858 - DNA, 396 bp, Homo sapiens
gacttagtttttacatctgtaaaatggggataataaaggcacctgcctctttgtgttaccaggattagccaggattatgatgagagttcagctcagtgcccagtgcagagtaagtgctcatccccctctgccagccccacctccaccccatgcagactcaggaagctatggctgttatgttgcctccatcccacttctgaaactgtgcccagagtacctcagtcatttcacttattgcccacaaagatgcagtaaattccatccccacaagctggccctgcctccttctgcttgctaagggtatccctgagcagcaggacacacctcagaagctgcagagtggtgtgggaattgcaaggccagggcagtgcactgcctataacttcccattcaacc

SEQ ID NO: 54859 - DNA, 936 bp, Homo sapiens
tctgcacctaatactgagggtgtgaaatcttcctcagtaatgcccagccctagtaccacattagcgcggcaaggcagtctggagtcaccgtcgtccggtacgggcagcatgggcagtgctggtgggctaagcggcagcagcagccctctcttcaataaaccctcagacttaactacagatgttataagcttaagtcactcgttggcctccagcccagcatcggttcactctttcacatcaggtggtctcgtgtgggctgccaatatgagcagttcctctgcaggcagcaaggatactccgagctaccagtccatgactagcctccacacgagctctgagtccattgacctccccctcagccatcatggctccttgtctggactgaccacaggcactcacgaggtccagagcctgctcatgagaacgggtagtgtgagatctactctctcagaaaggtgagctttcctggaggcattgataacatcttccccctcttccctgcactatgcctaacccccaccccattaaattcccttgatttcactgtgagtgccccggtgcaaaaagatgtaagactgatgaaaccgggcctttcatttgctctcattaccaaatttacagaggaatagaatcattaaaggtagggtgagtggataattttgttaatatgaatgcatacatttatacccagtaggcaatgtgaataaaattcaaggaatgtatttagatattgaatgaggtctcctgaagacattttaatgatttggcttaagcttcagaacaacactagctccttatgatgacttaagcattttgaaagaccaaattgaaattattctatagttatgctcagagcaatatgttaaatttgttccatttgtacttctatgaaaaaatagcagatggattgctgggaaatcctagttggcctggtta

SEQ ID NO: 54860 - DNA, 445 bp, Homo sapiens
cacatgagcaaataataattctcaagagaaatctcaaaatatttaggactaaatgaaaatgaaaacacaactaatcatagtttgtgggaagagtgaaaacacagtttagaggaaaatttatagcattgaatgcatctattagaaaaaataaatataaaatcaatcatctaaacttctactttaggaaactagagaaagaagagcaaatccaaagttagctgaagaaaaaagttaaacactagagcataaattaatcaaattgaaaataggacatatgtagagaaaatcaataaagctaaaagctgcttctttgcaaacaccaataatattgatcaacctctaaccaggctaactacgaaaaaagagaagaaacaaattactaatatcagaagtgaaataaggaacatcactacagatcttatagattttaaaagaatgataaagg

SEQ ID NO: 54861 - DNA, 5452 bp, Homo sapiens
  misc_feature (1)..(1): n is a, c, g, or t
  misc_feature (3)..(3): n is a, c, g, or t
  misc_feature (524)..(524): n is a, c, g, or t
  misc_feature (567)..(568): n is a, c, g, or t
  misc_feature (2758)..(2758): n is a, c, g, or t
  misc_feature (3129)..(3129): n is a, c, g, or t
  misc_feature (3586)..(3586): n is a, c, g, or t
  misc_feature (4870)..(4870): n is a, c, g, or t
  misc_feature (4872)..(4872): n is a, c, g, or t
  misc_feature (5123)..(5123): n is a, c, g, or t
ncngagcggggatgatgaggagtaccagcgcatctacaccacgaagatcaagccacggctgaagtcggaagatggagtggaaggagacctcggggagacccagagccgtaccatcacagtgaccagaagggtcacggcctacactgtggatgtgactggccgggaaggagccaaggacatagacatcagtagccctgaattcaagatcaagattccaagacatgaactgactgaaatctccaatgtggatgtggagacccagtctgggaagaccgtgatcagactgccctcgggctcgggggcagcctctccgacaggctctgctgtggatatccgagcaggggccatttctgcttcaggaccagagctccaaggtgctggccactcgaagctccaggtcaccatgcctgggataaaggtgggaggctcaggtgtcaatgtcaatgcaaagggcttggacttgggtggcagaggaggggtccaagttccagcagtggacatttcatcttctcttgggggtaggncagtagaggtacagggcccatctctggagagtggtgatcatgnnaaaattaaatttcccaccatgaaagtgccgaaatttggtgtctcaacagggcgtgagggccagacaccaaaggcagggctgagggtttctgcacctgaagtctctgtggggcacaagggcggcaagccaggcttgactatccaagcccctcagctggaagtcagtgtgccctctgccaatattgagggccttgaggggaagctgaagggcccccaaatcactgggccatcacttgagggtgacctaggcctgaaaggtgccaagccacaggggcacattggggtggatgcctctgctccccaaattgggggtagcatcactggccccagtgtggaagttcaggcccctgacattgatgttcaggggcctgggagcaaactgaatgtgcccaagatgaaagtccccaagttctctgtatcaggtgcaaagggagaggaaactgggattgatgtgacactgcctacaggtgaagtgactgttcctggggtctctggggatgtcagcctgcctgagattgctactggtgggctggaaggaaagatgaaaggtactaaagtgaagactcctgaaatgattattcagaaacctaaaatctccatgcaggatgtggatctgagccttgggtctcctaaactgaaaggagatattaaggtttctgctcctggggtgcaaggtgatgttaaaggccctcaagtggcacttaaaggctccagagtggacatagagacaccaaacctagagggaaccttgacaggccctaggcttggcagtccttccgggaaaaccggaacctgtaggatctctatgtcagaagtagacttaaatgtggccgcacctaaagtgaaagggggtgtagatgtcacactccccagagtagaagggaaagtcaaagtccctgaagttgatgtcagaggccccaaagtggatgtcagtgccccagatgtcgaagcgcatggcccagaatggaacctgaaaatgcccaagatgaaaatgcccacgttcagcactccaggagccaaaggggaaggtccagatgttcatatgactctacccaaaggagatatcagtatttcagggcccaaggtcaatgtggaagccccagatgtcaacttggagggtctggggggaaaacttaaaggccccgatgttaagctgcctgatatgagtgtcaagacaccaaagatctccatgcctgatgtagatttgcacgtgaaaggtacaaaggtgaagggagagtatgatgtaactgtaccaaagctggaaggagaactcaaaggcccaaaagtggacattgatgccccagatgtggatgttcatggcccagactggcacttgaagatgcccaagatgaaaatgcccaaattcagtgtgccagggttcaaagcagagggcccagaagtggatgtgaacctgcccaaggctgatgtggacatttccgggcccaagatagatgttactgctcctgatgtgagcattgaggaaccagaagggaaattgaaagggcccaagtttaagatgcctgagatgaacatcaaagtccccaagatctccatgcctgatgtggacttacatctgaaaggccctaacgtaaagggagaatatgatgtcacaatgccaaaggttgaaagtgagattaaagttcctgatgttgaacttaaaagtgccaaaatggacattgatgtcccagatgtggaggttcaaggcccagactggcacctgaagatgcccaagatgaaaatgcccaagttcagcatgcctggcttcaaagcagagggcccagaagtggatgtgaacctgcccaaggctgatgtggacatctcaggacccaaggtgggtgttgaagttccagatgtgaatattgaaggacctgaaggaaagctgaagggccccaagttcaagatgccagagatgaatatcaaggcccccaagatctccatgcctgatgtggacttgcatatgaaaggtcctaaagtaaagggagaatatgatatgacagtgccaaagctggaaggggacctgaaaggcccaaaagtagatgtcagtgccccagatgttgaaatgcagggtcctgactggaacttgaagatgccaaagattaaaatgcccaaatttagcatgcccagcctcaaaggagaggggccagaatttgatgtgaacctgtccaaagcgaatgtggacatttctgcaccnaaagtagatactaatgctccagatctgagccttgaaggacctgaagggaagttgaaaggcccgaagtttaagatgcctgagatgcacttcagagctcctaagatgtctttgccagatgttgacctggatcttaaaggacccaaaatgaaaggaaatgtagatatctctgcaccaaagatagagggtgaaatgcaggttccagatgtggacatcagaggtcccaaggtagatattaaagcaccagatgtggaaggccaaggcctggactggagcctgaaaatacccaagatgaaaatgcccaagttcagcatgcccagcctcaaaggcgagggcccagaagtggatgtgaacttgcctaaggctgacgttgntgtctcaggacccaaggtggacatcgaagccccagatgtgagcctcgaaggtccagaagggaagctgaagggtcccaagtttaagatgcctgagatgcatttcaagacccccaagatctccatgcctgatgtggacttacacttgaaaggccccaaagtcaaaggggatgtggatgtgtctgtgcccaaggtagaaggtgaaatgaaagtgccagatgttgaaatcaaaggacccaaaatggacattgatgccccagatgtggaggttcaaggcccagactggcacctgaagatgcccaagatgaaaatgcccaagtttagcatgcctggcttcaaaggagagggccgagaagtggatgtgaacctgcccaaggctgacattgatgtctcaggacccaaggtggatgttgaagtcccagatgtgagccttgagggcccggaaggaaagctgaagggncccaagtttaagatgcctgagatgcacttcaaggcccccaagatctccatgcctgatgtggacctgaatcttaaggggccaaaattgaagggagatgtggatgtgtccttgcctgaggtagaaggtgaaatgaaagtgccagatgttgacattaaagggcccaaagttgacattagtgctccagatgtggatgttcatggcccagattggcacctgaagatgcccaaggtgaaaatgcccaagttcagcatgcccggcttcaaaggagagggccctgaagtggatgtgaagctgcccaaagctgacgttgatgtctcaggacccaaaatggatgctgaagttccagatgtgaatattgaaggtccagacgcaaaactaaaaggtcccaaattcaagatgccagaaatgagtataaagcctcagaagatatccataccagatgttggtttgcatttgaaaggtcctaaaatgaaaggagattatgatgtaacagttccaaaagtagaaggagagataaaagctcctgatgttgacatcaaaggccccaaagttgatattaatgcaccagatgtggaggttcatggcccagactggcacctgaagatgcccaaggtaaaaatgcccaagttcagcatgcctggctttaaaggagagggcccagaggtggatatgaacctgcccaaggctgaccttggtgtttcaggacccaaggtggacattgatgttccagatgtgaatcttgaagctccagaggggaaactaaaaggccctaagttcaagatgccaagcatgaatatacagacgcacaaaatctctatgcctgatgttggacttaatttgaaagcccctaaactgaaaactgatgtagatgtttcccttcccaaagtggaaggagacttgaagggtcctgaaattgatgtgaaagcccctaagatggatgtgaatgttggtgatattgatattgaaggtccagaagggaagttgaagggccccaagtttaagatgcctgagatgcatttcaaggcccccaagatctccatgcccgatgtggacttacacttgaaaggccccaaagtcaaaggggatatggatgtgtctgtgcccaaggtagaaggtgaaatgaaagtgccagatgttgacattaaagggcccaaagtggacattgatgccccagatgtggaggttcacgacccagattggcacctgaaaatgcccaagatgaaaatgcccaagttcagtatgcctggcttcaaagcagagggccctgaagtggatgtgaatctncnaaaggctgacattgatgtgtctggacccagtgtggacactgatgctcctgatttggatattgagggaccagaaggaaagttgaaaggctccaaatttaagatgcccaagttgaatataaaagctcccaaggtctccatgccagatgtggacttgaatttgaagggacccaaactgaagggagagatagatgcttctgtgccagaactggaaggtgatctcagagggccgcaagttgatgtcaaaggtcctnttgtggaagcggaggtgcccgatgttgatctggagtgtcctgatgcaaagttgaaagggcccaagtttaagatgcctgagatgcacttcaaggcccccaagatctccatgcctgatgtggacttacacctgaaaggccccaaagtcaaaggggatgcggatgtgtcggtgccaaaattggagggagatttaacaggccccagtgtgggtgtggaggtgcctgatgttgagctggagtgtcctgatgcaaagttgaaaggccctaaatttaagatgccagacatgcacttcaaggcccccaagatctccatgcctgatgtggacttacac

SEQ ID NO: 54862 - DNA, 332 bp, Homo sapiens
agtctctctctcttttttttaatctttaaaatggagataagaatcttcactctgcctacgtctgtggtggttttgaggctcagatggaagaatgggaatgaaaccattgaaaccattgtgtagatgcaagacccatagtagagacccacccagccttcttgaaggaaaacaaaaccatattggaatagagacttgagtttggagccaggcctgggggccacttccacatagcatggacagactggagttgtcctctactaggtgtgcccatggggtcccagctgtcagtgcagctgatgggaaaagtgcagtgtaaagaatctctgaaccac

SEQ ID NO: 54863 - DNA, 381 bp, Homo sapiens
tggatggatggatggatggatggatggatggatggatggatggatggggcattagatttaagtccacccagcaatttaaaatttctcactcggtcagacacagtagctcaagcctgtaaccccagcactttggaggcccaagcgggaggactgcctgaggccaggagttcaggactagcttgggcaacatagtgagattctgtctctacaaaaactttaaaaattagccaggcatggtggcagacacctatagtcccagctacttgggaggctgaggcagaaggattccttgagcccaggagttcaaggctgcagtgagctatgatggcaccactgcactccagcctgggcaagagagaaaccttgtctctatttaaaaca

SEQ ID NO: 54864 - DNA, 1052 bp, Homo sapiens
aatggcatagtggtagaaaatcgatatggtgtgtccatcagtgaggcaacatgtggtgtatctggagtgaatgggaaggagtgatgatgggaggtgacaagaggggacgtgagaggcatgtctacagaagtaaccaagtctgtctttcatacccacagacctgacttttcacctcttctttcataaatttcttgcactgcttcttttgagtctagttctcctacagccccacaccactctctctttcaactgaactgttctcttcagccttcagatgtgccctggtttccttcaacatttttttgtttgtttgttttttgttttttgagaatcgcttgaacccaggagactgaggttgcagtgagctgagatcatgcaactgcactccagcctgggcaacacagcaagacttcatctcaagaaaaaaaaaaaagaaaaccttggagtcatcctcaattcctctctttatttcgtgccccatacaatatgccagcacaatcctatcatcttttttcaaaatgacacccagaactgaccacttctcaccaccaccaataccactgcaaagggctgagccaccagcatctctcatctggactattagagtaatttcctcactggtccctcttgtggctcccacctggctcaaggtcctctgactcctgcccagctctcctgatttggtctcttccccacccttctctgctgtctactctcactctctccatttcagtcatggtgactttcatgatacccctcacacataccaagccttgtccggcctcagggcctttgctgttactatgctttcagcttgggacactttcttctcatatcctcatggctccctctgctgtcatctcctgatctctgcttaaatgtcaacccagtggcactccctctccatccctctgcatcttcttaccctgttttcttgttctttacatcaccacccgacatatcatgttttctgggttttatttatagtatgtctccacaactagatcagaagctctgcaggggtaggggtttttgtctgtttggttcacagc

SEQ ID NO: 54865 - DNA, 148 bp, Homo sapiens
tgagattcagtctcacactgttgccctggctaaagtgcagtggtataaacatggttcattgtagtctcaaccacctaagctcaagtgatcctcctacctaagcctccagtgcatcctgggaccacacgtgctggccaccatacccagc

SEQ ID NO: 54866 - DNA, 396 bp, Homo sapiens
cccgcctcagcctcccaaactgttgggattacaagcgtgagccaccgcgcccagcctctcaaaatatctttcaaaatcattctcatgtctccatcttcatccccctcctttggttaagatctccagtctcctggcctttcttccctgcaaacttgagctgaaatgatttttctaaaacatcaacctagtcataactctcactgttttgcttaaaatcctccatatcatttccatcagggtatactttaaactcatgagctagacagaccatgcctttgcctgctttgccaactttaactcctgtcttctcccccttcttttgcttcagtatttctcaaagtatagtctttggaccatccccaaaagaattgccacttattaaaattacagatttgg

SEQ ID NO: 54867 - DNA, 356 bp, Homo sapiens
atgtgaagtgacttgcttgggccatctcgcttggcagcgtcaaggctgatatctgggcccaggcaggtgatctgccttcagcctctgtgagcacagcctatcccacaagaaggtcggctgtagaggatcctggaggctggacgggcagaatcagtcagccgttgcccatttgatggacattcacattaactccctaagtcaactcctcaacctcagtgccgtggagagcagggggcgggtgaggaggggctctgatggcctgtctctccgcccacacccaccgctccacccttgcttaggggccatttttagagttgggagtgctgccctcatagttcatccacaggcttgtaaga

SEQ ID NO: 54868 - DNA, 364 bp, Homo sapiens
ccaatgagacatttgcctttattcctgaagatttttggggacaaaaaaattttacccataaaaactcagaatttctccagaaaaagcctcatcaaccatctcttctcccaggaacctcctctcagcctctagtcatcagatatctcttcttttccatcctacctcttatgatttttgcacattgatttttatcctgagactttgctgaagttgtttatcagcttaaggagatttggggctgagatgatggggttttctaaatatacaatcatgtcatctgcaaacagggacaatttgacttcctcttttcctaattgaataccctttatttttttctctagcctgattgccctggccagaactt

SEQ ID NO: 54869 - DNA, 205 bp, Homo sapiens
acagcgtttgagtattgacaacagcaaaaagggagaatctcagctacgcgtccgagattctctccgacctgaccatggtctgtatatgatcaaagttgaaaatgaccacggtattgcaaaagctccttgtactgtcagtgtgttagatacaccgggaccaccaatcaactttgtatttgaagatatcagaaagacctcagtcctt

SEQ ID NO: 54870 - DNA, 278 bp, Homo sapiens
ccctggcaggtgtgggtgtggttcccctgggctggagctggcagggtcaccgtagggagaggggctaagctcaggggagagaggtgggagggagagaggaaggactctgcgtgtccagtgtagaggccctgctcaccctccctggtcctgaccccggctccagccccatcagactctgcagttggactgttgctcagggcccggtcttgccccggctaggccactgtataggaggccttgtgtgctgaggctcctggtctcgcctggcgccagcctga

SEQ ID NO: 54871 - DNA, 393 bp, Homo sapiens
actgtgtagcaaatcctataataacttgttacatcaattatgtgatttttcatttataacactgactttcgaacacaaaaatgtaaagaaattcaacattatttcatcacatttttcaaaagttattgctaaaatatttacctgtgaacacaaatatttgagggataatcttattttaagagcatggttttaaaattagatacaaagtttaaaactgttttctaattgctcccaacttttcccacacatacgttttttaaatcaaaattattttggtataaaatattgagttcaggcctggcaccatggcccacgcctaaaattccagtgctttgggaggccaaggtgggagaattgcataagggcaagagtttgagaccagcttgggcaaaa

SEQ ID NO: 54872 - DNA, 2452 bp, Homo sapiens
  misc_feature (1898)..(1898): n is a, c, g, or t
ggtttctatcaaagtgttcataaaacctggagctgcagctggcccccattaggtagtttcttggtgaacgttttccaaggaaaacttttttttaacaacttcataaagccaagcacaaaaggacattgcaatgactggctgaaagacatgggactttttgtcttcgacgactaaaacgttaaatgggggcttactttgtgcatttatggaagaaaacttggaaggcattaaaggctacattttgagccttgcatgatttcattcatttatgcatgaattcatttgttcaacatttatttagtacctactatatgccaggcactgtgccaaatgttgggaggaagaaaaaggtgaataacactggcgagaacacaagtaactatttcaaagtagtctatggcaagggcttcagtgacagaatttgtaaagctacctggaaaagtgcttggtgccaataaatgctcagaatatgtgtgctcgttccttctacatacaaaattaaatgcaaatgcttagagtacaatcatgcatttattgctaaaagatgactatcaacctcacacaaaaggtattgtttggggtccaatttggaaatatgtgctattgttttaaaaggtacattttcttctaaacaacaggatatgtatgttagttttggcgcaacaccattacacctttcctatatgcttgcatacttcctctgctctcaggagaattatactccagctgacgaaatcatgcttatattttcttatgaataaaacatgaaggaggctttcccctccagcagactctcttgcccacagactcaggttggttctagatcagtgtaaacattggccattcatccaaccaacccttccattcaaccagcataggtaataataatgctgtaagagttcagaggcacaaatgatctcctgggagatgaggtggtcaggcaaggctctatgaagcaggcaatcctgaagctaggtctcaagaatgaaggttgtacacagtacaaagggagaagaaagaaattcaagagacggggaaagcttgagcaaagatgcagaagtaggaacgtgcttagcatgattgggaacaatgaatacaccagtttgacctgaacaccattcagaggattactggaaaatcaaattcacgctaggtagggccagatcatggaaaacctcaaatttcagtctcaggcattgtataaaatttgtagcctatatatggttgcacacattatacttttaaaaagtatatagcaagaactgagtccacagattctcaagtattttattcttagcagtattatttattacagtgagtctcagaaccttccaaatgcttccaatactataaaatccacaggacttggaggcctgtaaaagaaaaggtcctgaaaacatatggcaacactgtacctgggaaatgtgtccttgagaaaagaaactagtatttgcagacattgtgcaagacccttgtacatgtgttcttcaatttaattttcacataaagtctatgaggtaggtcctaatatagcccccgttttacagatgaaaaaactgagcctcagatagcagatcaatacaggattcaaactgtggcccattttgttctaaatccactattctttttaccataccacactgccccctgaatggaatttctctgcaaaaatttgagtcagggtaccctgtgattcatccataccttcagttgctctttatctggaacctagtaaaaatttctatttgcctatcatccaaacatctttgaatgtcagatattttgaggttctagccaagttagggaaaacaatgaactcaaggactcccaggacaattcattataaagtcaaactagcccttcactatatagtcaaactacccccacatttacttaancttcaagggactctacagcaagaatcagagaaaatggtgctaactggaactatttgagtggttcaggttgggggccacagccaataaggattggctctattattctggtaggctctgctgcctctttaagtaccacatgactaaaacgactgcaaacaattatactagcaggttacctttgtacagcactctatagtttacaaagtttatatacaacccccctctgaaacaccaccatttccaatttcacaaataagaaaactaaagatcagagaaagcaagtaacttgctcaaggacacttatctcaataattggtaaagtacaaatttaaaccccagctctttcacctcaaagttcaatatactactttttaagtgtgaagacactgatattgccttcattttggcaaaacaaccatgtagtgaaatactagaagtcatcaacttaactgattttatttctcactgctaatcttccaggttctgaagtgtattaggccatttttgcattgctataaaaaaatctgaagctgggtaatttataaagaaaaaaa

SEQ ID NO: 54873 - DNA, 1719 bp, Homo sapiens
aactctggaaagagttcatgtcagatgctagaccagcaagttacccaactcaaaattcagccaatgattctttactatagagtacctatcatgtgtcaaataatatacagacttcactactaaccctcacaaaaacttgcagggtaggtggaatgagccccaatttaatttggaggtaatagtgggtcagaaagattaaatgacttgccttaagtcatagagttagcagtgagtggcagcactgggattcaaacccaggtttgtgtcttgtccaaagcctgtgcttactgctttaccattgtgctctttagtttgtaaagtatggtaagctggcctgttatttgtttagtatcttctggattttttttttttaattatagagctagcttaccgtgtgtatcatgtaaaaaaaattcataagattaacaatttccatgagaatatcataaactcagggcacacattctggccattcctgactaaaaaacttcaagcagaataagcagctataaaatagaaaagaaaaattaaggataaacggcattgtgaaaaaaaaccgagccacacagatgagaattaaaaattaacagccagcaaactcaaaagaacctttgtcctccttgagatatggtgatgatcaaaaagttagcaaggaatattaatcaaggaattaaagggcattaggaatgctatagtattggaagaaattacatcttaacatttcaaagccccatttcacttaagagtaaaatctaatctgatgttttttactctgaattttattcagtaatttttattcataattcatgataattggtaatgtagtataattgttagtaaatgcagtacaaattgttctactgttttaaaaagttttccgcagaacagtgcatttatggcaatgctatgtttaatgagttagggacatcaaatatatagtagttccttattttcagttgtgaaaatgaaatggctaaagcagaagagacgtctattttagtcttttaaaaatgtgtgtgggtggtcttttttcctcagaagcccaaagcacatgtatattttgttatttctccttgctatattcctgagactatactaaaaactttaagaaaaggaacaagaaaaaggtaaattcatgtgttccccactgctgtgtctagaaccaagatcacattatatcattgttaaaattgtgttatctagaaagtgcaatatagggaaaacactctaagaatcttttaaaagcctagtgtttcccttatttgtcagaatatgtggtagtggcatccataagtatcttttaacttgcatttagcaggacaaatagtgtgatacttatactgatgacaatcatccccatttaatgaccagcagtcactgagcgctgtgaaaattcactcagtgataccccgtgttggtcttgaaggaaaccgtacatatgaatttttggatagctaatgtatatctctcaagtgccaacatttaaaacttgtaattatttttgatgtgagtatttcaggtatgttagtataccttcctgccttcttcttaaacatcatgctcagtataattcacattttcatgatgaaaagttaaagttatattcataatgtattattataagtatccagctctgatgtatgtaaaacacttcataaaatgtaaagggctataacaaatatgttataaagtgattctctcagccctgaggtatacaga

SEQ ID NO: 54874 - DNA, 2959 bp, Homo sapiens
aactctggaaagagttcatgtcagatgctagaccagcaagttacccaactcaaaattcagccaatgattctttactatagagtacctatcatgtgtcaaataatatacagacttcactactaaccctcacaaaaacttgcagggtaggtggaatgagccccaatttaatttggaggtaatagtgggtcagaaagattaaatgacttgccttaagtcatagagttagcagtgagtggcagcactgggattcaaacccaggtttgtgtcttgtccaaagcctgtgcttactgctttaccattgtgctctttagtttgtaaagtatggtaagctggcctgttatttgtttagtatcttctggattttttttttttaattatagagctagcttaccgtgtgtatcatgtaaaaaaaattcataagattaacaatttccatgagaatatcataaactcagggcacacattctggccattcctgactaaaaaacttcaagcagaataagcagctataaaatagaaaagaaaaattaaggataaacggcattgtgaaaaaaaaccgagccacacagatgagaattaaaaattaacagccagcaaactcaaaagaacctttgtcctccttgagatatggtgatgatcaaaaagttagcaaggaatattaatcaaggaattaaagggcattaggaatgctatagtattggaagaaattacatcttaacatttcaaagccccatttcacttaagagtaaaatctaatctgatgttttttactctgaattttattcagtaatttttattcataattcatgataattggtaatgtagtataattgttagtaaatgcagtacaaattgttctactgttttaaaaagttttccgcagaacagtgcatttatggcaatgctatgtttaatgagttagggacatcaaatatatagtagttccttattttcagttgtgaaaatgaaatggctaaagcagaagagacgtctattttagtcttttaaaaatgtgtgtgggtggtcttttttcctcagaagcccaaagcacatgtatattttgttatttctccttgctatattcctgagactatactaaaaactttaagaaaaggaacaagaaaaaggtaaattcatgtgttccccactgctgtgtctagaaccaagatcacattatatcattgttaaaattgtgttatctagaaagtgcaatatagggaaaacactctaagaatcttttaaaagcctagtgtttcccttatttgtcagaatatgtggtagtggcatccataagtatcttttaacttgcatttagcaggacaaatagtgtgatacttatactgatgacaatcatccccatttaatgaccagcagtcactgagcgctgtgaaaattcactcagtgataccccgtgttggtcttgaaggaaaccgtacatatgaatttttggatagctaatgtatatctctcaagtgccaacatttaaaacttgtaattatttttgatgtgagtatttcaggtatgttagtataccttcctgccttcttcttaaacatcatgctcagtataattcacattttcatgatgaaaagttaaagttatattcataatgtattattataagtatccagctctgatgtatgtaaaacacttcataaaatgtaaagggctataacaaatatgttataaagtgattctctcagccctgaggtatacagaatcatttgcctcagactgctgttggattttaaaatttttaaaatatctgctaagtaatttgctatgtcttctcccacactatcaatatgcctgcttctaacaggctccccactttcttctaatgtgctgttatgagctttggacatgagataaccgtgcctgttcagagtgtctacagtaagagctggacaaactctggggggacacagtctttgagacagctcttttggttgctttccacttttctgaaaggttcacagtaaccttctagataatagaaactcccagttaaagcctaggctagcaattttttttagttgcaactaagtaagatatactacaaactaaggatgctgctagactaaggaataaacagcaaggtaccaaagtacagcaaagcaacaacaaaggctctgtatttgcagaggggtctatcatgcttttaagaaaaaagaagagtacaggaaaaaaattcagatagacataagagtattttggatgccattaaactttgtcaataaccattaaaacataggcttaaattatcacgtattgttacaaagacacagttttgtctcattataaaataagattatatgaaatttatattctagaaatgattccaaatcatgtcctaagaatttctcccattcaaatgataatggaaattactgtcaaaaggaaaatctcaaagttaccattacgctgctctcttgtaaatgaactagggataaagatatgggttttatcaaaagccctaaggaatatatctcacattcacctcctatatgtatgtgtatatataaatgccactataaatgaaaatgtcacccagagataataaaataatttttaaagtttaaatctggtccaaagtctttaaaataggtagattttcagctttcttaagtttctccctcatttagatttcatggtttttacataaagggtgaatatttgaattttcttttaaatttcactgcatcttcaattgcccaactgtgtttcctgataaattttagattcacatttttaggaaatttggagtattccagacaatatactagatacccagaaacttttctcagtaggttctgaggtgttttaagttcttatgctagactgtaagctccttgagggcagagactgttttatttattcttgtatcctcagtgcctggtacaggacttgacacagagtagttgttcaataaatatttgttgaatgaatcaaaaaaacc

SEQ ID NO: 54875 - DNA, 405 bp, Homo sapiens
ttgtaaggaggacttgtcaccccaagacctgtgtgcagcccttctcaacactgtgcaaaaacagaaaaacctgatctgtaaagagaccaggggcttttatcttcttgcttttcattctttctcagatctggctgcactgcctgcatgtgagttttgtcagatatcctccaaacatttctctttgttttttgttttgttttgtgtttgtttttttttgtgtgtgtgtgtgacgtgatctctgctcactgcaagctccgcctcccgggttcatgccattctcgtgcctcagcctcccaagtagctggaactacaggcgcccgccacgatgcccggctaattttttgtatttttagtagagacagggtttcaccatgttagccaggatggtctcgatctcctgaccgc

SEQ ID NO: 54876 - DNA, 709 bp, Homo sapiens
gaaaatcttggcatagatatggaataaatattaatgtctccaaaatcttctcaaaatttatactatggcacaaacaagttaaatgtaggtctcttcctcaccatctatcttaggtctctttctcatattttcctccaatctctactgctgggaaggcgagggacatggaggggagagatcacctcaagtaggcacaggcttgaaagtccaagatcaaggtagcagcatctggtgaggactgcaatcgacttccaagatgacgccttgaatgccatacccaccagaaggctggtacactgtgtcctcacatggcagaaggcagaagggaacagagagacagatgccttccatcaagccctttgattacagcatgaatgcataagtgagagtggagctttcatgaactgaatgcctccccaaaggccccaccttccaacactgttgcagtgggattaggtttctaacatatgaattttgggagacacattcagaccatagcagcaaagctgtagactaattgaagaattagtctgtaggcaaataagtacaataagatgttctgagagaaggttgtgtatgacactgcaatgtaggaaatgtgttgaatttgtgcttgttgagtaaaaaagtaaattgtatttgctaaatattttgtcttcattatcaactgatctgtataaacaataaaagtattctattatcttcattg

SEQ ID NO: 54877 - DNA, 511 bp, Homo sapiens
ggagtgtaaattgcaccatatttcatggcttttgtgcctgccagtcattggcattggctgaggggcaggtctctggagaagggggcagccatctgctgttagccactgcccagcacagcggggagtgcgtgcatgggtctgcagagggaatctggacagaggcccaatagtggccattacctcacctgtccagatgcaggcagcatgaagctaccacagcacccccacatggggtgtgtacctataaaactcacccgtagaaccgcagagctgagtgcaagctctctgtaaccagtcttgctgccagggggtgaaggagaggaatgaccgtgttcatcatcagttaaagcacttgtgttgtctggggaaggagtatgacagttaatggatctagagcggagactcagtgttccccttctgacaagaaaagtacattcacgtgttttgtaaaaagcgtatttattaaagttcaagaacacataacctgcccattttaatggaatgatagaga

SEQ ID NO: 54878 - DNA, 265 bp, Homo sapiens
ataactgaaaaatggaagaaaatatttgcaaattacacatgtgaaaagcagttaatatcaaaaatatataagaaactcaaaggactatacaacaaaaaacaaataaccatgaaaaataagcaaaagatatatataaataattttcaaagaaagacatacatatagcttggcagatagatgaatatggctcaaagtcaattatcatcaaggaaaggcaaaccaaaacaactctaagatataaactcactcctgttaaaatgtttaa

SEQ ID NO: 54879 - DNA, 456 bp, Homo sapiens
acactacatgccatggctgggcagaacacttacatatgttatctcatttactcccaacaacattttgagaatggagctgttcttatccacatttcacagatgaagcaactgaggcccagagaagcagagtaattgcctgagaccaccctgatggttaaatgggagagctgggataaatggccccagtggtctgacttcagctttacagttatcctaaactgcttttcatggtgtaaatcttttttctgtgtgtgggagaagacagctactgccaagcctgtatttacttttgggtggggattgggagggaagtttccttctttttttttttttgaatcattaaagcctgtggaagtcactataccagggtctgagtagattttgttgctctgagttcaagaccctagaggccctgaagtcatacgtatatagcatttcctgctctctcccatttct

SEQ ID NO: 54880 - DNA, 6672 bp, Homo sapiens
  misc_feature (5)..(5): n is a, c, g, or t
atggnactatctcctgagtgctgcaagttgtaacgggcaccgctgagcctgtttccctttggagcacttcttatctagaagcagtgtttagtttcttccaaactgggccacttcgtccacctactctgttctgagtaaggaaacagcctccaagcatcagcagagcccagatgagcacgggccgcggagccgcttagcagtctcccgggacccagctccggaggagccgcaagcatgcaccctgggttgtggctgctcctggttacgttgtgcctgaccgaggaactggcagcagcgggagagaagtcttatggaaagccatgtgggggccaggactgcagtgggagctgtcagtgttttcctgagaaaggagcgagaggacgacctggaccaattggaattcaaggcccaacaggtcctcaaggattcactggctctactggtttatcgggattgaaaggagaaaggggtttcccaggccttctgggaccttatggaccaaaaggagataagggtcccatgggagttcctggctttcttggcatcaatgggattccgggccaccctggacaaccaggccccagaggcccacctggtctggatggctgtaatggaactcaaggagctgttggatttccaggccctgatggctatcctgggcttctcggaccacccgggcttcctggtcagaaaggatcaaaaggtgaccctgtccttgctccaggtagtttcaaaggaatgaagggggatcctgggctgcctggactggatggaatcactggcccacaaggagcacccggatttcctggagctgtaggacctgcaggaccaccaggattacaaggtcctccagggcctcctggtcctcttggtcctgatgggaatatggggctaggttttcaaggagagaaaggagtcaagggggatgttggcctccctggcccagcaggacctccaccatctactggagagctggaattcatgggattccccaaagggaagaaaggatccaagggtgaaccagggcctaagggttttccaggcataagtggccctccaggcttcccgggccttggaactactggagaaaagggagaaaagggagaaaagggaatccctggtttgccaggacctaggggtcccatgggttcagaaggagtccaaggccctccagggcaacagggcaagaaagggaccctgggatttcctgggcttaatggattccaaggaattgagggtcaaaagggtgacattggcctgccaggcccagatgttttcatcgatatagatggtgctgtgatctcaggtaatcctggagatcctggtgtacctggcctcccaggccttaaaggagatgaaggcatccaaggcctacgtggcccttctggtgtccctggattgccagcattatcaggtgtcccaggagccctagggcctcagggatttccagggctgaagggggaccaaggaaacccaggccgtaccacaattggagcagctggcctccctggcagagatggtttgccaggcccaccaggtccaccaggcccacctagtccagaatttgagactgaaactctacacaacaaagagtcagggttccctggtctccgaggagaacaaggtccaaaaggaaacctaggcctcaaaggaataaaaggagactcaggtttctgtgcttgtgacggtggtgttcccaacactggaccacccggggaaccaggcccacctggtccatggggtctcataggccttccaggccttaaaggagccagaggagatcgaggctctgggggtgcacagggcccagcaggggctccaggcttagttgggcctctgggtccttcaggacccaaaggaaagaagggggaaccaattctcagtacaatccaaggaatgccaggagatcggggtgattctggctcccagggcttccgtggtgtaataggagaaccaggcaaggacggagtaccaggtttaccaggtctgccaggccttccgggtgatggtggacagggcttcccaggtgaaaaggggttacctggacttcctggtgaaaaaggccatcctggtccacctggcctcccaggaaatgggttaccaggacttcctggaccccgtgggcttcctggagataaaggcaaggatggattaccgggacaacaaggccttcccggatctaagggaatcaccctgccctgtattattcctgggtcatacggtccatcaggatttccaggcactcccggattcccaggccctaaagggtctcgaggcctccctgggaccccaggccagcctgggtcaagtggaagtaaaggagagccagggagtccaggattggttcatcttcctgaattaccaggatttcctggacctcgtggggagaagggcttgcctgggtttcctgggctccctggaaaagatggcttgcctgggatgattggcagtccaggcttacctggttccaagggagccactggtgacatctttggtgctgaaaatggtgctccgggggaacaaggcctacaaggattaacagggcacaaaggatttcttggagactctggccttccaggactcaagggtgtgcacgggaagcctggcttactaggccccaaaggtgagcggggcagccctgggacaccaggacaggtgggacagccaggcaccccaggatctagtggtccatatggcatcaagggcaaatctgggctcccaggagcaccaggcttcccaggcatctcaggacatcctggaaagaaaggaacaagaggcaagaaaggtcctcctggatcaattgtaaagaaagggctgccagggctaaaaggccttcctggaaatccaggcctagtaggactgaaaggaagcccaggctctccaggggtcgctgggttgccagccctctctggacccaagggagagaaggggtctgttggattcgtaggttttccaggaataccaggtctgcctggtattcctggaacaagaggattaaaaggaattccaggatcaactggaaaaatgggaccatctggacgcgctggtactcctggtgaaaagggagacagaggcaatccggggccagtcggaatacctagtccaagacgtccaatgtcaaacctttggctcaaaggagacaaaggctctcaaggctcagccggatccaatggatttcctgggccaagaggtgacaaaggagaggctggtcgacctggaccaccaggcctacctggagctcctggcctcccaggcattatcaaaggagttagtggaaagccagggccccctggcttcatgggaatccggggtttacctggcctgaaggggtcctctgggatcacaggtttcccaggaatgccaggagaaagtggttcacaaggtatcagagggtcgcctggactcccaggagcatctggtctcccaggcctgaaaggagacaacggccagacagttgaaatttccggtagcccaggacccaagggacagcctggcgaatctggttttaaaggcacaaaaggaagagatggactaataggcaatataggcttccctggaaacaaaggtgaagatggaaaagttggtgtttctggagatgttggccttcctggagctccaggatttccaggagttgccggcatgagaggagaaccaggacttccaggttcttctggtcaccaaggggcaattgggcctctaggatcccccggattaataggacccaaaggcttccctggatttcctggtttacatggactgaatgggcttccgggcaccaagggtacccatggcactccaggacctagtatcaccggtgtgcctgggcctgctggtctccctggacccaaaggagaaaaaggatatccaggaattggcatcggagctccagggaagccgggcctgagagggcaaaaaggtgatcgaggtttcccaggtctccagggccctgctggtctccccggtgccccaggcatctccttgccctcactcatagcaggacagcctggtgaccccgggcgaccaggcctagatggagaacgaggccgcccaggccccgctggacccccaggtccccctgggccatcctcgaatcaaggcgacaccggagaccctggcttccctggaattccaggtttttctggcctccctggagagctaggactgaaaggcatgagaggtgagcctggcttcatggggactccaggcaaggttgggccacctggagacccaggatttcccggaatgaaggggaaggcagggccaagaggctcttctggcctccaaggtgatcctggacaaacaccaactgcagaagctgtccaggttcctcctggacccttgggtctaccagggatcgatggcatccctggcctcactggggaccctggggctcaaggccctgtaggcctacaaggctccaaaggtttacctggcatccccggtaaagatggccccagtgggctcccaggcccacctggggctcttggtgatcctggtctgcctggactgcaaggccctccaggatttgaaggagctccagggcagcaaggccccttcgggatgcctggaatgcctggccagagcatgagagtgggctacacgttggtaaagcacagccagtcggaacaggtgcccccgtgtcccatcgggatgagccagctgtgggtggggtacagcttactgtttgtggaggggcaagagaaagcccacaaccaggacctgggctttgctggctcctgtctgccccgcttcagcaccatgcccttcatctactgcaacatcaacgaggtgtgccactatgccaggcgcaatgataaatcttactggctctccactaccgcccctatccccatgatgcccgtcagccagacccagattccccagtacatcagccgctgctctgtgtgtgaggcaccctcgcaagccattgctgtgcacagccaggacatcaccatcccgcagtgccccctgggctggcgcagcctctggattgggtactctttcctcatgcacactgccgctggtgccgagggtggaggccagtccctggtctcacctggctcctgcctagaggactttcgggccactcctttcatcgaatgcagtggtgcccgaggcacctgccactactttgcaaacaagtacagtttctggttgaccacagtggaggagaggcagcagtttggggagttgcctgtgtctgaaacgctgaaagctgggcagctccacactcgagtcagtcgctgccaggtgtgtatgaaaagcctgtagggtggcacctgccactctgccccttgccctcccctgcccctcacaacagtcacctcacaaacctgaatggtctgaagaaggaaggcctgagcccctttgcctgtcaagttgtacattggagtctcatttgggctagactaccggacactcgtcaccccagccctcgggtccatagagatgagcccaccctgctgagatctgctgtcctgtttctgtcaagctggtgctactgtttgatttggatgattgtgtgactattcatggctacctcagaaagatttgatgggccacaactgtcttagactgctagctttctccttaccgtcttgatcggaaagctcttcctaatcgctaatcagtcatttcttcatgtacagaggtcagcacacattatttggcttaaaccagaacccagtgtttccacacttaaattctctaaccgaatattcatggatggctcaagtctgcacagagcaagtcctcactcttcaaggaggcccactgtgtctaggcaggcaagagaattgaaatgaggtgccacccagtagcccagagtgagctttagctctctctagaatgagcaagactgggccccacatggcttagagaggcttgaaggccagcagctgggttgggggtggtggtcattaatggcatatggtcctagacaaaccatctcctccttgccggctccccctccagccagagacagaggacgtggcctggttcaaagtaaagcagaggatgcaacaaatgtggccaagcctatcaaaggaaatgagaatgacagccttttttcctgggccagaagtagaggggtgggtgcgtaaggatgtgtgagttttgcttttgactccaggaacaaaaaggtaaatcccacatcccagtttctcagaagtccctgtttattccaaatgccatccagatgtgtgcaatgtggcaaactgaagctgcacagtgttggtttccttgtattctgaggatgttaaagactttgttaaatggttatccaattgctctttcacaggtagcctattaaactattttaatatgtttttttaaacctcataaaaatctagcacactcttctcttgagcagttagcagacctaaagcaagcctgaattggctatgcagtacattgtattctgtttgggggaatttgttttagccattttctttaattaccagttttccagaacactcttagctatgttgacatgaggcagttccttccaggtgattctgtttccttaagtattatataaactgtgccaatacagacaaagcataatcaatataatctgaattattgttatctttacctcctgagtaataagcatggtgtcagttttgtacatagcaaataaaataaatgaaatctgaacatgtgaaaaattga

SEQ ID NO: 54881 - DNA, 6603 bp, Homo sapiens
  misc_feature (16)..(18): n is a, c, g, or t
attagaaacaaatttnnntcggtgctccctgggctgctggtcttctttaccttccagctgctcacagaacagagagtttctacatacaagcagaagatgtgaaaatattgggaataaataaagtatatgcttataaacaagttgtggctgctcctggttacgttgtgcctgaccgaggaactggcagcagcgggagagaagtcttatggaaagccatgtgggggccaggactgcagtgggagctgtcagtgttttcctgagaaaggagcgagaggacgacctggaccaattggaattcaaggcccaacaggtcctcaaggattcactggctctactggtttatcgggattgaaaggagaaaggggtttcccaggccttctgggaccttatggaccaaaaggagataagggtcccatgggagttcctggctttcttggcatcaatgggattccgggccaccctggacaaccaggccccagaggcccacctggtctggatggctgtaatggaactcaaggagctgttggatttccaggccctgatggctatcctgggcttctcggaccacccgggcttcctggtcagaaaggatcaaaaggtgaccctgtccttgctccaggtagtttcaaaggaatgaagggggatcctgggctgcctggactggatggaatcactggcccacaaggagcacccggatttcctggagctgtaggacctgcaggaccaccaggattacaaggtcctccagggcctcctggtcctcttggtcctgatgggaatatggggctaggttttcaaggagagaaaggagtcaagggggatgttggcctccctggcccagcaggacctccaccatctactggagagctggaattcatgggattccccaaagggaagaaaggatccaagggtgaaccagggcctaagggttttccaggcataagtggccctccaggcttcccgggccttggaactactggagaaaagggagaaaagggagaaaagggaatccctggtttgccaggacctaggggtcccatgggttcagaaggagtccaaggccctccagggcaacagggcaagaaagggaccctgggatttcctgggcttaatggattccaaggaattgagggtcaaaagggtgacattggcctgccaggcccagatgttttcatcgatatagatggtgctgtgatctcaggtaatcctggagatcctggtgtacctggcctcccaggccttaaaggagatgaaggcatccaaggcctacgtggcccttctggtgtccctggattgccagcattatcaggtgtcccaggagccctagggcctcagggatttccagggctgaagggggaccaaggaaacccaggccgtaccacaattggagcagctggcctccctggcagagatggtttgccaggcccaccaggtccaccaggcccacctagtccagaatttgagactgaaactctacacaacaaagagtcagggttccctggtctccgaggagaacaaggtccaaaaggaaacctaggcctcaaaggaataaaaggagactcaggtttctgtgcttgtgacggtggtgttcccaacactggaccacccggggaaccaggcccacctggtccatggggtctcataggccttccaggccttaaaggagccagaggagatcgaggctctgggggtgcacagggcccagcaggggctccaggcttagttgggcctctgggtccttcaggacccaaaggaaagaagggggaaccaattctcagtacaatccaaggaatgccaggagatcggggtgattctggctcccagggcttccgtggtgtaataggagaaccaggcaaggacggagtaccaggtttaccaggtctgccaggccttccgggtgatggtggacagggcttcccaggtgaaaaggggttacctggacttcctggtgaaaaaggccatcctggtccacctggcctcccaggaaatgggttaccaggacttcctggaccccgtgggcttcctggagataaaggcaaggatggattaccgggacaacaaggccttcccggatctaagggaatcaccctgccctgtattattcctgggtcatacggtccatcaggatttccaggcactcccggattcccaggccctaaagggtctcgaggcctccctgggaccccaggccagcctgggtcaagtggaagtaaaggagagccagggagtccaggattggttcatcttcctgaattaccaggatttcctggacctcgtggggagaagggcttgcctgggtttcctgggctccctggaaaagatggcttgcctgggatgattggcagtccaggcttacctggttccaagggagccactggtgacatctttggtgctgaaaatggtgctccgggggaacaaggcctacaaggattaacagggcacaaaggatttcttggagactctggccttccaggactcaagggtgtgcacgggaagcctggcttactaggccccaaaggtgagcggggcagccctgggacaccaggacaggtgggacagccaggcaccccaggatctagtggtccatatggcatcaagggcaaatctgggctcccaggagcaccaggcttcccaggcatctcaggacatcctggaaagaaaggaacaagaggcaagaaaggtcctcctggatcaattgtaaagaaagggctgccagggctaaaaggccttcctggaaatccaggcctagtaggactgaaaggaagcccaggctctccaggggtcgctgggttgccagccctctctggacccaagggagagaaggggtctgttggattcgtaggttttccaggaataccaggtctgcctggtattcctggaacaagaggattaaaaggaattccaggatcaactggaaaaatgggaccatctggacgcgctggtactcctggtgaaaagggagacagaggcaatccggggccagtcggaatacctagtccaagacgtccaatgtcaaacctttggctcaaaggagacaaaggctctcaaggctcagccggatccaatggatttcctgggccaagaggtgacaaaggagaggctggtcgacctggaccaccaggcctacctggagctcctggcctcccaggcattatcaaaggagttagtggaaagccagggccccctggcttcatgggaatccggggtttacctggcctgaaggggtcctctgggatcacaggtttcccaggaatgccaggagaaagtggttcacaaggtatcagagggtcgcctggactcccaggagcatctggtctcccaggcctgaaaggagacaacggccagacagttgaaatttccggtagcccaggacccaagggacagcctggcgaatctggttttaaaggcacaaaaggaagagatggactaataggcaatataggcttccctggaaacaaaggtgaagatggaaaagttggtgtttctggagatgttggccttcctggagctccaggatttccaggagttgccggcatgagaggagaaccaggacttccaggttcttctggtcaccaaggggcaattgggcctctaggatcccccggattaataggacccaaaggcttccctggatttcctggtttacatggactgaatgggcttccgggcaccaagggtacccatggcactccaggacctagtatcaccggtgtgcctgggcctgctggtctccctggacccaaaggagaaaaaggatatccaggaattggcatcggagctccagggaagccgggcctgagagggcaaaaaggtgatcgaggtttcccaggtctccagggccctgctggtctccccggtgccccaggcatctccttgccctcactcatagcaggacagcctggtgaccccgggcgaccaggcctagatggagaacgaggccgcccaggccccgctggacccccaggtccccctgggccatcctcgaatcaaggcgacaccggagaccctggcttccctggaattcctggacctaaagggcctaagggagaccaaggaattccaggtttttctggcctccctggagagctaggactgaaaggcatgagaggtgagcctggcttcatggggactccaggcaaggttgggccacctggagacccaggatttcccggaatgaaggggaaggcagggccaagaggctcttctggcctccaaggtgatcctggacaaacaccaactgcagaagctgtccaggttcctcctggacccttgggtctaccagggatcgatggcatccctggcctcactggggaccctggggctcaaggccctgtaggcctacaaggctccaaaggtttacctggcatccccggtaaagatggccccagtgggctcccaggcccacctggggctcttggtgatcctggtctgcctggactgcaaggccctccaggatttgaaggagctccagggcagcaaggccccttcgggatgcctggaatgcctggccagagcatgagagtgggctacacgttggtaaagcacagccagtcggaacaggtgcccccgtgtcccatcgggatgagccagctgtgggtggggtacagcttactgtttgtggaggggcaagagaaagcccacaaccaggacctgggctttgctggctcctgtctgccccgcttcagcaccatgcccttcatctactgcaacatcaacgaggtgtgccactatgccaggcgcaatgataaatcttactggctctccactaccgcccctatccccatgatgcccgtcagccagacccagattccccagtacatcagccgctgctctgtgtgtgaggcaccctcgcaagccattgctgtgcacagccaggacatcaccatcccgcagtgccccctgggctggcgcagcctctggattgggtactctttcctcatgcacactgccgctggtgccgagggtggaggccagtccctggtctcacctggctcctgcctagaggactttcgggccactcctttcatcgaatgcagtggtgcccgaggcacctgccactactttgcaaacaagtacagtttctggttgaccacagtggaggagaggcagcagtttggggagttgcctgtgtctgaaacgctgaaagctgggcagctccacactcgagtcagtcgctgccaggtgtgtatgaaaagcctgtagggtggcacctgccactctgccccttgccctcccctgcccctcacaacagtcacctcacaaacctgaatggtctgaagaaggaaggcctgagcccctttgcctgtcaagttgtacattggagtctcatttgggctagactaccggacactcgtcaccccagccctcgggtccatagagatgagcccaccctgctgagatctgctgtcctgtttctgtcaagctggtgctactgtttgatttggatgattgtgtgactattcatggctacctcagaaagatttgatgggccacaactgtcttagactgctagctttctccttaccgtcttgatcggaaagctcttcctaatcgctaatcagtcatttcttcatgtacagaggtcagcacacattatttggcttaaaccagaacccagtgtttccacacttaaattctctaaccgaatattcatggatggctcaagtctgcacagagcaagtcctcactcttcaaggaggcccactgtgtctaggcaggcaagagaattgaaatgaggtgccacccagtagcccagagtgagctttagctctctctagaatgagcaagactgggccccacatggcttagagaggcttgaaggccagcagctgggttgggggtggtggtcattaatggcatatggtcctagacaaaccatctcctccttgccggctccccctccagccagagacagaggacgtggcctggttcaaagtaaagcagaggatgcaacaaatgtggccaagcctatcaaaggaaatgagaatgacagccttttttcctgggccagaagtagaggggtgggtgcgtaaggatgtgtgagttttgcttttgactccaggaacaaaaaggtaaatcccacatcccagtttctcagaagtccctgtttattccaaatgccatccagatgtgtgcaatgtggcaaactgaagctgcacagtgttggtttccttgtattctgaggatgttaaagactttgttaaatggttatccaattgctctttcacaggtagcctattaaactattttaatatgtttttttaaacctcataaaaatctagcacactcttctcttgagcagttagcagacctaaagcaagcctgaattggctatgcagtacattgtattctgtttgggggaatttgttttagccattttctttaattaccagttttccagaacactcttagctatgttgacatgaggcagttccttccaggtgattctgtttccttaagtattatataaactgtgccaatacagacaaagcataatcaatataatctgaattattgttatctttacctcctgagtaataagcatggtgtcagttttgtacatagcaaataaaataaatgaaatctgaacatgtgaaaaattga

SEQ ID NO: 54882 - DNA, 1779 bp, Homo sapiens
  misc_feature (16)..(18): n is a, c, g, or t
  misc_feature (1644)..(1644): n is a, c, g, or t
  misc_feature (1778)..(1779): n is a, c, g, or t
attagaaacaaatttnnntcggtgctccctgggctgctggtcttctttaccttccagctgctcacagaacagagagtttctacatacaagcagaagatgtgaaaatattgggaataaataaagtatatgcttataaacaagttgtggctgctcctggttacgttgtgcctgaccgaggaactggcagcagcgggagagaagtcttatggaaagccatgtgggggccaggactgcagtgggagctgtcagtgttttcctgagaaaggagcgagacacaacttgcagctactgaatgatatggctggccggctctaccatttcagtgaggttctgcctaatctcttttgattctaaggggtaatgtggctcagccacagcaaggaggctgagttctgatgttctctttccccatacttctatggaagactggaagacagattacttgcagtgatttctggaggcagaagataagcaagtggcctctatgatggtagaaccaagaaagaatgatcattgcccttaagccttcagagatgacagctaaatccagagggaaaataaatagggataagattgtaaaaaaagttgctgctggagaaaaaatagctgctgctgataaagaacctcaataaattcaaacaatgtctgcgtttggccctcaaatgtcatgctggctcattgctcgggagaaagagccgtacaactaccatgtcagaggagatgaggaagcaaagaagtctgactaagggcactgccatggatattcttgcccctgctttggaacaatctatcattggattgtggagaggaagcaaggaggcagctggcagtgtgacaccacgtgctatgactcatgactgttttgcctgatggttggcaacatagtattggcacagttgtgggctctagagtacctgggcctgaatctctattgatatgtgccatttggcaaatttctaaactctaagtcttagctgtctcatatacaaaatgggcataatacatcctccctcatatggttgttgtgaggattaataaaacagtgtttataaagtgcttggcacagtgctgaacacatagcagtaaataaatattagtcattattaatattagctgatgcacatttgggggcaatttcaagaaagaattgattacaatagtaaattcagactatggcatctattgattgttcctttttaaatgaaccattttaaatacagtaaaagccctcctccctggcctctgcttaacttcctttatggagtaagtcgatgtttttccttcctattggaatatacactggccaatgctcagggcacaatggaagctcatgggcaggtaagttacttctggtgaacacttatatttctgcttccacacaacaagttgatcacttaccaaaagttagctgtgtttttgccaagcccatttatggcagttgtactcgttattacaagtaggtaatttaatgtaaatttgtgaaatatgagtataaaaagaaaactattattttcatgaaaactaagttcaatgctttggaaagacttactaaagaaaagttgcttttgaaaactgccatattgttaaaaataaaacaaaactgaaagtggaaatcaaatgtgatgcattaggaatgtaacttangtgaaaaagagtctgtgaaatcccagggtgtggcctcacgctcaaagaaaaggccttggccttacaacacatcaccagagtggtgaatgaatgtactttgtgtgttttaggttgaaataaaatgttttatgtann

SEQ ID NO: 54883 - DNA, 1884 bp, Homo sapiens
  misc_feature (5)..(5): n is a, c, g, or t
  misc_feature (1749)..(1749): n is a, c, g, or t
  misc_feature (1883)..(1884): n is a, c, g, or t
atggnactatctcctgagtgctgcaagttgtaacgggcaccgctgagcctgtttccctttggagcacttcttatctagaagcagtgtttagtttcttccaaactgggccacttcgtccacctactctgttctgagtaaggaaacagcctccaagcatcagcagagcccagatgagcacgggccgcggagccgcttagcagtctcccgggacccagctccggaggagccgcaagcatgcaccctgggttgtggctgctcctggttacgttgtgcctgaccgaggaactggcagcagcgggagagaagtcttatggaaagccatgtgggggccaggactgcagtgggagctgtcagtgttttcctgagaaaggagcgagacacaacttgcagctactgaatgatatggctggccggctctaccatttcagtgaggttctgcctaatctcttttgattctaaggggtaatgtggctcagccacagcaaggaggctgagttctgatgttctctttccccatacttctatggaagactggaagacagattacttgcagtgatttctggaggcagaagataagcaagtggcctctatgatggtagaaccaagaaagaatgatcattgcccttaagccttcagagatgacagctaaatccagagggaaaataaatagggataagattgtaaaaaaagttgctgctggagaaaaaatagctgctgctgataaagaacctcaataaattcaaacaatgtctgcgtttggccctcaaatgtcatgctggctcattgctcgggagaaagagccgtacaactaccatgtcagaggagatgaggaagcaaagaagtctgactaagggcactgccatggatattcttgcccctgctttggaacaatctatcattggattgtggagaggaagcaaggaggcagctggcagtgtgacaccacgtgctatgactcatgactgttttgcctgatggttggcaacatagtattggcacagttgtgggctctagagtacctgggcctgaatctctattgatatgtgccatttggcaaatttctaaactctaagtcttagctgtctcatatacaaaatgggcataatacatcctccctcatatggttgttgtgaggattaataaaacagtgtttataaagtgcttggcacagtgctgaacacatagcagtaaataaatattagtcattattaatattagctgatgcacatttgggggcaatttcaagaaagaattgattacaatagtaaattcagactatggcatctattgattgttcctttttaaatgaaccattttaaatacagtaaaagccctcctccctggcctctgcttaacttcctttatggagtaagtcgatgtttttccttcctattggaatatacactggccaatgctcagggcacaatggaagctcatgggcaggtaagttacttctggtgaacacttatatttctgcttccacacaacaagttgatcacttaccaaaagttagctgtgtttttgccaagcccatttatggcagttgtactcgttattacaagtaggtaatttaatgtaaatttgtgaaatatgagtataaaaagaaaactattattttcatgaaaactaagttcaatgctttggaaagacttactaaagaaaagttgcttttgaaaactgccatattgttaaaaataaaacaaaactgaaagtggaaatcaaatgtgatgcattaggaatgtaacttangtgaaaaagagtctgtgaaatcccagggtgtggcctcacgctcaaagaaaaggccttggccttacaacacatcaccagagtggtgaatgaatgtactttgtgtgttttaggttgaaataaaatgttttatgtann

SEQ ID NO: 54884 - DNA, 377 bp, Homo sapiens
aaatgtcctcatgagtgcaggctccgaaagtcccttccttttcattggcacagtttgctttcctgatctattattttttttttgtctgcagcacaacttgcagctactgaatgatatggctggccggctctaccatttcagtgaggttctgcctaatctcttttgattctaaggggtaatgtggctcagccacagcaaggaggctgagttctgatgttctctttccccatacttctatggaagactggaagacagattacttgcagtgatttctggaggcagaagataagcaagtggcctctatgatggtagaaccaagaaagaatgatcattgcccttaagccttcagagatgacagctaaatccagagggaaaat

SEQ ID NO: 54885 - DNA, 806 bp, Homo sapiens
  misc_feature (16)..(18): n is a, c, g, or t
attagaaacaaatttnnntcggtgctccctgggctgctggtcttctttaccttccagctgctcacagaacagagagtttctacatacaagcagaagatgtgaaaatattgggaataaataaagtatatgcttataaacaagttgtggctgctcctggttacgttgtgcctgaccgaggaactggcagcagcgggagagaagtcttatggaaagccatgtgggggccaggactgcagtgggagctgtcagtgttttcctgagaaaggagcgagaggacgacctggaccaattggaattcaaggcccaacaggtcctcaaggattcactggctctactggtttatcgggattgaaaggagaaaggggtttcccaggccttctgggaccttatggaccaaaaggagataagggtcccatgggagttcctggctttcttggcatcaatgggattccgggccaccctggacaaccaggccccagaggcccacctggtctggatggctgtaatggaactcaaggagctgttggatttccaggccctgatggctatcctgggcttctcggaccacccgtatgctgccagatatttgcattttatttcaaatggctttgcttgtctctacgtgtgccctttttctgcctctctggaaacctcaagattttgtggggcagccactacacacccttgtccaatgtaggagtcaatactggcagcaccacaacagtaaaagtctaaagaagaataccagttgcagtggggtgtgcacatgctacactgcttagggttgccttttttttaatgcagct

SEQ ID NO: 54886 - DNA, 556 bp, Homo sapiens
ctttcacgctcccataaccattccttggcccacctccaagaaaaggcaggctggcctctgtttaggtgttgtctgtgcttgcattcccaacgttgacatgaggaattatcaatgggttccggacataatcagccacacggcagagtgaattccaggagtgtaaataacaagagctgcctataaatctacctcagaagacaaagggaaaagcaaaactctgcccaggaagaccttactttacaaaccagctcaaccatatttaccagccttcctgtggtcatttgtctgagctccagctagtgaagtatgagtagaacagacatgcaccacttccagacctggcaccggcaaaccccccatggcaaccctccaaccctttcctcaacaactggaccacgctggaaaggactgaggatctagaggaggacagggctgtaatatggaaggagtttggtttctgaaggaccatgtagcaggccacctgcagggcgggaacatctttaataggtttggaatagcaagaaataaactggtcttgtattaaacaactaaaatt

SEQ ID NO: 54887 - DNA, 529 bp, Homo sapiens
aatgggggagcaggtaccaggtggccagcatcctaaatgactctcagcagctgcagagaatgtaaataacaagagctgcctataaatctacctcagaagacaaagggaaaagcaaaactctgcccaggaagaccttactttacaaaccaggtgaccaaatttctaaaacatcattcccgtaatccctgatcaacagaaaggaagctctggaagcatgaatgctcaaccatatttaccagccttcctgtggtcatttgtctgagctccagctagtgaagtatgagtagaacagacatgcaccacttccagacctggcaccggcaaaccccccatggcaaccctccaaccctttcctcaacaactggaccacgctggaaaggactgaggatctagaggaggacagggctgtaatatggaaggagtttggtttctgaaggaccatgtagcaggccacctgcagggcgggaacatctttaataggtttggaatagcaagaaataaactggtcttgtattaaacaactaaaatt

SEQ ID NO: 54888 - DNA, 458 bp, Homo sapiens
aatgggggagcaggtaccaggtggccagcatcctaaatgactctcagcagctgcagagaatgtaaataacaagagctgcctataaatctacctcagaagacaaagggaaaagcaaaactctgcccaggaagaccttactttacaaaccagctcaaccatatttaccagccttcctgtggtcatttgtctgagctccagctagtgaagtatgagtagaacagacatgcaccacttccagacctggcaccggcaaaccccccatggcaaccctccaaccctttcctcaacaactggaccacgctggaaaggactgaggatctagaggaggacagggctgtaatatggaaggagtttggtttctgaaggaccatgtagcaggccacctgcagggcgggaacatctttaataggtttggaatagcaagaaataaactggtcttgtattaaacaactaaaatt

SEQ ID NO: 54889 - DNA, 627 bp, Homo sapiens
ctttcacgctcccataaccattccttggcccacctccaagaaaaggcaggctggcctctgtttaggtgttgtctgtgcttgcattcccaacgttgacatgaggaattatcaatgggttccggacataatcagccacacggcagagtgaattccaggagtgtaaataacaagagctgcctataaatctacctcagaagacaaagggaaaagcaaaactctgcccaggaagaccttactttacaaaccaggtgaccaaatttctaaaacatcattcccgtaatccctgatcaacagaaaggaagctctggaagcatgaatgctcaaccatatttaccagccttcctgtggtcatttgtctgagctccagctagtgaagtatgagtagaacagacatgcaccacttccagacctggcaccggcaaaccccccatggcaaccctccaaccctttcctcaacaactggaccacgctggaaaggactgaggatctagaggaggacagggctgtaatatggaaggagtttggtttctgaaggaccatgtagcaggccacctgcagggcgggaacatctttaataggtttggaatagcaagaaataaactggtcttgtattaaacaactaaaatt

SEQ ID NO: 54890 - DNA, 606 bp, Homo sapiens
ctttcacgctcccataaccattccttggcccacctccaagaaaaggcaggctggcctctgtttaggtgttgtctgtgcttgcattcccaacgttgacatgaggaattatcaatgggttccggacataatcagccacacggcagagtgaattccaggagtgtaaataacaagagctgcctataaatctacctcagaagacaaagggaaaagcaaaactctgcccaggaagaccttactttacaaaccaggtgaccaaatttctaaaacatcattcccgtaatccctgatcaacagaaaggaagctctggaagcatgaatggtcagtacacacatcgtccacaggactcacacaccacaaactagtcattgatccttttgacccaatttcagaaaatatgtttacatagagacacatatttttgctatttactttttgagcaaccaacaggaaaacctatccacatatgtccattatgatcctctctaatgaagactatctctttatgttgtttaaacaaaaagaaattaatgcatgagaatgtcaaagttctgagctttaagtttctgtactcaatatattgaataaaagatatatgtagtataaaa

SEQ ID NO: 54891 - DNA, 387 bp, Homo sapiens
ccctgtctctaaaaaaaattcgttttaagtgtgctcaggacataacaggagccgctggtaacatgccatttccactgtgaatatggtaaggacagaatccctgtctctaggccctcttccactagtcaatctcatcatcaccatcaaggccaacattggtattctctcctctgagacaaagtctttgacattttctatactatactatgtcttcctctccccaaatgcatatacaaataaaatttgaatgcttctttctccatttagtgtaattttttttataacatagacccaattttcaaaccccacaatggtggattttatttgatgtattgtaaaaagcgctggattgaagtcaaatggcttgggagacctaaattctactcc

SEQ ID NO: 54892 - DNA, 277 bp, Homo sapiens
aaaataaacaataataacacaattttggaaaattggatgagtgagaaaagacttagcagaactcccaaattaaagtactaaaccagcagcaggaaagccaagaagcaacttgttttacactcaagagccttcaagtgtcaggaattggcagcatcagattcttctggaagtgtggtgaagaggagagactaaaatgagaatgatgcgttgaaagtttatttaagaagcagtcagatcactagatcctttccaatcatgaaaaggtacactaccgctt

SEQ ID NO: 54893 - DNA, 780 bp, Homo sapiens
caggagtgatatccacccaggtttgctcagtaagactatgagacctatcttcctggctgtggtgattggttcagaagcaacatgccaaccaacctgatccaatgagagtgagttctaggacttttgctggaactactgtatgtctatatataaaagagaatctatctttctattgaaagccaaaggtaagaagccaatatgatatgcatttgattctgttacagaaatccacataaaagaaggctgcccaagtataaaaccaacacagaagaaagcagaggtaagagatggaaaaagaaatgagtgaaccagtgacagcaagagactgaagaacatcatttgattgcctggaatcagctaagcctgaagagaagcctaaccctaagcttttcagttacccaagccatcaaattcccatccccatttttttggttcttaagcagcttgaaccatagttgtctcacttgcatgcaagagatccctgaagatacatgcagttcctcaggtgaagattgccatcagttaacagatcctggcacccatggaccctgggacagtcattctggtagcatcctctggtagagaataacatagtcaaatctgacagtcagagagtatctgccagcctctgcttagatatagcccactgaaagggagagatgattaatttagccttgatttcaaaaccttgtcttgtatattccattcagcactttttatcttcctgtattcccctggttcctttctagctgaataaagaacaatttttaaagcaaacat

SEQ ID NO: 54894 - DNA, 562 bp, Homo sapiens
ctggacatggtgacttttggggactaatttgaattatatttttatgctctagccctctccctaggctctgaaagttcttgagaaggtcattaatgagaggcaatctacttcaaaccagagggccacctcactaaaatcaggcaaaatggcaaaattcatagcccattactcattaacttatttggagctgcccttcagtagggtaaacatttttttaagggttggggccaaattaaactcctggatcgattatacatagttccccaatacccacatggacatcactccacataattccagtgtgaaaatctcacagacttattagcatttccagatactagaactcaactagaaaacaacaaagttgtttttatgcctatcagaaaatgaagaatgttattaactttccaagaaggaaaaaagtaaaattatttataatatacaggatgtttttggcttcacatggagtctgacccaggtggtggagaaagtcacatctacgatcaaaatgaccagcctcctgaaaactgaccaatccagaataatcctttcaggttcactc

SEQ ID NO: 54895 - DNA, 235 bp, Homo sapiens
tgtatctgtttgacttctaaacccttgcttttcccactgcaaattgttttggctagagagcaggctattaagacattctagccaagccaatttcctgagagttctgcaggtaccaggtgttgctggagcccagcatctgctcagaggaaggcagagagacccagaggaacccagaatgagacactcatttttgcatcctcagtttccaagttaattttctagctcctggttagga

SEQ ID NO: 54896 - DNA, 540 bp, Homo sapiens
tggaattgctgactgcatatatagcagttacaagttatgtggagatactcctcacagtctgtaatctgggcatcaaccaagttataaaatccatttaagtatactaaaaaaatgtcttctaaagccatgattcagagtatagtccaaaggccatgagtgaaccacagaggatcttctgatgggtcatgaactgattatacatggccaagggttgcttattgaattaaaaacggtcaataaaatttggtattcctaaactaaaattagcacattccatggctttactgcagactcaccttcagtgttctatctagaggtctggcggccatgcctggcaacatccccactgcactagtgcatatgtggaggatggggatctctcaactgctttttggaaagacattctgcctattctttcattgattattctcttgagttggtcatggtttatactttctgcaattcttgcttttatttttatttattttgagacagggtctcttgctctgtcacccaggctggagtgcagtggcacgatca

SEQ ID NO: 54897 - DNA, 151 bp, Homo sapiens
attcatagccattatcttttcaaatattgctgcttcattctctctctcttcttcattaacctacgtatagtagaatttttgactatgttctgtgtgtctccaacactgtgttctgtcctttttgcccttgttttctgtgcttcagtttgga

SEQ ID NO: 54898 - DNA, 449 bp, Homo sapiens
aataggatcttgaggaactaaaatattaattaaacttgattttttgaactgttttcttagtatattctcttgggaatcgataagattatattcctcaaatcagtgccataagactaatttatttggttatgtaaagtactgaaaacttaggtatcaacattaattaggttactcaaacagatactatgtccgtattcttctaataccttgctactcaaagtatgttccaaggtctggcagcctttgtatcacctggaagcctattaggaatgcagaatctcagacgccacctcagacctgcggaatcacaatctgttttaaaaagattatttgccgggtgcagtggctcacagctgtaatcccaacactttgggaggccagggtgggcagattgcttgatgtcagaagtttgagagcagcctaggcaacatggtgaaacctcatctcta

SEQ ID NO: 54899 - DNA, 251 bp, Homo sapiens
tgctgaaaggtggggaaaaaaagtcagtctaaaattctctgcccagtgaaacattttaaaaaacagagacaaaatgacatttccagataagcaaaaatagagagaagttgtcagtatacacgcactaaagaaattttaaaagatgatcttcaggctgaaggaaaatcatactgggtaaaaacagatttacataaaggaaaaaagaaatgttaagaaatggtaaatatgtgggtctgaaatatgtagaaatt

SEQ ID NO: 54900 - DNA, 1667 bp, Homo sapiens
ggtcctaacgggaggcgcccgcggggctgtccgcggtcgcgccgggctccgcctgcagtgtggcccgtccggacagtccctcaccccggcctgcgctgctgcgtggactcgggcctcaggaattccgctgcggcccaaggcttgccgtttgacgaggagcagtcgcggtaggcggtgggcaaggctgccctgggcggaggccgaggcgcggctcggactccagcatggcgaccgcggtgcgcgctgtgggctgcctccccgtgctgtgtagcgggacggcaggtcatttattggggaggcagtgttccctaaacaccttaccagcagcttccattttggcatggaagagtgttctcggcaatggccatttgtcatcactgggaaccagagacacccatccctacgccagcttgagccgtgcactgcagacacaatgctgtatttcttctcccagtcacctgatgagccagcagtatagaccatatagtttcttcactaaattgactgcagatgagctgtggaaaggcgctttagcagagactggtgctggagcaaaaaaaggaagaggcaaaagaactaaaaagaagaaaagaaaggatctgaacaggggtcagatcattggtgaagggcgttatggttttctatggcccggactgaatgtccctcttatgaaaaatggagcagtgcagaccattgcccaaagaagcaaggaagagcaggagaaggtggaggcagacatgatccagcagagagaagagtgggaccgaaagaagaagatgaaggttaaacgggagcgaggatggagtggaaactcatggggaggcatcagtcttggcccccctgaccctggtccctgtggagaaacatatgaggattttgataccaggatacttgaggtaagaaacgttttcactatgactgcgaaagagggaagaaagaaatcgatccgtgtcttggtggctgtggggaacggaaaaggagctgcaggtttttctattgggaaagctactgatcggatggatgctttcaggaaagcaaagaacagagcagttcaccatttgcattatatagaacgatatgaagaccatacaatattccatgatatttcattaagatttaaaaggacgcatatcaagatgaagaaacaacccaaaggttacggcctccgctgccacagggccatcatcaccatctgccggctcattggcatcaaagacatgtatgccaaggtctctgggtccattaatatgctcagcctcacccagggcctcttccgtgggctctccagacaggaaacccatcaacagctggctgataagaagggcctccatgttgtggaaatccgggaggaatgtggccctctgcccattgtggttgcgtccccccgggggcccttgaggaaggatccagagccagaagatgaggttccagacgtcaaactggactgggaagatgtgaagactgcacagggaatgaagcgctctgtgtggtctaatttgaagagagccgccacgtaacctctctggccttgtgcagccagttcctgtgctgccctgcacctaggagagactcagcccctcacagcttgggatgttaccttgccttttgtttgttttgagggaagtttaatctttaaactctttggaaataaataattatagctttca

SEQ ID NO: 54901 - DNA, 308 bp, Homo sapiens
  misc_feature (16)..(16): n is a, c, g, or t
accaaatgtaatgcanactccattgcattcagcccgctctcccaagtcatcacaagaaagatgaggttccagacgtcaaactggactgggaagatgtgaagactgcacagggaatgaagcgctctgtgtggtctaatttgaagagagccgccacgtaacctctctggccttgtgcagccagttcctgtgctgccctgcacctaggagagactcagcccctcacagcttgggatgttaccttgccttttgtttgttttgagggaagtttaatctttaaactctttggaaataaataattatagctttca

SEQ ID NO: 54902 - DNA, 229 bp, Homo sapiens
ggcagagctgggaggacattccaggcagagggaatcccaagtgcagtccttaaggtgaggaagccagcaggaggtggcgtctctctggccttgtgcagccagttcctgtgctgccctgcacctaggagagactcagcccctcacagcttgggatgttaccttgccttttgtttgttttgagggaagtttaatctttaaactctttggaaataaataattatagctttca

SEQ ID NO: 54903 - DNA, 368 bp, Homo sapiens
actgagtttatgaacttaactggtggagcagtctctagtgatgaggggtgactggggcatggccttgagagtgggaccaaaagatctgagattctttctccccgaaaggtctgtgatggtgcctgtgttgaaaatgctttcatgttaattgtgtacacacatttcatctgtatccctgtttcttttctccctacaaaacatatgaggattttgataccaggatacttgaggtttttctattgggaaagctactgatcggatggatgctttcaggaaagcaaagaacagagcagttcaccatttgcattatatagaacgatatgaagaccatacaagtgagtgataatctatttttttttttttaattt

SEQ ID NO: 54904 - DNA, 1420 bp, Homo sapiens
tagttcttttgcctcttcctttttttgctccagcagtcatttattggggaggcagtgttccctaaacaccttaccagcagcttccattttggcatggaagagtgttctcggcaatggccatttgtcatcactgggaaccagagacacccatccctacgccagcttgagccgtgcactgcagacacaatgctgtatttcttctcccagtcacctgatgagccagcagtatagaccatatagtttcttcactaaattgactgcagatgagctgtggaaaggcgctttagcagagactggtgctggagcaaaaaaaggaagaggcaaaagaactaaaaagaagaaaagaaaggatctgaacaggggtcagatcattggtgaagggcgttatggttttctatggcccggactgaatgtccctcttatgaaaaatggagcagtgcagaccattgcccaaagaagcaaggaagagcaggagaaggtggaggcagacatgatccagcagagagaagagtgggaccgaaagaagaagatgaaggttaaacgggagcgaggatggagtggaaactcatggggaggcatcagtcttggcccccctgaccctggtccctgtggagaaacatatgaggattttgataccaggatacttgaggtaagaaacgttttcactatgactgcgaaagagggaagaaagaaatcgatccgtgtcttggtggctgtggggaacggaaaaggagctgcaggtttttctattgggaaagctactgatcggatggatgctttcaggaaagcaaagaacagagcagttcaccatttgcattatatagaacgatatgaagaccatacaatattccatgatatttcattaagatttaaaaggacgcatatcaagatgaagaaacaacccaaaggttacggcctccgctgccacagggccatcatcaccatctgccggctcattggcatcaaagacatgtatgccaaggtctctgggtccattaatatgctcagcctcacccagggcctcttccgtgggctctccagacaggaaacccatcaacagctggctgataagaagggcctccatgttgtggaaatccgggaggaatgtggccctctgcccattgtggttgcgtccccccgggggcccttgaggaaggatccagagccagaagatgaggttccagacgtcaaactggactgggaagatgtgaagactgcacagggaatgaagcgctctgtgtggtctaatttgaagagagccgccacgtaacctctctggccttgtgcagccagttcctgtgctgccctgcacctaggagagactcagcccctcacagcttgggatgttaccttgccttttgtttgttttgagggaagtttaatctttaaactctttggaaataaataattatagctttca

SEQ ID NO: 54905 - DNA, 1610 bp, Homo sapiens
ggtcctaacgggaggcgcccgcggggctgtccgcggtcgcgccgggctccgcctgcagtgtggcccgtccggacagtccctcaccccggcctgcgctgctgcgtggactcgggcctcaggaattccgctgcggcccaaggcttgccgtttgacgaggagcagtcgcggtaggcggtgggcaaggctgccctgggcggaggccgaggcgcggctcggactccagcatggcgaccgcggtgcgcgctgtgggctgcctccccgtgctgtgtagcgggacggcaggtcatttattggggaggcagtgttccctaaacaccttaccagcagcttccattttggcatggaagagtgttctcggcaatggccatttgtcatcactgggaaccagagacacccatccctacgccagcttgagccgtgcactgcagacacaatgctgtatttcttctcccagtcacctgatgagccagcagtatagaccatatagtttcttcactaaattgactgcagatgagctgtggaaaggcgctttagcagagactggtgctggagcaaaaaaaggaagaggcaaaagaactaaaaagaagaaaagaaaggatctgaacaggggtcagatcattggtgaagggcgttatggttttctatggcccggactgaatgtccctcttatgaaaaatggagcagtgcagaccattgcccaaagaagcaaggaagagcaggagaaggtggaggcagacatgatccagcagagagaagagtgggaccgaaagaagaagatgaaggttaaacgggagcgaggatggaaaacatatgaggattttgataccaggatacttgaggtaagaaacgttttcactatgactgcgaaagagggaagaaagaaatcgatccgtgtcttggtggctgtggggaacggaaaaggagctgcaggtttttctattgggaaagctactgatcggatggatgctttcaggaaagcaaagaacagagcagttcaccatttgcattatatagaacgatatgaagaccatacaatattccatgatatttcattaagatttaaaaggacgcatatcaagatgaagaaacaacccaaaggttacggcctccgctgccacagggccatcatcaccatctgccggctcattggcatcaaagacatgtatgccaaggtctctgggtccattaatatgctcagcctcacccagggcctcttccgtgggctctccagacaggaaacccatcaacagctggctgataagaagggcctccatgttgtggaaatccgggaggaatgtggccctctgcccattgtggttgcgtccccccgggggcccttgaggaaggatccagagccagaagatgaggttccagacgtcaaactggactgggaagatgtgaagactgcacagggaatgaagcgctctgtgtggtctaatttgaagagagccgccacgtaacctctctggccttgtgcagccagttcctgtgctgccctgcacctaggagagactcagcccctcacagcttgggatgttaccttgccttttgtttgttttgagggaagtttaatctttaaactctttggaaataaataattatagctttca

SEQ ID NO: 54906 - DNA, 1693 bp, Homo sapiens
  misc_feature (1680)..(1680): n is a, c, g, or t
ggtcctaacgggaggcgcccgcggggctgtccgcggtcgcgccgggctccgcctgcagtgtggcccgtccggacagtccctcaccccggcctgcgctgctgcgtggactcgggcctcaggaattccgctgcggcccaaggcttgccgtttgacgaggagcagtcgcggtaggcggtgggcaaggctgccctgggcggaggccgaggcgcggctcggactccagcatggcgaccgcggtgcgcgctgtgggctgcctccccgtgctgtgtagcgggacggcaggtcatttattggggaggcagtgttccctaaacaccttaccagcagcttccattttggcatggaagagtgttctcggcaatggccatttgtcatcactgggaaccagagacacccatccctacgccagcttgagccgtgcactgcagacacaatgctgtatttcttctcccagtcacctgatgagccagcagtatagaccatatagtttcttcactaaattgactgcagatgagctgtggaaaggcgctttagcagagactggtgctggagcaaaaaaaggaagaggcaaaagaactaaaaagaagaaaagaaaggatctgaacaggggtcagatcattggtgaagggcgttatggttttctatggcccggactgaatgtccctcttatgaaaaatggagcagtgcagaccattgcccaaagaagcaaggaagagcaggagaaggtggaggcagacatgatccagcagagagaagagtgggaccgaaagaagaagatgaaggttaaacgggagcgaggatggagtggaaactcatggggaggcatcagtcttggcccccctgaccctggtccctgtggagaaacatatgaggattttgataccaggatacttgaggtaagaaacgttttcactatgactgcgaaagagggaagaaagaaatcgatccgtgtcttggtggctgtggggaacggaaaaggagctgcaggtttttctattgggaaagctactgatcggatggatgctttcaggaaagcaaagaacagagcagttcaccatttgcattatatagaacgatatgaagaccatacaatattccatgatatttcattaagatttaaaaggacgcatatcaagatgaagaaacaacccaaaggttacggcctccgctgccacagggccatcatcaccatctgccggctcattggcatcaaagacatgtatgccaaggtctctgggtccattaatatgctcagcctcacccagggcctcttccgtgggctctccagacaggaaacccatcaacagctggctgataagaagggcctccatgttgtggaaatccgggaggaatgtggccctctgcccattgtggttgcgtccccccgggggcccttgaggaaggatccagagccagaagatgaggttccagacgtcaaactggactgggaagatgtgaagactgcacagggaatgaagcgctctgtgtggtctaatttgaagagagccgccacgtaacctctctggccttgtgcagccagttcctgtgctgccctgcacctaggagagactcagcccctcacagcttgggatgttaccttgccttttgtttgttttgagggaagtttaatctttaaactctttggaaataaataattatagctttcaaaatgagcagacnaaggagcaccgat

SEQ ID NO: 54907 - DNA, 1588 bp, Homo sapiens
ggtcctaacgggaggcgcccgcggggctgtccgcggtcgcgccgggctccgcctgcagtgtggcccgtccggacagtccctcaccccggcctgcgctgctgcgtggactcgggcctcaggaattccgctgcggcccaaggcttgccgtttgacgaggagcagtcgcggtaggcggtgggcaaggctgccctgggcggaggccgaggcgcggctcggactccagcatggcgaccgcggtgcgcgctgtgggctgcctccccgtgctgtgtagcgggacggcaggtcatttattggggaggcagtgttccctaaacaccttaccagcagcttccattttggcatggaagagtgttctcggcaatggccatttgtcatcactgggaaccagagacacccatccctacgccagcttgagccgtgcactgcagacacaatgctgtatttcttctcccagtcacctgatgagccagcagtatagaccatatagtttcttcactaaattgactgcagatgagctgtggaaaggcgctttagcagagactggtgctggagcaaaaaaaggaagaggcaaaagaactaaaaagaagaaaagaaaggatctgaacaggggtcagatcattggtgaagggcgttatggttttctatggcccggactgaatgtccctcttatgaaaaatggagcagtgcagaccattgcccaaagaagcaaggaagagcaggagaaggtggaggcagacatgatccagcagagagaagagtgggaccgaaagaagaagatgaagaaacatatgaggattttgataccaggatacttgaggtaagaaacgttttcactatgactgcgaaagagggaagaaagaaatcgatccgtgtcttggtggctgtggggaacggaaaaggagctgcaggtttttctattgggaaagctactgatcggatggatgctttcaggaaagcaaagaacagagcagttcaccatttgcattatatagaacgatatgaagaccatacaatattccatgatatttcattaagatttaaaaggacgcatatcaagatgaagaaacaacccaaaggttacggcctccgctgccacagggccatcatcaccatctgccggctcattggcatcaaagacatgtatgccaaggtctctgggtccattaatatgctcagcctcacccagggcctcttccgtgggctctccagacaggaaacccatcaacagctggctgataagaagggcctccatgttgtggaaatccgggaggaatgtggccctctgcccattgtggttgcgtccccccgggggcccttgaggaaggatccagagccagaagatgaggttccagacgtcaaactggactgggaagatgtgaagactgcacagggaatgaagcgctctgtgtggtctaatttgaagagagccgccacgtaacctctctggccttgtgcagccagttcctgtgctgccctgcacctaggagagactcagcccctcacagcttgggatgttaccttgccttttgtttgttttgagggaagtttaatctttaaactctttggaaataaataattatagctttca

SEQ ID NO: 54908 - DNA, 906 bp, Homo sapiens
actcctgggctcaagcgatcctcccacctcagcctcctaaagtgctgagattacggatgtgaatcattacacccagcctattaatggttttgtatagcaagtcttttgtgggtggtggaaagatgaagtgctgtgaaatattgtaggagcagaaacttgaaatgtggcaaaaaccacatgggcaaaatttctgtctcttttcttatttttgcttttttgtttaaaggtttttctattgggaaagctactgatcggatggatgctttcaggaaagcaaagaacagagcagttcaccatttgcattatatagaacgatatgaagaccatacaatattccatgatatttcattaagatttaaaaggacgcatatcaagatgaagaaacaacccaaaggttacggcctccgctgccacagggccatcatcaccatctgccggctcattggcatcaaagacatgtatgccaaggtctctgggtccattaatatgctcagcctcacccagggcctcttccgtgggctctccagacaggaaacccatcaacagctggctgataagaagggcctccatgttgtggaaatccgggaggaatgtggccctctgcccattgtggttgcgtccccccgggggcccttgaggaaggatccagagccagaagatgaggttccagacgtcaaactggactgggaagatgtgaagactgcacagggaatgaagcgctctgtgtggtctaatttgaagagagccgccacgtaacctctctggccttgtgcagccagttcctgtgctgccctgcacctaggagagactcagcccctcacagcttgggatgttaccttgccttttgtttgttttgagggaagtttaatctttaaactctttggaaataaataattatagctttca

SEQ ID NO: 54909 - DNA, 816 bp, Homo sapiens
  misc_feature (10)..(10): n is a, c, g, or t
  misc_feature (72)..(72): n is a, c, g, or t
  misc_feature (77)..(77): n is a, c, g, or t
  misc_feature (140)..(140): n is a, c, g, or t
  misc_feature (142)..(142): n is a, c, g, or t
aaaacatcgnaatcccggttgttcttttgggtgggcttggtggggggaaacaggaaaaaaaaggaagcttgncaagngttttttttcttaatttggggaaaaagcttaacttgaatcgggaatgtgaatgccttttcaangnaaaagcaaaaagaaacaagaagcaagtttcaaccaatcttgcaattaataatagaaacgaataatgaaagaaccaatacaaataattccaatgaataatttcaattaaagaatttaaaaaggaacgcaatatcaaagaatgaaagaaaacaaaccacaaaaggttacggcctccgctgccacagggccatcatcaccatctgccggctcattggcatcaaagacatgtatgccaaggtctctgggtccattaatatgctcagcctcacccagggcctcttccgtgggctctccagacaggaaacccatcaacagctggctgataagaagggcctccatgttgtggaaatccgggaggaatgtggccctctgcccattgtggttgcgtccccccgggggcccttgaggaaggatccagagccagaagatgaggttccagacgtcaaactggactgggaagatgtgaagactgcacagggaatgaagcgctctgtgtggtctaatttgaagagagccgccacgtaacctctctggccttgtgcagccagttcctgtgctgccctgcacctaggagagactcagcccctcacagcttgggatgttaccttgccttttgtttgttttgagggaagtttaatctttaaactctttggaaataaataattatagctttca

SEQ ID NO: 54910 - DNA, 467 bp, Homo sapiens
actctagatatcccctataggcgcggtaggtctctgggtccattaatatgctcagcctcacccagggcctcttccgtgggctctccagacaggaaacccatcaacagctggctgataagaagggcctccatgttgtggaaatccgggaggaatgtggccctctgcccattgtggttgcgtccccccgggggcccttgaggaaggatccagagccagaagatgaggttccagacgtcaaactggactgggaagatgtgaagactgcacagggaatgaagcgctctgtgtggtctaatttgaagagagccgccacgtaacctctctggccttgtgcagccagttcctgtgctgccctgcacctaggagagactcagcccctcacagcttgggatgttaccttgccttttgtttgttttgagggaagtttaatctttaaactctttggaaataaataattatagctttca

SEQ ID NO: 54911 - DNA, 922 bp, Homo sapiens
ggtcctaacgggaggcgcccgcggggctgtccgcggtcgcgccgggctccgcctgcagtgtggcccgtccggacagtccctcaccccggcctgcgctgctgcgtggactcgggcctcaggaattccgctgcggcccaaggcttgccgtttgacgaggagcagtcgcggtaggcggtgggcaaggctgccctgggcggaggccgaggcgcggctcggactccagcatggcgaccgcggtgcgcgctgtgggctgcctccccgtgctgtgtagcgggacggcaggtcatttattggggaggcagtgttccctaaacaccttaccagcagcttccattttggcatggaagagtgttctcggcaatggccatttgtcatcactgggaaccagagacacccatccctacgccagcttgagccgtgcactgcagacacaatgctgtatttcttctcccagtcacctgatgagccagcagtatagaccatatagtttcttcactaaattgactgcagatgagctgtggaaaggcgctttagcagagactggtgctggagcaaaaaaaggaagaggcaaaagaactaaaaagaagaaaagaaaggatctgaacaggggtcagatcattggtgaagggcgttatggttttctatggcccggactgaatgtccctcttatgaaaaatggagcagtgcagaccattgcccaaagaagcaaggaagaactgcacagggaatgaagcgctctgtgtggtctaatttgaagagagccgccacgtaacctctctggccttgtgcagccagttcctgtgctgccctgcacctaggagagactcagcccctcacagcttgggatgttaccttgccttttgtttgttttgagggaagtttaatctttaaactctttggaaataaataattatagctttca

SEQ ID NO: 54912 - DNA, 2949 bp, Homo sapiens
ggtcctaacgggaggcgcccgcggggctgtccgcggtcgcgccgggctccgcctgcagtgtggcccgtccggacagtccctcaccccggcctgcgctgctgcgtggactcgggcctcaggaattccgctgcggcccaaggcttgccgtttgacgaggagcagtcgcggtaggcggtgggcaaggctgccctgggcggaggccgaggcgcggctcggactccagcatggcgaccgcggtgcgcgctgtgggctgcctccccgtgctgtgtagcgggacggcaggtcatttattggggaggcagtgttccctaaacaccttaccagcagcttccattttggcatggaagagtgttctcggcaatggccatttgtcatcactgggaaccagagacacccatccctacgccagcttgagccgtgcactgcagacacaatgctgtatttcttctcccagtcacctgatgagccagcagtatagaccatatagtttcttcactaaattgactgcagatgagctgtggaaaggcgctttagcagagactggtgctggagcaaaaaaaggaagaggcaaaagaactaaaaagaagaaaagaaaggatctgaacaggggtcagatcattggtgaagggcgttatggttttctatggcccggactgaatgtccctcttatgaaaaatggagcagtgcagaccattgcccaaagaagcaaggaagagcaggagaaggtggaggcagacatgatccagcagagagaagagtgggaccgaaagaagaagatgaaggttaaacgggagcgaggatggagtggaaactcatggggaggcatcagtcttggcccccctgaccctggtccctgtggagaaacatatgaggattttgataccaggatacttgaggtaagaaacgttttcactatgactgcgaaagagggaagaaagaaatcgatccgtgtcttggtggctgtggggaacggaaaaggagctgcaggtttttctattgggaaagctactgatcggatggatgctttcaggaaagcaaagaacagagcagttcaccatttgcattatatagaacgatatgaagaccatacaatattccatgatatttcattaagatttaaaaggacgcatatcaagatgaagaaacaacccaaaggttacggcctccgctgccacagggccatcatcaccatctgccggctcattggcatcaaagacatgtatgccaaggtctctgggtccattaatatgctcagcctcacccagggcctcttccgtgggctctccagacaggaaacccatcaacagctggctgataagaagggcctccatgttgtggaaatccgggaggaatgtggccctctgcccattgtggttgcgtccccccgggggcccttgaggaaggatccagagccagaagatgaggttccagacgtcaaactggactgggaagatgtgaagactgcacagggaatgaagcgctctgtgtggtctaatttgaagagagccgccacgtaacctctctggccttgtgcagccagttcctgtgctgccctgcacctaggagagactcagcccctcacagcttgggatgttaccttgccttttgtttgttttgagggaagtttaatctttaaactctttggaaataaataattatagctttcatttgttgagcacatgttatatgccaatgtgatagaacctttacatacatatctcagttcaagactactttaaatattcatccaaagtaacaaaagtaaatgaattagggagacggggttaataatttgacccaatcagtaataatgtacacaatgataattgctgtagtaattatagctaatatatatgaactcattcatccaaagtgaatgtgattaacttcattttacagagcagttaagtaacttgactaccgtgaggaacttccaaaccgttttccacagtggaaatggaagttgtaggctactattgggaatgttaaatggtatattaattgtataccattgcaattttgacttgtatttccctgatggctgatgatgttgaacatcttttcatgtgctgatgtggccatttgtatatgttttttggagaaatgtctattcagagcctttgcccatttaaaaagttattttttattattattgagttccttatagtttctagatataagcccccctatcatacatgctttacagaagtttttacccattctgtggaatatatatatttttatttctttgcatactctttctgccccacccacatcctctttctgggacactgatgaccaaaatgttgaatcttttactattgtcccgtgagtccctgaggcgctgtttattttttttccagtctgttttctctgtgttgctcagtttaggtaatttctattgttttatcttcagaataactggttatttactctttcctttccattctgctcttgaaccatccatgcagtactttaactttgactgtcattgtatatttcagttaaaatttccatttggtttattttttatgtcttctctttatttgctgaggctatttgctgagactttttttttctttaaatggcttcaagagtgtttataattgctcactgaagcatttttatggtggctgctttaaaatctttgtcatcaggtaggtgtggtggctcacgcctataaccccagcactttgtgaaggtgaggcaggaggattgcttcagcccaggagtttgagatcagcctaggcaacaaagtgagacctcatctctacaaaaagtaaaagtaaatttaaaagttagacacacatggtggtgtatgcctgtagtcccagctacataggaggctgaagtgggaggatcatttgattgcaggaggttgaggctgcagtgagccttgttcatgccactccagcctgggtggcagagtgagaccttgtctccaaaaaa

SEQ ID NO: 54913 - DNA, 1388 bp, Homo sapiens
ggtcctaacgggaggcgcccgcggggctgtccgcggtcgcgccgggctccgcctgcagtgtggcccgtccggacagtccctcaccccggcctgcgctgctgcgtggactcgggcctcaggaattccgctgcggcccaaggcttgccgtttgacgaggagcagtcgcggtaggcggtgggcaaggctgccctgggcggaggccgaggcgcggctcggactccagcatggcgaccgcggtgcgcgctgtgggctgcctccccgtgctgtgtagcgggacggcaggtcatttattggggaggcagtgttccctaaacaccttaccagcagcttccattttggcatggaagagtgttctcggcaatggccatttgtcatcactgggaaccagagacacccatccctacgccagcttgagccgtgcactgcagacacaatgctgtatttcttctcccagtcacctgatgagccagcagtatagaccatatagtttcttcactaaattgactgcagatgagctgtggaaaggcgctttagcagagactggtgctggagcaaaaaaaggaagaggcaaaagaactaaaaagaagaaaagaaaggatctgaacaggggtcagatcattggtgaagggcgttatggttttctatggcccggactgaatgtccctcttatgaaaaatggagcagtgcagaccattgcccaaagaagcaaggaagagcaggagaaggtggaggcagacatgatccagcagagagaagagtgggaccgaaagaagaagatgaaggttaaacgggagcgaggatggagtggaaactcatggggaggcatcagtcttggcccccctgaccctggtccctgtggagaaacatatgaggattttgataccaggatacttgaggtaagaaacgttttcactatgactgcgaaagagggaagaaagaaatcgatccgtgtcttggtggctgtggggaacggaaaaggagctgcaggtgaatggggagtgatggcatcacagtggcggtggtgtgcagggaaaggcgtggcacgggccatgctgtggagcccatgggctcatgctgctggccggactttttccattgattaaaccttttagtggtttgggttcacaaagcttgtggtaagtccatgacttcccttagagagaaaagagagaatagattctactgtacttgccttttcctctgaggaaaaggaatattataaaaggctgaagacattattttattatgtataatagtggaaaattagggagaaaaactaaatgttcaatagggccatggttataaaaacagtgtagccatacactgtaatattctgtatccattaaagaattatgggaaattagttttaaaataatgctaagttaaaa

SEQ ID NO: 54914 - DNA, 2204 bp, Homo sapiens
ggtcctaacgggaggcgcccgcggggctgtccgcggtcgcgccgggctccgcctgcagtgtggcccgtccggacagtccctcaccccggcctgcgctgctgcgtggactcgggcctcaggaattccgctgcggcccaaggcttgccgtttgacgaggagcagtcgcggtaggcggtgggcaaggctgccctgggcggaggccgaggcgcggctcggactccagcatggcgaccgcggtgcgcgctgtgggctgcctccccgtgctgtgtagcgggacggcaggtcatttattggggaggcagtgttccctaaacaccttaccagcagcttccattttggcatggaagagtgttctcggcaatggccatttgtcatcactgggaaccagagacacccatccctacgccagcttgagccgtgcactgcagacacaatgctgtatttcttctcccagtcacctgatgagccagcagtatagaccatatagtttcttcactaaattgactgcagatgagctgtggaaaggcgctttagcagagactggtgctggagcaaaaaaaggaagaggcaaaagaactaaaaagaagaaaagaaaggatctgaacaggggtcagatcattggtgaagggcgttatggttttctatggcccggactgaatgtccctcttatgaaaaatggagcagtgcagaccattgcccaaagaagcaaggaagaactgcacagggaatgaagcgctctgtgtggtctaatttgaagagagccgccacgtaacctctctggccttgtgcagccagttcctgtgctgccctgcacctaggagagactcagcccctcacagcttgggatgttaccttgccttttgtttgttttgagggaagtttaatctttaaactctttggaaataaataattatagctttcatttgttgagcacatgttatatgccaatgtgatagaacctttacatacatatctcagttcaagactactttaaatattcatccaaagtaacaaaagtaaatgaattagggagacggggttaataatttgacccaatcagtaataatgtacacaatgataattgctgtagtaattatagctaatatatatgaactcattcatccaaagtgaatgtgattaacttcattttacagagcagttaagtaacttgactaccgtgaggaacttccaaaccgttttccacagtggaaatggaagttgtaggctactattgggaatgttaaatggtatattaattgtataccattgcaattttgacttgtatttccctgatggctgatgatgttgaacatcttttcatgtgctgatgtggccatttgtatatgttttttggagaaatgtctattcagagcctttgcccatttaaaaagttattttttattattattgagttccttatagtttctagatataagcccccctatcatacatgctttacagaagtttttacccattctgtggaatatatatatttttatttctttgcatactctttctgccccacccacatcctctttctgggacactgatgaccaaaatgttgaatcttttactattgtcccgtgagtccctgaggcgctgtttattttttttccagtctgttttctctgtgttgctcagtttaggtaatttctattgttttatcttcagaataactggttatttactctttcctttccattctgctcttgaaccatccatgcagtactttaactttgactgtcattgtatatttcagttaaaatttccatttggtttattttttatgtcttctctttatttgctgaggctatttgctgagactttttttttctttaaatggcttcaagagtgtttataattgctcactgaagcatttttatggtggctgctttaaaatctttgtcatcaggtaggtgtggtggctcacgcctataaccccagcactttgtgaaggtgaggcaggaggattgcttcagcccaggagtttgagatcagcctaggcaacaaagtgagacctcatctctacaaaaagtaaaagtaaatttaaaagttagacacacatggtggtgtatgcctgtagtcccagctacataggaggctgaagtgggaggatcatttgattgcaggaggttgaggctgcagtgagccttgttcatgccactccagcctgggtggcagagtgagaccttgtctccaaaaaa

SEQ ID NO: 54915 - DNA, 326 bp, Homo sapiens
ttgagaaaactgcagaagctggaaggtcaatctctgaccttctttcctgagacaccttcatgtgacaggtgtcccactttatgcctggagggaaggaatgataacacaaagataccaagaagaatgtgaagagacctttctcagttccccccagttcaagaccattatatcgtacccacttttgtctaatcatgcttctatatgactatccattctttatcaaaactaaacatagaaatatacgattatctcaatttctgtctttgtttctgaaggctcctgtgtcacataaaacttacattaaataaatttgtatgtctctcttg

SEQ ID NO: 54916 - DNA, 606 bp, Homo sapiens
  misc_feature (577)..(578): n is a, c, g, or t
gcattctcgtggctcactacggcctcaacctcctgggctcaaatgagcctcccacttcagtgcctcctaagtagctaggactacagcatagcttggaggagactgcagcctcggactctcacctgcctcttttctgcgccgatgggagttccagaacggcggcggtggccacaggtctgatagcccagccgcagtgccaaggacgtgcagggcgaggccttcttgggcagctttgtggccagcgggatggggccctcggcctcgtcccatgggagcccagtgccactgccctctgacctgtctttccgctccccaacccctagcaacctgcccatggtgcagctgtgggccgcccacgcccatgaaggcttctcccacctgcccagtgggctgtacccatcctacctccacctgaaccacctggagccccccagcagtgggagccccctcctcagccagctgggtcagcccagcattttcgatacccagaaaggtcaggggccaggaggagacggttctacctgcccaccggggggctccgggctccctgcactctcacgcgcctcggccggacccnncggggcactcctcgggcgccccggcaag

SEQ ID NO: 54917 - DNA, 358 bp, Homo sapiens
gcattctcgtggctcactacggcctcaacctcctgggctcaaatgagcctcccacttcagtgcctcctaagtagctaggactacaggtgcgttccaccacacctggctaactgttaaattttttttagacatggggtctctcgctatgttgcccaggctggtcttgaactcctgagctcaaataatcctcttgcctggacttccctaagtgctgagattataggtgtgagttaccatgcccagccagccttctggtcccttgatgcatttttttcacttgtcatatctattggatgagctgctttgttttttttggagatttccttcctggaattttccatcttccttctctagtctg

SEQ ID NO: 54918 - DNA, 707 bp, Homo sapiens
  misc_feature (330)..(331): n is a, c, g, or t
cggaggcgttgaatggcccggaggcgttgaatggcccactgccctctgacctgtctttccgctccccaacccctagcaacctgcccatggtgcagctgtgggccgcccacgcccatgaaggcttctcccacctgcccagtgggctgtacccatcctacctccacctgaaccacctggagccccccagcagtgggagccccctcctcagccagctgggtcagcccagcattttcgatacccagaaaggtcaggggccaggaggagacggttctacctgcccaccggggggctccgggctccctgcactctcacgcgcctcggccggacccnncgcagatggccgtgctggccgcgcagcaccaccacagccgcgccgaagaggaggccgccgtggtcgctgcctcctcctccaagaaggcctacctggaccctggggctgtgctgccccgctcggcggccacctgcggccggccggtcgctgacatgcactctgcggcccacgggcctggagaggcctcggccatgcagagccttataaagtacagtggcagctttgcccgggacgccgtggccgtgcgccctggtggctgtggcaagaagagcccctttggaggtttgggcaccatgaaacccgagcctgcgcccacctctgcgggtgcctcccgagcccaggcccgtctcccacactccggaggccctgcagcggg

SEQ ID NO: 54919 - DNA, 203 bp, Homo sapiens
gttgatctgggctggtggctactgcagtcttggtcctggttctggtcccagcatagcttggaggagactgcagcctcggactctcacctgcctcttttctgcgccgatgggagttccagaacggcggcggtggccacaggtctgatagcccagccgcagtgccaaggacgtgcagggtgagccccctgtcccaccaccccagc

SEQ ID NO: 54920 - DNA, 627 bp, Homo sapiens
gcggccgccccccgcggatgcccccacggtgcgggccacacgcgcctccccggacccccgcgcctacgtgcctgccaaggagctgctcaagcccgaggcggacccgaggccctgcgagcgtgcgccccgcggcccagccggtcctgcagcccaacaggccgccaagctcttcggcctggagcccgggcgccccccgcccaccggccctgagcataaatggaaacccttcgagctgggcaacttcgccgccacgcagatggccgtgctggccgcgcagcaccaccacagccgcgccgaagaggaggccgccgtggtcgctgcctcctcctccaagaaggcctacctggaccctggggctgtgctgccccgctcggcggccacctgcggccggccggtcgctgacatgcactctgcggcccacgggcctggagaggcctcggccatgcagagccttataaagtacagtggcagctttgcccgggacgccgtggccgtgcgccctggtggctgtggcaagaagagcccctttggaggtttgggcaccatgaaacccgagcctgcgcccacctctgcgggtgcctcccgagcccaggcccgtctcccacactccggaggccctgcagcggg

SEQ ID NO: 54921 - DNA, 190 bp, Homo sapiens
cggaggcgttgaatggcccggaggcgttgaatggcccactgccctctgacctgtctttccgctccccaacccctagcaacctgcccatggtgcagctgtgggccgcccacgcccatgaaggtaaggaacatgccggggtcggggctgagggctgctgggctgacgtcccagccactctggccacttcatg

SEQ ID NO: 54922 - DNA, 384 bp, Homo sapiens
gaccctcctgcctcagccttccaaagtgttgggattataggtgtgagccactgcaccccaccactaattcctgctctccttatatcaatttatgacattcagggttgaagatgggcccctacccagaaacatatgcccttgagaagaggattcacagagaccctttaagagccaaaccaacaaagccgtgaaggcaatggtggaataattaacaatgaggttgatatttctgaggtgcacttgttcagcctgccctgcccccttctccatggggtaactgggccctaggcttctcctgagaaccatccctttctgataggtcctattatgaaagtcttccacaagtcttacttggatacactcgtaaagtaggctgtgactgtc

SEQ ID NO: 54923 - DNA, 162 bp, Homo sapiens
acgtcaccagtgttttcaaagaaaaggactagcaaattaagctaacaattggttaatttttcattacccaaattaaattacccatttacctacatgcgtttataggctgtatcttaaagacttgtctgaggagaaagagaagtttgctttagtggctggcaa

SEQ ID NO: 54924 - DNA, 212 bp, Homo sapiens
tggacatgcaaataacagccgattaaattaagaccctaataggtgcatgtggaaagcatttatgtgcaatgtggtgcacttcctcttggcacctttttctgtgtctttgcagagataccagttttttctgagtgactcagggtgaatactgggcactgagaatgctgtattcagagtcattactgtgaacatggttaatacatttcttccat

SEQ ID NO: 54925 - DNA, 244 bp, Homo sapiens
tccaaatacataccaaatttttggcttcccagaaatcaatttaataatttgaattttattacaatgtaggcactgtgataggtgttgggaggatctaagatgagaaagatattgtcagtgctttcgaagtgctcacagttcttaccctccattttactacctcacatggcattattaattaatgcactcagatctcttgctaaccagaatgtaatgttttgatgtgaaagattttatacatcat

SEQ ID NO: 54926 - DNA, 145 bp, Homo sapiens
agcgagattacaaaggatagtgtctattgaagggtcagggacatgaaagcaaaagagacccaacaaatggaatgaaaatggaaagtaattgataaagactgcataattttaagacttagggaaaagaagaaaagaaaagctctaa

SEQ ID NO: 54927 - DNA, 2077 bp, Homo sapiens
  misc_feature (928)..(929): n is a, c, g, or t
gtgctacagtgacagaggcaaatagttgcagcagagactataggacctccaaaatgtcaaccatttaccatctggccctttagagaagtctgctgacccttggcccagggctacagttttctcatctataaagtgaagttcaggtttttttcatctttgacatttgagactatctataagccatatatttttattataaaactgccagagagaaggtttggtttgtatatataggtgtacattgtttgtaagcttttaggcgaatgtattttatgactctgttttgtcttagctggctacggtccttgaaaatattcttcagaatgactgaattgcatcacgggatgaaagagccacggggtctcacagctgagttctcagggactttgctgatgtgcttcctttcttggtgtccttggaatgacacccagcaggtgtcccagggtggattgtggggctcagcctgtgaggatattgagagctgggtttttgtccaggccctggctggcagctgggaatgaaggcagtgatcgaaggcagaccaagcatagtctcctttccatccccagtgacttcgtaaggaggtgagagaaaagggccccggttgttacatggggtcctttagctcctgttaagaatcagacagttggccgggcgtggtggctcacgcctgtaatctcagcactttgggaggctgaggcgggcagatcacgaggtcaggagatcgagaccatcctggctaacacggtgaaaccccgtctctactaaaaatacaaaaaattagctgggcgtggtggtgcatgcctgtaatcccagctattcaggaggctgaggcgggagaatggtatgaaccagggaggcggaacttgcagtgagccaagatcatgccactgcactccagcctgggtgacagagtgagactccgtcnnaaaaaaaaaaaaagaatcagaccgttgtagggagtattttgccttcacataccagacatgagacatgagagcagccttcctcctaggcttctgagaagagggcctgcttagcccaaagagagctgacaccacaaaaagctcccctgaagtgaatccacttaaaacggggaccaaaatttcatatgtggtggacactgggggataggggaaacctgaatggaactttaatcatgaaaatggaacaaaatgacaaaagcatgttcataattttaaagatatattaattctgacaaggaaattaagttgtttttgaagtgaaactgattttgtatcttacaataattttctcatttgatttttgcaacgtgatcatagaaggaagttttgcaaaaatatttgagggcttcatcagttttcagaaggcctcttgatattttgatattcacattcttttttataagtatctatcggtgatcacctcctcaactttccttttattgttaactggtctgagtctgtcacccacacttttcagagcttttgcttaaggtttgagcagttttctagcattatttatcaacttcatcaaatccaccaccatttgcaagatttgtgattattgcaattaagttgcattctatttgtgtcatttgtcatatgcttacagtataaccatagagactaacagaagaccagaatacagtgggcaggataaatacattggcttcaggtacttaagaagcaaagagggactaactttttataaatagctcattagtgaatgttttcacattgggatgactttcacttctctatataatttggtagctgcaaggacttggttaatgaatatgcaaataataaagacccccttttatttataatgcagatatgttttaataatgtacatgccctttgaacttagcatttacacttctcagaagtcttcagcctgagcaacatagctggggactcttgactctacattagccaggtgtggtggtgcatgccttgtagtcccagctgcttgggaggctgaggtgggaggatctcttgagcccaggagttcaaggctgcagtgagtcatggttgtgccactgcattccagcctgggtgacatagtgagaccctgtctcataaaaaaaaaa

SEQ ID NO: 54928 - DNA, 4994 bp, Homo sapiens
gcgcgcagggtgccaagccctcccctacgaagtctgttttgtctcaggctgggctgagtcacatagaatagatagatagttgatttagcacatgtcctccagatcatattatccgcctacaaatatagcctgttagcgcacaggcacgggaggcttcttccggctcggccgtgctgctcagcgggtgtaaacagcctctgcggtgtaaacagcctctgcggtgtaaacagccgcggcgggcaggccaggactgtcagtgcccgcccctcggggcaggtgtaatttcatgctcccaaaatgggacataaagtggttgtcttcgacatttctgtcatcagagccttgtgggaaactcgtgtcaagaagcacaaagcttggcagaagaaggaggtggaaaggcttgagaagagcgccttggagaagataaaggaggagtggaactttgtggccgaatgcaggaggaagggcatcccccaggctgtatactgcaagaatggcttcatagacaccagcgtgcggcttctggacaagattgaaaggaacactctcacaaggcagagttcacttcccaaggacagaggcaaacggagcagtgcgtttgtgtttgaactttctggggagcactggacggagctcccagattcattgaaggagcagacacacctgagagaatggtacataagcaataccttgattcaaatcattcctacatatattcagttatttcaagagatgagaattctggatctgccaaaaaaccaaatctcacatcttccagcagaaatcggttgtttgaagaacctgaaagaactcaatgtgggtttcaactatctgaagagcattcctccagaattgggagattgtgaaaatctagagagactggattgttctggaaatctagaattaatggagctgccctttgaattaagtaatttgaagcaagttacatttgtagatatctcagcaaacaagttttccagtgtcccaatctgtgtcctgcggatgtcgaatttgcagtggttggatatcagcagcaataacctgaccgacctgccgcaagatatagacaggctagaggagctgcagagctttctcttgtataaaaacaagttgacctaccttccctattccatgctgaacctgaagaagctcactctgttagtcgtcagtggggaccatttggtggagctcccaactgccctttgtgactcatccacacctttaaaatttgtaagccttatggacaatcctattgataatgcccaatgtgaagatggcaatgaaataatggaaagtgaacgggatcgccaacattttgataaagaagttatgaaagcctatattgaagaccttaaagaaagagaatctgttcccagctataccaccaaagtgtcttttagccttcaactttgatatccatcagaagactgcaaatctcactattctctggagctatatataaatctttgttatgatcatgtcatataggaagaatggcttgtgcttaaggacaaagtctagaaaccactatcatagttgctaaaaaaaatggttttcaaatgtcaaatacatgagtatctccctccatggactggagaattgaaaaattggtttgtatattgatatttccaggttcatttgcatatacttttttccaaataatgcacatttaatatgttttaaaatgtcttatttttaagaattataactaaaagaccaaatactgaagttaagtgcattgttttcaggaatcaaaagataaaggggccgggtgtggtggctcacacctgtaatcccagcactttgggaggccgaagtgggtggatcacctgaggtccggagttcgaggctggtttggccagcatggcgaaaccccatctctactaaaaatacaaaaaattagctgggcatggtggcagttgcctgtaatcctagctactcaggaggctgaggcaggagaatcgcttgaacctgggaggtggagttgcagtgagccgagatcatgggactgcactccagcctgggtgacagagccagactctgtctcaaaaaaaaaaaaaaagaaaagaaaaagataaagggattgtgaaaagagcatttatattggactaatcagatgagagtgttttgttattttgaaagagtttcttttactgagaataatcttccttgagtttatataaactgctatttccatatgttttaagttatattttggcaagtgtagactcccaggagagacttgtaggtacaatctaggccttgaagaaacaaaggctggaatatctgcccatgctttgggcatgagatgctcagatggtgcgtgggtagatctagttgaggaagtgtgggcctggctgttcatgggaagtcttcagtggccttcatggatggccatccagtcctgagtggtcaccctgggggtcctgggacacacctcagtaaagagcaaaggcaacgccctcagggtcccttcctccaagatggccatgtagggtaatggagatgaccagtccacactgataaggagttcctagcaaggcttccttgtgggtaccacaggacaactctgcccatagcaaagatgcttcagtccagagggagcccatgggctgtttgaatttgggagaggtgggattcattacaagactttgggctcttatgtcacatcacatgatttggagaaattagacacaatctcttatttttataccactgtcttgggctaaaataaacaggttgtggctgatggtgttgaagataaataagcttaaacaaataactttggccgggcacggtggctcacacctataatcccagcactatgggaggctgaggcaagcaggttgtttgagcccaggaatttgagaacaggattttgagaacagcttggacatcatgacgaaaccccatctccacaaaaaaattcaaaaaattagccaggtgtggtggcatgtgcctgtggtcccagctactcaggaggctgaggtgggaaaatcacttgagcccaggaggtcgaggctgcagtgtgctgtgattgtgacactgccctccagcctgggtgacagagtgagaccctgtctcaaaagcaaaacaaacagcaataacaatattattattgttataactaaaaaaaaaaaaacaaaaacaagcagcttttgtgactaagaaggaaaatatgcatatagtggcatatttttatatgaatcatctcctctgtggtcttgcccagtaccatccagtggagctttctgcagtgacggaaatgttctgtatttgcgttgtccaacgtggtaaaccagacacatgtgattcttgagcacttgaacaatgactgatgtgattgaagaacccatctttcaattcaattaaatttaaatagccacatttaactccagccttgggtttgacctgatggaaaattcccatgagagagtgctccaaaccgttccaaggtggggccagttgcgattctaaaggaagaagcactaaatggcagggtgatcagtccaaagcatttatgaggggagcttacatacagcatgggctgcagcgtccttgtgatgggcagtgagacaagggatgttctacctgggcatgtccccagcgagggggttgggggatggagttcacatgaagatgtaaggaatttgggtgggggctgggctggcttctacatgtttagcaacacggctgatctttcagtgtttccagcaacaacctaagcaccgttatcagtgcctaggaatgttcaaggcccaggctggggttcagacctgcagaggaaaacatcagctggctgggtcaaggcaccatgtgttacttggtcaggacagagacaaaaatgaggaaaactaggggaccccacacacatgtggctaccatactcctgaacaggtctagctagttatttgtttttttggaagttaatctggggtagaaatgtatggtgatttttattttctctgtctgaagaaccagccatttttaaaaaggttattattgacatcccaatattttgtcttggtgggcttactcataagtccaaacattttattctcaacaggtgtaaaacaggcagagcattctaaaaccacatggtagtgctttggtggaggactgcttccacttagaaacaaactctgagaagtaggctaagagaagacaagagggccgggcgcggtgactcacgcctataatcccagcactttgggaggccgagatgggtgaatcatgaggtcaggagttcgagaccagcctaaacaacatagtgaaaccctgtctctattaaaaatgcaaaaaattagccgggcgtggtgggcacccgtaatcccagctactcaggaggctgaggcaggagaattgcttgaacccaggaagcagaggttgcagtaagctgagatcccaccattgcactccagcctgggcaacagagtgagactccatctcaaaaaaaaaaagagagagagatgaaaagagtaggaaaatgagaaatcaccttcgttgaatcttaaatagttacatttttttctttttaacactaaaaatacaattcaaatttattagctctactacttgaatgattttggaattttatgtcatgctaaggtatgtgttacatatggccaagtggaaaatatatctgaagaggggctttcatacaaatagactgttcataatttatgtaaattttattttaataaaatcagttttttgtttaaaaaccttgtttcactgtcacatatgaaaaaaatactgcattgatatataattatttcatgttacataataacccaaaacaaataattacttgaatatgtttgtagagatactatttaatttattcatataaatgtgcagaaagattccaaaggagaatatatatcttgtgaaaatatggagatttgaaaatttgacatgatgcaaatagactgatacataatttggaaaggttctttacatggcagaatacatgtatgaatattaaagtaata

SEQ ID NO: 54929 - DNA, 4863 bp, Homo sapiens
aaagaggagaacctccgcttaccacagccgggtagaaatgcctgaggaaagcagcggagcgtgaccgtgccagcatttacacagggaacacttcttgggcagccaggtgtcatggggcacagacccacagttcctgagaatgaacaggtaatttcatgctcccaaaatgggacataaagtggttgtcttcgacatttctgtcatcagagccttgtgggaaactcgtgtcaagaagcacaaagcttggcagaagaaggaggtggaaaggcttgagaagagcgccttggagaagataaaggaggagtggaactttgtggccgaatgcaggaggaagggcatcccccaggctgtatactgcaagaatggcttcatagacaccagcgtgcggcttctggacaagattgaaaggaacactctcacaaggcagagttcacttcccaaggacagaggcaaacggagcagtgcgtttgtgtttgaactttctggggagcactggacggagctcccagattcattgaaggagcagacacacctgagagaatggtacataagcaataccttgattcaaatcattcctacatatattcagttatttcaagagatgagaattctggatctgccaaaaaaccaaatctcacatcttccagcagaaatcggttgtttgaagaacctgaaagaactcaatgtgggtttcaactatctgaagagcattcctccagaattgggagattgtgaaaatctagagagactggattgttctggaaatctagaattaatggagctgccctttgaattaagtaatttgaagcaagttacatttgtagatatctcagcaaacaagttttccagtgtcccaatctgtgtcctgcggatgtcgaatttgcagtggttggatatcagcagcaataacctgaccgacctgccgcaagatatagacaggctagaggagctgcagagctttctcttgtataaaaacaagttgacctaccttccctattccatgctgaacctgaagaagctcactctgttagtcgtcagtggggaccatttggtggagctcccaactgccctttgtgactcatccacacctttaaaatttgtaagccttatggacaatcctattgataatgcccaatgtgaagatggcaatgaaataatggaaagtgaacgggatcgccaacattttgataaagaagttatgaaagcctatattgaagaccttaaagaaagagaatctgttcccagctataccaccaaagtgtcttttagccttcaactttgatatccatcagaagactgcaaatctcactattctctggagctatatataaatctttgttatgatcatgtcatataggaagaatggcttgtgcttaaggacaaagtctagaaaccactatcatagttgctaaaaaaaatggttttcaaatgtcaaatacatgagtatctccctccatggactggagaattgaaaaattggtttgtatattgatatttccaggttcatttgcatatacttttttccaaataatgcacatttaatatgttttaaaatgtcttatttttaagaattataactaaaagaccaaatactgaagttaagtgcattgttttcaggaatcaaaagataaaggggccgggtgtggtggctcacacctgtaatcccagcactttgggaggccgaagtgggtggatcacctgaggtccggagttcgaggctggtttggccagcatggcgaaaccccatctctactaaaaatacaaaaaattagctgggcatggtggcagttgcctgtaatcctagctactcaggaggctgaggcaggagaatcgcttgaacctgggaggtggagttgcagtgagccgagatcatgggactgcactccagcctgggtgacagagccagactctgtctcaaaaaaaaaaaaaaagaaaagaaaaagataaagggattgtgaaaagagcatttatattggactaatcagatgagagtgttttgttattttgaaagagtttcttttactgagaataatcttccttgagtttatataaactgctatttccatatgttttaagttatattttggcaagtgtagactcccaggagagacttgtaggtacaatctaggccttgaagaaacaaaggctggaatatctgcccatgctttgggcatgagatgctcagatggtgcgtgggtagatctagttgaggaagtgtgggcctggctgttcatgggaagtcttcagtggccttcatggatggccatccagtcctgagtggtcaccctgggggtcctgggacacacctcagtaaagagcaaaggcaacgccctcagggtcccttcctccaagatggccatgtagggtaatggagatgaccagtccacactgataaggagttcctagcaaggcttccttgtgggtaccacaggacaactctgcccatagcaaagatgcttcagtccagagggagcccatgggctgtttgaatttgggagaggtgggattcattacaagactttgggctcttatgtcacatcacatgatttggagaaattagacacaatctcttatttttataccactgtcttgggctaaaataaacaggttgtggctgatggtgttgaagataaataagcttaaacaaataactttggccgggcacggtggctcacacctataatcccagcactatgggaggctgaggcaagcaggttgtttgagcccaggaatttgagaacaggattttgagaacagcttggacatcatgacgaaaccccatctccacaaaaaaattcaaaaaattagccaggtgtggtggcatgtgcctgtggtcccagctactcaggaggctgaggtgggaaaatcacttgagcccaggaggtcgaggctgcagtgtgctgtgattgtgacactgccctccagcctgggtgacagagtgagaccctgtctcaaaagcaaaacaaacagcaataacaatattattattgttataactaaaaaaaaaaaaacaaaaacaagcagcttttgtgactaagaaggaaaatatgcatatagtggcatatttttatatgaatcatctcctctgtggtcttgcccagtaccatccagtggagctttctgcagtgacggaaatgttctgtatttgcgttgtccaacgtggtaaaccagacacatgtgattcttgagcacttgaacaatgactgatgtgattgaagaacccatctttcaattcaattaaatttaaatagccacatttaactccagccttgggtttgacctgatggaaaattcccatgagagagtgctccaaaccgttccaaggtggggccagttgcgattctaaaggaagaagcactaaatggcagggtgatcagtccaaagcatttatgaggggagcttacatacagcatgggctgcagcgtccttgtgatgggcagtgagacaagggatgttctacctgggcatgtccccagcgagggggttgggggatggagttcacatgaagatgtaaggaatttgggtgggggctgggctggcttctacatgtttagcaacacggctgatctttcagtgtttccagcaacaacctaagcaccgttatcagtgcctaggaatgttcaaggcccaggctggggttcagacctgcagaggaaaacatcagctggctgggtcaaggcaccatgtgttacttggtcaggacagagacaaaaatgaggaaaactaggggaccccacacacatgtggctaccatactcctgaacaggtctagctagttatttgtttttttggaagttaatctggggtagaaatgtatggtgatttttattttctctgtctgaagaaccagccatttttaaaaaggttattattgacatcccaatattttgtcttggtgggcttactcataagtccaaacattttattctcaacaggtgtaaaacaggcagagcattctaaaaccacatggtagtgctttggtggaggactgcttccacttagaaacaaactctgagaagtaggctaagagaagacaagagggccgggcgcggtgactcacgcctataatcccagcactttgggaggccgagatgggtgaatcatgaggtcaggagttcgagaccagcctaaacaacatagtgaaaccctgtctctattaaaaatgcaaaaaattagccgggcgtggtgggcacccgtaatcccagctactcaggaggctgaggcaggagaattgcttgaacccaggaagcagaggttgcagtaagctgagatcccaccattgcactccagcctgggcaacagagtgagactccatctcaaaaaaaaaaagagagagagatgaaaagagtaggaaaatgagaaatcaccttcgttgaatcttaaatagttacatttttttctttttaacactaaaaatacaattcaaatttattagctctactacttgaatgattttggaattttatgtcatgctaaggtatgtgttacatatggccaagtggaaaatatatctgaagaggggctttcatacaaatagactgttcataatttatgtaaattttattttaataaaatcagttttttgtttaaaaaccttgtttcactgtcacatatgaaaaaaatactgcattgatatataattatttcatgttacataataacccaaaacaaataattacttgaatatgtttgtagagatactatttaatttattcatataaatgtgcagaaagattccaaaggagaatatatatcttgtgaaaatatggagatttgaaaatttgacatgatgcaaatagactgatacataatttggaaaggttctttacatggcagaatacatgtatgaatattaaagtaata

SEQ ID NO: 54930 - DNA, 4242 bp, Homo sapiens
attagccgggcatgatggcgtgtgcctgtagtcctagttactcaggaaggagtctgaggtgggaggatcatttgagcccaggaagttgaggctgcagtgagccgagattgtaccactgcactccaacctgggcaacataataacaccttgtctcaaaaaaaaaaacgaagaacaaaacttagaataagttggttctcataaaggtcacatgtataaaataaagtagggacttcctgttagaatttatttgtaattcatgttggttttcttagctatgatgctaagtccagtgctatgattgtttttacctcttcttaggctagaggagctgcagagctttctcttgtataaaaacaagttgacctaccttccctattccatgctgaacctgaagaagctcactctgttagtcgtcagtggggaccatttggtggagctcccaactgccctttgtgactcatccacacctttaaaatttgtaagccttatggacaatcctattgataatgcccaatgtgaagatggcaatgaaataatggaaagtgaacgggatcgccaacattttgataaagaagttatgaaagcctatattgaagaccttaaagaaagagaatctgttcccagctataccaccaaagtgtcttttagccttcaactttgatatccatcagaagactgcaaatctcactattctctggagctatatataaatctttgttatgatcatgtcatataggaagaatggcttgtgcttaaggacaaagtctagaaaccactatcatagttgctaaaaaaaatggttttcaaatgtcaaatacatgagtatctccctccatggactggagaattgaaaaattggtttgtatattgatatttccaggttcatttgcatatacttttttccaaataatgcacatttaatatgttttaaaatgtcttatttttaagaattataactaaaagaccaaatactgaagttaagtgcattgttttcaggaatcaaaagataaaggggccgggtgtggtggctcacacctgtaatcccagcactttgggaggccgaagtgggtggatcacctgaggtccggagttcgaggctggtttggccagcatggcgaaaccccatctctactaaaaatacaaaaaattagctgggcatggtggcagttgcctgtaatcctagctactcaggaggctgaggcaggagaatcgcttgaacctgggaggtggagttgcagtgagccgagatcatgggactgcactccagcctgggtgacagagccagactctgtctcaaaaaaaaaaaaaaagaaaagaaaaagataaagggattgtgaaaagagcatttatattggactaatcagatgagagtgttttgttattttgaaagagtttcttttactgagaataatcttccttgagtttatataaactgctatttccatatgttttaagttatattttggcaagtgtagactcccaggagagacttgtaggtacaatctaggccttgaagaaacaaaggctggaatatctgcccatgctttgggcatgagatgctcagatggtgcgtgggtagatctagttgaggaagtgtgggcctggctgttcatgggaagtcttcagtggccttcatggatggccatccagtcctgagtggtcaccctgggggtcctgggacacacctcagtaaagagcaaaggcaacgccctcagggtcccttcctccaagatggccatgtagggtaatggagatgaccagtccacactgataaggagttcctagcaaggcttccttgtgggtaccacaggacaactctgcccatagcaaagatgcttcagtccagagggagcccatgggctgtttgaatttgggagaggtgggattcattacaagactttgggctcttatgtcacatcacatgatttggagaaattagacacaatctcttatttttataccactgtcttgggctaaaataaacaggttgtggctgatggtgttgaagataaataagcttaaacaaataactttggccgggcacggtggctcacacctataatcccagcactatgggaggctgaggcaagcaggttgtttgagcccaggaatttgagaacaggattttgagaacagcttggacatcatgacgaaaccccatctccacaaaaaaattcaaaaaattagccaggtgtggtggcatgtgcctgtggtcccagctactcaggaggctgaggtgggaaaatcacttgagcccaggaggtcgaggctgcagtgtgctgtgattgtgacactgccctccagcctgggtgacagagtgagaccctgtctcaaaagcaaaacaaacagcaataacaatattattattgttataactaaaaaaaaaaaaacaaaaacaagcagcttttgtgactaagaaggaaaatatgcatatagtggcatatttttatatgaatcatctcctctgtggtcttgcccagtaccatccagtggagctttctgcagtgacggaaatgttctgtatttgcgttgtccaacgtggtaaaccagacacatgtgattcttgagcacttgaacaatgactgatgtgattgaagaacccatctttcaattcaattaaatttaaatagccacatttaactccagccttgggtttgacctgatggaaaattcccatgagagagtgctccaaaccgttccaaggtggggccagttgcgattctaaaggaagaagcactaaatggcagggtgatcagtccaaagcatttatgaggggagcttacatacagcatgggctgcagcgtccttgtgatgggcagtgagacaagggatgttctacctgggcatgtccccagcgagggggttgggggatggagttcacatgaagatgtaaggaatttgggtgggggctgggctggcttctacatgtttagcaacacggctgatctttcagtgtttccagcaacaacctaagcaccgttatcagtgcctaggaatgttcaaggcccaggctggggttcagacctgcagaggaaaacatcagctggctgggtcaaggcaccatgtgttacttggtcaggacagagacaaaaatgaggaaaactaggggaccccacacacatgtggctaccatactcctgaacaggtctagctagttatttgtttttttggaagttaatctggggtagaaatgtatggtgatttttattttctctgtctgaagaaccagccatttttaaaaaggttattattgacatcccaatattttgtcttggtgggcttactcataagtccaaacattttattctcaacaggtgtaaaacaggcagagcattctaaaaccacatggtagtgctttggtggaggactgcttccacttagaaacaaactctgagaagtaggctaagagaagacaagagggccgggcgcggtgactcacgcctataatcccagcactttgggaggccgagatgggtgaatcatgaggtcaggagttcgagaccagcctaaacaacatagtgaaaccctgtctctattaaaaatgcaaaaaattagccgggcgtggtgggcacccgtaatcccagctactcaggaggctgaggcaggagaattgcttgaacccaggaagcagaggttgcagtaagctgagatcccaccattgcactccagcctgggcaacagagtgagactccatctcaaaaaaaaaaagagagagagatgaaaagagtaggaaaatgagaaatcaccttcgttgaatcttaaatagttacatttttttctttttaacactaaaaatacaattcaaatttattagctctactacttgaatgattttggaattttatgtcatgctaaggtatgtgttacatatggccaagtggaaaatatatctgaagaggggctttcatacaaatagactgttcataatttatgtaaattttattttaataaaatcagttttttgtttaaaaaccttgtttcactgtcacatatgaaaaaaatactgcattgatatataattatttcatgttacataataacccaaaacaaataattacttgaatatgtttgtagagatactatttaatttattcatataaatgtgcagaaagattccaaaggagaatatatatcttgtgaaaatatggagatttgaaaatttgacatgatgcaaatagactgatacataatttggaaaggttctttacatggcagaatacatgtatgaatattaaagtaata

SEQ ID NO: 54931 - DNA, 4934 bp, Homo sapiens
gcgcgcagggtgccaagccctcccctacgaagtctgttttgtctcaggctgggctgagtcacatagaatagatagatagttgatttagcacatgtcctccagatcatattatccgcctacaaatatagcctgttagcgcacaggcacgggaggcttcttccggctcggccgtgctgctcagcgggtgtaaacagcctctgcggtgtaaacagcctctgcggtgtaaacagccgcggcgggcaggccaggactgtcagtgcccgcccctcggggcaggtagccttgtgggaaactcgtgtcaagaagcacaaagcttggcagaagaaggaggtggaaaggcttgagaagagcgccttggagaagataaaggaggagtggaactttgtggccgaatgcaggaggaagggcatcccccaggctgtatactgcaagaatggcttcatagacaccagcgtgcggcttctggacaagattgaaaggaacactctcacaaggcagagttcacttcccaaggacagaggcaaacggagcagtgcgtttgtgtttgaactttctggggagcactggacggagctcccagattcattgaaggagcagacacacctgagagaatggtacataagcaataccttgattcaaatcattcctacatatattcagttatttcaagagatgagaattctggatctgccaaaaaaccaaatctcacatcttccagcagaaatcggttgtttgaagaacctgaaagaactcaatgtgggtttcaactatctgaagagcattcctccagaattgggagattgtgaaaatctagagagactggattgttctggaaatctagaattaatggagctgccctttgaattaagtaatttgaagcaagttacatttgtagatatctcagcaaacaagttttccagtgtcccaatctgtgtcctgcggatgtcgaatttgcagtggttggatatcagcagcaataacctgaccgacctgccgcaagatatagacaggctagaggagctgcagagctttctcttgtataaaaacaagttgacctaccttccctattccatgctgaacctgaagaagctcactctgttagtcgtcagtggggaccatttggtggagctcccaactgccctttgtgactcatccacacctttaaaatttgtaagccttatggacaatcctattgataatgcccaatgtgaagatggcaatgaaataatggaaagtgaacgggatcgccaacattttgataaagaagttatgaaagcctatattgaagaccttaaagaaagagaatctgttcccagctataccaccaaagtgtcttttagccttcaactttgatatccatcagaagactgcaaatctcactattctctggagctatatataaatctttgttatgatcatgtcatataggaagaatggcttgtgcttaaggacaaagtctagaaaccactatcatagttgctaaaaaaaatggttttcaaatgtcaaatacatgagtatctccctccatggactggagaattgaaaaattggtttgtatattgatatttccaggttcatttgcatatacttttttccaaataatgcacatttaatatgttttaaaatgtcttatttttaagaattataactaaaagaccaaatactgaagttaagtgcattgttttcaggaatcaaaagataaaggggccgggtgtggtggctcacacctgtaatcccagcactttgggaggccgaagtgggtggatcacctgaggtccggagttcgaggctggtttggccagcatggcgaaaccccatctctactaaaaatacaaaaaattagctgggcatggtggcagttgcctgtaatcctagctactcaggaggctgaggcaggagaatcgcttgaacctgggaggtggagttgcagtgagccgagatcatgggactgcactccagcctgggtgacagagccagactctgtctcaaaaaaaaaaaaaaagaaaagaaaaagataaagggattgtgaaaagagcatttatattggactaatcagatgagagtgttttgttattttgaaagagtttcttttactgagaataatcttccttgagtttatataaactgctatttccatatgttttaagttatattttggcaagtgtagactcccaggagagacttgtaggtacaatctaggccttgaagaaacaaaggctggaatatctgcccatgctttgggcatgagatgctcagatggtgcgtgggtagatctagttgaggaagtgtgggcctggctgttcatgggaagtcttcagtggccttcatggatggccatccagtcctgagtggtcaccctgggggtcctgggacacacctcagtaaagagcaaaggcaacgccctcagggtcccttcctccaagatggccatgtagggtaatggagatgaccagtccacactgataaggagttcctagcaaggcttccttgtgggtaccacaggacaactctgcccatagcaaagatgcttcagtccagagggagcccatgggctgtttgaatttgggagaggtgggattcattacaagactttgggctcttatgtcacatcacatgatttggagaaattagacacaatctcttatttttataccactgtcttgggctaaaataaacaggttgtggctgatggtgttgaagataaataagcttaaacaaataactttggccgggcacggtggctcacacctataatcccagcactatgggaggctgaggcaagcaggttgtttgagcccaggaatttgagaacaggattttgagaacagcttggacatcatgacgaaaccccatctccacaaaaaaattcaaaaaattagccaggtgtggtggcatgtgcctgtggtcccagctactcaggaggctgaggtgggaaaatcacttgagcccaggaggtcgaggctgcagtgtgctgtgattgtgacactgccctccagcctgggtgacagagtgagaccctgtctcaaaagcaaaacaaacagcaataacaatattattattgttataactaaaaaaaaaaaaacaaaaacaagcagcttttgtgactaagaaggaaaatatgcatatagtggcatatttttatatgaatcatctcctctgtggtcttgcccagtaccatccagtggagctttctgcagtgacggaaatgttctgtatttgcgttgtccaacgtggtaaaccagacacatgtgattcttgagcacttgaacaatgactgatgtgattgaagaacccatctttcaattcaattaaatttaaatagccacatttaactccagccttgggtttgacctgatggaaaattcccatgagagagtgctccaaaccgttccaaggtggggccagttgcgattctaaaggaagaagcactaaatggcagggtgatcagtccaaagcatttatgaggggagcttacatacagcatgggctgcagcgtccttgtgatgggcagtgagacaagggatgttctacctgggcatgtccccagcgagggggttgggggatggagttcacatgaagatgtaaggaatttgggtgggggctgggctggcttctacatgtttagcaacacggctgatctttcagtgtttccagcaacaacctaagcaccgttatcagtgcctaggaatgttcaaggcccaggctggggttcagacctgcagaggaaaacatcagctggctgggtcaaggcaccatgtgttacttggtcaggacagagacaaaaatgaggaaaactaggggaccccacacacatgtggctaccatactcctgaacaggtctagctagttatttgtttttttggaagttaatctggggtagaaatgtatggtgatttttattttctctgtctgaagaaccagccatttttaaaaaggttattattgacatcccaatattttgtcttggtgggcttactcataagtccaaacattttattctcaacaggtgtaaaacaggcagagcattctaaaaccacatggtagtgctttggtggaggactgcttccacttagaaacaaactctgagaagtaggctaagagaagacaagagggccgggcgcggtgactcacgcctataatcccagcactttgggaggccgagatgggtgaatcatgaggtcaggagttcgagaccagcctaaacaacatagtgaaaccctgtctctattaaaaatgcaaaaaattagccgggcgtggtgggcacccgtaatcccagctactcaggaggctgaggcaggagaattgcttgaacccaggaagcagaggttgcagtaagctgagatcccaccattgcactccagcctgggcaacagagtgagactccatctcaaaaaaaaaaagagagagagatgaaaagagtaggaaaatgagaaatcaccttcgttgaatcttaaatagttacatttttttctttttaacactaaaaatacaattcaaatttattagctctactacttgaatgattttggaattttatgtcatgctaaggtatgtgttacatatggccaagtggaaaatatatctgaagaggggctttcatacaaatagactgttcataatttatgtaaattttattttaataaaatcagttttttgtttaaaaaccttgtttcactgtcacatatgaaaaaaatactgcattgatatataattatttcatgttacataataacccaaaacaaataattacttgaatatgtttgtagagatactatttaatttattcatataaatgtgcagaaagattccaaaggagaatatatatcttgtgaaaatatggagatttgaaaatttgacatgatgcaaatagactgatacataatttggaaaggttctttacatggcagaatacatgtatgaatattaaagtaata

SEQ ID NO: 54932 - DNA, 4809 bp, Homo sapiens
aaagaggagaacctccgcttaccacagccgggtagaaatgcctgaggaaagcagcggagcgtgaccgtgccagcatttacacagggaacacttcttgggcagccaggtgtcatggggcacagacccacagttcctgagaatgaacaggtaatttcatgctcccaaaatgggacataaagtggttgtcttcgacatttctgtcatcagagccttgtgggaaactcgtgtcaagaagcacaaagcttggcagaagaaggaggtggaaaggcttgagaagagcgccttggagaagataaaggaggagtggaactttgtggccgaatgcaggaggaagggcatcccccaggctgtatactgcaagaatggcttcatagacaccagcgtgcggcttctggacaagattgaaaggaacactctcacaaggcagagttcacttcccaaggacagaggcaaacggagcagtgcgtttgtgtttgaactttctggggagcactggacggagctcccagattcattgaaggagcagacacacctgagagaatggtacataagcaataccttgattcaaatcattcctacatatattcagttatttcaagagatgagaattctggatctgccaaaaaaccaaatctcacatcttccagcagaaatcggttgtttgaagaacctgaaagaactcaatgtgggtttcaactatctgaagagcattcctccagaattgggagattgtgaaaatctagagagactggattgttctggaaatctagaattaatggagctgccctttgaattaagtaatttgaagcaagttacatttgtagatatctcagcaaacaagttttccagtgtcccaatctgtgtcctgcggatgtcgaatttgcagtggttggatatcagcagcaataacctgaccgacctgccgcaagatatagacaggctagaggagctgcagagctttctcttgtataaaaacaagttgacctaccttccctattccatgctgaacctgaagaagctcactctgttagtcgtcagtggggaccatttggtggagctcccaactgccctttgtgactcatccacacctttaaaatttgtaagccttatggacaatcctattgataatgcccaatgtgaagatggcaatgaaataatggaaagtgaacgggatcgccaacattttgataaagaagttatgaaagcctatattgaagaccttaaagaaagagaatctgttcccagctataccaccaaagtgtcttttagccttcaactttgatatccatcagaagactgcaaatctcactattctctggagctatatataaatctttgttatgatcatgtcatataggaagaatggcttgtgcttaaggacaaagtctagaaaccactatcatagttgctaaaaaaaatggttttcaaatgtcaaatacatgagtatctccctccatggactggagaattgaaaaattggtttgtatattgatatttccaggttcatttgcatatacttttttccaaataatgcacatttaatatgttttaaaatgtcttatttttaagaattataactaaaagaccaaatactgaagttaagtgcattgttttcaggaatcaaaagataaaggggccgggtgtggtggctcacacctgtaatcccagcactttgggaggccgaagtgggtggatcacctgaggtccggagttcgaggctggtttggccagcatggcgaaaccccatctctactaaaaatacaaaaaattagctgggcatggtggcagttgcctgtaatcctagctactcaggaggctgaggcaggagaatcgcttgaacctgggaggtggagttgcagtgagccgagatcatgggactgcactccagcctgggtgacagagccagactctgtctcaaaaaaaaaaaaaaagaaaagaaaaagataaagggattgtgaaaagagcatttatattggactaatcagatgagagtgttttgttattttgaaagagtttcttttactgagaataatcttccttgagtttatataaactgctatttccatatgttttaagttatattttggcaagtgtagactcccaggagagacttgtaggtacaatctaggccttgaagaaacaaaggctggaatatctgcccatgctttgggcatgagatgctcagatggtgcgtgggtagatctagttgaggaagtgtgggcctggctgttcatgggaagtcttcagtggccttcatggatggccatccagtcctgagtggtcaccctgggggtcctgggacacacctcagtaaagagcaaaggcaacgccctcagggtcccttcctccaagatggccatgtagggtaatggagatgaccagtccacactgataaggagttcctagcaaggcttccttgtgggtaccacaggacaactctgcccatagcaaagatgcttcagtccagagggagcccatgggctgtttgaatttgggagaggtgggattcattacaagactttgggctcttatgtcacatcacatgatttggagaaattagacacaatctcttatttttataccactgtcttgggctaaaataaacaggttgtggctgatggtgttgaagataaataagcttaaacaaataactttggccgggcacggtggctcacacctataatcccagcactatgggaggctgaggcaagcaggttgtttgagcccaggaatttgagaacaggattttgagaacagcttggacatcatgacgaaaccccatctccacaaaaaaattcaaaaaattagccaggtgtggtggcatgtgcctgtggtcccagctactcaggaggctgaggtgggaaaatcacttgagcccaggaggtcgaggctgcagtgtgctgtgattgtgacactgccctccagcctgggtgacagagtgagaccctgtctcaaaagcaaaacaaacagcaataacaatattattattgttataactaaaaaaaaaaaaacaaaaacaagcagcttttgtgactaagaaggaaaatatgcatatagtggcatatttttatatgaatcatctcctctgtggtcttgcccagtaccatccagtggagctttctgcagtgacggaaatgttctgtatttgcgttgtccaacgtggtaaaccagacacatgtgattcttgagcacttgaacaatgactgatgtgattgaagaacccatctttcaattcaattaaatttaaatagccacatttaactccagccttgggtttgacctgatggaaaattcccatgagagagtgctccaaaccgttccaaggtggggccagttgcgattctaaaggaagaagcactaaatggcagggtgatcagtccaaagcatttatgaggggagcttacatacagcatgggctgcagcgtccttgtgatgggcagtgagacaagggatgttctacctgggcatgtccccagcgagggggttgggggatggagttcacatgaagatgtaaggaatttgggtgggggctgggctggcttctacatgtttagcaacacggctgatctttcagtgtttccagcaacaacctaagcaccgttatcagtgcctaggaatgttcaaggcccaggctggggttcagacctgcagaggaaaacatcagctggctgggtcaaggcaccatgtgttacttggtcaggacagagacaaaaatgaggaaaactaggggaccccacacacatgtggctaccatactcctgaacaggtctagctagttatttgtttttttggaagttaatctggggtagaaatgtatggtgatttttattttctctgtctgaagaaccagccatttttaaaaaggttattattgacatcccaatattttgtcttggtgggcttactcataagtccaaacattttattctcaacaggtgtaaaacaggcagagcatttctgagaagtaggctaagagaagacaagagggccgggcgcggtgactcacgcctataatcccagcactttgggaggccgagatgggtgaatcatgaggtcaggagttcgagaccagcctaaacaacatagtgaaaccctgtctctattaaaaatgcaaaaaattagccgggcgtggtgggcacccgtaatcccagctactcaggaggctgaggcaggagaattgcttgaacccaggaagcagaggttgcagtaagctgagatcccaccattgcactccagcctgggcaacagagtgagactccatctcaaaaaaaaaaagagagagagatgaaaagagtaggaaaatgagaaatcaccttcgttgaatcttaaatagttacatttttttctttttaacactaaaaatacaattcaaatttattagctctactacttgaatgattttggaattttatgtcatgctaaggtatgtgttacatatggccaagtggaaaatatatctgaagaggggctttcatacaaatagactgttcataatttatgtaaattttattttaataaaatcagttttttgtttaaaaaccttgtttcactgtcacatatgaaaaaaatactgcattgatatataattatttcatgttacataataacccaaaacaaataattacttgaatatgtttgtagagatactatttaatttattcatataaatgtgcagaaagattccaaaggagaatatatatcttgtgaaaatatggagatttgaaaatttgacatgatgcaaatagactgatacataatttggaaaggttctttacatggcagaatacatgtatgaatattaaagtaata

SEQ ID NO: 54933 - DNA, 1454 bp, Homo sapiens
aaagaggagaacctccgcttaccacagccgggtagaaatgcctgaggaaagcagcggagcgtgaccgtgccagcatttacacagggaacacttcttgggcagccaggtgtcatggggcacagacccacagttcctgagaatgaacaggtaatttcatgctcccaaaatgggacataaagtggttgtcttcgacatttctgtcatcagagccttgtgggaaactcgtgtcaagaagcacaaagcttggcagaagaaggaggtggaaaggcttgagaagagcgccttggagaagataaaggaggagtggaactttgtggccgaatgcaggaggaagggcatcccccaggctgtatactgcaagaatggcttcatagacaccagcgtgcggcttctggacaagattgaaaggaacactctcacaaggcagagttcacttcccaaggacagaggcaaacggagcagtgcgtttgtgtttgaactttctggggagcactggacggagctcccagattcattgaaggagcagacacacctgagagaatggtacataagcaataccttgattcaaatcattcctacatatattcagttatttcaagagatgagaattctggatctgccaaaaaaccaaatctcacatcttccagcagaaatcggttgtttgaagaacctgaaagaactcaatgtgggtttcaactatctgaagagcattcctccagaattgggagattgtgaaaatctagagagactggattgttctggaaatctagaattaatggagctgccctttgaattaagtaatttgaagcaagttacatttgtagatatctcagcaaacaagttttccagtgtcccaatctgtgtcctgcggatgtcgaatttgcagtggttggatatcagcagcaataacctgaccgacctgccgcaagatatagacaggctagaggagctgcagagctttctcttgtataaaaacaagttgacctaccttccctattccatgctgaacctgaagaagctcactctgttagtcgtcagtggggaccatttggtggagctcccaactgccctttgtgactcatccacacctttaaaatttgtaagccttatggacaatcctattgataatgcccaatgtgaagatggcaatgaaataatggaaagtgaacgggatcgccaacattttgataaagaagttatgaaagcctatattgaagaccttaaagaaagagaatctgttcccagctataccaccaaagtgtcttttagccttcaactttgatatccatcagaagactgcaaatctcactattctctggagctatatataaatctttgttatgatcatgtcatataggaagaatggcttgtgcttaaggacaaagtctagaaaccactatcatagttgctaaaaaaaatggttttcaaatgtcaaatacatgagtatctccctc

SEQ ID NO: 54934 - DNA, 2237 bp, Homo sapiens
ttttttttttcatcctactttgttttattgggcgttgattgttacaggtcccagcctgtagacatcttttactccaatttcctgaatagatagctttattccttcaaggagagtaagacgggcagctacacccgcagcagttacctgccagctgagcaactggtcagagtggacagattgctttccgtgccaggacaagagtggtgacatctgggatcaagccagctgctccagttctacaacttgtgtaaggcaagcacagtgtggacaggatttccagtgtaaggagacaggtcgctgcctgaaacgccaccttgtgtgtaatggagaccaggactgccttgatggctctgatgaggacgactgtgaagatgtcagggccattgacgaagactgcagccagtatgaaccaattccaggatcacagaaggcagccttggggtacaatatcctgacccaggaagatgctcagagtgtgtacgatgccagttattatgggggccagtgtgagacggtatacaatggggaatggagggagcttcgatatgactccacctgtgaacgtctctactatggagatgatgagaaatactttcggaaaccctacaactttctgaagtaccactttgaagccctggcagatactggaatctcctcagagttttatgataatgcaaatgaccttctttccaaagttaaaaaagacaagtctgactcatttggagtgaccatcggcataggcccagccggcagccctttattggtgggtgtaggtgtatcccactcacaagacacttcattcttgaacgaattaaacaagtataatgagaagaaattcattttcacaagaatcttcacaaaggtgcagactgcacattttaagatgaggaaggatgacattatgctggatgaaggaatgctgcagtcattaatggagcttccagatcagtacaattatggcatgtatgccaagttcatcaatgactatggcacccattacatcacatctggatccatgggtggcatttatgaatatatcctggtgattgacaaagcaaaaatggaatcccttggtattaccagcagagatatcacgacatgttttggaggctccttgggcattcaatatgaagacaaaataaatgttggtggaggtttatcaggagaccattgtaaaaaatttggaggtggcaaaactgaaagggccaggaaggccatggctgtggaagacattatttctcgggtgcgaggtggcagttctggctggagcggtggcttggcacagaacaggagcaccattacataccgttcctgggggaggtcattaaagtataatcctgttgttatcgattttgagatgcagcctatccacgaggtgctgcggcacacaagcctggggcctctggaggccaagcgccagaacctgcgccgcgccttggaccagtatctgatggaattcaatgcctgccgatgtgggccttgcttcaacaatggggtgcccatcctcgagggcaccagctgcaggtgccagtgccgcctgggtagcttgggtgctgcctgtgagcaaacacagacagaaggagccaaagcagatgggagctggagttgctggagctcctggtctgtatgcagagcaggcatccaggaaaggagaagagagtgtgacaatccagcacctcagaatggaggggcctcgtgtccagggcggaaagtacagacgcaggcttgctgagggcctctggacacaggctggaccagatgctgtggatgtcgacccctgcactgactattggataaagacttctttcaactaagagaagatgcaaatcagcacacttttttctttgttctgccagcttccaggcctaagactaggttttgctgtctacagccaactattctattagttacaaaactcaatcattttattcagcaactggatgttgactgttaactagaagctctgtcctacttacagcactttggatcatcaaaaaaataaagtaaaatagaaaactgagaaaactcaatccatgaccagggagaacttacaggatgttagagacaaaacaagcagacacctgaaacaatcaacgcccaataaaacaaagtaggatgaaaattctcttagttctttgataacaatttgttcactcatagaaacattattaattggtagggtaagcagacactctgaaacaatgagaaaaatactaaaaattgacttgagttatttc

SEQ ID NO: 54935 - DNA, 2183 bp, Homo sapiens
ttttttttttcatcctactttgttttattgggcgttgattgttacaggtcccagcctgtagacatcttttactccaatttcctgaatagatagctttattccttcaaggagagtaagacgggcagctacacccgcagcagttacctgccagctgagcaactggtcagagtggacagattgctttccgtgccaggacaagagtggtgacatctgggatcaagccagctgctccagttctacaacttgtgtaaggcaagcacagtgtggacaggatttccagtgtaaggagacaggtcgctgcctgaaacgccaccttgtgtgtaatggagaccaggactgccttgatggctctgatgaggacgactgtgaagatgtcagggccattgacgaagactgcagccagtatgaaccaattccaggatcacagaaggcagccttggggtacaatatcctgacccaggaagatgctcagagtgtgtacgatgccagttattatgggggccagtgtgagacggtatacaatggggaatggagggagcttcgatatgactccacctgtgaacgtctctactatggagatgatgagaaatactttcggaaaccctacaactttctgaagtaccactttgaagccctggcagatactggaatctcctcagagttttatgataatgcaaatgaccttctttccaaagttaaccctttattggtgggtgtaggtgtatcccactcacaagacacttcattcttgaacgaattaaacaagtataatgagaagaaattcattttcacaagaatcttcacaaaggtgcagactgcacattttaagatgaggaaggatgacattatgctggatgaaggaatgctgcagtcattaatggagcttccagatcagtacaattatggcatgtatgccaagttcatcaatgactatggcacccattacatcacatctggatccatgggtggcatttatgaatatatcctggtgattgacaaagcaaaaatggaatcccttggtattaccagcagagatatcacgacatgttttggaggctccttgggcattcaatatgaagacaaaataaatgttggtggaggtttatcaggagaccattgtaaaaaatttggaggtggcaaaactgaaagggccaggaaggccatggctgtggaagacattatttctcgggtgcgaggtggcagttctggctggagcggtggcttggcacagaacaggagcaccattacataccgttcctgggggaggtcattaaagtataatcctgttgttatcgattttgagatgcagcctatccacgaggtgctgcggcacacaagcctggggcctctggaggccaagcgccagaacctgcgccgcgccttggaccagtatctgatggaattcaatgcctgccgatgtgggccttgcttcaacaatggggtgcccatcctcgagggcaccagctgcaggtgccagtgccgcctgggtagcttgggtgctgcctgtgagcaaacacagacagaaggagccaaagcagatgggagctggagttgctggagctcctggtctgtatgcagagcaggcatccaggaaaggagaagagagtgtgacaatccagcacctcagaatggaggggcctcgtgtccagggcggaaagtacagacgcaggcttgctgagggcctctggacacaggctggaccagatgctgtggatgtcgacccctgcactgactattggataaagacttctttcaactaagagaagatgcaaatcagcacacttttttctttgttctgccagcttccaggcctaagactaggttttgctgtctacagccaactattctattagttacaaaactcaatcattttattcagcaactggatgttgactgttaactagaagctctgtcctacttacagcactttggatcatcaaaaaaataaagtaaaatagaaaactgagaaaactcaatccatgaccagggagaacttacaggatgttagagacaaaacaagcagacacctgaaacaatcaacgcccaataaaacaaagtaggatgaaaattctcttagttctttgataacaatttgttcactcatagaaacattattaattggtagggtaagcagacactctgaaacaatgagaaaaatactaaaaattgacttgagttatttc

SEQ ID NO: 54936 - DNA, 2396 bp, Homo sapiens
  misc_feature (114)..(114): n is a, c, g, or t
tactagtggatcccccgcgctgcacgaattctgctcgcgagagagagagagagagagagagagagagagagagagagagagagagagagagagagagagagagagagagagtanacatcttttactccaatttcctgaatagatagctttattccttcaaggtaatatagtgcggtggcttctggctgagatgtttgctgttgttttcttcatcttgtctttgatgacttgtcagcctggggtaactgcacaggagaaggtgaaccagagagtaagacgggcagctacacccgcagcagttacctgccagctgagcaactggtcagagtggacagattgctttccgtgccaggacaagagtggtgacatctgggatcaagccagctgctccagttctacaacttgtgtaaggcaagcacagtgtggacaggatttccagtgtaaggagacaggtcgctgcctgaaacgccaccttgtgtgtaatggagaccaggactgccttgatggctctgatgaggacgactgtgaagatgtcagggccattgacgaagactgcagccagtatgaaccaattccaggatcacagaaggcagccttggggtacaatatcctgacccaggaagatgctcagagtgtgtacgatgccagttattatgggggccagtgtgagacggtatacaatggggaatggagggagcttcgatatgactccacctgtgaacgtctctactatggagatgatgagaaatactttcggaaaccctacaactttctgaagtaccactttgaagccctggcagatactggaatctcctcagagttttatgataatgcaaatgaccttctttccaaagttaaaaaagacaagtctgactcatttggagtgaccatcggcataggcccagccggcagccctttattggtgggtgtaggtgtatcccactcacaagacacttcattcttgaacgaattaaacaagtataatgagaagaaattcattttcacaagaatcttcacaaaggtgcagactgcacattttaagatgaggaaggatgacattatgctggatgaaggaatgctgcagtcattaatggagcttccagatcagtacaattatggcatgtatgccaagttcatcaatgactatggcacccattacatcacatctggatccatgggtggcatttatgaatatatcctggtgattgacaaagcaaaaatggaatcccttggtattaccagcagagatatcacgacatgttttggaggctccttgggcattcaatatgaagacaaaataaatgttggtggaggtttatcaggagaccattgtaaaaaatttggaggtggcaaaactgaaagggccaggaaggccatggctgtggaagacattatttctcgggtgcgaggtggcagttctggctggagcggtggcttggcacagaacaggagcaccattacataccgttcctgggggaggtcattaaagtataatcctgttgttatcgattttgagatgcagcctatccacgaggtgctgcggcacacaagcctggggcctctggaggccaagcgccagaacctgcgccgcgccttggaccagtatctgatggaattcaatgcctgccgatgtgggccttgcttcaacaatggggtgcccatcctcgagggcaccagctgcaggtgccagtgccgcctgggtagcttgggtgctgcctgtgagcaaacacagacagaaggagccaaagcagatgggagctggagttgctggagctcctggtctgtatgcagagcaggcatccaggaaaggagaagagagtgtgacaatccagcacctcagaatggaggggcctcgtgtccagggcggaaagtacagacgcaggcttgctgagggcctctggacacaggctggaccagatgctgtggatgtcgacccctgcactgactattggataaagacttctttcaactaagagaagatgcaaatcagcacacttttttctttgttctgccagcttccaggcctaagactaggttttgctgtctacagccaactattctattagttacaaaactcaatcattttattcagcaactggatgttgactgttaactagaagctctgtcctacttacagcactttggatcatcaaaaaaataaagtaaaatagaaaactgagaaaactcaatccatgaccagggagaacttacaggatgttagagacaaaacaagcagacacctgaaacaatcaacgcccaataaaacaaagtaggatgaaaattctcttagttctttgataacaatttgttcactcatagaaacattattaattggtagggtaagcagacactctgaaacaatgagaaaaatactaaaaattgacttgagttatttc

SEQ ID NO: 54937 - DNA, 2213 bp, Homo sapiens
ttttttttttcatcctactttgttttattgggcgttgattgttacaggtcccagcctgtagacatcttttactccaatttcctgaatagatagctttattccttcaaggagagtaagacgggcagctacacccgcagcagttacctgccagctgagcaactggtcagagtggacagattgctttccgtgccaggacaagagtggtgacatctgggatcaagccagctgctccagttctacaacttgtgtaaggcaagcacagtgtggacaggatttccagtgtaaggagacaggtcgctgcctgaaacgccaccttgtgtgtaatggagaccaggactgccttgatggctctgatgaggacgactgtgaagatgtcagggccattgacgaagactgcagccagtatgaaccaattccaggatcacagaaggcagccttggggtacaatatcctgacccaggaagatgctcagagtgtgtacgatgccagttattatgggggccagtgtgagacggtatacaatggggaatggagggagcttcgatatgactccacctgtgaacgtctctactatggagatgatgagaaatactttcggaaaccctacaactttctgaagtaccactttgaagccctggcagatactggaatctcctcagagttttatgataatgcaaatgaccttctttccaaagttaaaaaagacaagtctgactcatttggagtgaccatcggcataggcccagccggcagccctttattggtgggtgtaggtgtatcccactcacaagacacttcattcttgaacgaattaaacaagtataatgagaagaaattcattttcacaagaatcttcacaaaggtgcagactgcacattttaagatgaggaaggatgacattatgctggatgaaggaatgctgcagtcattaatggagcttccagatcagtacaattatggcatgtatgccaagttcatcaatgactatggcacccattacatcacatctggatccatgggtggcatttatgaatatatcctggtgattgacaaagcaaaaatggaatcccttggtattaccagcagagatatcacgacatgttttggaggctccttgggcattcaatatgaagacaaaataaatgttggtggaggtttatcaggagaccattgtaaaaaatttggaggtggcaaaactgaaagggccaggaaggccatggctgtggaagacattatttctcgggtgcgaggtggcagttctggctggagcggtggcttggcacagaacaggagcaccattacataccgttcctgggggaggtcattaaagtataatcctgttgttatcgattttgagatgcagcctatccacgaggtgctgcggcacacaagcctggggcctctggaggccaagcgccagaacctgcgccgcgccttggaccagtatctgatggaattcaatgcctgccgatgtgggccttgcttcaacaatggggtgcccatcctcgagggcaccagctgcaggtgccatgcctgtgagcaaacacagacagaaggagccaaagcagatgggagctggagttgctggagctcctggtctgtatgcagagcaggcatccaggaaaggagaagagagtgtgacaatccagcacctcagaatggaggggcctcgtgtccagggcggaaagtacagacgcaggcttgctgagggcctctggacacaggctggaccagatgctgtggatgtcgacccctgcactgactattggataaagacttctttcaactaagagaagatgcaaatcagcacacttttttctttgttctgccagcttccaggcctaagactaggttttgctgtctacagccaactattctattagttacaaaactcaatcattttattcagcaactggatgttgactgttaactagaagctctgtcctacttacagcactttggatcatcaaaaaaataaagtaaaatagaaaactgagaaaactcaatccatgaccagggagaacttacaggatgttagagacaaaacaagcagacacctgaaacaatcaacgcccaataaaacaaagtaggatgaaaattctcttagttctttgataacaatttgttcactcatagaaacattattaattggtagggtaagcagacactctgaaacaatgagaaaaatactaaaaattgacttgagttatttc

SEQ ID NO: 54938 - DNA, 2394 bp, Homo sapiens
ttttttttttcatcctactttgttttattgggcgttgattgttacaggtcccagcctgtagacatcttttactccaatttcctgaatagatagctttattccttcaaggtaatatagtgcggtggcttctggctgagatgtttgctgttgttttcttcatcttgtctttgatgacttgtcagcctggggtaactgcacaggagaaggtgaaccagagagtaagacgggcagctacacccgcagcagttacctgccagctgagcaactggtcagagtggacagattgctttccgtgccaggacaagtaccgacaccggagcctcttgcagccaaacaagtttgggggaaccatctgcagtggtgacatctgggatcaagccagctgctccagttctacaacttgtgtaaggcaagcacagtgtggacaggatttccagtgtaaggagacaggtcgctgcctgaaacgccaccttgtgtgtaatggagaccaggactgccttgatggctctgatgaggacgactgtgaagatgtcagggccattgacgaagactgcagccagtatgaaccaattccaggatcacagaaggcagccttggggtacaatatcctgacccaggaagatgctcagagtgtgtacgatgccagttattatgggggccagtgtgagacggtatacaatggggaatggagggagcttcgatatgactccacctgtgaacgtctctactatggagatgatgagaaatactttcggaaaccctacaactttctgaagtaccactttgaagccctggcagatactggaatctcctcagagttttatgataatgcaaatgaccttctttccaaagttaaaaaagacaagtctgactcatttggagtgaccatcggcataggcccagccggcagccctttattggtgggtgtaggtgtatcccactcacaagacacttcattcttgaacgaattaaacaagtataatgagaagaaattcattttcacaagaatcttcacaaaggtgcagactgcacattttaagatgaggaaggatgacattatgctggatgaaggaatgctgcagtcattaatggagcttccagatcagtacaattatggcatgtatgccaagttcatcaatgactatggcacccattacatcacatctggatccatgggtggcatttatgaatatatcctggtgattgacaaagcaaaaatggaatcccttggtattaccagcagagatatcacgacatgttttggaggctccttgggcattcaatatgaagacaaaataaatgttggtggaggtttatcaggagaccattgtaaaaaatttggaggtggcaaaactgaaagggccaggaaggccatggctgtggaagacattatttctcgggtgcgaggtggcagttctggctggagcggtggcttggcacagaacaggagcaccattacataccgttcctgggggaggtcattaaagtataatcctgttgttatcgattttgagatgcagcctatccacgaggtgctgcggcacacaagcctggggcctctggaggccaagcgccagaacctgcgccgcgccttggaccagtatctgatggaattcaatgcctgccgatgtgggccttgcttcaacaatggggtgcccatcctcgagggcaccagctgcaggtgccagtgccgcctgggtagcttgggtgctgcctgtgagcaaacacagacagaaggagccaaagcagatgggagctggagttgctggagctcctggtctgtatgcagagcaggcatccaggaaaggagaagagagtgtgacaatccagcacctcagaatggaggggcctcgtgtccagggcggaaagtacagacgcaggcttgctgagggcctctggacacaggctggaccagatgctgtggatgtcgacccctgcactgactattggataaagacttctttcaactaagagaagatgcaaatcagcacacttttttctttgttctgccagcttccaggcctaagactaggttttgctgtctacagccaactattctattagttacaaaactcaatcattttattcagcaactggatgttgactgttaactagaagctctgtcctacttacagcactttggatcatcaaaaaaataaagtaaaatagaaaactgagaaaactcaatccatgaccagggagaacttacaggatgttagagacaaaacaagcagacacctgaaacaatcaacgcccaataaaacaaagtaggatgaaaattctcttagttctttgataacaatttgttcactcatagaaacattattaattggtagggtaagcagacactctgaaacaatgagaaaaatactaaaaattgacttgagttatttc

SEQ ID NO: 54939 - DNA, 2288 bp, Homo sapiens
ttttttttttcatcctactttgttttattgggcgttgattgttacaggtcccagcctgtagacatcttttactccaatttcctgaatagatagctttattccttcaaggagagtaagacgggcagctacacccgcagcagttacctgccagctgagcaactggtcagagtggacagattgctttccgtgccaggacaagtaccgacaccggagcctcttgcagccaaacaagtttgggggaaccatctgcagtggtgacatctgggatcaagccagctgctccagttctacaacttgtgtaaggcaagcacagtgtggacaggatttccagtgtaaggagacaggtcgctgcctgaaacgccaccttgtgtgtaatggagaccaggactgccttgatggctctgatgaggacgactgtgaagatgtcagggccattgacgaagactgcagccagtatgaaccaattccaggatcacagaaggcagccttggggtacaatatcctgacccaggaagatgctcagagtgtgtacgatgccagttattatgggggccagtgtgagacggtatacaatggggaatggagggagcttcgatatgactccacctgtgaacgtctctactatggagatgatgagaaatactttcggaaaccctacaactttctgaagtaccactttgaagccctggcagatactggaatctcctcagagttttatgataatgcaaatgaccttctttccaaagttaaaaaagacaagtctgactcatttggagtgaccatcggcataggcccagccggcagccctttattggtgggtgtaggtgtatcccactcacaagacacttcattcttgaacgaattaaacaagtataatgagaagaaattcattttcacaagaatcttcacaaaggtgcagactgcacattttaagatgaggaaggatgacattatgctggatgaaggaatgctgcagtcattaatggagcttccagatcagtacaattatggcatgtatgccaagttcatcaatgactatggcacccattacatcacatctggatccatgggtggcatttatgaatatatcctggtgattgacaaagcaaaaatggaatcccttggtattaccagcagagatatcacgacatgttttggaggctccttgggcattcaatatgaagacaaaataaatgttggtggaggtttatcaggagaccattgtaaaaaatttggaggtggcaaaactgaaagggccaggaaggccatggctgtggaagacattatttctcgggtgcgaggtggcagttctggctggagcggtggcttggcacagaacaggagcaccattacataccgttcctgggggaggtcattaaagtataatcctgttgttatcgattttgagatgcagcctatccacgaggtgctgcggcacacaagcctggggcctctggaggccaagcgccagaacctgcgccgcgccttggaccagtatctgatggaattcaatgcctgccgatgtgggccttgcttcaacaatggggtgcccatcctcgagggcaccagctgcaggtgccagtgccgcctgggtagcttgggtgctgcctgtgagcaaacacagacagaaggagccaaagcagatgggagctggagttgctggagctcctggtctgtatgcagagcaggcatccaggaaaggagaagagagtgtgacaatccagcacctcagaatggaggggcctcgtgtccagggcggaaagtacagacgcaggcttgctgagggcctctggacacaggctggaccagatgctgtggatgtcgacccctgcactgactattggataaagacttctttcaactaagagaagatgcaaatcagcacacttttttctttgttctgccagcttccaggcctaagactaggttttgctgtctacagccaactattctattagttacaaaactcaatcattttattcagcaactggatgttgactgttaactagaagctctgtcctacttacagcactttggatcatcaaaaaaataaagtaaaatagaaaactgagaaaactcaatccatgaccagggagaacttacaggatgttagagacaaaacaagcagacacctgaaacaatcaacgcccaataaaacaaagtaggatgaaaattctcttagttctttgataacaatttgttcactcatagaaacattattaattggtagggtaagcagacactctgaaacaatgagaaaaatactaaaaattgacttgagttatttc

SEQ ID NO: 54940 - DNA, 2201 bp, Homo sapiens
  misc_feature (2123)..(2123): n is a, c, g, or t
ttttttttttcatcctactttgttttattgggcgttgattgttacaggtcccagcctgtagacatcttttactccaatttcctgaatagatagctttattccttcaaggagagtaagacgggcagctacacccgcagcagttacctgccagctgagcaactggtcagagtggacagattgctttccgtgccaggacaagagtggtgacatctgggatcaagccagctgctccagttctacaacttgtgtaaggcaagcacagtgtggacaggatttccagtgtaaggagacaggtcgctgcctgaaacgccaccttgtgtgtaatggagaccaggactgccttgatggctctgatgaggacgactgtgaagatgtcagggccattgacgaagactgcagccagtatgaaccaattccaggatcacagaaggcagccttggggtacaatatcctgacccaggaagatgctcagagtgtgtacgatgccagttattatgggggccagtgtgagacggtatacaatggggaatggagggagcttcgatatgactccacctgtgaacgtctctactatggagatgatgagaaatactttcggaaaccctacaactttctgaagtaccactttgaagccctggcagatactggaatctcctcagagttttatgataatgcaaatgaccttctttccaaagttaaaaaagacaagtctgactcatttggagtgaccatcggcataggcccagccggcagccctttattggtgggtgtaggtgtatcccactcacaagacacttcattcttgaacgaattaaacaagtataatgagaagaaattcattttcacaagaatcttcacaaaggtgcagactgcacattttaagatgaggaaggatgacattatgctggatgaaggaatgctgcagtcattaatggagcttccagatcagtacaattatggcatgtatgccaagttcatcaatgactatggcacccattacatcacatctggatccatgggtggcatttatgaatatatcctggtgattgacaaagcaaaaatggaatcccttggtattaccagcagagatatcacgacatgttttggaggctccttgggcattcaatatgaagacaaaataaatgttggtggaggtttatcaggagaccattgtaaaaaatttggaggtggcaaaactgaaagggccaggaaggccatggctgtggaagacattatttctcgggtgcgaggtggcagttctggctggagcggtggcttggcacagaacaggagcaccattacataccgttcctgggggaggtcattaaagtataatcctgttgttatcgattttgagatgcagcctatccacgaggtgctgcggcacacaagcctggggcctctggaggccaagcgccagaacctgcgccgcgccttggaccagtatctgatggaattcaatgcctgccgatgtgggccttgcttcaacaatggggtgcccatcctcgagggcaccagctgcaggtgccagtgccgcctgggtagcttgggtgctgcctgtgagcaaacacagacagaaggagccaaagcagatgggagctggagttgctggagctcctggtctgtatgcagagcaggcatccaggaaaggagaagagagtgtgacaatccagcacctcagaatggaggggcctcgtgtccagggcggaaagtacagacgcaggcttgctgagggcctctggacacaggctggaccagatgctgtggatgtcgacccctgcactgactattggataaagacttctttcaactaagagaagatgcaaatcagcacacttttttctttgttctgccagcttccaggcctaagactaggttttgctgtctacagccaactattctattagttacaaaactcaatcattttattcagcaactggatgttgactgttaactagaagctctgtcctacttacagcactttggatcatcaaaaaaataaagtaaaatagaaaactgagaaaaaaagaaaactcgtgccgaattcggcacgaggggaaggctccctaatgacagtgagtcaagccttgcctgagagtctgagagagacactttcagagaanaacagtgtggtacacagaaagcctcttggacactcgggtaatgggccaggagcgctctctaggaggcaggctccaaca

SEQ ID NO: 54941 - DNA, 1935 bp, Homo sapiens
ttttttttttcatcctactttgttttattgggcgttgattgttacaggtcccagcctgtagacatcttttactccaatttcctgaatagatagctttattccttcaaggagagtaagacgggcagctacacccgcagcagttacctgccagctgagcaactggtcagagtggacagattgctttccgtgccaggacaagagtggtgacatctgggatcaagccagctgctccagttctacaacttgtgtaaggcaagcacagtgtggacaggatttccagtgtaaggagacaggtcgctgcctgaaacgccaccttgtgtgtaatggagaccaggactgccttgatggctctgatgaggacgactgtgaagatgtcagggccattgacgaagactgcagccagtatgaaccaattccaggatcacagaaggcagccttggggtacaatatcctgacccaggaagatgctcagagtgtgtacgatgccagttattatgggggccagtgtgagacggtatacaatggggaatggagggagcttcgatatgactccacctgtgaacgtctctactatggagatgatgagaaatactttcggaaaccctacaactttctgaagtaccactttgaagccctggcagatactggaatctcctcagagttttatgataatgcaaatgaccttctttccaaagttaaaaaagacaagtctgactcatttggagtgaccatcggcataggcccagccggcagccctttattggtgggtgtaggtgtatcccactcacaagacacttcattcttgaacgaattaaacaagtataatgagaagaaattcattttcacaagaatcttcacaaaggtgcagactgcacattttaagatgaggaaggatgacattatgctggatgaaggaatgctgcagtcattaatggagcttccagatcagtacaattatggcatgtatgccaagttcatcaatgactatggcacccattacatcacatctggatccatgggtggcatttatgaatatatcctggtgattgacaaagatgcagcctatccacgaggtgctgcggcacacaagcctggggcctctggaggccaagcgccagaacctgcgccgcgccttggaccagtatctgatggaattcaatgcctgccgatgtgggccttgcttcaacaatggggtgcccatcctcgagggcaccagctgcaggtgccagtgccgcctgggtagcttgggtgctgcctgtgagcaaacacagacagaaggagccaaagcagatgggagctggagttgctggagctcctggtctgtatgcagagcaggcatccaggaaaggagaagagagtgtgacaatccagcacctcagaatggaggggcctcgtgtccagggcggaaagtacagacgcaggcttgctgagggcctctggacacaggctggaccagatgctgtggatgtcgacccctgcactgactattggataaagacttctttcaactaagagaagatgcaaatcagcacacttttttctttgttctgccagcttccaggcctaagactaggttttgctgtctacagccaactattctattagttacaaaactcaatcattttattcagcaactggatgttgactgttaactagaagctctgtcctacttacagcactttggatcatcaaaaaaataaagtaaaatagaaaactgagaaaactcaatccatgaccagggagaacttacaggatgttagagacaaaacaagcagacacctgaaacaatcaacgcccaataaaacaaagtaggatgaaaattctcttagttctttgataacaatttgttcactcatagaaacattattaattggtagggtaagcagacactctgaaacaatgagaaaaatactaaaaattgacttgagttatttc

SEQ ID NO: 54942 - DNA, 3393 bp, Homo sapiens
cgcccaacccaagttcaaaggctgataagagagaaaatctcatgaggaggttttagtctagggaaagtcattcagtggatgtgatcttggctcacaggggacgatgtcaagctcttcctggctccttctcagccttgttgctgtaactgctgctcagtccaccattgaggaacaggccaagacatttttggacaagtttaaccacgaagccgaagacctgttctatcaaagttcacttgcttcttggaattataacaccaatattactgaagagaatgtccaaaacatgaataatgctggggacaaatggtctgcctttttaaaggaacagtccacacttgcccaaatgtatccactacaagaaattcagaatctcacagtcaagcttcagctgcaggctcttcagcaaaatgggtcttcagtgctctcagaagacaagagcaaacggttgaacacaattctaaatacaatgagcaccatctacagtactggaaaagtttgtaacccagataatccacaagaatgcttattacttgaaccaggtttgaatgaaataatggcaaacagtttagactacaatgagaggctctgggcttgggaaagctggagatctgaggtcggcaagcagctgaggccattatatgaagagtatgtggtcttgaaaaatgagatggcaagagcaaatcattatgaggactatggggattattggagaggagactatgaagtaaatggggtagatggctatgactacagccgcggccagttgattgaagatgtggaacatacctttgaagagattaaaccattatatgaacatcttcatgcctatgtgagggcaaagttgatgaatgcctatccttcctatatcagtccaattggatgcctccctgctcatttgcttggtgatatgtggggtagattttggacaaatctgtactctttgacagttccctttggacagaaaccaaacatagatgttactgatgcaatggtggaccaggcctgggatgcacagagaatattcaaggaggccgagaagttctttgtatctgttggtcttcctaatatgactcaaggattctgggaaaattccatgctaacggacccaggaaatgttcagaaagcagtctgccatcccacagcttgggacctggggaagggcgacttcaggatccttatgtgcacaaaggtgacaatggacgacttcctgacagctcatcatgagatggggcatatccagtatgatatggcatatgctgcacaaccttttctgctaagaaatggagctaatgaaggattccatgaagctgttggggaaatcatgtcactttctgcagccacacctaagcatttaaaatccattggtcttctgtcacccgattttcaagaagacaatgaaacagaaataaacttcctgctcaaacaagcactcacgattgttgggactctgccatttacttacatgttagagaagtggaggtggatggtctttaaaggggaaattcccaaagaccagtggatgaaaaagtggtgggagatgaagcgagagatagttggggtggtggaacctgtgccccatgatgaaacatactgtgaccccgcatctctgttccatgtttctaatgattactcattcattcgatattacacaaggaccctttaccaattccagtttcaagaagcactttgtcaagcagctaaacatgaaggccctctgcacaaatgtgacatctcaaactctacagaagctggacagaaactgttcaatatgctgaggcttggaaaatcagaaccctggaccctagcattggaaaatgttgtaggagcaaagaacatgaatgtaaggccactgctcaactactttgagcccttatttacctggctgaaagaccagaacaagaattcttttgtgggatggagtaccgactggagtccatatgcagaccaaagcatcaaagtgaggataagcctaaaatcagctcttggagataaagcatatgaatggaacgacaatgaaatgtacctgttccgatcatctgttgcatatgctatgaggcagtactttttaaaagtaaaaaatcagatgattctttttggggaggaggatgtgcgagtggctaatttgaaaccaagaatctcctttaatttctttgtcactgcacctaaaaatgtgtctgatatcattcctagaactgaagttgaaaaggccatcaggatgtcccggagccgtatcaatgatgctttccgtctgaatgacaacagcctagagtttctggggatacagccaacacttggacctcctaaccagccccctgtttccatatggctgattgtttttggagttgtgatgggagtgatagtggttggcattgtcatcctgatcttcactgggatcagagatcggaagaagaaaaataaagcaagaagtggagaaaatccttatgcctccatcgatattagcaaaggagaaaataatccaggattccaaaacactgatgatgttcagacctccttttagaaaaatctatgtttttcctcttgaggtgattttgttgtatgtaaatgttaatttcatggtatagaaaatataagatgataaagatatcattaaatgtcaaaactatgactctgttcagaaaaaaaattgtccaaagacaacatggccaaggagagagcatcttcattgacattgctttcagtatttatttctgtctctggatttgacttctgttctgtttcttaataaggattttgtattagagtatattagggaaagtgtgtatttggtctcacaggctgttcagggataatctaaatgtaaatgtctgttgaatttctgaagttgaaaacaaggatatatcattggagcaagtgttggatcttgtatggaatatggatggatcacttgtaaggacagtgcctgggaactggtgtagctgcaaggattgagaatggcatgcattagctcactttcatttaatccattgtcaaggatgacatgctttcttcacagtaactcagttcaagtactatggtgatttgcctacagtgatgtttggaatcgatcatgctttcttcaaggtgacaggtctaaagagagaagaatccagggaacaggtagaggacattgctttttcacttccaaggtgcttgatcaacatctccctgacaacacaaaactagagccaggggcctccgtgaactcccagagcatgcctgatagaaactcatttctactgttctctaactgtggagtgaatggaaattccaactgtatgttcaccctctgaagtgggtacccagtctcttaaatcttttgtatttgctcacagtgtttgagcagtgctgagcacaaagcagacactcaataaatgctagatttacacactc

SEQ ID NO: 54943 - DNA, 3183 bp, Homo sapiens
cgcccaacccaagttcaaaggctgataagagagaaaatctcatgaggaggttttagtctagggaaagtcattcagtggatgtgatcttggctcacaggggacgatgtcaagctcttcctggctccttctcagccttgttgctgtaactgctgctcagtccaccattgaggaacaggccaagacatttttggacaagtttaaccacgaagccgaagacctgttctatcaaagttcacttgcttcttggaattataacaccaatattactgaagagaatgtccaaaacatgaataatgctggggacaaatggtctgcctttttaaaggaacagtccacacttgcccaaatgtatccactacaagaaattcagaatctcacagtcaagcttcagctgcaggctcttcagcaaaatgggtcttcagtgctctcagaagacaagagcaaacggttgaacacaattctaaatacaatgagcaccatctacagtactggaaaagtttgtaacccagataatccacaagaatgcttattacttgaaccaggtttgaatgaaataatggcaaacagtttagactacaatgagaggctctgggcttgggaaagctggagatctgaggtcggcaagcagctgaggccattatatgaagagtatgtggtcttgaaaaatgagatggcaagagcaaatcattatgaggactatggggattattggagaggagactatgaagtaaatggggtagatggctatgactacagccgcggccagttgattgaagatgtggaacatacctttgaagagattaaaccattatatgaacatcttcatgcctatgtgagggcaaagttgatgaatgcctatccttcctatatcagtccaattggatgcctccctgctcatttgcttggtgatatgtggggtagattttggacaaatctgtactctttgacagttccctttggacagaaaccaaacatagatgttactgatgcaatggtggaccaggcctgggatgcacagagaatattcaaggaggccgagaagttctttgtatctgttggtcttcctaatatgactcaaggattctgggaaaattccatgctaacggacccaggaaatgttcagaaagcagtctgccatcccacagcttgggacctggggaagggcgacttcaggatccttatgtgcacaaaggtgacaatggacgacttcctgacagctcatcatgagatggggcatatccagtatgatatggcatatgctgcacaaccttttctgctaagaaatggagctaatgaaggattccatgaagctgttggggaaatcatgtcactttctgcagccacacctaagcatttaaaatccattggtcttctgtcacccgattttcaagaagacaatgaaacagaaataaacttcctgctcaaacaagcactcacgattgttgggactctgccatttacttacatgttagagaagtggaggtggatggtctttaaaggggaaattcccaaagaccagtggatgaaaaagtggtgggagatgaagcgagagatagttggggtggtggaacctgtgccccatgatgaaacatactgtgaccccgcatctctgttccatgtttctaatgattactcattcattcgatattacacaaggaccctttaccaattccagtttcaagaagcactttgtcaagcagctaaacatgaaggccctctgcacaaatgtgacatctcaaactctacagaagctggacagaaactgttcaatatgctgaggcttggaaaatcagaaccctggaccctagcattggaaaatgttgtaggagcaaagaacatgaatgtaaggccactgctcaactactttgagcccttatttacctggctgaaagaccagaacaagaattcttttgtgggatggagtaccgactggagtccatatgcagaccaaagcatcaaagtgaggataagcctaaaatcagctcttggagataaagcatatgaatggaacgacaatgaaatgtacctgttccgatcatctgttgcatatgctatgaggcagtactttttaaaagtaaaaaatcagatgattctttttggggaggaggatgtgcgagtggctaatttgaaaccaagaatctcctttaatttctttgtcactgcacctaaaaatgtgtctgatatcattcctagaactgaagttgaaaaggccatcaggatgtcccggagccgtatcaatgatgctttccgtctgaatgacaacagcctagagtttctggggatacagccaacacttggacctcctaaccagccccctgtttccatatggctgattgtttttggagttgtgatgggagtgatagtggttggcattgtcatcctgatcttcactgggatcagagatcggaagaagaaaaataaagcaagaagtggagaaaatccttatgcctccatcgatattagcaaaggagaaaataatccaggattccaaaacactgatgatgttcagacctccttttagaaaaatctatgtttttcctcttgaggtgattttgttgtatgtaaatgttaatttcatggtatagaaaatataagatgataaagatatcattaaatgtcaaaactatgactctgttcagaaaaaaaattgtccaaagacaacatggccaaggagagagcatcttcattgacattgctttcagtatttatttctgtctctggatttgacttctgttctgtttcttaataaggattttgtattagagtatattagggaaagtgtgtatttggtctcacaggctgttcagggataatctaaatgtaaatgtctgttgaatttctgaagttgaaaacaaggatatatcattggagcaagtgttggatcttgtatggaatatggatggatcacttgtagaggacattgctttttcacttccaaggtgcttgatcaacatctccctgacaacacaaaactagagccaggggcctccgtgaactcccagagcatgcctgatagaaactcatttctactgttctctaactgtggagtgaatggaaattccaactgtatgttcaccctctgaagtgggtacccagtctcttaaatcttttgtatttgctcacagtgtttgagcagtgctgagcacaaagcagacactcaataaatgctagatttacacactc

SEQ ID NO: 54944 - DNA, 3294 bp, Homo sapiens
cgcccaacccaagttcaaaggctgataagagagaaaatctcatgaggaggttttagtctagggaaagtcattcagtggatgtgatcttggctcacaggggacgatgtcaagctcttcctggctccttctcagccttgttgctgtaactgctgctcagtccaccattgaggaacaggccaagacatttttggacaagtttaaccacgaagccgaagacctgttctatcaaagttcacttgcttcttggaattataacaccaatattactgaagagaatgtccaaaacatgaataatgctggggacaaatggtctgcctttttaaaggaacagtccacacttgcccaaatgtatccactacaagaaattcagaatctcacagtcaagcttcagctgcaggctcttcagcaaaatgggtcttcagtgctctcagaagacaagagcaaacggttgaacacaattctaaatacaatgagcaccatctacagtactggaaaagtttgtaacccagataatccacaagaatgcttattacttgaaccaggtttgaatgaaataatggcaaacagtttagactacaatgagaggctctgggcttgggaaagctggagatctgaggtcggcaagcagctgaggccattatatgaagagtatgtggtcttgaaaaatgagatggcaagagcaaatcattatgaggactatggggattattggagaggagactatgaagtaaatggggtagatggctatgactacagccgcggccagttgattgaagatgtggaacatacctttgaagagattaaaccattatatgaacatcttcatgcctatgtgagggcaaagttgatgaatgcctatccttcctatatcagtccaattggatgcctccctgctcatttgcttggtgatatgtggggtagattttggacaaatctgtactctttgacagttccctttggacagaaaccaaacatagatgttactgatgcaatggtggaccaggcctgggatgcacagagaatattcaaggaggccgagaagttctttgtatctgttggtcttcctaatatgactcaaggattctgggaaaattccatgctaacggacccaggaaatgttcagaaagcagtctgccatcccacagcttgggacctggggaagggcgacttcaggatccttatgtgcacaaaggtgacaatggacgacttcctgacagctcatcatgagatggggcatatccagtatgatatggcatatgctgcacaaccttttctgctaagaaatggagctaatgaaggattccatgaagctgttggggaaatcatgtcactttctgcagccacacctaagcatttaaaatccattggtcttctgtcacccgattttcaagaagacaatgaaacagaaataaacttcctgctcaaacaagcactcacgattgttgggactctgccatttacttacatgttagagaagtggaggtggatggtctttaaaggggaaattcccaaagaccagtggatgaaaaagtggtgggagatgaaatattacacaaggaccctttaccaattccagtttcaagaagcactttgtcaagcagctaaacatgaaggccctctgcacaaatgtgacatctcaaactctacagaagctggacagaaactgttcaatatgctgaggcttggaaaatcagaaccctggaccctagcattggaaaatgttgtaggagcaaagaacatgaatgtaaggccactgctcaactactttgagcccttatttacctggctgaaagaccagaacaagaattcttttgtgggatggagtaccgactggagtccatatgcagaccaaagcatcaaagtgaggataagcctaaaatcagctcttggagataaagcatatgaatggaacgacaatgaaatgtacctgttccgatcatctgttgcatatgctatgaggcagtactttttaaaagtaaaaaatcagatgattctttttggggaggaggatgtgcgagtggctaatttgaaaccaagaatctcctttaatttctttgtcactgcacctaaaaatgtgtctgatatcattcctagaactgaagttgaaaaggccatcaggatgtcccggagccgtatcaatgatgctttccgtctgaatgacaacagcctagagtttctggggatacagccaacacttggacctcctaaccagccccctgtttccatatggctgattgtttttggagttgtgatgggagtgatagtggttggcattgtcatcctgatcttcactgggatcagagatcggaagaagaaaaataaagcaagaagtggagaaaatccttatgcctccatcgatattagcaaaggagaaaataatccaggattccaaaacactgatgatgttcagacctccttttagaaaaatctatgtttttcctcttgaggtgattttgttgtatgtaaatgttaatttcatggtatagaaaatataagatgataaagatatcattaaatgtcaaaactatgactctgttcagaaaaaaaattgtccaaagacaacatggccaaggagagagcatcttcattgacattgctttcagtatttatttctgtctctggatttgacttctgttctgtttcttaataaggattttgtattagagtatattagggaaagtgtgtatttggtctcacaggctgttcagggataatctaaatgtaaatgtctgttgaatttctgaagttgaaaacaaggatatatcattggagcaagtgttggatcttgtatggaatatggatggatcacttgtaaggacagtgcctgggaactggtgtagctgcaaggattgagaatggcatgcattagctcactttcatttaatccattgtcaaggatgacatgctttcttcacagtaactcagttcaagtactatggtgatttgcctacagtgatgtttggaatcgatcatgctttcttcaaggtgacaggtctaaagagagaagaatccagggaacaggtagaggacattgctttttcacttccaaggtgcttgatcaacatctccctgacaacacaaaactagagccaggggcctccgtgaactcccagagcatgcctgatagaaactcatttctactgttctctaactgtggagtgaatggaaattccaactgtatgttcaccctctgaagtgggtacccagtctcttaaatcttttgtatttgctcacagtgtttgagcagtgctgagcacaaagcagacactcaataaatgctagatttacacactc

SEQ ID NO: 54945 - DNA, 1633 bp, Homo sapiens
gtttgccacaatcctgggccaccgattattccttgttgattctcctgctgttttcagtttggaaattttctataattgaaaaagatgtgggttttatataaaggcagaacaaatagtgccaaaacttgatatcacaatttttatgtagttgatttcatgtgctttgggcagcattaatgttttttttgacaattacatcctctcattgtttgccctcccccatgtctctctatcctgtgattctctctctaatctccttttcaccagcaggggaagtcttcattctcttgattgtgtcctctgtgccacaagtgaagatgtttgttttgtttctctacagggaggaggatgtgcgagtggctaatttgaaaccaagaatctcctttaatttctttgtcactgcacctaaaaatgtgtctgatatcattcctagaactgaagttgaaaaggccatcaggatgtcccggagccgtatcaatgatgctttccgtctgaatgacaacagcctagagtttctggggatacagccaacacttggacctcctaaccagccccctgtttccatatggctgattgtttttggagttgtgatgggagtgatagtggttggcattgtcatcctgatcttcactgggatcagagatcggaagaagaaaaataaagcaagaagtggagaaaatccttatgcctccatcgatattagcaaaggagaaaataatccaggattccaaaacactgatgatgttcagacctccttttagaaaaatctatgtttttcctcttgaggtgattttgttgtatgtaaatgttaatttcatggtatagaaaatataagatgataaagatatcattaaatgtcaaaactatgactctgttcagaaaaaaaattgtccaaagacaacatggccaaggagagagcatcttcattgacattgctttcagtatttatttctgtctctggatttgacttctgttctgtttcttaataaggattttgtattagagtatattagggaaagtgtgtatttggtctcacaggctgttcagggataatctaaatgtaaatgtctgttgaatttctgaagttgaaaacaaggatatatcattggagcaagtgttggatcttgtatggaatatggatggatcacttgtaaggacagtgcctgggaactggtgtagctgcaaggattgagaatggcatgcattagctcactttcatttaatccattgtcaaggatgacatgctttcttcacagtaactcagttcaagtactatggtgatttgcctacagtgatgtttggaatcgatcatgctttcttcaaggtgacaggtctaaagagagaagaatccagggaacaggtagaggacattgctttttcacttccaaggtgcttgatcaacatctccctgacaacacaaaactagagccaggggcctccgtgaactcccagagcatgcctgatagaaactcatttctactgttctctaactgtggagtgaatggaaattccaactgtatgttcaccctctgaagtgggtacccagtctcttaaatcttttgtatttgctcacagtgtttgagcagtgctgagcacaaagcagacactcaataaatgctagatttacacactc

SEQ ID NO: 54946 - DNA, 1529 bp, Homo sapiens
cgcccaacccaagttcaaaggctgataagagagaaaatctcatgaggaggttttagtctagggaaagtcattcagtggatgtgatcttggctcacaggggacgatgtcaagctcttcctggctccttctcagccttgttgctgtaactgctgctcagtccaccattgaggaacaggccaagacatttttggacaagtttaaccacgaagccgaagacctgttctatcaaagttcacttgcttcttggaattataacaccaatattactgaagagaatgtccaaaacatgaataatgctggggacaaatggtctgcctttttaaaggaacagtccacacttgcccaaatgtatccactacaagaaattcagaatctcacagtcaagcttcagctgcaggctcttcagcaaaatgggtcttcagtgctctcagaagacaagagcaaacggttgaacacaattctaaatacaatgagcaccatctacagtactggaaaagtttgtaacccagataatccacaagaatgcttattacttgaaccaggtttgaatgaaataatggcaaacagtttagactacaatgagaggctctgggcttgggaaagctggagatctgaggtcggcaagcagctgaggccattatatgaagagtatgtggtcttgaaaaatgagatggcaagagcaaatcattatgaggactatggggattattggagaggagactatgaagtaaatggggtagatggctatgactacagccgcggccagttgattgaagatgtggaacatacctttgaagagattaaaccattatatgaacatcttcatgcctatgtgagggcaaagttgatgaatgcctatccttcctatatcagtccaattggatgcctccctgctcatttgcttggtgatatgtggggtagattttggacaaatctgtactctttgacagttccctttggacagaaaccaaacatagatgttactgatgcaatggtggaccaggcctgggatgcacagagaatattcaaggaggccgagaagttctttgtatctgttggtcttcctaatatgactcaaggattctgggaaaattccatgctaacggacccaggaaatgttcagaaagcagtctgccatcccacagcttgggacctggggaagggcgacttcaggatccttatgtgcacaaaggtgacaatggacgacttcctgacagctcatcatgagatggggcatatccagtatgatatggcatatgctgcacaaccttttctgctaagaaatggagctaatgaaggattccatgaagctgttggggaaatcatgtcactttctgcagccacacctaagcatttaaaatccattggtcttctgtcacccgattttcaagaagacaatggaaattccaactgtatgttcaccctctgaagtgggtacccagtctcttaaatcttttgtatttgctcacagtgtttgagcagtgctgagcacaaagcagacactcaataaatgctagatttacacactc

SEQ ID NO: 54947 - DNA, 347 bp, Homo sapiens
atgcttcgctccctgcagcacaaatactctctccctcctttcacttctttctccaaacacctagagctgctcggggcggcccagatgaacccatgagtggtgatggggaacaaaggctctgaactcacatcaaaggggttcaaaccccagcacttaacaagctgcgattccttgcgcatatccctcaaggcctctgagcttttgttttttcatctctaaaacggggagggggggggaatatcttcatagggttgttgtgtggatcgaaagagatacttagcacaatgcctggcacacagcaggcactcaacaatgttaaccacaagtatacgtaaaggaaggagagg

SEQ ID NO: 54948 - DNA, 434 bp, Homo sapiens
tggtctaaatgcttagtaagtagacagagatgatatagatcttaataaatagtttaatgtgaaactagagaatgaagcaaaggtatgaaaaatacttttataataactgatgtctgattttatctttattattttatgcgtaaaagtgttacttggaataagaactggtagcatcccaacattctagcaggctccatttctctaccaaaggtaatcaccagttggtaagcaatttttttttttttagtaaactggaatttgtacatccaaatgattgctgttcttcaaagtggacatattggatgataagacattttaagaactcctatttgggaattgtctttgctgctttggctattaatgtacctgtatcttgactccctactcaccacttctctaagacttgtcccttgccatcaaggaagcttcagtaa

SEQ ID NO: 54949 - DNA, 455 bp, Homo sapiens
agccacttctgttgaaggaaagatcatggtgaacaaacaagcatcatacaacaccaggtggtgatacgtgttatgaaggtaaataaaacaatggtaaggggagttctagagcaacaggactgccattttagattgagtgtccaagaaggactctgagagtcatcattagagcagactaccgagtgacatataagaacgtcacacaagtgggagttgagcagtgagaacacatggacacagggaggggaacatcacacaccggggcctgtcagcggggtggggacaaaggggagggagagcattagggcaaatacctaatgcatgtggggcttaaaacctagacgacgggttgataggtgcagcaaaccaccatggcacatgtatacctatgtaacaaacctgcacgttcagctcatgtatcccagaacttaaagtaaaataaaaaataaaacttt

SEQ ID NO: 54950 - DNA, 351 bp, Homo sapiens
ttgcccgggctggactgcaatggcacaatctcggctcaccgcaacctcagcctcccaggttcaagcgattctcttgccttagcctcctgagtagctgggattagaggcatgcgccaccacgctcggctaattttgtatttttagaagaaacagggtttctccatgttggtcaggctggtctcgaactccagacctcaggtgacccacccaccttggcctcccaaagtgctgggattacaggcgtgagccaccgcacccggtcttctgtgttattaacagcacttttggtgatcttgaatgcattggcatataactaaaaaatttccttttggaaaaatgtcaagaaagggg

SEQ ID NO: 54951 - DNA, 445 bp, Homo sapiens
aactgtgagaaaagaacgtttctgtagttgaagccacctcgtctgtggtattttgttatggcagccccagccaacaaacacacggtggtgtatacacttcaggtaaccatgagcatatggcagagctggcagtgaagcctgagtttgtgtcctgacacattcctgtcaccgcgccttgctgcctcctaggtgcggcaacaatgctggctttcctgacggagagagggaggccggcatccccaggccacacctataatgcctctcaccccatacacgtgtgcacaacacgcctcctcccctcctcacaatcttgggtgcacccagtagctacacccggctggcaccggagcccagggaggccagccccactctaaagaggccccgaagaattcaaggcctcctaggagtaccctgaggagaagaaaataatccctcaatggggagt

SEQ ID NO: 54952 - DNA, 326 bp, Homo sapiens
ggttgtaatcctagctacttgggaggctgaggcagagaatcaccttgagcccaggagttctagaccagtctgggtaacatagtgacaccttcatctcattacaaaatgtcctctttttcaaggaaatttgatggggtctatttgcttcaagataaacctcactaaacccagatttagttgctatctgtcattttcgttgacactggttctctcatatgaaggtgtttctggggttaatgtgtttctagtgcatttccagcattttaaagctatttaagtaagacattgtcctatatatgttaataaaattcattattaaatatatt

SEQ ID NO: 54953 - DNA, 104 bp, Homo sapiens
ccattgactttatggtggtgctcgttatctttagtatttattttattaaattattattttatttttattgtagtttttctatccaaaatagaaacgcctcttca

SEQ ID NO: 54954 - DNA, 705 bp, Homo sapiens
attcctgcagttctagtgtgccgactgaaaccctggagccctgagcaggaattccttgggagagtttgctgagggcctactaggtgcatgtattaacacttctgcgatttctgcaaggatcatactgtctaaaggagaaacacgttttgtgagacaacactttcatagatgtgcagtagaagcctctggtttttccaaatgaggaaggcaggtgagagcatgggaaccacatcaaagccttgcctagaaatctgtgccgggagagggggcttctgtctgcttgaggagggcagaggagtgggagtgagaagccaggaagaaaattctgttcctctgggccaggttacagattctcatgaaagtgctgaacaccacggactcaggctcgtggttaagaaagagcctcgttttacgatctccagtcatttggtcttctgtatcaaaaacacactttcactggggatgtgtgtgtgtatgttatatacacacatgtatatttacatgtacattttctttctaaattaagcaaacaggtagaaggtatgtttctaagggtaactctccttttgtttttccctcaattctggaccagaaaaatcagattagcagggctctagtaaacgtttctgtttttcccaattccaaacttcaggtcttttcatctctaagtactccattttatataagctataactcctgtgtaaa

SEQ ID NO: 54955 - DNA, 438 bp, Homo sapiens
gaggtgggacaggttgcccccatactggctgctgctttcctggtcctctctcctgcaaagaaatgcagattccagcagtttgaataggtttgagcactctgccagcagcttttattaccaataatattgtttaagcttggaaaagagaatgaaactacccacaactgtcccacaagccatgacatggcagaagtgtttgtgtttcgtgtgctccccccagtgtgttttctgtgcatctctgcaggttcactcattcagcagctgtctactgagtggttgtcacgcaggaggttcctgtttgaggtgctggggatatagcattgtgtactcactgggagaatagtgtgggcagctagtgatgagtaggaagaaaaacaaagcttggtaaggggttcgaggtgtgattgtgactatttagacagggagattgggaagacc

SEQ ID NO: 54956 - DNA, 731 bp, Homo sapiens
cataaagctgcattaacctcatacaggcactagaataacaggatcagcttgtgcattttaagattgtagcactgtgccgatgactttgaagatgcgtttatctgtgttaaatgaaatgttatgctgccctaacagaatcggagttgatgctgcttcctgtcctgacccctgtgggtctgtgttccctgataattttacacaacactgaggcgggaagaacgtaaattccaggaatgcatttatggttaatctgttgttgaggtttagtcagacagccagtgttttataaaccaagcctcccatgaaattgggctggaggaagagggatctaatagagcagataattaccacttgctctccattaactcagcccttgtgcccgggacacttttccttttggccagcaaaattggagtggctttgtcatgtttacagggagcctgcctgttggctattagagagggacagaaagaatctgcatatagaaaccctgaaagaatacacactaggcaactaataaaaatggtcgggaacctgagcagcatagtgagaccctttctctaaaacaatttttaaaaacttagccaggcatggaggcacacactaggtcccagctactccggaggctgaagtgggaggatcccttgaacctaggagtttgaggttgcagtgagctgtgatcgcaccactacactacagcttgggcaacagagtgagacccagactcttaa

SEQ ID NO: 54957 - DNA, 470 bp, Homo sapiens
tgctccttaagatagttatctgaccagctttgttaaaactgggaatctaaggatctcttaactccattttggtttgaagaaagatattaatattgaaatacatagttgcacaccaaatggcagtggggtcaggggttggggtacacttttatatctgctctcatttttccatccctgccagatagttgttatttctgattctaattgttacttctgattctctaaatcagtggacttgtaattatatattgctttgctaattatgtttccttaacattattttgacaaagtttcagttattatttacatatggctccttttaccatcagattgccatacacaggcataaatgtcacaaatattaagatagttgaagttttcagagcggcagacatttggggaaaattatggaaccttcatgtgttggagctggaaagagcctttcagtcaggactactttaatcatttct

SEQ ID NO: 54958 - DNA, 664 bp, Homo sapiens
aggtagggaagtttggcaggattgtagataagggagattaaaatactgaccacaaaaaacaaacaggcagttttgacagaatttaataatcaacaactaaaagttcctagttgtgaagcagttgttttatctgaaagacaaatgataaaagaaagctttgaaaattatagcaagggctcataaactgagaacaccacaatgggtaagtgaactgagaaaaacgtatttattctgtacacgcaaaggctgagacatgagatacttcattaactctgaaacttctgaggatggtgccaggttttcctttttagagctaggcaggaagcatttaaaaatcacaaaaataagcctaagaagacttgccaaaggtatgttcattgaaaattaattgtgtcagctgatggagacttgaaagtctttatgctatcaagtaattatgagtacacaaaattttagatggtctagtcttcacaaaaacaaggaaatactgtcaggcaggaaaaaaaaaacaagagaaaatagtgtatgtatggcatcttttgtggggagaaggaagagaataagaaaaacattcacatttccttctatttgcataaagaaatgcaggaagaatatacaacttacaatggtgatttacttgtaaggaggaacagggagctgggtg

SEQ ID NO: 54959 - DNA, 434 bp, Homo sapiens
tgatcttgaactcttgggctcaagcaatcctctcatcttggcctcccaagtagccaaagctggctcatgtcaccaagctggctttagttctaatgaagatttaagatagtaaagtccatcagacaaaattctggtgatataataatatatcttatattctctcaactcctccctatttataatgaacaaatgtttggacaaaaaaaatgtttagttcaccaccatggagtacatactgttagttgcctatccaacatgcatacaatccctatgcccttcttaagggaactgctgatcatcctctcattgttgtgtacttcagggaaaactgaacctcagcctcaggtatagggaatgaatcctgggtagtttaagccaaccatggtaaacccatttcccatgctgactattaatttagaaacagacacgtaaca

SEQ ID NO: 54960 - DNA, 248 bp, Homo sapiens
attatttttcaagattaatatttattccagtaactgaatgtttcttttccaatgaaatattctgaaaataattcagaaaggaaatattcagtaaagaaatatgttgtctgtaaatctaaagaacatatgtgaaaattctatatgcaaaattacatgaatgagactttctggtatattattactatgagaagtactagacagtatgtttaattttaattttcaaagttcttacagattaagtattgatg

SEQ ID NO: 54961 - DNA, 397 bp, Homo sapiens
ggtttgcagaacattggctacagtaagaacatactctgcatcagagagggttcaacattaacaacgtctgtaaaaacagaatcacagctgtcaagaagagtgctttctccatgtactgtgaaacacatccatctggatccacctatttaagctacatgcctagcctccagagtcatccagacttttagcataagaactcaaatgagaaatcatgaagaatgcattaactgaatccaatatcacctacaggaccctgggcccattgcactttgtaattgtattacttttcttctggttatcttcataggatcttaggtatactctctctgaaaagtgttaaagacaacttctccctgggcctgagaataaattatctttttcctatcgctgtaaaaaa

SEQ ID NO: 54962 - DNA, 618 bp, Homo sapiens
aaaagaagacacaaacagagaagcagagagagaatttaggggcaacatgatgagtttgatcacagatttgatgcgtgggacatcagtacaggagaagatgtatataaaacttggcatggtgcagggatgtattcaagaactctacaccgccaccaccgcccttctaagtcacttttgtctgttgcctggcctgctgcagtagcctttttagtcctcctagtagttttcttgccacctccaatttactcacaaagatgccaaagtaatatttttagaagcaaccatattgtattactctcctatttaaaacccttcaaaagcaccaggcatggtggctcacacctataatcctaatacttgggaacctgaagtgggagtattgcttgaggctgggagtttaagaccagcctgggcaacatagagagactctgtcgccaaaaaatttttgtatttagccaggcatggtggcttatgcctgtagtcccagctactcagagggctgaagtgggaagattgcttgagcccaggagttaaagcctgcagtgagctgtcatcatgctattgcattccagtctgggtgacaaagtgagacaagaaagaaaggaagaaaggaaggaa

SEQ ID NO: 54963 - DNA, 1010 bp, Homo sapiens
ggctggtgaattaccagatctccgtcaagtgcagtaaccagttcaagttggaaggtgtgtcttttgaatgcagaaaacaaagtcgtggacaaccaggctgggacccagggccagctgaaggtgctgggtgccaacctctggtggccgtacctgatgcacgaacaccccgcctacctgtactcgtgggaggatggtgattgctcacaccaaagccttggacccctcccagcctgtgacctttgtgaccaactccacctacgcagcagacaagggggctctgtatgtggatgtgatccgtgtgaacagctactactcttggtatcgcaactacgggcacctggagttgattcagctgcagctggccgcccagtttgagaattggtgtaagacatcacaatcccattattcagagcgcgtatggagtggaaacgcttgtagggtttcaccaggatccacctctgatgttcagtgaagaggaccggaaaagtctgctagagcagtaccatctgggtctggatcaaaaacgcagaaaatacgtggttggagagctcatctggaattttgccgatttcatgactaaccagtgtgtcagtttcttggtcgggaatgaaaatagtgccaacctgtgataccttcactctaattttactttctgaggaagttttctgtaatagttatttggtgataattattaatactggtgagaatttcttcggagtaagaaatcctcagaggaaattacccagtatattcaaagctacaagggatttgttgacataacggtctgttttcaaggcagtttccggaaacagtgaccctgagaaggcttcctcctgagtatgcataaacattcacagcttgcatgcgtgtgtgtgtgtgtgtgtgtgtgtgtgtgtatgtttgcttgcactgcataaaaacaattgcaacatcaacagaaataaaaattaaaggaataattctcctccgactctgccgttccatccagtgaaactcttcattctggggga

SEQ ID NO: 54964 - DNA, 505 bp, Homo sapiens
cccagtgaggacagatattttggtcaccatcaagtggatctttatttttatctaacatttacaattctgccagttcttactcttaattctctttgccttgaatcccaggatccacctctgatgttcagtgaagaggaccggaaaagtctgctagagcagtaccatctgggtctggatcaaaaacgcagaaaatacgtggttggagagctcatctggaattttgccgatttcatgactaaccagtgtgtcagtttcttggtcgggaatgaaaatagtgccaacctgtgataccttcactctaattttactttctgaggaagttttctgtaatagttatttggtgataattattaatactggtgagaaaatcaatgtaaaagaggagaaataacccacacaaccacatacaactaggaaatgatagatggatctgaaaaaaaggatatgcactcttaacaagttcaacacccaagtactattgcaagtaccagctgtatttcatgga

SEQ ID NO: 54965 - DNA, 626 bp, Homo sapiens
acattaatattagggtattaagaagatgctcagcaagcttgatcagaatcttcatggtcattaccaatcagtctgacaaaatagttctctggtagtcagcattcatttaaggcagcttgcctgataatttcctgtgttatgtgaagtgtcttgcactttcacatgttagctataattccttaaattacttaactgaaatctgtaatagagaaccattttggcatttgaacagctattttacatggagaaaaagcaaacacatctgtttgctttacccagaaaaactgactttctggtttcatcttcatattgtttagtagcataatgagagtagtcctttatctttctctaatgttagtaaatatattctgttagtaggaagttctgaaattgaagggaaaatatatttaaggaaataaaggaattcaatacacccttcaaaagtcaccaaatactgaaaataagagatgagtccttaaaacctgagtcaaaaaaggtccagttttacagcctgcaattaattcagggctgcgttggcattaaaaaagaaaatatatatatatatatatatatatatatatatatattatatatatgtatattatatatacagtagcttacactta

SEQ ID NO: 54966 - DNA, 2567 bp, Homo sapiens
cacaccccatctgggggaaggacaggagctggacaggccaagagctatctcccttggctggagaagaccgggaaaaagggagtactggagccaggaaggaagaagagggagggccagtgctggtaaaggagaagttgggcctgaagaagttagtcctcacccaggagcagaagaccatgttgttggattggaatgactccatccctgagagtgtgcacctcaaagctggggagcgaatttcccagaaaagtgctgagaatggtagaggaggccgtgtgctaaaaccagtccgccccctgctgctccctagggcagcaggagagcccctgccaacccagagaggggctcaggagaagatggggacccctgcggaacaagctcaaggggagcgaaacgtgcctccacccaagtccccactgcggctcatagccaatgccatccgaaggtctctagagcccctcctttccaactctgaaggcgggaagaaggcctgggccaagcaagaatccaaaactttgcccacacaggcctgcactcgctcattcagccttcggaaaaccaattccaataaagacggggaccagcattcccctgggagaaaccagtcctcagcctttagccctcctgaccctgccctccgcacccacagtttgcccaatcggccatccaaggtctttcctgcacttaggtccccaccctgcagcaagattgaagaagtccccacactcctcgagaaagtgagtttgcaagagaacttcccagatgcttctaagcctccaaagaaaagaatctcacttttttcctccctcagactcaaagacaaatcttttgagagtttcctccaagaatccagacaaagaaaggacatcagggacctctttggcagccccaagaggaaggtgctgcctgaagatagtgcgcaggccctggagaagctgctgcagcctttcaaaagcacctccctgcgccaggcagctcctcctcctcctcctcctcctcctcctcctcctcctcctcctcctccccctacagcgggaggtgcagactccaagaactttcccctcagagcacaggtaacagaggcttcctcttctgcctcttcaacctcctcctcctctgcagatgaagaatttgatccccagctttccttgcagttaaaggagaagaagacacttagaagaagaaagaagctagaaaaagcaatgaagcagttggttaagcaagaagaattgaaaagactctataaggctcaggccatccagaggcagctggaggaggtggaggagcggcagagggcttctgagatccagggtgtgaggctggagaaggcgttgcgaggagaagcagattcaggcacacaggatgaagcacagcttttgcaggaatggtttaagctggttctggagaagaataaattaatgcgatatgagtcggagctcctaatcatggcccaggaactggaattagaagatcatcaaagcagactggagcagaaactgagagagaaaatgctcaaggaggagagccagaaagatgagaaggatctaaacgaagagcaagaagtattcaccgagctgatgcaagtgattgagcaaagggacaaactcgtcgattccttagaggaacaacgcatcagagaaaaagccgaggaccagcactttgaaagcttcgtattctccagaggctgtcagctgagcaggacttgaggaggcccgtagtccctctccctggctgcacgttgggaccggatcaggccaagtgcaccacacaccctcatgggtctttctgcaggatttatcatccctggaacttaagttataccttactgcattttttaaaattaaaattctcttgcacgcatggcagcttcccaaggttcttccagagattcaaatgaagaaaacccaaagactctttggcaattggcagtcaacttcagccaggctctcagactggaggtgttgttggcagatgaccagcattgttttccctagaaagtgacacaaagacttgactttcctgctacttttatcattttccttcccaattcattgagttacatactttaagatttttgagaagctgccttttcattaatatatccatatttgcctttttttgtatggatgaccagtttccaaatgtcagaaagaagcagccgcagtttaaagattaggttaatatttaaattgtgtttccagagaaagaggagaaaccttgagattactgattacataaagcaaataactcatatagcaggtgttaattcaatccagggtgaatttaatttaccaggtgcatttataagccttaatataatatacataagcaatgagagcttaatagaacatttgagccttaattttattttaagaagaaaagaaaaaaggaaataaaactttaactttatgccagtgggattgttagtgttcaccaaacactgctggcttagaaaagcttttcgtccccgtgctatgctttttatggaccctggaaaataatgaaaagcattttcagaaaatgaatgattttaaagtactttttaaataagtgttgatgatggcaaa

SEQ ID NO: 54967 - DNA, 421 bp, Homo sapiens
tcgaggctgctgtcaccagaggggctgattttctaggagattctgcagagtggcgtgttcgtgcaacacctttcatttataaaatgctgttgattaatttaaaaacagaacaatactgtctcagccaaacatagcacattctttgggccatgggcttatgactcctgctgcagtagcgaacctgatgatgctaggtccagactggcagggcgtggggcatgttgtcccttctaatttacaacagagcccctgactaggttggaagccagtgtagccatgtgggtgtagcaaaatagatggaatgcaggctttcagttaatctgcacacgttcctttcaggatacagcagtcttattttgtaattgagaaaaaaggggagctcagagaggtacatagttggcagcgagtagcaggttttact

SEQ ID NO: 54968 - DNA, 496 bp, Homo sapiens
gtgcttcatagtccaccatcttcccggaattctgtttatagctttttaaataacagatttattgatatataactcatataccatacaattcaaccctttaaagtgtacaattcagtgggttttagtatattcagagttgtgcaaccatcaccacaatcaatttcagaaaatttttattactccaaaaaagaaacctttacccattagcagtcacttcccatttcctgaacccccaccccaactctatagccctagtcaaccactaatctataccctgtctctatagatttgcctagtctagaaattttgtataaatgaaatcatgcacttgaactttttgtatctggcttcttttcatttagcataaagttttaaaggtccttatatgttgctgcatgtgtcatttctttttgtgactgaatattacattgtatggatataccattttgcatattttgttaatccattcatcagttggtggacagcaggttatttc

SEQ ID NO: 54969 - DNA, 885 bp, Homo sapiens
catccttttaccacagcctcagccacagtacgtctaattatttaaaatttgtgattatcgctggtggtcaacaatttttttgtttttcatcctttaactggaaaaaggaggggctgtctcagtttttcttctgactctgtgtgtcacttacaattaataatgctagctgttaacatctacatagcagttgacatgtgccaggcctgtttaccagttaatcttctccatgatcctatgaggaaagtgctattgctgtctccatttcatagatgaggaaaatgaggcacagaggagacgttatgtagccactaccactgcaacttgctcaaacttccggccaagtcggctctagtccagacagcctgactcctcagcctgcgtctgtatgctgcctctcctaattcattatgtttattaataatttttccccgttttgttaacacttatgtttcaaaaacagtcatctttatttacattgactgatcatttcttttgtaatttcttctagtacttacaatagttctagtttcattaacatttcctatagactgaaaaaattttttaatctttttggaattttaatatagtcaagaaagtatctaaacttctcatttttcaaaatcttactgtcatttaataatccttcccttttccactgatttgtgacactataatagtaaattttacaagggcttgttttggttacttattcttgccctggggttatctttaaactgaccacagctttctaatatatttgatcgtaacttccaaaaactgtgtaatttttgcttatttgtcttgcatctagtcacttaactctcttttgcttttctaggcagatcctatattatctacaaataatatatttatttccttctttcc

SEQ ID NO: 54970 - DNA, 970 bp, Homo sapiens
ttacctgacctcggccggaggtcccctgaggactagggttgagattcaccggcgccagtcacggaatgaccccccgcatgacgaccgcgccgcaaatgggaacatacgagccctgccggaggaacccggatctgagaatgttccagccaagagtcaagaagtgcagagctgaacaaggaggtgtctaccaacactgccatgattcagaccagcaagacagagatcacggagctcaggcgcacgctccaaggcctggagattgagctgcagtcccagctgagcatgaaagcggggctggagaacacggtggcagagacggagtgccgctatgccctgcagctgcagcagatccagggactcatcagcagcatcgaggcccagctgagcgagctccgcagtgagatggagtgccagaaccaagagtacaagatgctgctggacatcaagacacgtctggagcaggagatcgccacctaccgcagcctgctcgagggccaggacgccaagatgattggtttcccttcctcagcaggaagcgtcagcccccgtagcacctctgttaccacgacttctagtgcctctgttaccaccacctctaatgcctctggtcgccgcacttctgatgtccgtaggccttaaatctgcctggcgtcccctccctctgtcttcagcacccagaggaggagagagccggcagttccctgcaggagagaggaggggctgctggacccaaggctcagtccctctgctctcaggaccccctgtcctgactctctcctgatggtgggccctctgtgctcttctcttcctgtcggatctctctcctctctgacctggatacgctttggtttctcaacttctctaccccaaagaaaagattattcaataaagtttcctgcctttctgcaaacataacaaccggcacagcctcggcctgattaacacccagcctcgacttatgctcatattt

SEQ ID NO: 54971 - DNA, 681 bp, Homo sapiens
  misc_feature (69)..(69): n is a, c, g, or t
ctctgcctactactgcatttgatggactctgtgacggggtcacccacactgtgcccatctatgaggggntgccctcccccatgccaccctgcgaacctatgtcataggttcgcagcatcgaggcccagctgagcgagctccgcagtgagatggagtgccagaaccaagagtacaagatgctgctggacatcaagacacgtctggagcaggagatcgccacctaccgcagcctgctcgagggccaggacgccaagatgattggtttcccttcctcagcaggaagcgtcagcccccgtagcacctctgttaccacgacttctagtgcctctgttaccaccacctctaatgcctctggtcgccgcacttctgatgtccgtaggccttaaatctgcctggcgtcccctccctctgtcttcagcacccagaggaggagagagccggcagttccctgcaggagagaggaggggctgctggacccaaggctcagtccctctgctctcaggaccccctgtcctgactctctcctgatggtgggccctctgtgctcttctcttcctgtcggatctctctcctctctgacctggatacgctttggtttctcaacttctctaccccaaagaaaagattattcaataaagtttcctgcctttctgcaaacataacctatgattgattctggcc

SEQ ID NO: 54972 - DNA, 335 bp, Homo sapiens
ggtcgactactactactaaattcgcggccgcgtcgacctctgggtgctgaagacagagggaggagagagccggcagttccctgcaggagagaggaggggctgctggacccaaggctcagtccctctgctctcaggaccccctgtcctgactctctcctgatggtgggccctctgtgctcttctcttcctgtcggatctctctcctctctgacctggatacgctttggtttctcaacttctctaccccaaagaaaagattattcaataaagtttcctgcctttctgcaaacataaaaaaagtcgacgcggccgcgaatttagtagtagtaggcggc

SEQ ID NO: 54973 - DNA, 1811 bp, Homo sapiens
atcgagctcgcaccctgccatttactccatggctagggttatagatagctgggtggctggggtaaatgagtgaggcaggagtcctcggcccaggccaagcaagcttctatctgcacctgctctcaatcctgctctcaccatgagcctccgcctgcagagctcctctgccagctatggaggtggtttcgggggtggctcttgccagctgggaggaggccgtggtgtctctacctgttcaactcggtttgtgtctgggggatcagctgggggctatggaggcggcgtgagctgtggttttggtggaggggctggtagtggctttggaggtggctatggaggtggccttggaggtggctatggaggtggccttggaggtggctttggtgggggttttgctggtggctttgttgactttggtgcttgtgatggcggcctcctcactggcaatgagaagatcaccatgcagaacctcaacgaccgcctggcttcctacctggagaaggtgcgcgccctggaggaggccaacgctgacctggaggtgaagatccgtgactggcacctgaagcagagcccagctagccctgagcgggactacagcccctactacaagaccattgaagagctccgggacaagatcctgaccgccaccattgaaaacaaccgggtcatcctggagattgacaatgccaggctggctgtggacgacttcaggctcaagtatgagaatgagctggccctgcgccagagcgtggaggccgacatcaacggcctgcgccgggtgctggatgagctcactctgtctaagactgacctggagatgcagatcgagagcctgaatgaagagctagcctacatgaagaagaaccatgaagaggagatgaaggaatttagcaaccaggtggtcggccaggtcaacgtggagatggatgccaccccaggcattgacctgacccgcgtgctggcagagatgagggagcagtacgaggccatggcagagaggaaccgccgggatgctgaggaatggttccacgccaagagtgcagagctgaacaaggaggtgtctaccaacactgccatgattcagaccagcaagacagagatcacggagctcaggcgcacgctccaaggcctggagattgagctgcagtcccagctgagcatgaaagcggggctggagaacacggtggcagagacggagtgccgctatgccctgcagctgcagcagatccagggactcatcagcagcatcgaggcccagctgagcgagctccgcagtgagatggagtgccagaaccaagagtacaagatgctgctggacatcaagacacgtctggagcaggagatcgccacctaccgcagcctgctcgagggccaggacgccaagatgattggtttcccttcctcagcaggaagcgtcagcccccgtagcacctctgttaccacgacttctagtgcctctgttaccaccacctctaatgcctctggtcgccgcacttctgatgtccgtaggccttaaatctgcctggcgtcccctccctctgtcttcagcacccagaggaggagagagccggcagttccctgcaggagagaggaggggctgctggacccaaggctcagtccctctgctctcaggaccccctgtcctgactctctcctgatggtgggccctctgtgctcttctcttcctgtcggatctctctcctctctgacctggatacgctttggtttctcaacttctctaccccaaagaaaagattattcaataaagtttcctgcctttctgcaaacataacctatgattgattctggcc

SEQ ID NO: 54974 - DNA, 1767 bp, Homo sapiens
aaacttaggctagtagaggcggtgttaggcagcagagcttctatctgcacctgctctcaatcctgctctcaccatgagcctccgcctgcagagctcctctgccagctatggaggtggtttcgggggtggctcttgccagctgggaggaggccgtggtgtctctacctgttcaactcggtttgtgtctgggggatcagctgggggctatggaggcggcgtgagctgtggttttggtggaggggctggtagtggctttggaggtggctatggaggtggccttggaggtggctatggaggtggccttggaggtggctttggtgggggttttgctggtggctttgttgactttggtgcttgtgatggcggcctcctcactggcaatgagaagatcaccatgcagaacctcaacgaccgcctggcttcctacctggagaaggtgcgcgccctggaggaggccaacgctgacctggaggtgaagatccgtgactggcacctgaagcagagcccagctagccctgagcgggactacagcccctactacaagaccattgaagagctccgggacaagatcctgaccgccaccattgaaaacaaccgggtcatcctggagattgacaatgccaggctggctgtggacgacttcaggctcaagtatgagaatgagctggccctgcgccagagcgtggaggccgacatcaacggcctgcgccgggtgctggatgagctcactctgtctaagactgacctggagatgcagatcgagagcctgaatgaagagctagcctacatgaagaagaaccatgaagaggagatgaaggaatttagcaaccaggtggtcggccaggtcaacgtggagatggatgccaccccaggcattgacctgacccgcgtgctggcagagatgagggagcagtacgaggccatggcagagaggaaccgccgggatgctgaggaatggttccacgccaagagtgcagagctgaacaaggaggtgtctaccaacactgccatgattcagaccagcaagacagagatcacggagctcaggcgcacgctccaaggcctggagattgagctgcagtcccagctgagcatgaaagcggggctggagaacacggtggcagagacggagtgccgctatgccctgcagctgcagcagatccagggactcatcagcagcatcgaggcccagctgagcgagctccgcagtgagatggagtgccagaaccaagagtacaagatgctgctggacatcaagacacgtctggagcaggagatcgccacctaccgcagcctgctcgagggccaggacgccaagatgattggtttcccttcctcagcaggaagcgtcagcccccgtagcacctctgttaccacgacttctagtgcctctgttaccaccacctctaatgcctctggtcgccgcacttctgatgtccgtaggccttaaatctgcctggcgtcccctccctctgtcttcagcacccagaggaggagagagccggcagttccctgcaggagagaggaggggctgctggacccaaggctcagtccctctgctctcaggaccccctgtcctgactctctcctgatggtgggccctctgtgctcttctcttcctgtcggatctctctcctctctgacctggatacgctttggtttctcaacttctctaccccaaagaaaagattattcaataaagtttcctgcctttctgcaaacataaaaaaagtcgacgcggccgcgaatttagtagtagtaggcggc

SEQ ID NO: 54975 - DNA, 1807 bp, Homo sapiens
atcgagctcgcaccctgccatttactccatggctagggttatagatagctgggtggctggggtaaatgagtgaggcaggagtcctcggcccaggccaagcaagcttctatctgcacctgctctcaatcctgctctcaccatgagcctccgcctgcagagctcctctgccagctatggaggtggtttcgggggtggctcttgccagctgggaggaggccgtggtgtctctacctgttcaactcggtttgtgtctgggggatcagctgggggctatggaggcggcgtgagctgtggttttggtggaggggctggtagtggctttggaggtggctatggaggtggccttggaggtggctatggaggtggccttggaggtggctttggtgggggttttgctggtggctttgttgactttggtgcttgtgatggcggcctcctcactggcaatgagaagatcaccatgcagaacctcaacgaccgcctggcttcctacctggagaaggtgcgcgccctggaggaggccaacgctgacctggaggtgaagatccgtgactggcacctgaagcagagcccagctagccctgagcgggactacagcccctactacaagaccattgaagagctccgggacaagatcctgaccgccaccattgaaaacaaccgggtcatcctggagattgacaatgccaggctggctgtggacgacttcaggctcaagtatgagaatgagctggccctgcgccagagcgtggaggccgacatcaacggcctgcgccgggtgctggatgagctcactctgtctaagactgacctggagatgcagatcgagagcctgaatgaagagctagcctacatgaagaagaaccatgaagaggagatgaaggaatttagcaaccaggtggtcggccaggtcaacgtggagatggatgccaccccaggcattgacctgacccgcgtgctggcagagatgagggagcagtacgaggccatggcagagaggaaccgccgggatgctgaggaatggttccacgccaagagtgcagagctgaacaaggaggtgtctaccaacactgccatgattcagaccagcaagacagagatcacggagctcaggcgcacgctccaaggcctggagattgagctgcagtcccagctgagcatgaaagcggggctggagaacacggtggcagagacggagtgccgctatgccctgcagctgcagcagatccagggactcatcagcagcatcgaggcccagctgagcgagctccgcagtgagatggagtgccagaaccaagagtacaagatgctgctggacatcaagacacgtctggagcaggagatcgccacctaccgcagcctgctcgagggccaggacgccaagaagcgtcagcccccgtagcacctctgttaccacgacttctagtgcctctgttaccaccacctctaatgcctctggtcgccgcacttctgatgtccgtaggccttaaatctgcctggcgtcccctccctctgtcttcagcacccagaggaggagagagccggcagttccctgcaggagagaggaggggctgctggacccaaggctcagtccctctgctctcaggaccccctgtcctgactctctcctgatggtgggccctctgtgctcttctcttcctgtcggatctctctcctctctgacctggatacgctttggtttctcaacttctctaccccaaagaaaagattattcaataaagtttcctgcctttctgcaaacataaaaaaagtcgacgcggccgcgaatttagtagtagtaggcggc

SEQ ID NO: 54976 - DNA, 1909 bp, Homo sapiens
ccggccgtgcagcagccgtgccgcctcggcctcccaaattgctgggattacaggcatgagacaccacaacgggctcccgatgttgtctttgacgtattcctctggacctcaatatttcctgtcagctggtaattagatctagaggcttgattaatctttgtatgttcatatgtgagaagaattcataggcggcggcccgtgtgctccgccgagccatgagcctccgcctgcagagctcctctgccagctatggaggtggtttcgggggtggctcttgccagctgggaggaggccgtggtgtctctacctgttcaactcggtttgtgtctgggggatcagctgggggctatggaggcggcgtgagctgtggttttggtggaggggctggtagtggctttggaggtggctatggaggtggccttggaggtggctatggaggtggccttggaggtggctttggtgggggttttgctggtggctttgttgactttggtgcttgtgatggcggcctcctcactggcaatgagaagatcaccatgcagaacctcaacgaccgcctggcttcctacctggagaaggtgcgcgccctggaggaggccaacgctgacctggaggtgaagatccgtgactggcacctgaagcagagcccagctagccctgagcgggactacagcccctactacaagaccattgaagagctccgggacaagatcctgaccgccaccattgaaaacaaccgggtcatcctggagattgacaatgccaggctggctgtggacgacttcaggctcaagtatgagaatgagctggccctgcgccagagcgtggaggccgacatcaacggcctgcgccgggtgctggatgagctcactctgtctaagactgacctggagatgcagatcgagagcctgaatgaagagctagcctacatgaagaagaaccatgaagaggagatgaaggaatttagcaaccaggtggtcggccaggtcaacgtggagatggatgccaccccaggcattgacctgacccgcgtgctggcagagatgagggagcagtacgaggccatggcagagaggaaccgccgggatgctgaggaatggttccacgccaagagtgcagagctgaacaaggaggtgtctaccaacactgccatgattcagaccagcaagacagagatcacggagctcaggcgcacgctccaaggcctggagattgagctgcagtcccagctgagcatgaaagcggggctggagaacacggtggcagagacggagtgccgctatgccctgcagctgcagcagatccagggactcatcagcagcatcgaggcccagctgagcgagctccgcagtgagatggagtgccagaaccaagagtacaagatgctgctggacatcaagacacgtctggagcaggagatcgccacctaccgcagcctgctcgagggccaggacgccaagatgattggtttcccttcctcagcaggaagcgtcagcccccgtagcacctctgttaccacgacttctagtgcctctgttaccaccacctctaatgcctctggtcgccgcacttctgatgtccgtaggccttaaatctgcctggcgtcccctccctctgtcttcagcacccagaggaggagagagccggcagttccctgcaggagagaggaggggctgctggacccaaggctcagtccctctgctctcaggaccccctgtcctgactctctcctgatggtgggccctctgtgctcttctcttcctgtcggatctctctcctctctgacctggatacgctttggtttctcaacttctctaccccaaagaaaagattattcaataaagtttcctgcctttctgcaaacataaaaaaagtcgacgcggccgcgaatttagtagtagtaggcggc

SEQ ID NO: 54977 - DNA, 1461 bp, Homo sapiens
  misc_feature (10)..(10): n is a, c, g, or t
  misc_feature (22)..(22): n is a, c, g, or t
  misc_feature (36)..(36): n is a, c, g, or t
acctcctagnagtgatccccgnattttcactccggnaattgcaggctgttgtgatggcggcctcctcactggcaatgagaagatcaccatgcagaacctcaacgaccgcctggcttcctacctggagaaggtgcgcgccctggaggaggccaacgctgacctggaggtgaagatccgtgactggcacctgaagcagagcccagctagccctgagcgggactacagcccctactacaagaccattgaagagctccgggacaagatcctgaccgccaccattgaaaacaaccgggtcatcctggagattgacaatgccaggctggctgtggacgacttcaggctcaagtatgagaatgagctggccctgcgccagagcgtggaggccgacatcaacggcctgcgccgggtgctggatgagctcactctgtctaagactgacctggagatgcagatcgagagcctgaatgaagagctagcctacatgaagaagaaccatgaagaggagatgaaggaatttagcaaccaggtggtcggccaggtcaacgtggagatggatgccaccccaggcattgacctgacccgcgtgctggcagagatgagggagcagtacgaggccatggcagagaggaaccgccgggatgctgaggaatggttccacgccaagagtgcagagctgaacaaggaggtgtctaccaacactgccatgattcagaccagcaagacagagatcacggagctcaggcgcacgctccaaggcctggagattgagctgcagtcccagctgagcatgaaagcggggctggagaacacggtggcagagacggagtgccgctatgccctgcagctgcagcagatccagggactcatcagcagcatcgaggcccagctgagcgagctccgcagtgagatggagtgccagaaccaagagtacaagatgctgctggacatcaagacacgtctggagcaggagatcgccacctaccgcagcctgctcgagggccaggacgccaagatgattggtttcccttcctcagcaggaagcgtcagcccccgtagcacctctgttaccacgacttctagtgcctctgttaccaccacctctaatgcctctggtcgccgcacttctgatgtccgtaggccttaaatctgcctggcgtcccctccctctgtcttcagcacccagaggaggagagagccggcagttccctgcaggagagaggaggggctgctggacccaaggctcagtccctctgctctcaggaccccctgtcctgactctctcctgatggtgggccctctgtgctcttctcttcctgtcggatctctctcctctctgacctggatacgctttggtttctcaacttctctaccccaaagaaaagattattcaataaagtttcctgcctttctgcaaacataaaaaaagtcgacgcggccgcgaatttagtagtagtaggcggc

SEQ ID NO: 54978 - DNA, 1086 bp, Homo sapiens
cagggttgctgtggcaggacccagtaggtggagcccacagtatgctgggacaggtgcttcacccagttcagccatgagggacaaatattcttatatccatccgtctcttctcttgtagagaagagacgagatgaaggaatttagcaaccaggtggtcggccaggtcaacgtggagatggatgccaccccaggcattgacctgacccgcgtgctggcagagatgagggagcagtacgaggccatggcagagaggaaccgccgggatgctgaggaatggttccacgccaagagtgcagagctgaacaaggaggtgtctaccaacactgccatgattcagaccagcaagacagagatcacggagctcaggcgcacgctccaaggcctggagattgagctgcagtcccagctgagcatgaaagcggggctggagaacacggtggcagagacggagtgccgctatgccctgcagctgcagcagatccagggactcatcagcagcatcgaggcccagctgagcgagctccgcagtgagatggagtgccagaaccaagagtacaagatgctgctggacatcaagacacgtctggagcaggagatcgccacctaccgcagcctgctcgagggccaggacgccaagatgattggtttcccttcctcagcaggaagcgtcagcccccgtagcacctctgttaccacgacttctagtgcctctgttaccaccacctctaatgcctctggtcgccgcacttctgatgtccgtaggccttaaatctgcctggcgtcccctccctctgtcttcagcacccagaggaggagagagccggcagttccctgcaggagagaggaggggctgctggacccaaggctcagtccctctgctctcaggaccccctgtcctgactctctcctgatggtgggccctctgtgctcttctcttcctgtcggatctctctcctctctgacctggatacgctttggtttctcaacttctctaccccaaagaaaagattattcaataaagtttcctgcctttctgcaaacataaaaaaagtcgacgcggccgcgaatttagtagtagtaggcggc

SEQ ID NO: 54979 - DNA, 1026 bp, Homo sapiens
atcgagctcgcaccctgccatttactccatggctagggttatagatagctgggtggctggggtaaatgagtgaggcaggagtcctcggcccaggccaagcaagcttctatctgcacctgctctcaatcctgctctcaccatgagcctccgcctgcagaagatgagggagcagtacgaggccatggcagagaggaaccgccgggatgctgaggaatggttccacgccaagagtgcagagctgaacaaggaggtgtctaccaacactgccatgattcagaccagcaagacagagatcacggagctcaggcgcacgctccaaggcctggagattgagctgcagtcccagctgagcatgaaagcggggctggagaacacggtggcagagacggagtgccgctatgccctgcagctgcagcagatccagggactcatcagcagcatcgaggcccagctgagcgagctccgcagtgagatggagtgccagaaccaagagtacaagatgctgctggacatcaagacacgtctggagcaggagatcgccacctaccgcagcctgctcgagggccaggacgccaagatgattggtttcccttcctcagcaggaagcgtcagcccccgtagcacctctgttaccacgacttctagtgcctctgttaccaccacctctaatgcctctggtcgccgcacttctgatgtccgtaggccttaaatctgcctggcgtcccctccctctgtcttcagcacccagaggaggagagagccggcagttccctgcaggagagaggaggggctgctggacccaaggctcagtccctctgctctcaggaccccctgtcctgactctctcctgatggtgggccctctgtgctcttctcttcctgtcggatctctctcctctctgacctggatacgctttggtttctcaacttctctaccccaaagaaaagattattcaataaagtttcctgcctttctgcaaacataaaaaaagtcgacgcggccgcgaatttagtagtagtaggcggc

SEQ ID NO: 54980 - DNA, 828 bp, Homo sapiens
cccaccaccttcttcctgcttgcatttcagaagtgcagagctgaacaaggaggtgtctaccaacactgccatgattcagaccagcaagacagagatcacggagctcaggcgcacgctccaaggcctggagattgagctgcagtcccagctgagcatgaaagcggggctggagaacacggtggcagagacggagtgccgctatgccctgcagctgcagcagatccagggactcatcagcagcatcgaggcccagctgagcgagctccgcagtgagatggagtgccagaaccaagagtacaagatgctgctggacatcaagacacgtctggagcaggagatcgccacctaccgcagcctgctcgagggccaggacgccaagatgattggtttcccttcctcagcaggaagcgtcagcccccgtagcacctctgttaccacgacttctagtgcctctgttaccaccacctctaatgcctctggtcgccgcacttctgatgtccgtaggccttaaatctgcctggcgtcccctccctctgtcttcagcacccagaggaggagagagccggcagttccctgcaggagagaggaggggctgctggacccaaggctcagtccctctgctctcaggaccccctgtcctgactctctcctgatggtgggccctctgtgctcttctcttcctgtcggatctctctcctctctgacctggatacgctttggtttctcaacttctctaccccaaagaaaagattattcaataaagtttcctgcctttctgcaaacataaaaaaagtcgacgcggccgcgaatttagtagtagtaggcggc

SEQ ID NO: 54981 - DNA, 1867 bp, Homo sapiens
atcgagctcgcaccctgccatttactccatggctagggttatagatagctgggtggctggggtaaatgagtgaggcaggagtcctcggcccaggccaagcaagcttctatctgcacctgctctcaatcctgctctcaccatgagcctccgcctgcagagctcctctgccagctatggaggtggtttcgggggtggctcttgccagctgggaggaggccgtggtgtctctacctgttcaactcggtttgtgtctgggggatcagctgggggctatggaggcggcgtgagctgtggttttggtggaggggctggtagtggctttggaggtggctatggaggtggccttggaggtggctatggaggtggccttggaggtggctttggtgggggttttgctggtggctttgttgactttggtgcttgtgatggcggcctcctcactggcaatgagaagatcaccatgcagaacctcaacgaccgcctggcttcctacctggagaaggtgcgcgccctggaggaggccaacgctgacctggaggtgaagatccgtgactggcacctgaagcagagcccagctagccctgagcgggactacagcccctactacaagaccattgaagagctccgggacaagatcctgaccgccaccattgaaaacaaccgggtcatcctggagattgacaatgccaggctggctgtggacgacttcaggctcaagtatgagaatgagctggccctgcgccagagcgtggaggccgacatcaacggcctgcgccgggtgctggatgagctcactctgtctaagactgacctggagatgcagatcgagagcctgaatgaagagctagcctacatgaagaagaaccatgaagaggagatgaaggaatttagcaaccaggtggtcggccaggtcaacgtggagatggatgccaccccaggcattgacctgacccgcgtgctggcagagatgagggagcagtacgaggccatggcagagaggaaccgccgggatgctgaggaatggttccacgccaagagtgcagagctgaacaaggaggtgtctaccaacactgccatgattcagaccagcaagacagagatcacggagctcaggcgcacgctccaaggcctggagattgagctgcagtcccagctgagcatgaaagcggggctggagaacacggtggcagagacggagtgccgctatgccctgcagctgcagcagatccagggactcatcagcagcatcgaggcccagctgagcgagctccgcagtgagatggagtgccagaaccaagagtacaagatgctgctggacatcaagacacgtctggagcaggagatcgccacctaccgcagcctgctcgagggccaggacgccaagtaggtcctctccagcctctttcttaggatagtgactgcaggacccgtgggtgtcagagcaggcagggccttagagatccaccccctcatgtcagagaggagacccctctgttaccaccacctctaatgcctctggtcgccgcacttctgatgtccgtaggccttaaatctgcctggcgtcccctccctctgtcttcagcacccagaggaggagagagccggcagttccctgcaggagagaggaggggctgctggacccaaggctcagtccctctgctctcaggaccccctgtcctgactctctcctgatggtgggccctctgtgctcttctcttcctgtcggatctctctcctctctgacctggatacgctttggtttctcaacttctctaccccaaagaaaagattattcaataaagtttcctgcctttctgcaaacataaaaaaagtcgacgcggccgcgaatttagtagtagtaggcggc

SEQ ID NO: 54982 - DNA, 1747 bp, Homo sapiens
atcgagctcgcaccctgccatttactccatggctagggttatagatagctgggtggctggggtaaatgagtgaggcaggagtcctcggcccaggccaagcaagcttctatctgcacctgctctcaatcctgctctcaccatgagcctccgcctgcagagctcctctgccagctatggaggtggtttcgggggtggctcttgccagctgggaggaggccgtggtgtctctacctgttcaactcggtttgtgtctgggggatcagctgggggctatggaggcggcgtgagctgtggttttggtggaggggctggtagtggctttggaggtggctatggaggtggccttggaggtggctatggaggtggccttggaggtggctttggtgggggttttgctggtggctttgttgactttggtgcttgtgatggcggcctcctcactggcaatgagaagatcaccatgcagaacctcaacgaccgcctggcttcctacctggagaaggtgcgcgccctggaggaggccaacgctgacctggaggtgaagatccgtgactggcacctgaagcagagcccagctagccctgagcgggactacagcccctactacaagaccattgaagagctccgggacaagatcctgaccgccaccattgaaaacaaccgggtcatcctggagattgacaatgccaggctggctgtggacgacttcaggctcaagtatgagaatgagctggccctgcgccagagcgtggaggccgacatcaacggcctgcgccgggtgctggatgagctcactctgtctaagactgacctggagatgcagatcgagagcctgaatgaagagctagcctacatgaagaagaaccatgaagaggagatgaaggaatttagcaaccaggtggtcggccaggtcaacgtggagatggatgccaccccaggcattgacctgacccgcgtgctggcagagatgagggagcagtacgaggccatggcagagaggaaccgccgggatgctgaggaatggttccacgccaagagtgcagagctgaacaaggaggtgtctaccaacactgccatgattcagaccagcaagacagagatcacggagctcaggcgcacgctccaaggcctggagattgagctgcagtcccagctgagcatgaaagcggggctggagaacacggtggcagagacggagtgccgctatgccctgcagctgcagcagatccagggactcatcagcagcatcgaggcccagctgagcgagctccgcagtgagatggagtgccagaaccaagagtacaagatgctgctggacatcaagacacgtctggagcaggagatcgccacctaccgcagcctgctcgagggccaggacgccaagatgattggtttcccttcctcagcaggaagcgtcagcccccgtagcacctctgttaccacgacttctagtgcctctgttaccaccacctctaatgcctctggtcgccgcacttctgatgtccgtaggccttaaatctgcctggcgtcccctccctctgtcttcagcacccagaggaggagagagccggcagttccctgcaggagagaggaggggctgctggacccaaggctcagtccctctgctctcaggaccccctgtcctgactctctcctgatggtgggccctctgtgctcttctcttcctgtcggatctctctcctctctgtacatctcgtctcttctcttgggggatcctctagcgtca

SEQ ID NO: 54983 - DNA, 2254 bp, Homo sapiens
atcgagctcgcaccctgccatttactccatggctagggttatagatagctgggtggctggggtaaatgagtgaggcaggagtcctcggcccaggccaagcaagcttctatctgcacctgctctcaatcctgctctcaccatgagcctccgcctgcagagctcctctgccagctatggaggtggtttcgggggtggctcttgccagctgggaggaggccgtggtgtctctacctgttcaactcggtttgtgtctgggggatcagctgggggctatggaggcggcgtgagctgtggttttggtggaggggctggtagtggctttggaggtggctatggaggtggccttggaggtggctatggaggtggccttggaggtggctttggtgggggttttgctggtggctttgttgactttggtgcttgtgatggcggcctcctcactggcaatgagaagatcaccatgcagaacctcaacgaccgcctggcttcctacctggagaaggtgcgcgccctggaggaggccaacgctgacctggaggtgaagatccgtgactggcacctgaagcagagcccagctagccctgagcgggactacagcccctactacaagaccattgaagagctccgggacaagatcctgaccgccaccattgaaaacaaccgggtcatcctggagattgacaatgccaggctggctgtggacgacttcaggctcaagtatgagaatgagctggccctgcgccagagcgtggaggccgacatcaacggcctgcgccgggtgctggatgagctcactctgtctaagactgacctggagatgcagatcgagagcctgaatgaagagctagcctacatgaagaagaaccatgaagaggagatgaaggaatttagcaaccaggtggtcggccaggtcaacgtggagatggatgccaccccaggcattgacctgacccgcgtgctggcagagatgagggagcagtacgaggccatggcagagaggaaccgccgggatgctgaggaatggttccacgccaagagtgcagagctgaacaaggaggtgtctaccaacactgccatgattcagaccagcaagacagagatcacggagctcaggcgcacgctccaaggcctggagattgagctgcagtcccagctgagcatgaaagcggggctggagaacacggtggcagagacggagtgccgctatgccctgcagctgcagcagatccagggactcatcagcagcatcgaggcccagctgagcgagctccgcagtgagatggagtgccagaaccaagagtacaagatgctgctggacatcaagacacgtctggagcaggagatcgccacctaccgcagcctgctcgagggccaggacgccaagtaggtcctctccagcctctttcttaggatagtgactgcaggacccgtgggtgtcagagcaggcagggccttagagatccaccccctcatgtcagagaggagacccctcactgtctgactttacggggacatttccttggtaggctgcagggttaacacctttaaactttctaatttgggcctccaagttagactggagggaacagagaccatggagggaacatctgatattggaaaaacatgagcttggatacagctcagctgaacaaagctattactatggtgctttaactgcctttagaccctttgcagaaatcaagccacccctgtgggctcagggctcaggtggagggttgcgggtttgggcgatccagagggaagacaaacaccctgaatcttgtggctaataatatctccccttgagacctctcagacagacagacaggaaagacagacagtcccagtgggcacctgatgctgctgtcccttgagctgggggcacagctaggaggcactagagtccagcccaggggcttgaaatgataagccgaggcacttccccagaggaacaggtaagcacctgccctcagttaccctctgctcatggccacctctgtcctctctcccaggatgattggtttcccttcctcagcaggtaagggaacagccccgtggtgtagggggaggcagagttagcctcccattcactgccccaatgggggtgggagctggcggggtagtttgttctcctttctctgtctgtctgtttttggttccggctctttaccttgtgaagattcttatcaactccggatcagattgttttattcctgtaacactcatgaaatgctacttgtggctatctgatcct

SEQ ID NO: 54984 - DNA, 1771 bp, Homo sapiens
atcgagctcgcaccctgccatttactccatggctagggttatagatagctgggtggctggggtaaatgagtgaggcaggagtcctcggcccaggccaagcaagcttctatctgcacctgctctcaatcctgctctcaccatgagcctccgcctgcagagctcctctgccagctatggaggtggtttcgggggtggctcttgccagctgggaggaggccgtggtgtctctacctgttcaactcggtttgtgtctgggggatcagctgggggctatggaggcggcgtgagctgtggttttggtggaggggctggtagtggctttggaggtggctatggaggtggccttggaggtggctatggaggtggccttggaggtggctttggtgggggttttgctggtggctttgttgactttggtgcttgtgatggcggcctcctcactggcaatgagaagatcaccatgcagaacctcaacgaccgcctggcttcctacctggagaaggtgcgcgccctggaggaggccaacgctgacctggaggtgaagatccgtgactggcacctgaagcagagcccagctagccctgagcgggactacagcccctactacaagaccattgaagagctccgggacaagatcctgaccgccaccattgaaaacaaccgggtcatcctggagattgacaatgccaggctggctgtggacgacttcaggctcaagtatgagaatgagctggccctgcgccagagcgtggaggccgacatcaacggcctgcgccgggtgctggatgagctcactctgtctaagactgacctggagatgcagatcgagagcctgaatgaagagctagcctacatgaagaagaaccatgaagaggagatgaaggaatttagcaaccaggtggtcggccaggtcaacgtggagatggatgccaccccaggcattgacctgacccgcgtgctggcagagatgagggagcagtacgaggccatggcagagaggaaccgccgggatgctgaggaatggttccacgccaagagtgcagagctgaacaaggaggtgtctaccaacactgccatgattcagaccagcaagacagagatcacggagctcaggcgcacgctccaaggcctggagattgagctgcagtcccagctgagcatgaaagcggggctggagaacacggtggcagagacggagtgccgctatgccctgcagctgcagcagatccagggactcatcagcagcatcgaggcccagctgagcgagctccgcagtgagatggagtgccagaaccaagagtacaagatgctgctggacatcaagacacgtctggagcaggagagaggaggggctgctggacccaaggctcagtccctctgctctcaggaccccctgtcctgactctctcctgatggtgggccctctgtgctcttctcttcctgtcggatctctctcctctctgacctggatacgctttggtttctcaacttctctaccccaaagaaaagattattcaataaagtttcctgcctttctgcaaacatagcacctggctgaccaggctgaggcccgcaggtctaagaccaaggaagcacgcaagcgccgtgaagagcgcctccaggccaagaaggaggagatcatcaagacttatccaaggaggaagagaccaagaaataaaacctcccactttgtctgtacatactggccactgtgatacatagatcagccattaaaataaaacagcctatctgcacatgggaccgagctcga

SEQ ID NO: 54985 - DNA, 552 bp, Homo sapiens
ggtcgactactactactaaattcgcggccgcgtcgacatcaagacacgtctggagcaggagatcgccacctaccgcagcctgctcgagggccaggacgccaagatgattggtttcccttcctcagcaggaagcgtcagcccccgtagcacctctgttaccacgacttctagtgcctctgttaccaccacctctaatgcctctggtcgccgcacttctgatgtccgtaggccttaaatctgcctggcgtcccctccctctgtcttcagcacccagaggaggagagagccggcagttccctgcaggagagaggaggggctgctggacccaaggctcagtccctctgctctcaggaccccctgtcctgactctctcctgatggtgggccctctgtgctcttctcttcctgtcggatctctctcctctctgacctggatacgctttggtttctcaacttctctaccccaaagaaaagattattcaataaagtttcctgcctttctgcaaacataaaaaaagtcgacgcggccgcgaatttagtagtagtaggcggc

SEQ ID NO: 54986 - DNA, 690 bp, Homo sapiens
gccagtgctgggctctccagtgtagggagggggagagctggggtggaagtggtcattcgctcactgattttccttttgaaactgatggctctgccccacagagctatttggctgtcttgggaagagccatctttggggacaataaagagtctccatccacgcaccacctgactaatgaggagtttgtgagccctccaggggggccctgccctgtcctgaggtgggtcttctccagcctgagcatgtcttgtctcttgtttcccagggaagcgtcagcccccgtagcacctctgttaccacgacttctagtgcctctgttaccaccacctctaatgcctctggtcgccgcacttctgatgtccgtaggccttaaatctgcctggcgtcccctccctctgtcttcagcacccagaggaggagagagccggcagttccctgcaggagagaggaggggctgctggacccaaggctcagtccctctgctctcaggaccccctgtcctgactctctcctgatggtgggccctctgtgctcttctcttcctgtcggatctctctcctctctgacctggatacgctttggtttctcaacttctctaccccaaagaaaagattattcaataaagtttcctgcctttctgcaaacataaaaaaagtcgacgcggccgcgaatttagtagtagtaggcggc

SEQ ID NO: 54987 - DNA, 602 bp, Homo sapiens
ggacatccagaaggtgcggcgaccaagaggcattagaaggtggtggttactagaggcactagtagtctctggtaacagaaggtgcttacgggggtctgacgctttcctgctgtaggaagggtaaccaatcatcttggcttcctggccctcgtggcaggcttcggtagttggcgatctcctgctccagacgtgtcttgaagtccagcagcatcttgtactcttggctctgttaccaccacctctaatgcctctggtcgccgcacttctgatgtccgtaggccttaaatctgcctggcgtcccctccctctgtcttcagcacccagaggaggagagagccggcagttccctgcaggagagaggaggggctgctggacccaaggctcagtccctctgctctcaggaccccctgtcctgactctctcctgatggtgggccctctgtgctcttctcttcctgtcggatctctctcctctctgacctggatacgctttggtttctcaacttctctaccccaaagaaaagattattcaataaagtttcctgcctttctgcaaacataaaaaaagtcgacgcggccgcgaatttagtagtagtaggcggc

SEQ ID NO: 54988 - DNA, 689 bp, Homo sapiens
atcgagctcgcaccctgccatttactccatggctagggttatagatagctgggtggctggggtaaatgagtgaggcaggagtcctcggcccaggccaagcaagcttctatctgcacctgctctcaatcctgctctcaccatgagcctccgcctgcagagctcctctgccagctatggaggtggtttcgggggtggctcttgccagctgggaggaggccgtggtgtctctacctgttcaactcggtttgtgtctgggggatcagctgggggctatggaggcggcgtgagctgtggttttggtggaggggctggtagtggctttggaggtggctatggaggtggccttggaggtggctatggaggtggccttggaggtggctttggtgggggttttgctggtggctttgttgactttggtgcttgtgatggcggcctcctcactggcaatgagaagatcaccatgcagaacctcaacgaccgcctggcttcctacctggagaaggtgcgcgccctggaggaggccaacgctgacctggaggtgaagatccgtgactggcacctgaagcagagcccagctagccctgagcgggactacagcccctactacaagaccattgaagagctccgggacaagatcctgaccgccaccattgtaaacaaccgggcattgtcaatctgcagaagtaatt

SEQ ID NO: 54989 - DNA, 700 bp, Homo sapiens
atcgagctcgcaccctgccatttactccatggctagggttatagatagctgggtggctggggtaaatgagtgaggcaggagtcctcggcccaggccaagcaagcttctatctgcacctgctctcaatcctgctctcaccatgagcctccgcctgcagagctcctctgccagctatggaggtggtttcgggggtggctcttgccagctgggaggaggccgtggtgtctctacctgttcaactcggtttgtgtctgggggatcagctgggggctatggaggcggcgtgagctgtggttttggtggaggggctggtagtggctttggaggtggctatggaggtggccttggaggtggctatggaggtggccttggaggtggctttggtgggggttttgctggtggctttgttgactttggtgcttgtgatggcggcctcctcactggcaatgagaagatcaccatgcagaacctcaacgaccgcctggcttcctacctggagaaggtgcgcgccctggaggaggccaacgctgacctggaggtgaagatccgtgactggcacctgaagcagaaccacgaggaggagatgaatgccctgagaggccaggtgggtggagatgtcaatgtggagatggacgctgcacctggcgtggacctgagccgcattctgaacgagatgcgtgaccgttgagatcaggcatgt

SEQ ID NO: 54990 - DNA, 501 bp, Homo sapiens
  misc_feature (10)..(10): n is a, c, g, or t
tcggctcggnaccgtttgacggaagtacaagatgctgctggacatcaagacacgtctggagcaggagatcgccacctaccgcagcctgctcgagggccaggacgccaagatgattggtttcccttcctcagcaggaagcgtcagcccccgtagcacctctgttaccacgacttctagtgcctctgttaccaccacctctaatgcctctggtcgccgcacttctgatgtccgtaggccttaaatctgcctggcgtcccctccctctgtcttcagcacccagaggaggagagagccggcagttccctgcaggagagaggaggggctgctggacccaaggctcagtccctctggtgggccctctgtgctcttctcttcctgtcggatctctctcctctctgacctggatacgctttggtttctcaacttctctaccccaaagaaaagattattcaataaagtttcctgcctttctgcaaacataacctatgattgattctggcc

SEQ ID NO: 54991 - DNA, 220 bp, Homo sapiens
gcgtcgacagagggcccaccatcaggagagagtcaggacagggggtcctgagagcagagggactgagccgtgggccctctgtgctcttctcttcctgtcggatctctctcctctctgacctggatacgctttggtttctcaacttctctaccccaaagaaaagattattcaataaagtttcctgcctttctgcaaacataacctatgattgattctggcc

SEQ ID NO: 54992 - DNA, 593 bp, Homo sapiens
gtgagcgggaattgcaggctgccctgggctcaacaacctccagtgagaaggaggagccctcccctgcaactggacacagtcctccactgtgggacctggaaacactctccagaacactctgccagcactcagagccaaggagagggaggatgagtagcctcacacatcttcctttcccatccccacaggagatgaaggaatttagcaaccaggtggtcggccaggtcaacgtggagatggatgccaccccaggcattgacctgacccgcgtgctggcagagatgagggagcagtacgaggccatggcagagaggaaccgccgggatgctgaggaatggttccacgccaaggtacccggccctcccaccccacatagcccatcccatatagccaggggggccgggcggacacagcctcttggtcaggctgctcgagctgagcttccccaccaccttcttcctgcttgcatttcagaagtgcagagctgaacaaggaggtgtctaccaacactgccatgattcagaccagcaagacagagatcacggagctcaggcgcacgctccaaggcctggagattgagctgcagtcccagc

SEQ ID NO: 54993 - DNA, 808 bp, Homo sapiens
cccaccaccttcttcctgcttgcatttcagaagtgcagagctgaacaaggaggtgtctaccaacactgccatgattcagaccagcaagacagagatcacggagctcaggcgcacgctccaaggcctggagattgagctgcagtcccagctgagcatgaaagcggggctggagaacacggtggcagagacggagtgccgctatgccctgcagctgcagcagatccagggactcatcagcagcatcgaggcccagctgagcgagctccgcagtgagatggagtgccagaaccaagagtacaagatgctgctggacatcaagacacgtctggagcaggagatcgccacctaccgcagcctgctcgagggccaggacgccaagatgattggtttcccttcctcagcaggaagcgtcagcccccgtagcacctctgttaccacgacttctagtgcctctgttaccaccacctctaatgcctctggtcgccgcacttctgatgtccgtaggccttaaatctgcctggcgtcccctccctctgtcttcagcacccagaggaggagagagccggcagttccctgcaggagagaggaggggctgctggacccaaggctcagtccctctgctctcaggaccccctgtcctgactctctcctgatggtgggccctctgtgctcttctcttcctgtcggatctctctcctctctgacctggatacgctttggtttctcaacttctctaccccaaagaaaagattattcaataaagtttcctgcctttctgcaaacatataccaaccggccgaagcctcgt

SEQ ID NO: 54994 - DNA, 1833 bp, Homo sapiens
atcgagctcgcaccctgccatttactccatggctagggttatagatagctgggtggctggggtaaatgagtgaggcaggagtcctcggcccaggccaagcaagcttctatctgcacctgctctcaatcctgctctcaccatgagcctccgcctgcagagctcctctgccagctatggaggtggtttcgggggtggctcttgccagctgggaggaggccgtggtgtctctacctgttcaactcggtttgtgtctgggggatcagctgggggctatggaggcggcgtgagctgtggttttggtggaggggctggtagtggctttggaggtggctatggaggtggccttggaggtggctatggaggtggccttggaggtggctttggtgggggttttgctggtggctttgttgactttggtgcttgtgatggcggcctcctcactggcaatgagaagatcaccatgcagaacctcaacgaccgcctggcttcctacctggagaaggtgcgcgccctggaggaggccaacgctgacctggaggtgaagatccgtgactggcacctgaagcagagcccagctagccctgagcgggactacagcccctactacaagaccattgaagagctccgggacaagatcctgaccgccaccattgaaaacaaccgggtcatcctggagattgacaatgccaggctggctgtggacgacttcaggctcaagtatgagaatgagctggccctgcgccagagcgtggaggccgacatcaacggcctgcgccgggtgctggatgagctcactctgtctaagactgacctggagatgcagatcgagagcctgaatgaagagctagcctacatgaagaagaaccatgaagaggagatgaaggaatttagcaaccaggtggtcggccaggtcaacgtggagatggatgccaccccaggcattgacctgacccgcgtgctggcagagatgagggagcagtacgaggccatggcagagaggaaccgccgggatgctgaggaatggttccacgccaagagtgcagagctgaacaaggaggtgtctaccaacactgccatgattcagaccagcaagacagagatcacggagctcaggcgcacgctccaaggcctggagattgagctgcagtcccagctgagcatgaaagcggggctggagaacacggtggcagagacggagtgccgctatgccctgcagctgcagcagatccagggactcatcagcagcatcgaggcccagctgagcgagctccgcagtgagatggagtgccagaaccaagagtacaagatgctgctggacatcaagacacgtctggagcaggagatcgccacctaccgcagcctgctcgagggccaggacgccaagatgattggtttcccttcctcagcaggaagcgtcagcccccgtagcacctctgttaccacgacttctagtgcctctgttaccaccacctctaatgcctctggtcgccgcacttctgatgtccgtaggccttaaatctgcctggcgtcccctccctctgtcttcagcacccagaggaggagagagccggcagttccctgcaggagagaggaggggctgctggacccaaggctcagtccctctgctctcaggaccccctgtcctgactctctcctgatggtgggccctctgtgctcttctcttcctgtcggatctctctcctctctgacctggatacgctttggtttctcaacttctctaccccaaagaaaagattattcaataaagtttcctgcctttctgcaaacataaaaaaagtcgacgcggccgcgaatttagtagtagtaggcggc

SEQ ID NO: 54995 - DNA, 2016 bp, Homo sapiens
atcgagctcgcaccctgccatttactccatggctagggttatagatagctgggtggctggggtaaatgagtgaggcaggagtcctcggcccaggccaagcaagcttctatctgcacctgctctcaatcctgctctcaccatgagcctccgcctgcagagctcctctgccagctatggaggtggtttcgggggtggctcttgccagctgggaggaggccgtggtgtctctacctgttcaactcggtttgtgtctgggggatcagctgggggctatggaggcggcgtgagctgtggttttggtggaggggctggtagtggctttggaggtggctatggaggtggccttggaggtggctatggaggtggccttggaggtggctttggtgggggttttgctggtggctttgttgactttggtgcttgtgatggcggcctcctcactggcaatgagaagatcaccatgcagaacctcaacgaccgcctggcttcctacctggagaaggtgcgcgccctggaggaggccaacgctgacctggaggtgaagatccgtgactggcacctgaagcagagcccagctagccctgagcgggactacagcccctactacaagaccattgaagagctccgggacaagatcctgaccgccaccattgaaaacaaccgggtcatcctggagattgacaatgccaggctggctgtggacgacttcaggctcaagtatgagaatgagctggccctgcgccagagcgtggaggccgacatcaacggcctgcgccgggtgctggatgagctcactctgtctaagactgacctggagatgcagatcgagagcctgaatgaagagctagcctacatgaagaagaaccatgaagaggagatgaaggaatttagcaaccaggtggtcggccaggtcaacgtggagatggatgccaccccaggcattgacctgacccgcgtgctggcagagatgagggagcagtacgaggccatggcagagaggaaccgccgggatgctgaggaatggttccacgccaagagtgcagagctgaacaaggaggtgtctaccaacactgccatgattcagaccagcaagacagagatcacggagctcaggcgcacgctccaaggcctggagattgagctgcagtcccagctgagcatgaaagcggggctggagaacacggtggcagagacggagtgccgctatgccctgcagctgcagcagatccagggactcatcagcagcatcgaggcccagctgagcgagctccgcagtgagatggagtgccagaaccaagagtacaagatgctgctggacatcaagacacgtctggagcaggagatcgccacctaccgcagcctgctcgagggccaggacgccaagatgattggtttcccttcctcagcaggaagcgtcagcccccgtagcacctctgttaccacgacttctagtgcctctgttaccaccacctctaatgcctctggtcgccgcacttctgatgtccgtaggccttaaatctgcctggcgtcccctccctctgtcttcagcacccagaggaggagagagccggcagttccctgcaggagagaggaggggctgctggacccaaggctcagtccctctgctctcaggaccccctgtcctgactctctcctgatggtgggccctctgtgctcttctcttcctgtcggatctctctcctctctgacctggatacgctttggtttctcaacttctctaccccaaagaaaagattattcaataaagtttcctgcctttctgcaaacatagcacctggctgaccaggctgaggcccgcaggtctaagaccaaggaagcacgcaagcgccgtgaagagcgcctccaggccaagaaggaggagatcatcaagacttatccaaggaggaagagaccaagaaataaaacctcccactttgtctgtacatactggccactgtgatacatagatcagccattaaaataaaacagcctatctgcacatgggaccgagctcga

SEQ ID NO: 54996 - DNA, 1769 bp, Homo sapiens
tcagtctagtagaggccgcgggtttaatcggccgaggagcttctatctgcacctgctctcaatcctgctctcaccatgagcctccgcctgcagagctcctctgccagctatggaggtggtttcgggggtggctcttgccagctgggaggaggccgtggtgtctctacctgttcaactcggtttgtgtctgggggatcagctgggggctatggaggcggcgtgagctgtggttttggtggaggggctggtagtggctttggaggtggctatggaggtggccttggaggtggctatggaggtggccttggaggtggctttggtgggggttttgctggtggctttgttgactttggtgcttgtgatggcggcctcctcactggcaatgagaagatcaccatgcagaacctcaacgaccgcctggcttcctacctggagaaggtgcgcgccctggaggaggccaacgctgacctggaggtgaagatccgtgactggcacctgaagcagagcccagctagccctgagcgggactacagcccctactacaagaccattgaagagctccgggacaagatcctgaccgccaccattgaaaacaaccgggtcatcctggagattgacaatgccaggctggctgtggacgacttcaggctcaagtatgagaatgagctggccctgcgccagagcgtggaggccgacatcaacggcctgcgccgggtgctggatgagctcactctgtctaagactgacctggagatgcagatcgagagcctgaatgaagagctagcctacatgaagaagaaccatgaagaggagatgaaggaatttagcaaccaggtggtcggccaggtcaacgtggagatggatgccaccccaggcattgacctgacccgcgtgctggcagagatgagggagcagtacgaggccatggcagagaggaaccgccgggatgctgaggaatggttccacgccaagagtgcagagctgaacaaggaggtgtctaccaacactgccatgattcagaccagcaagacagagatcacggagctcaggcgcacgctccaaggcctggagattgagctgcagtcccagctgagcatgaaagcggggctggagaacacggtggcagagacggagtgccgctatgccctgcagctgcagcagatccagggactcatcagcagcatcgaggcccagctgagcgagctccgcagtgagatggagtgccagaaccaagagtacaagatgctgctggacatcaagacacgtctggagcaggagatcgccacctaccgcagcctgctcgagggccaggacgccaagatgattggtttcccttcctcagcaggaagcgtcagcccccgtagcacctctgttaccacgacttctagtgcctctgttaccaccacctctaatgcctctggtcgccgcacttctgatgtccgtaggccttaaatctgcctggcgtcccctccctctgtcttcagcacccagaggaggagagagccggcagttccctgcaggagagaggaggggctgctggacccaaggctcagtccctctgctctcaggaccccctgtcctgactctctcctgatggtgggccctctgtgctcttctcttcctgtcggatctctctcctctctgacctggatacgctttggtttctcaacttctctaccccaaagaaaagattattcaataaagtttcctgcctttctgcaaacataaaaaaagtcgacgcggccgcgaatttagtagtagtaggcggc

SEQ ID NO: 54997 - DNA, 2462 bp, Homo sapiens
atcgagctcgcaccctgccatttactccatggctagggttatagatagctgggtggctggggtaaatgagtgaggcaggagtcctcggcccaggccaagcaagcttctatctgcacctgctctcaatcctgctctcaccatgagcctccgcctgcagagctcctctgccagctatggaggtggtttcgggggtggctcttgccagctgggaggaggccgtggtgtctctacctgttcaactcggtttgtgtctgggggatcagctgggggctatggaggcggcgtgagctgtggttttggtggaggggctggtagtggctttggaggtggctatggaggtggccttggaggtggctatggaggtggccttggaggtggctttggtgggggttttgctggtggctttgttgactttggtgcttgtgatggcggcctcctcactggcaatgagaagatcaccatgcagaacctcaacgaccgcctggcttcctacctggagaaggtgcgcgccctggaggaggccaacgctgacctggaggtgaagatccgtgactggcacctgaagcagagcccagctagccctgagcgggactacagcccctactacaagaccattgaagagctccgggacaagatcctgaccgccaccattgaaaacaaccgggtcatcctggagattgacaatgccaggctggctgtggacgacttcaggctcaagtatgagaatgagctggccctgcgccagagcgtggaggccgacatcaacggcctgcgccgggtgctggatgagctcactctgtctaagactgacctggagatgcagatcgagagcctgaatgaagagctagcctacatgaagaagaaccatgaagaggagatgaaggaatttagcaaccaggtggtcggccaggtcaacgtggagatggatgccaccccaggcattgacctgacccgcgtgctggcagagatgagggagcagtacgaggccatggcagagaggaaccgccgggatgctgaggaatggttccacgccaagagtgcagagctgaacaaggaggtgtctaccaacactgccatgattcagaccagcaagacagagatcacggagctcaggcgcacgctccaaggcctggagattgagctgcagtcccagctgagcatgaaagcggggctggagaacacggtggcagagacggagtgccgctatgccctgcagctgcagcagatccagggactcatcagcagcatcgaggcccagctgagcgagctccgcagtgagatggagtgccagaaccaagagtacaagatgctgctggacatcaagacacgtctggagcaggagatcgccacctaccgcagcctgctcgagggccaggacgccaagtaggtcctctccagcctctttcttaggatagtgactgcaggacccgtgggtgtcagagcaggcagggccttagagatccaccccctcatgtcagagaggagacccctcactgtctgactttacggggacatttccttggtaggctgcagggttaacacctttaaactttctaatttgggcctccaagttagactggagggaacagagaccatggagggaacatctgatattggaaaaacatgagcttggatacagctcagctgaacaaagctattactatggtgctttaactgcctttagaccctttgcagaaatcaagccacccctgtgggctcagggctcaggtggagggttgcgggtttgggcgatccagagggaagacaaacaccctgaatcttgtggctaataatatctccccttgagacctctcagacagacagacaggaaagacagacagtcccagtgggcacctgatgctgctgtcccttgagctgggggcacagctaggaggcactagagtccagcccaggggcttgaaatgataagccgaggcacttccccagaggaacaggtaagcacctgccctcagttaccctctgctcatggccacctctgtcctctctcccaggatgattggtttcccttcctcagcaggaagcgtcagcccccgtagcacctctgttaccacgacttctagtgcctctgttaccaccacctctaatgcctctggtcgccgcacttctgatgtccgtaggccttaaatctgcctggcgtcccctccctctgtcttcagcacccagaggaggagagagccggcagttccctgcaggagagaggaggggctgctggacccaaggctcagtccctctgctctcaggaccccctgtcctgactctctcctgatggtgggccctctgtgctcttctcttcctgtcggatctctctcctctctgacctggatacgctttggtttctcaacttctctaccccaaagaaaagattattcaataaagtttcctgcctttctgcaaacataaaaaaagtcgacgcggccgcgaatttagtagtagtaggcggc

SEQ ID NO: 54998 - DNA, 2379 bp, Homo sapiens
atcgagctcgcaccctgccatttactccatggctagggttatagatagctgggtggctggggtaaatgagtgaggcaggagtcctcggcccaggccaagcaagcttctatctgcacctgctctcaatcctgctctcaccatgagcctccgcctgcagagctcctctgccagctatggaggtggtttcgggggtggctcttgccagctgggaggaggccgtggtgtctctacctgttcaactcggtttgtgtctgggggatcagctgggggctatggaggcggcgtgagctgtggttttggtggaggggctggtagtggctttggaggtggctatggaggtggccttggaggtggctatggaggtggccttggaggtggctttggtgggggttttgctggtggctttgttgactttggtgcttgtgatggcggcctcctcactggcaatgagaagatcaccatgcagaacctcaacgaccgcctggcttcctacctggagaaggtgcgcgccctggaggaggccaacgctgacctggaggtgaagatccgtgactggcacctgaagcagagcccagctagccctgagcgggactacagcccctactacaagaccattgaagagctccgggacaagatcctgaccgccaccattgaaaacaaccgggtcatcctggagattgacaatgccaggctggctgtggacgacttcaggctcaagtatgagaatgagctggccctgcgccagagcgtggaggccgacatcaacggcctgcgccgggtgctggatgagctcactctgtctaagactgacctggagatgcagatcgagagcctgaatgaagagctagcctacatgaagaagaaccatgaagaggagatgaaggaatttagcaaccaggtggtcggccaggtcaacgtggagatggatgccaccccaggcattgacctgacccgcgtgctggcagagatgagggagcagtacgaggccatggcagagaggaaccgccgggatgctgaggaatggttccacgccaagagtgcagagctgaacaaggaggtgtctaccaacactgccatgattcagaccagcaagacagagatcacggagctcaggcgcacgctccaaggcctggagattgagctgcagtcccagctgagcatgaaagcggggctggagaacacggtggcagagacggagtgccgctatgccctgcagctgcagcagatccagggactcatcagcagcatcgaggcccagctgagcgagctccgcagtgagatggagtgccagaaccaagagtacaagatgctgctggacatcaagacacgtctggagcaggagatcgccacctaccgcagcctgctcgagggccaggacgccaagtaggtcctctccagcctctttcttaggatagtgactgcaggacccgtgggtgtcagagcaggcagggccttagagatccaccccctcatgtcagagaggagacccctcactgtctgactttacggggacatttccttggtaggctgcagggttaacacctttaaactttctaatttgggcctccaagttagactggagggaacagagaccatggagggaacatctgatattggaaaaacatgagcttggatacagctcagctgaacaaagctattactatggtgctttaactgcctttagaccctttgcagaaatcaagccacccctgtgggctcagggctcaggtggagggttgcgggtttgggcgatccagagggaagacaaacaccctgaatcttgtggctaataatatctccccttgagacctctcagacagacagacaggaaagacagacagtcccagtgggcacctgatgctgctgtcccttgagctgggggcacagctaggaggcactagagtccagcccaggggcttgaaatgataagccgaggcacttccccagaggaacaggaagcgtcagcccccgtagcacctctgttaccacgacttctagtgcctctgttaccaccacctctaatgcctctggtcgccgcacttctgatgtccgtaggccttaaatctgcctggcgtcccctccctctgtcttcagcacccagaggaggagagagccggcagttccctgcaggagagaggaggggctgctggacccaaggctcagtccctctgctctcaggaccccctgtcctgactctctcctgatggtgggccctctgtgctcttctcttcctgtcggatctctctcctctctgacctggatacgctttggtttctcaacttctctaccccaaagaaaagattattcaataaagtttcctgcctttctgcaaacataaaaaaagtcgacgcggccgcgaatttagtagtagtaggcggc

SEQ ID NO: 54999 - DNA, 1818 bp, Homo sapiens
atcgagctcgcaccctgccatttactccatggctagggttatagatagctgggtggctggggtaaatgagtgaggcaggagtcctcggcccaggccaagcaagcttctatctgcacctgctctcaatcctgctctcaccatgagcctccgcctgcagagctcctctgccagctatggaggtggtttcgggggtggctcttgccagctgggaggaggccgtggtgtctctacctgttcaactcggtttgtgtctgggggatcagctgggggctatggaggcggcgtgagctgtggttttggtggaggggctggtagtggctttggaggtggctatggaggtggccttggaggtggctatggaggtggccttggaggtggctttggtgggggttttgctggtggctttgttgactttggtgcttgtgatggcggcctcctcactggcaatgagaagatcaccatgcagaacctcaacgaccgcctggcttcctacctggagaaggtgcgcgccctggaggaggccaacgctgacctggaggtgaagatccgtgactggcacctgaagcagagcccagctagccctgagcgggactacagcccctactacaagaccattgaagagctccgggacaagatcctgaccgccaccattgaaaacaaccgggtcatcctggagattgacaatgccaggctggctgtggacgacttcaggctcaagtatgagaatgagctggccctgcgccagagcgtggaggccgacatcaacggcctgcgccgggtgctggatgagctcactctgtctaagactgacctggagatgcagatcgagagcctgaatgaagagctagcctacatgaagaagaaccatgaagaggagatgaaggaatttagcaaccaggtggtcggccaggtcaacgtggagatggatgccaccccaggcattgacctgacccgcgtgctggcagagatgagggagcagtacgaggccatggcagagaggaaccgccgggatgctgaggaatggttccacgccaagagtgcagagctgaacaaggaggtgtctaccaacactgccatgattcagaccagcaagacagagatcacggagctcaggcgcacgctccaaggcctggagattgagctgcagtcccagctgagcatgaaagcggggctggagaacacggtggcagagacggagtgccgctatgccctgcagctgcagcagatccagggactcatcagcagcatcgaggcccagctgagcgagctccgcagtgagatggagtgccagaaccaagagtacaagatgctgctggacatcaagacacgtctggagcaggagatcgccacctaccgcagcctgctcgagggccaggacgccaagatgattggtttcccttcctcagcaggaagcgtcagcccccgtagcacctctgttaccacgacttctagtgcctctgttaccaccacctctaatgcctctggtcgccgcacttctgatgtccgtaggccttaaatctgcctggcgtcccctccctctgtcttcagcacccagaggaggagagagccggcagttccctgcaggagagaggaggggctgctggacccaaggctcagtccctctgctctcaggaccccctgtcctgactctctcctgatggtgggccctctgtgctcttctcttcctgtcggatctctctcctctctgacctggatacgctttggtttctcaacttctctaccccaaagaaaagattattcgacgccagccccccttatcttaccaaccaacgcagcccgcctgaatacaccgcgccc

SEQ ID NO: 55000 - DNA, 1460 bp, Homo sapiens
atcgagctcgcaccctgccatttactccatggctagggttatagatagctgggtggctggggtaaatgagtgaggcaggagtcctcggcccaggccaagcaagcttctatctgcacctgctctcaatcctgctctcaccatgagcctccgcctgcagagctcctctgccagctatggaggtggtttcgggggtggctcttgccagctgggaggaggccgtggtgtctctacctgttcaactcggtttgtgtctgggggatcagctgggggctatggaggcggcgtgagctgtggttttggtggaggggctggtagtggctttggaggtggctatggaggtggccttggaggtggctatggaggtggccttggaggtggctttggtgggggttttgctggtggctttgttgactttggtgcttgtgatggcggcctcctcactggcaatgagaagatcaccatgcagaacctcaacgaccgcctggcttcctacctggagaaggtgcgcgccctggaggaggccaacgctgacctggaggtgaagatccgtgactggcacctgaagcagagcccagctagccctgagcgggactacagcccctactacaagaccattgaagagctccgggacaagatcctgaccgccaccattgaaaacaaccgggtcatcctggagattgacaatgccaggctggctgtggacgacttcaggctcaagtatgagaatgagctggccctgcgccagagcgtggaggccgacatcaacggcctgcgccgggtgctggatgagctcactctgtctaagactgacctggagatgcagatcgagagcctgaatgaagagctagcctacatgaagaagaaccatgaagaggagatgaaggaatttagcaaccaggtggtcggccaggtcaacgtggagatggatgccaccccaggcattgacctgacccgcgtgctggcagagatgagggagcagtacgaggccatggcagagaggaaccgccgggatgctgaggaatggttccacgccaaggaagcgtcagcccccgtagcacctctgttaccacgacttctagtgcctctgttaccaccacctctaatgcctctggtcgccgcacttctgatgtccgtaggccttaaatctgcctggcgtcccctccctctgtcttcagcacccagaggaggagagagccggcagttccctgcaggagagaggaggggctgctggacccaaggctcagtccctctgctctcaggaccccctgtcctgactctctcctgatggtgggccctctgtgctcttctcttcctgtcggatctctctcctctctgacctggatacgctttggtttctcaacttctctaccccaaagaaaagattattcaataaagtttcctgcctttctgcaaacataaaaaaagtcgacgcggccgcgaatttagtagtagtaggcggc

SEQ ID NO: 55001 - DNA, 558 bp, Homo sapiens
  misc_feature (10)..(10): n is a, c, g, or t
tcggctcggnaccgtttgacggaagtacaagatgctgctggacatcaagacacgtctggagcaggagatcgccacctaccgcagcctgctcgagggccaggacgccaagatgattggtttcccttcctcagcaggaagcgtcagcccccgtagcacctctgttaccacgacttctagtgcctctgttaccaccacctctaatgcctctggtcgccgcacttctgatgtccgtaggccttaaatctgcctggcgtcccctccctctgtcttcagcacccagaggaggagagagccggcagttccctgcaggagagaggaggggctgctggacccaaggctcagtccctctgctctcaggaccccctgtcctgactctctcctgatggtgggccctctgtgctcttctcttcctgtcggatctctctcctctctgacctggatacgctttggtttctcaacttctctaccccaaagaaaagattattcaataaagtttcctgcctttctgcaaacataaaaaaagtcgacgcggccgcgaatttagtagtagtaggcggc

SEQ ID NO: 55002 - DNA, 1150 bp, Homo sapiens
atcgagctcgcaccctgccatttactccatggctagggttatagatagctgggtggctggggtaaatgagtgaggcaggagtcctcggcccaggccaagcaagcttctatctgcacctgctctcaatcctgctctcaccatgagcctccgcctgcagagctcctctgccagctatggaggtggtttcgggggtggctcttgccagctgggaggaggccgtggtgtctctacctgttcaactcggtttgtgtctgggggatcagctgggggctatggaggcggcgtgagctgtggttttggtggaggggctggtagtggctttggaggtggctatggaggtggccttggaggtggctatggaggtggccttggaggtggctttggtgggggttttgctggtggctttgttgactttggtgcttgtgatggcggcctcctcactggcaatgagaagatcaccatgcagaacctcaacgaccgcctggcttcctacctggagaaggtgcgcgccctggaggaggccaacgctgacctggaggtgaagatccgtgactggcacctgaagcagagcccagctagccctgagcgggactacagcccctactacaagaccattgaagagctccgggacaagatcctgaccgccaccattgaaaacaaccgggtcatcctggagattgacaatgccaggctggctgtggacgacttcaggctcaagtatgagaatgagctggccctgcgccagagcgtggaggccgacatcaacggcctgcgccgggtgctggatgagctcactctgtctaagactgacctggagatgcagatcgagagcctgaatgaagagctagcctacatgaagaagaaccatgaagaggaggagagagccggcagttccctgcaggagagaggaggggctgctggacccaaggctcagtccctctgctctcaggaccccctgtcctgactctctcctgatggtgggccctctgtgctcttctcttcctgtcggatctctctcctctctgacctggatacgctttggtttctcaacttctctaccccaaagaaaagattattcaataaagtttcctgcctttctgcaaacataaaaaaagtcgacgcggccgcgaatttagtagtagtaggcggc

SEQ ID NO: 55003 - DNA, 811 bp, Homo sapiens
atcgagctcgcaccctgccatttactccatggctagggttatagatagctgggtggctggggtaaatgagtgaggcaggagtcctcggcccaggccaagcaagcttctatctgcacctgctctcaatcctgctctcaccatgagcctccgcctgcagagctcctctgccagctatggaggtggtttcgggggtggctcttgccagctgggaggaggccgtggtgtctctacctgttcaactcggtttgtgtctgggggatcagctgggggctatggaggcggcgtgagctgtggttttggtggaggggctggtagtggctttggaggtggctatggaggtggccttggaggtggctatggaggtggccttggaggtggctttggtgggggttttgctggtggctttgttgactttggtgcttgtgatggcggcctcctcactggcaatgagaagatcaccatgcagaacctcaacgaccgcctggcttcctacctggagaaggtgcgcgccctggaggaggccaacgctgacctggaggtgaagatccgtgactggcacctgaagcagagcccagctagccctgagcgggactacagcccctactacaagaccattgaagagctccgggacaagaatccgtggaaccgggcaaacccattggaaaaacaaacgtgggttccattccgtgggagatttgccaattgccaggggtgtgtctgggtggacagaacttcagggctcaaggtaatgaggaaatgggaggcttggcccctttggggccaagaagcgtggggagggccggaatcaacg

SEQ ID NO: 55004 - DNA, 658 bp, Homo sapiens
atcgagctcgcaccctgccatttactccatggctagggttatagatagctgggtggctggggtaaatgagtgaggcaggagtcctcggcccaggccaagcaagcttctatctgcacctgctctcaatcctgctctcaccatgagcctccgcctgcagagctcctctgccagctatggaggtggtttcgggggtggctcttgccagctgggaggaggccgtggtgtctctacctgttcaactcggtttgtgtctgggggatcagctgggggctatggaggcggcgtgagctgtggttttggtggaggggctggtagtggctttggaggtggctatggaggtggccttggaggtggctatggaggtggccttggaggtggctttggtgggggttttgctggtggctttgttgactttggtgcttgtgatggcggcctcctcactggcaatgagaagatcaccatgcagaacctcaacgaccgcctggcttcctacctggagaaggtgcgcgccctggaggaggccaacgctgacctggaggtgaagatccgtgactggcacctgaagcagagcccagctagccctgagcgggactacagcccctactacaagaccattgaagagctccgggacaagaccacaggggtcctctagagcagc

SEQ ID NO: 55005 - DNA, 393 bp, Homo sapiens
ccggccgtgcagcagccgtgccgcctcggcctcccaaattgctgggattacaggcatgagacaccacaacgggctcccgatgttgtctttgacgtattcctctggacctcaatatttcctgtcagctggtaattagatctagaggcttgattaatctttgtatgttcatatgtgagaagaattcataggcggcggcccgtgtgctccgccgagccatgagcctccgcctgcagagctcctctgccagctatggaggtggtttcgggggtggctcttgccagctgggaggaggccgtggtgtctctacctgttcaactcggtttgtgtctgggggatcagctgggggccccccagccaagaccccccgccggggggcgtgccgtggctgggggg

SEQ ID NO: 55006 - DNA, 250 bp, Homo sapiens
tcagatgatccacctgactcggcctcccagagtgctgggattacaggcctgagccactgcaccaggcccaaacttccctcttctcattccacagacactagtcataatggatttagggccctcactagtccagcataacctcattttaacttgagtacatctgcaaatagcctatttcaaaataaaggtcacattcacaggttccaggtaaacataaattttacgggaacagcatttaacccaaagctgt

SEQ ID NO: 55007 - DNA, 430 bp, Homo sapiens
ggtattaaacaagaagagttatggaaaccttaaaaatctattattctggtagcctgtcaaattgttattcccaaatcgaaggaataaaaaaaaatttcaattctttgttatatgagcagccaaagtttactttgattggactttgaattgattactgtgctctttgttatccatcgattgctcactcatccattcaaacattcattgagggtttgctgtgtggaaggaccagaccattcatcttaaattagacaggaacaatacacaaaaaagcatccacatttctgcctttcacactaattataaaggaattttgagcagcacaaactagctacaataataaattttctagtctttaaaaaacagctttatgaaatcttcgatacatgtaagaaaatgagctcctaatgtcatgaactaaccatttaaa

SEQ ID NO: 55008 - DNA, 308 bp, Homo sapiens
tcttatactcaaaatgccccttccatacattatttttaaacatacgaaaatatattcaacttcacttattagaaaaatataatttaaaattagaccaagatcagaatgccaaagatcaaaaaaatctgaaatattagattggtgcaggtataggaagacacactctgatgccttattgatgggagtataagttgatacaacttacctttaaaaacaagttgcaatatctgaaaactctgaaatgtattaggccaacagtcccactcctagcaatttatcctacaaatatactcatatgagtgcaaaaa

SEQ ID NO: 55009 - DNA, 392 bp, Homo sapiens
gagagaaggagggaagaaagaggagagagagaaaaagaaagggaggaggagcaggagagagaagcctgtctcgcctactatagaattttcttctctcctctcaaaacaagttccttacacatttggctgaccgcatggtacacgtggctggtgtcagggttctgtctgaactctgtgattgaggagaccaacctgcaggagccactttgaagatgcttactactgacagggcaggatcccatgaggcaggcatttcagggctaccttgtccttggaattcacatttcttggagccctggaaggggaccagctgttcagctctgcctgtcttgtgaacaggttgcaatccttaggaaaggaagtatgactttttgcttcattctacaaagtct

SEQ ID NO: 55010 - DNA, 218 bp, Homo sapiens
atagattgttaatacttcaaaataaaaatagaaaaactcatatatcacatttatatcttaaaaatgagagatctaacagtgaagatttctacagagcaataatcagttacggtaaaagtgcaaaagaaaacattttaaagaaaaagatagaaatgactatttaaataaagtgtatacatcaaataaggtaactgataaagtgataaagaatatgtttt

SEQ ID NO: 55011 - DNA, 1167 bp, Homo sapiens
cgtttccagaatcacttagcttctttggctggatgaagcactagccatctcttgctttgacagggctttcctaacttcacaattgttgccattcacagtatgatatttctgaatgacagtcttatccacggagttgtggtcgtcaaaggttacaaaggcaaagccccttttcttgccactgcctcggtcagtcatgatttcaatcacttcagtttttcagaactgtttaaaataatctcttaggtgatgttctttagtgtcttctttaatgccaccaacaaatatctttttcacagttaagtgggcacctggtctttaagaatcttctgttgagacagctctctttggttccacaagtcttctgttcaccttgtgtgggccttgcattcatggctgcatcctccacctccacagtggcatatgtgacaaactcaaagcccctggagcacttggtgtttggatctctcattaccacacagtccgtgagtgtcccccattgctcaaaatggctcctcaggctctcatcggttgtttcaaagctcaaccctccaatgaagagcttcctcagctgttcgggctctttaggagacttgtgacttagacatgatggcatggagaagagagactttaatgatgcttcagcgtcatccatgggcagaaagctttttttttggagacagaatctcactttgtcacccaggctggagtgcagtggcatgatcttggcttactatagccttggcctcctgggctcaagctgtccttctgtgtcagcctccctagtagccgggactacaggtatgcatcggcatgcctgactaattttttaaatttttagtagagatgagatcaccctgtgttgctcaggctggtcttgaacgcctgggctcaagcaatcctccctcccttgccttccaaagtgctgggattacaggtgtgaaccactgtgcctggcctattttcaactttttcttatggtagttttcagttatatacagaagtcaagaaaatagttcagaacaaccccgtttgaggccgggtgcggtggctcatgcctgtaatcagcactatgggaggccgagacgggcagatcacgaggtcaggagatcgagaccatcctggctagtgcggtgaaaccccgtctctactaaaaatacaaaaaaaaaa

SEQ ID NO: 55012 - DNA, 742 bp, Homo sapiens
cttggggagccgttttgacgcaggggggggacattcacggacggtgtggtaatgacgcagatccacacaccaagtgctccaggggctttgagtgggtcacatatgccactgtggaggtggaggatgccgccatgaatgcaaggccacacaaggtgaacagaagacttgtgacttagacatgatggcatggagaagagagactttaatgatgcttcagcgtcatccatgggcagaaagctttttttttggagacagaatctcactttgtcacccaggctggagtgcagtggcatgatcttggcttactatagccttggcctcctgggctcaagctgtccttctgtgtcagcctccctagtagccgggactacaggtatgcatcggcatgcctgactaattttttaaatttttagtagagatgagatcaccctgtgttgctcaggctggtcttgaacgcctgggctcaagcaatcctccctcccttgccttccaaagtgctgggattacaggtgtgaaccactgtgcctggcctattttcaactttttcttatggtagttttcagttatatacagaagtcaagaaaatagttcagaacaaccccgtttgaggccgggtgcggtggctcatgcctgtaatcagcactatgggaggccgagacgggcagatcacgaggtcaggagatcgagaccatcctggctagtgcggtgaaaccccgtctctactaaaaatacaaaaaaaaaa

SEQ ID NO: 55013 - DNA, 441 bp, Homo sapiens
ggtccacacctggcagcatcggcatcaactctgaactgttagaaatacagattcttgggtcctaacattccagaattcctgaatcagaaaccctgaactgtgtttcagcatgcccaggttggagattctgatacatgggaaagtttgagaaccgctgctctaagggtatgtacttaggagtgggatggctgagtaatggtgtacaaacatacctgtttttactaaacactgctaaattactctccagagttgctcagctgctttctgttccacatcagtgcacaagggttcctgattccccacgttcttactcaaatttgttattaaccaactttctagttttaccaatgtttggtggctgtaaagtgggatctcattgggttttctttttgtgaacttatatgatttcttagtaaatttgaactcttttaatatattcat

SEQ ID NO: 55014 - DNA, 260 bp, Homo sapiens
tgaggcaggagaatggcgtgaacccgggaggcagagcttgcagtgagccgagatcgcaccactgtgctccagcctgggcgacagaacgagactccatcttaaaaataaataagtaaataaataaataaagctccatattttaaaagctcattatagtatttaagtagcagtgatgtttgaatagtcttttcatgccttcccttttactgatttccttgcgaatttgaaattttgactgtcttaagataatttagcacaca

SEQ ID NO: 55015 - DNA, 625 bp, Homo sapiens
attggaaggagaacgatcatggctttaacaaaaaaaaaaaaatgtttaagaaacttggaatctccaggaggctcattcaaaatcaatctcgatctctgtagatatatctccatgatcaggctaaggagcttaatttctcacaagcccccaactcatacagtcttctagttctcccctgcttggtgagaactcttgctagtgaaccttcctctcccacccccaacactggcttcttcttctttcagactgaaaatggaatagaatttgatcccatgctggatgagagaggttattgttgtatttactgccgtcgaggcaaccgctattgccgccgcgtctgtgaacctttactaggctactacccatatccatactgctaccaaggaggacgagtcatctgtcgtgtcatcatgccttgtaactggtgggtggcccgcatgctggggagggtctaataggaggtttgagctcaaatgcttaaactgctggcaacatataataaatgcatgctattcaatgaatttctgcctatgaggcatctggcccctggtagccagctctccagaattacttgtaggtaattcctctcttcatgttctaataaacttctacattatcaccaaca

SEQ ID NO: 55016 - DNA, 1310 bp, Homo sapiens
tatctatgtaacaaatcgcagcacaggagtcccctgggctccctcaggctctggtatgacatatttgagccatataaattcagcttctcctctggcatctgttagccgactcacttgcaactccacctcagcagtggtctctcagtcctctcaaagcaaggaaagagtactgtgtgctgagagaccatggcaaagaatcctccagagaattgtgaagactgtcacattctaaatgcagaagcttttaaatccaagaaaatatgtaaatcacttaagatttgtggactggtgtttggtatcctggccctaactctaattgtcctgttttgggggagcaagcacttctggccggaggtacccaaaaaagcctatgacatggagcacactttctacagcaatggagagaagaagaagatttacatggaaattgatcctgtgaccagaactgaaatattcagaagcggaaatggcactgatgaaacattggaagtacacgactttaaaaacggatacactggcatctacttcgtgggtcttcaaaaatgttttatcaaaactcagattaaagtgattcctgaattttctgaaccagaagaggaaatagatgagaatgaagaaattaccacaactttctttgaacagtcagtgatttgggtcccagcagaaaagcctattgaaaaccgagattttcttaaaaattccaaaattctggagatttgtgataacgtgaccatgtattggatcaatcccactctaatatcagtttctgagttacaagactttgaggaggagggagaagatcttcactttcctgccaacgaaaaaaaagggattgaacaaaatgaacagtgggtggtccctcaagtgaaagtagagaagacccgtcacgccagacaagcaagtgaggaagaacttccaataaatgactatactgaaaatggaatagaatttgatcccatgctggatgagagaggttattgttgtatttactgccgtcgaggcaaccgctattgccgccgcgtctgtgaacctttactaggctactacccatatccatactgctaccaaggaggacgagtcatctgtcgtgtcatcatgccttgtaactggtgggtggcccgcatgctggggagggtctaataggaggtttgagctcaaatgcttaaactgctggcaacatataataaatgcatgctattcaatgaatttctgcctatgaggcatctggcccctggtagccagctctccagaattacttgtaggtaattcctctcttcatgttctaataaacttctacattatcaccaaca

SEQ ID NO: 55017 - DNA, 2355 bp, Homo sapiens
tcgagatctgctgcattcagagcattgtgttaggaatattggaagtaaagcattgtaatagctcttgccttcagtaagcttgcagtctggcagttggattaaaaaaatgaccatacgaagccgtgataacagcctctaggagggaactctactatgtggtggagatatgtgtccccctgcaaataccaagaaagacagttaattagtgtccattacagaatgttcttctggtgtcctttttaaagagattcagtcagtctttaaagatgatgctattgctgctactgctaataataatagtgatagctaccacttactgtttactatgtaccttgtgctaaacacttgacataagttaactcgtttaatcttaaaccaaggaagtagataatgattctcattttacagatgaagaaactgaatagacagagatgaagaaatgtgcctaaggttacgcgatttagtgaactgggatcagaacctgggttctctggccttagactataaaccatagataggaattgagcacatttattaatcagcattgcaaggctggtggaattttgataaacacccaaaccagattcttttctgcactagtgataccagacagattttggaaatataaacaggatagggtgcattaaagttcactcacatttgttcagttaaacagatggttggcttatctttagttgcttcactcagtcatttccaaaaccacacccaaggccaggcagtggctcatgcctgtatttctagcagtttgggaagctgaggtcagaggatcacttgaaaccaggagtttgagaccagccttggccacgtagtgagaccatggctcaacaaacaaagaataataaacatatttactattatgggacgtctatgtgccagacattgtgctagacattttacatttattatttctaattgccccaacaacctgggaacatatcaccgagtgtattttattacaaatgtggaaactgaagtacagaagacaataagcctatgaagtgatcgtagggcgttgctggtacaaagtcaaaacctgcatcattgggccctgcgcctctatgtctgtggggagaagggattgttgatgatgtgatagctggaaaacataccattcatcaaaataaatcccaggtggattaaaaagaaatgtttaaaattatagaggcactgtggagaaaaagcaaaataaaatgtttatcagagataacgccttaacattttcttggaacattttattagatgtgtgcctgggaaggaatgataactttctttttaaaaccagaagaaatcacaaaggaaaaggtttgtcaacctaaatatgcaaaatgttaaaatattttcttattgaaaaataaaattatagaagatagtagtctgagaatgacaaatatgataaaagggtcaatacctgtactatttttttcagatgtgtagaaataaatacatcaagatctcaacagatatgtgtacaaaggaaatcataggccatgggaaattttaaatgtaaataagcatataaaaaaattcatgctcacatactgagagagatgccaaataaagtagacatttctacactccagccttggcaaccgtgagaccctgtctcaaaaaagcaaaaccaaagcagacatttcccatttatctatcttgcttactgtctatgtccttcattagaatgaaagcttcacgagggcagagctttgtctgctcactgctgagccctgcacctataacagtgccaggcacatagtacatgtttagtaaatatttactgatgaatgaataaagtcagggaaacaccagataggaatctgaaggagaataagaaactgccagaagcaagtattaattgcctcctaattactgtgaggaccctcccaagcatgctagatttgctgagcctgcagccagccccataaggaactcctgcatcctgtatgctgagcagagcacaaacactcataaactgaggcccatgcatggcgtgacaccacagttccacaccaaagagcaagagccataaaaacagaacagatactttctaaattgctttcatcaatcttactttgagaagaggattttttggctgaagcacgtgaacagaactgccaaaatccaaactttgtgagcagtgtttgttactcaaaattagtgaatacctcctttctcaacagcaaaatacagagaaatatgacaaatatgcattttatttaaaataactataaaactataaataaacctaatgcagttgatttcagagcatgctaagaacctttaaaagttattattctagccaggcatggtggctcacacctgtaatcccagcactttggg

SEQ ID NO: 55018 - DNA, 337 bp, Homo sapiens
tcaatacctgtactatttttttcagatgtgtagaaataaatacatcaagatctcaacagatatgtgtacaaaggaaatcataggccatgggaaattttaaatgtaaataagcatataaaaaaattcatgctcacatactgagagagatgccaaataaagtagacatttctacactccagccttggcaaccgtgagaccctgtctcaaaaaagcaaaaccaaagcagacatttcccatctaccaaaacagagaaattttagtgatagcctctgcttccttttcggagtatgtaagccaaaaggaaatgaaactttttatttaatcctcacccattttg

SEQ ID NO: 55019 - DNA, 957 bp, Homo sapiens
acacttccataaagcctaattcatctccaccaattcacaaaaaaatgccaagaaagcatttaccacatgcaatcactgttccaaagatttagagaggtttagaagagtgattgtaaccacaggctttggcgccatattgcctggtccaaatgtggctttggtgcatactaatcacagaattttagtctagttactggctgtgcctatctgtgcctcagtctccttatttgtaaaatgggaatgagcataagaagaataagtgggttgaaagtctacattgcctagaacaacccagcaaactagaagaacaccataagaatgcgtaattattattctttatatgtttataacattttttgtttgtttgttttaacagctccagacgcaggtagtatagtaatttttgccccatactgctgaatgttttgcctggcaaatactgggaatggggcaattcctgtggcagttttgttttccaataattgttttttcttatatcggggatgacaaatgcttgtcacaaagagtagccttgttgattacacttataaatcttcgggagacttcttcaatgagtcagtgttagagctttcagtttccataaatgcagatttcctttactcagtttttttttaaacatgagctgatctttcttagtttgcactataataccctccactgaagtctcactgcaactgcttttaattatatgtgaagagaaactagccctttgctaaaatagttgcatgtttcacgggccagtgagtcatttagtcatacacttaagaactttccacctttcaagtgtttatcatcacctcggatttcacggcctaatgccagtcaatttcatggggcatagaagccctgtacgtattagtttgggccattattgtatcagtcttgtttattcccagaaaagtcttatcaagaaaagagggagtgactataatcaga

SEQ ID NO: 55020 - DNA, 417 bp, Homo sapiens
gttgtgttatgtgcggctccgcctagcagaggcgttccaggaattggtgggcctttctatggcatgctttctccagctgtactcactgggatagcaagagagcaaggctttgaaccaagcttcttgcctctgaagaaaggctgccatccagaaccgccacctgggatgaggctgggcagggtcaggacaagaaacgctgctgcctgtccttggatcctggttactgaacagtcagtgtggaaaatgattaactggttcaagataattaggaaagagaatgattttgagagctggcatggatgagggagagaaacagtggactagggctccagctttaggcaagtgctaaatatcctaccagcaggaaggcggacagagtgggagatcagagagctgtctgggctattcagacccctt

SEQ ID NO: 55021 - DNA, 388 bp, Homo sapiens
tcagcctcttgagtagctgggaccacaggtgcttgccaccatgcctggctattttgtaatttttgtggacatgagttctcactatgttgcccaggctggccttgacctcctgggctcaaggaatcttcctgccttggcctcccaaagtgttgggattacaggcgtgagtcactgtgcctgatgaattgctgcgattcttgcttttaaattatgtaactgcagtttttatcatgggcaatacagtttactgtgagtttgcttaactctaaaacgcttagaatagtatcatacagaaataaattgctcaattatttgttaaataagtaaatgcacacaatcatgttatatgttggtttctgtccttctagtcatttttcccccatacatt

SEQ ID NO: 55022 - DNA, 169 bp, Homo sapiens
gtgtggacaagcctccgagggcctgaacaggaggcggggtcccaggcagaatggccaatgcggcctcccaagtttcaggaacaacccgtgatctggaagctttggaaactcttgaagacaaggagcaatgacctgggttggaccaaggattccagatccctgctctgct

SEQ ID NO: 55023 - DNA, 893 bp, Homo sapiens
  misc_feature (851)..(851): n is a, c, g, or t
ttttccacctcttttctctcctctctcctctgaatctgcctcttcctcttctcacctccctcttccttccctgtctctcccccttgggtctctcttccttccctctctctggtttctctgtctctgccctgtcctttcctttccctcctctctggacctgtctcctctcctggctctctctccttcaagctctcactcccactggcctccctcccgggagccccgtctcctccgtctccaggtggcccctgcatccctgcctggtgggcctttgcctccctctcctgttcctgccttgcctgctcccaggtttccaggtcctgaccaggaggcaggagtccataccgagggcccaaacaggctagccctgagcagggcccccaagcctgaggcccaggagtggacagacctttgtgacacccattctctcttccttttccatctgtccggaactctggacactgcctggaggaatcaggcctgccgtaggcccaggaaggcggaaacaaagacgacgctcagagacaggaagcaacttgcctaaagatacacagcacaaatgagaaaattggtgcccaatgtttctgaagaccagcaactgctaagacagagacttcgagggaacccgaccttgcctgaaggaccaacagcgccccctgcaggacacttccctccattgagagaagccacaggcgccggcctgaggcattctgagtgcgtggaatcctctattaccacctcctggcaaagaacggagctgcaacccagctatatgagacaccgagaatcgcttaaacccggtaggcggagtttgcagtgagccgagatcgcgccactgcactctagcttgngcaacacagcaagactccgtctcaaatcaaaaaacaaaaaaa

SEQ ID NO: 55024 - DNA, 626 bp, Homo sapiens
taacccctcactaaaggaattaagcttcggcccgcccttcgttttttaatttttggttgggcattttgtaaaaatgaacatttttactcctaatcaatatacaaacatcatgctcagcaaacttcttggtatgaaacttctgaacttcacacattttcaagtcattctatgggtgggtggattggctcccatggaaatgcaactgggactgcacatgggaaacaaaggaaaatggaatttggttcacacaaacctgtttgggagattgcatttccaggaaatgggccaaattgagtttgtttcctttgtaacaacattgttgtgccttgctgactggaaggtgggtacaaataaaggaggatggactgacagctgaagaggcaccagtaattagcccctaatccttaccagggagtctctctgatgggttaaagaagcctacagaggccaggggcggtggctcacacatgtaatcccagcactttaggttttaactaataattagggtattactctatcattctctatcattcaaattctccaggtactgacctggtttttattttatttatttatttatttacttatttatttttgagacagggtctcactctgctgcccaggct

SEQ ID NO: 55025 - DNA, 1441 bp, Homo sapiens
ttttccacctcttttctctcctctctcctctgaatctgcctcttcctcttctcacctccctcttccttccctgtctctcccccttgggtctctcttccttccctctctctggtttctctgtctctgccctgtcctttcctttccctcctctctggacctgtctcctctcctggctctctctccttcaagctctcactcccactggcctccctcccgggagccccgtctcctccgtctccaggtggcccctgcatccctgcctggtgggcctttgcctccctctcctgttcctgccttgcctgctcccaggtttccaggtcctgaccaggaggcaggagtccataccgagggcccaaacaggctagccctgagcagggcccccaagcctgaggcccaggagtggacagacctttgtgacacccattctctcttccttttccatctgtccggaactctggacactgcctggaggaatcaggcctgccgtaggcccaggaaggcggaaacaaagacgacgctcagagacaggaagcaacttgcctaaagatacacagcacaaatgagaaaattggtgcccaatgtttctgaagaccagcaactgctaagacagagacttcgagggaacccgaccttgcctgaaggaccaacagcgccccctgcaggacacttccctccattgagagaagccacaggcgccggcctgaggcattctgagtgcgtggaatcctctattaccacctcctggcaaagaacggagctgcaacccagctatatgagacaccgagaatgatctcaacaaaaaggaacagtgaccagaatgcctgggggaggaacaggggatactgggtggaaggaggggagagggagaagttgtaatattttgtaaaaatgaacatttttactcctaatcaatatacaaacatcatgctcagcaaacttcttggtatgaaacttctgaacttcacacattttcaagtcattctatgggtgggtggattggctcccatggaaatgcaactgggactgcacatgggaaacaaaggaaaatggaatttggttcacacaaacctgtttgggagattgcatttccaggaaatgggccaaattgagtttgtttcctttgtaacaacattgttgtgccttgctgactggaaggtgggtacaaataaaggaggatggactgacagctgaagaggcaccagtaattagcccctaatccttaccagggagtctctctgatgggttaaagaagcctacagaggccaggggcggtggctcacacatgtaatcccagcactttaggttttaactaataattagggtattactctatcattctctatcattcaaattctccaggtactgacctggtttttattttatttatttatttatttacttatttatttttgagacagggtctcactctgctgcccaggct

SEQ ID NO: 55026 - DNA, 198 bp, Homo sapiens
aggtagattgaattgagaatcatataatcagtatatctgagaattgtatgaccagtatattttaaaatatgatctttcttttaatcatattttaaagtatgatagtgcagagttaatggatgttaaaattttattttcttcttttagtaggtagactgaattgacaatcatatgatcagtatatttgagaattatatg

SEQ ID NO: 55027 - DNA, 565 bp, Homo sapiens
gaaaccccatctctactaaaaatacaaaattagcagggcgtggtggtgcactcctgtaatcctagctacttgggaggctgagacaggagaatcacttgaacccaggagccagaagtcgcagtgagccgtgatcatgccattgcaccccagcctgggcaaaaagagcgaaaccccatctcaaaaaataaaaacaaaaaacaaacaaaaaaaaatgtgatatcataagacagaccttttcccttctcatcagtgactggaattaactgcccatgtggaacgggttgtgggtgttggttcctttactgggtcatctggtaaactgcaaggtttctgctgtgacattgaaggcagacatcaaccctctaagacatttttttcctatcctctgggaatattactttttggacaatcttggtccattggtaagctcatgggaatttgtcagagtttttttgtttcttttggctcatgtttagcatcgattggcagagtgtttggagtcatcctcagaaaggaattacagtggttcggaggtgttttctgtagtgggccctcatttgggaat

SEQ ID NO: 55028 - DNA, 190 bp, Homo sapiens
  misc_feature (6)..(6): n is a, c, g, or t
  misc_feature (123)..(123): n is a, c, g, or t
  misc_feature (130)..(130): n is a, c, g, or t
gttctnattcttcatctctcttgataaaccttcacagctttcgtatttggcttctgcttctgcaactaccctttagcattattcaccaggatttcattcccttctgttcttattttacatttnctttttnctttttttttaagatggagtttcactcttgtcgcccaggctggagtgcaatggcacgatc

SEQ ID NO: 55029 - DNA, 2012 bp, Homo sapiens
acaaataataaggaacaaggtgtggttattgattctctaaaattaagtgaggagatgaagcccaatctagatggtgttgatttattcaacaatggtggttctggaaacggtgaaacgaaaactgggctgagactgaaagcaataaatctgcctttggaaaatgaagtaactgaaatttcagctttgcaggtgcatttggatgaattccaaaaaatcttatggaaggaaagagaaatgcgcacagctttggaaaaagaaatagagagactggagtcggctttgtctctgtggaagtggaagtatgaagaactgaaagaatcaaagccaaaaaatgtgaaagagtttgacattcttcttggtcaacataatgatgaaatgcaagaactgtcaggcaatataaaggaagaatccaaatctcaaaacagcaaagacagagtgatttgtgagttaagagcagagctagagagattgcaagctgaaaatacctcggagtgggacaagagggaaatacttgaaagagaaaagcagggactggagagagaaaatagaaggctgaagatccaggtgaaagaaatggaagagcttttggataagaaaaatagattaagtgcaaactctcaaagtcctgatttcaagatgtcacaaattgatctgcaagaaaaaaaccaggaattactgaaccttcaacatgcctactataaactaaacagacaataccaggcaaatattgcagaactgactcatgcaaacaaccgagtggatcaaaatgaagcagaagtaaagaaactaagattacgagtggaagaactaaagcagggactcaaccaaaaagaagatgagcttgatgattccctgaatcagatccgtaagctccagaggtctctggatgaagagaaagaaagaaatgaaaacttagagactgaactcaggcacttgcaaaactggtaattttttcacaaaatatgctgaattaaagattagggccttaaagacatttccatatccttttcttaaatatcagtaaaattgtttttattaactagaaatattaatgaaaaaaacgtagacaatacacaaattaatgggcttcttcacttcttctaatttttgcctaacagatactgcatattctcaaaaagacaatttaaatgtcatttaaaaacaactttaattctaagatgtgtaaatattttgaaagtcaaaaagggctttcagaatactttttacataaaatctgaaagagttataatatcggtaagaaaaagtaagttgaaaaccatacaagacgctgggtcattaataagaaaaccattgactttaagtataaagtactggtttgtttaaataattggtaaacttttatgtacgtgttgtctatgtggtggggatggcaggttgtattaacaaaaatgaatcattctagaggtgtaacaatacatttcttatataattttataagtcatttctaatctttgtataaaacagaagtgagcagatgaatcagaaaaaagtgttttgtattttaaagtaacagataaccagtgattgaatctaagacaggctgtaagcatcgctgagaaactaaaaggacttttgacttttatctggatagacatttctacagtaaaatcatggaaaggcatcagcattgcaaagtagcatctaggtagaaatcaggccaaaattaagctgtggtttccctctgagtagtgggaatagagaaaattaggaaattgtggttatgtgaatatttctttaaaacttttatgtacattatagtttattgcttcatatttaagtttagtttttaaggtaaaatgttattttgaacaaaaagacacttataattttccatacctattttcaactgaaggcaacttgtaagatttaactcagtcaataacatactggttttactcatctccccctccattgattagccaaaaaaaaatgaaatcttactaattcattattgaataaagaccacttttatcagagtctctcattgtaaa

SEQ ID NO: 55030 - DNA, 1248 bp, Homo sapiens
acaaataataaggaacaaggtgtggttattgattctctaaaattaagtgaggagatgaagcccaatctagatggtgttgatttattcaacaatggtggttctggaaacggtgaaacgaaaactgggctgagactgaaagcaataaatctgcctttggaaaatgaagtaattgcaaaactggtaattttttcacaaaatatgctgaattaaagattagggccttaaagacatttccatatccttttcttaaatatcagtaaaattgtttttattaactagaaatattaatgaaaaaaacgtagacaatacacaaattaatgggcttcttcacttcttctaatttttgcctaacagatactgcatattctcaaaaagacaatttaaatgtcatttaaaaacaactttaattctaagatgtgtaaatattttgaaagtcaaaaagggctttcagaatactttttacataaaatctgaaagagttataatatcggtaagaaaaagtaagttgaaaaccatacaagacgctgggtcattaataagaaaaccattgactttaagtataaagtactggtttgtttaaataattggtaaacttttatgtacgtgttgtctatgtggtggggatggcaggttgtattaacaaaaatgaatcattctagaggtgtaacaatacatttcttatataattttataagtcatttctaatctttgtataaaacagaagtgagcagatgaatcagaaaaaagtgttttgtattttaaagtaacagataaccagtgattgaatctaagacaggctgtaagcatcgctgagaaactaaaaggacttttgacttttatctggatagacatttctacagtaaaatcatggaaaggcatcagcattgcaaagtagcatctaggtagaaatcaggccaaaattaagctgtggtttccctctgagtagtgggaatagagaaaattaggaaattgtggttatgtgaatatttctttaaaacttttatgtacattatagtttattgcttcatatttaagtttagtttttaaggtaaaatgttattttgaacaaaaagacacttataattttccatacctattttcaactgaaggcaacttgtaagatttaactcagtcaataacatactggttttactcatctccccctccattgattagccaaaaaaaaatgaaatcttactaattcattattgaataaagaccacttttatcagagtctctcattgtaaa

SEQ ID NO: 55031 - DNA, 369 bp, Homo sapiens
cataaatatgggggaacgtggactatgaagatactgaaagagtgcaagccaaaaaactgtgaaagagtttgacattcttcttggtcaacataatgatgaaatgcaagaactgtcaggcaatataaaggaagaatccaaatctcaaaacagcaaagacagagtgatttgtgagttaagagcagaggtaagacactgggtaaagagtaccatatatattaaaacataactgactgttgttaaatgccatactattttaagtagggtaacggtcgtgcctttggttactttatgaaagtgaatgctgctgctaatgtaatcagcttatatgtgatttaaaaggctgtggaatgacattggcccataactaga

SEQ ID NO: 55032 - DNA, 1841 bp, Homo sapiens
acaaataataaggaacaaggtgtggttattgattctctaaaattaagtgaggagatgaagcccaatctagatggtgttgatttattcaacaatggtggttctggaaacggtgaaacgaaaactgggctgagactgaaagcaataaatctgcctttggaaaatgaagtaactgaaatttcagctttgcaggtgcatttggatgaattccaaaaaatcttatggaaggaaagagaaatgcgcacagctttggaaaaagaaatagagagactggagtcggctttgtctctgtggaagtggaagtatgaagaactgaaagaatcaaagccaaaaaatgtgaaagagtttgacattcttcttggtcaacataatgatgaaatgcaagaactgtcaggcaatataaaggaagaatccaaatctcaaaacagcaaagacagagtgatttgtgagttaagagcagagctagagagattgcaagctgaaaatacctcggagtgggacaagagggaaatacttgaaagagaaaagcagggactggagagagaaaatagaaggctgaagatccaggtgaaagaaatggaagagcttttggataagaaaaatagattaagtgcaaactctcaaagtcctgatttcaagatgtcacaaattgatctgcaagaaaaaaaccagcttgatgattccctgaatcagatccgtaagctccagaggtctctggatgaagagaaagaaagaaatgaaaacttagagactgaactcaggcacttgcaaaactggtaattttttcacaaaatatgctgaattaaagattagggccttaaagacatttccatatccttttcttaaatatcagtaaaattgtttttattaactagaaatattaatgaaaaaaacgtagacaatacacaaattaatgggcttcttcacttcttctaatttttgcctaacagatactgcatattctcaaaaagacaatttaaatgtcatttaaaaacaactttaattctaagatgtgtaaatattttgaaagtcaaaaagggctttcagaatactttttacataaaatctgaaagagttataatatcggtaagaaaaagtaagttgaaaaccatacaagacgctgggtcattaataagaaaaccattgactttaagtataaagtactggtttgtttaaataattggtaaacttttatgtacgtgttgtctatgtggtggggatggcaggttgtattaacaaaaatgaatcattctagaggtgtaacaatacatttcttatataattttataagtcatttctaatctttgtataaaacagaagtgagcagatgaatcagaaaaaagtgttttgtattttaaagtaacagataaccagtgattgaatctaagacaggctgtaagcatcgctgagaaactaaaaggacttttgacttttatctggatagacatttctacagtaaaatcatggaaaggcatcagcattgcaaagtagcatctaggtagaaatcaggccaaaattaagctgtggtttccctctgagtagtgggaatagagaaaattaggaaattgtggttatgtgaatatttctttaaaacttttatgtacattatagtttattgcttcatatttaagtttagtttttaaggtaaaatgttattttgaacaaaaagacacttataattttccatacctattttcaactgaaggcaacttgtaagatttaactcagtcaataacatactggttttactcatctccccctccattgattagccaaaaaaaaatgaaatcttactaattcattattgaataaagaccacttttatcagagtctctcattgtaaa

SEQ ID NO: 55033 - DNA, 1450 bp, Homo sapiens
acaaataataaggaacaaggtgtggttattgattctctaaaattaagtgaggagatgaagcccaatctagatggtgttgatttattcaacaatggtggttctggaaacggtgaaacgaaaactgggctgagactgaaagcaataaatctgcctttggaaaatgaagtaactgaaatttcagctttgcaggtgcatttggatgaattccaaaaaatcttatggaaggaaagagaaatgcgcacagctttggaaaaagaaatagagagactggagtcggctttgtctctgtggaagtggaagtatgaagaactgaaagaatcaaagccaaaaaatgtgaaagagtttgacattcttcttggtcaacataatgatgaaatgcaagaactgtcaggcaatataaaggaagaatccaaatctcaaaacagcaaagacagagtgatttgtgagttaagagcagagctagagagattgcaagctgaaaatacctcggagtgggacaagagggaaatacttgaaagagaaaagcagggactggagagagaaaatagaaggctgaagatccaggtgaaagaaatggaagagcttttggataagaaaaatagattaagtgcaaactctcaaagtcctgatttcaagatgtcacaaattgatctgcaagaaaaaaaccagcttgatgattccctgaatcagatccgtaagctccagaggtctctggatgaagagaaagaaagaaatgaaaacttagagactgaactcaggcacttgcaaaactggtaattttttcacaaaatatgctgaattaaagattagggccttaaagacatttccatatccttttcttaaatatcagtaaaattgtttttattaactagaaatattaatgaaaaaaacgtagacaatacacaaattaatgggcttcttcacttcttctaatttttgcctaacagatactgcatattctcaaaaagacaatttaaatgtcatttaaaaacaactttaattctaagatgtgtaaatattttgaaagtcaaaaagggctttcagaatactttttacataaaatctgaaagagttataatatcggtaagaaaaagtaagttgaaaaccatacaagacgctgggtcattaataagaaaaccattgactttaagtataaagtactggtttgtttaaataattggtaaacttttatgtacgtgttgtctatgtggtgggaagttcccaccagcaaagaccttcccaccacacgtttctttttttttgtttgtttgtttgagacagtgtctcactctgtcacccgggctggagtgcagtggcatgatcttggctctctgcaacctccacctcctaggttcaagcgattctcatgccttggcctccagagtagctgggatggataggcatgtgccaccacacctggctaacttttgtattttccgtagagagcggt

SEQ ID NO: 55034 - DNA, 1029 bp, Homo sapiens
acaaataataaggaacaaggtgtggttattgattctctaaaattaagtgaggagatgaagcccaatctagatggtgttgatttattcaacaatggtggttctggaaacggtgaaacgaaaactgggctgagactgaaagcaataaatctgcctttggaaaatgaagtaactgaaatttcagctttgcaggtgcatttggatgaattccaaaaaatcttatggaaggaaagagaaatgcgcacagctttggaaaaagaaatagagagactggagtcggctttgtctctgtggaagtggaagtatgaagaactgaaagaatcaaagccaaaaaatgtgaaagagtttgacattcttcttggtcaacataatgatgaaatgcaagaactgtcaggcaatataaaggaagaatccaaatctcaaaacagcaaagacagagtgatttgtgagttaagagcagagctagagagattgcaagctgaaaatacctcggagtgggacaagagggaaatacttgaaagagaaaagcagggactggagagagaaaatagaaggctgaagatccaggtgaaagaaatggaagagcttttggataagaaaaatagattaagtgcaaactctcaaagtcctgatttcaagatgtcacaaattgatctgcaagaaaaaaaccaggtatgggtgctccttggagcaaattctcactgtctaatctcactctgatgcctacgcagagtctgtcttcactcgtacacgcctccacatttggatatttccttttgtgccagctaatacctgatactccttgctcttttgcccactaggatgtaaaataacgttcatgcatctgaaacaaagtgtgtcaaatgttaaaatatgacaaatcttcagacagtttcaagatttccaaaaggaagaagaaaaatgaagtaagaaatagaactttctggttttttgtttcttattaaagctttgtctcagtattttctaagctaatgatcttatttccaataaagattttttcattaattcaag

SEQ ID NO: 55035 - DNA, 313 bp, Homo sapiens
tgggctgggattccagcccaggaccatgtggggtggggggcagtggatcaatcttttcctggagggagtcaatggtgatggtgggaatgggtcaggggtgctggcaaggagggtccaaggcccccaggagggagggaggcatgggagatgagtttgtccctcttgagttctgtctctctctgtgtctctctgtttctgcctctttctgtctccttgtatttctcagtccctgtcttcgtctatacctctttctctcttccttgtgtatctgacccactgcccaggaggggatgcaggcagagacccctggctt

SEQ ID NO: 55036 - DNA, 257 bp, Homo sapiens
aaattgaaaaatagagaaaatgtggagaaaactagaatctctatagacagcgtcaatgcagcatcaattatatgaaccacttttgagcacaaagaactattgttttgaccttggaggcaatttggtcttcattaggtttagctgtaggatagttgatgttcattattccctataatgcttgtgatggcaaaaccttcacaaatttatatgatctaggtatgttttcaatccttacaacccaaataaccgatcataac

SEQ ID NO: 55037 - DNA, 389 bp, Homo sapiens
gcggtgggcgcgcagtgcgttctcggtgtggagggcagctgttccgcctgcgatgatttatactcacaggacaaggatgcggtttgtcaaacagtactgctacggaggagcagcagagaaagggagagggtttgagagggagcaaaagaaaatggtaggcgcgcgtagttaattcatgcggctctcttactctgtttacatcctagagctagagtgctcggctgcccggctgagtctcctccccaccttccccaccctccccaccctccccataagcgcccctcccgggttcccaaagcagagggcgtgggggaaaagaaaaaagatcctctctcgctaatctccgcccaccggccctttataatgcgagggtctggacggctgaggac

SEQ ID NO: 55038 - DNA, 1104 bp, Homo sapiens
  misc_feature (1063)..(1063): n is a, c, g, or t
atgcctctatcattcctccctatctacactaacatcccacgctctgaacgcgcgcccattaatacccttctttcctccactctccctgggactcttgatcaaagcgcggccctttccccagccttagcgaggcgccctgcagcctggtacgcgcgtggcgtggcggtgggcgcgcagtgcgttctcggtgtggagggcagctgttccgcctgcgatgatttatactcacaggacaaggatgcgggtttgagagggagcaaaagaaaatggtaggcgcgcgtagttaattcatgcggctctcttactctgtttacatcctagagctagagtgctcggctgcccggctgagtctcctccccaccttccccaccctccccaccctccccataagcgcccctcccgggttcccaaagcagagggcgtgggggaaaagaaaaaagatcctctctcgctaatctccgcccaccggccctttataatgcgagggtctggacggctgaggacccccgagctgtgctgctcgcggccgccaccgccgggccccggccgtccctggctcccctcctgcctcgagaagggcagggcttctcagaggcttggcgggaaaaagaacggagggagggatcgcgctgagtataaaagccggttttcggggctttatctaactcgctgtagtaattccagcgagaggcagagggagcgagcgggcggccggctagggtggaagagccgggcgagcagagctgcgctgcgggcgtcctgggaagggagatccggagcgaatagggggcttcgcctctggcccagccctcccgctgatcccccagccagcggtccgcaacccttgccgcatccacgaaactttgcccatagcagcgggcgggcactttgcactggaacttacaacacccgagcaaggacgcgactctcccgacgcggggaggctattctgcccatttggggacacttccccgccgctgccaggacccgcttctctgaaaggctctccttgcagctgcttagacgctggatttttttcgggtagtggaaaaccagcagcctnccgcgacgagcccttcaacttagcttcacaacagggactat

SEQ ID NO: 55039 - DNA, 242 bp, Homo sapiens
acacagcttcgtctgtttgtgggaatattcgtttcttaggtcttgtaaagttcttgatttcttccctcaagaaaaatacggaattgcatgcattcttccatcaatatttgattcattataataaatttatgcctcactgctgtgttccacacctttctacataaaaatatagccttttgtattaacaacatttctaaaaacattttattgtttgttttttgagatggagtttcgctgttgtt

SEQ ID NO: 55040 - DNA, 702 bp, Homo sapiens
ctgatcttctcctttgggtatgtcagatcatcctaaattttagaagcagttgattcactttggaattcagaatgattcttgtattagaagataatttgtgggtattaatttttgtttaagtttaaaataaaagtaaagattcattttggatatcagttgaaaccccttagtaactcagtttctgttattcttgttctcatttcctttaaatacacttgttcttggcttttgccattttgattctgtgaagtaggcaggagcagggattaatttatacagtattcctgttctgaacaaaaccagaaaagtcactgtataaacttgacttaaaatagtatctttctcttttcatgtattttcatttgggggaaaaaaaatctctttaattgtaacctgaattcaagctgtacccctccatggtcctacactctagagctaatctggttgggcagaaaggcagaaggatggtatattgtcccattgtgcctataatgtattttaaattggtcattccaccttacctaatggaaattcttgcagctttcctagtgctcatcagcggttttaggaattcactaacacacccaaaatttgttttttgttttttgctttttttccttttccttttctctgtgatatcatgagcctgtaaggacaaatggcatatttgggcataactgcttgactctgtaactacttttt

SEQ ID NO: 55041 - DNA, 446 bp, Homo sapiens
tcacctgtaatctcagcactctgggaggccagggtgggtggatcacctgaggtcaggggttcaagatcagcctggctaacatggcaaaacctcatctctactaaaaaaatgcaaaaattagctgggcatggtggcatgcacctgtaatcccagctactcgggagattgaggctggagaatcgcttgaacccaggaggtggaggttgcagtgagctgagattgtgccactgcactccagcctgggtgacagagcaggactccgtcaaaaaacaaaacaaaacaaaacaaaacaaaactcatcattatgtgtagatagggaatgtgcaatgaggcatggtggattggtcaggactaagtttaaatatttatttttttattaaaaaaatagaaaaatgtgtccatgtcctaactgctggtaactgtgactatgacttcattttaaaatt

SEQ ID NO: 55042 - DNA, 439 bp, Homo sapiens
gtcacttgtgggtgttttgtaaagtgcatttctgatgttctttgaaaggacagaacatcatgggtttggtgccctgtgtcacaccctgagtccatggggacaggcggagtcagggttggggctggaagagaaccgagagggcatttaatccagtcctgttatgttattgacagaagaaacagaggctctgagagggtgagggatggaccaggccgctccttgctcaggaatcacagtgccggtccctgctggccagtctcgggctgccttccacatctctgtgtggattttcccctgatgtcttcagctgtatcttgctggtttgaacaattttcctttcataaaatattgtagttagggcagtcactctgcccaacagtgttgggtctgaccaattaaaatatgcttcattaattttttatgatacccatttttatcc

SEQ ID NO: 55043 - DNA, 491 bp, Homo sapiens
ccaaaactataagataatcaatttgtgttgttttaggccagtaagtttatggaaaattgtcacagaagcaataggaaacaaatatacgctccattgttcaatcttttgaataacacatatactattatttacttaatgtttttcttaaaatcagctcattttgttttctgcttttagccttaagtgataattcccacaaaactgtagtctgatgttgcagtgtttttttccttaatacagataaaactaaatgaatattaaaatttaaactataagctgtttatctgtgtaacatggtaaattggctccctaccactactgttcagcaaaccacattttgggaaacagcgatttaggtggttcaaaggagcaagtgattgtgcaagaacaagaatttattagagaaagaagcatttggccaatgggtagaattgttggcagacaaaggtagaagagaaagacaaattattcagtatggctctagcgaactc

SEQ ID NO: 55044 - DNA, 354 bp, Homo sapiens
ccagaatctaaacccagttctaaactgagccttttatctccaattatagagaaggttgaggttgcttatatccctggaagaaggaatacttgttcctggattatacactctggtatgaattaattatatcacattattctccaacccaagtatttttgaggggagaggaaagacagtatgaggaggaaagagatggtttgaggaggaaagaatgttagaagagattttgtgtgcctttctgttttgccaggaatcctctttccgaagacactgggggcttttcttcaatatgtttctaattcacagactaacgtgttatatctacgttaaataataaatattgatttctggatt

SEQ ID NO: 55045 - DNA, 365 bp, Homo sapiens
acagcccctgggctgggggtggaggggagcaggaggcctttcctgtcgctcctccctggcctctctgatgttgagtcatctcggcctctcaacctgctgccactaaaacagctgtttagttcttgatcagactttggggccccaaactggtttgattaaaatgtaacacctccctccccctgctccaaggaagaaggcctgagatttctggctcaacaaagccaacttcaacccgtctcaggtcctgcagcatgtggctggggactgctccatcaccacggtgcttataagaggaagagttcccatgacctgcagatggaaaggaggcccagagaggggcagccactagcccatgatcacacagc

SEQ ID NO: 55046 - DNA, 356 bp, Homo sapiens
cttccaggtcacaggtaggtgagagaaaaatagcttcattcttttaagtatctgattaggctttccaaaggaagcaatcagatatgcatctatcttagtgagcagagggatgactttgaatagaatggcaggcaggtttgccctaagcagttcccagcttgactattccctttagcttagtgatttgggggccccaagatttattttcccatcaaatttccccccttttcttttaaaaatatttggaggaagcattttagaagacagtgagtctctggtctggtctctcatggctaggacagtttattcctagatgggtaggttttaggttattaggaaagctcatttttagcagc

SEQ ID NO: 55047 - DNA, 324 bp, Homo sapiens
ggcaaaacagattgagaaatcatctagtggctggaattattacacagtaatttaaaactaactataatttgtttaacggcatagtagatgagataaatgggatgcatgaacagataaggactttcagagagattacaactttacgaaggagtcaaatggaaatgctagaaatgaaaaataccatatcagaaataagtaatttcatcaattagcctacaagcagactggatacagcaaaagaaaaccaatcagtgatcttgaagacaggtaaacaggaattatggcaatggtaacgcaaagaaaaaacgatggtaagcagtaaag

SEQ ID NO: 55048 - DNA, 886 bp, Homo sapiens
cctaaagataggagccctgtggtctgtttgataggttggcattctggggaggaggacaagtccctagattagatgccgtaacagtttgcagcactgagatccctgggctccagcagaacgattctatgtcttctagagtaacatggaaatagcagtgagcacatctggacctaatggagacatttggttcagtataacggtttgcatgtgctgataactcagcgtatcctatcaacccgatgggcccttggtggctcagaacatgaatgtgagagcaagcaacattaagaatcacctacccccttctcaacgcctaacccttgtatcagacccccactgaactttggagaactgggagcccaaactagtaattaaatcattacacaataataaagaaagttgcatttttcacacctgtgttggtggcctgcattttataccttgtgtagaatatttattttcttttcctcatgactgaatttccatggagttacaagaggacataacttctaggtatataaagactctttatagttctgatggaagcccacaaatgtttattgttggaaaagcaggcttcagcccacctggtcattaagtaaatgcacaaatcttggccaagactaggttttccatgttgagatgtagagaggcgattttgctgtcatgaaaggagtttgactaaaaacaaaagaaaacaaactgctctaacagcattagaccagctaatatttgctatttctgtatcccattaaaaaatatgcagatggaacagtgttagtgaacttcctggtcagaagaaaatcctgtccagtccaatccagtgcaaactaatttggagagcacatagtacttaatgagtaactcttgtgcctcttgttgctgc

SEQ ID NO: 55049 - DNA, 867 bp, Homo sapiens
ctgtggttccaggggagatccagaatgcatgtgtctcttcccacgcatttatgtcatgttggtagctttagatcagccatggtgagaaaagaacaaaagcttttagttgtttttgttttgttttggagaatttgtttaccagtaaatacatcactgcctgtaccccaaatgttaccagctccctgaggtgtcccacatactattgtgagttctcagagcatgaactgtcctcagaagagcagggctaggacttgtcccagcatctgtgcctccataccaatcctctttctcacagagaaccacttcccatataagatgcttaaggctctcaaaacagcagaacaatgaaacatactctccctacacttgcttagccaagagataccactcaggtaacttttttcaggacatggaagatctgtttcaaggagatttactgctattttatttggaagaagctggcaactggtcttgaccaaaatagaaaaaaaaaaaaaagtccacaaatttaatcacttgtagggaacccatctatcaaggtaccctaccatatacttttgtatttaatagattacttagaaaccacaaaaataggaatccttaccccttcaattcctgttcaaccctaaaaactgtgataaacgctcccaaccctgtggtgatcagggttatgtaatgttcaaagattcagacacacctgggtttggattcagttgcaactgggttgttatcacactcacttctttttagctgtgtgagcatgaataatttacttagcctctctgtgtctttccacctaattaaagaggatccaccccagggttattttgaggattcaaaaaggcatgcaacacacctggagcacaa

SEQ ID NO: 55050 - DNA, 464 bp, Homo sapiens
gtccccaacccaatgaccaaaaatctgaagtaggatctatattaagtttccaaccctggaacacattttccataaaaccatatagtaaattccataaaaataaaaccatgaccaatctccaaaagcttccttcaccaaaaaaacgtagctgaaaaaggagatggggtagcagcaatcagggacaggaaaaccaaagagtttgcttcaggtctttactctggtttaccgggaatgatgaccttggacaaattatttaacatctgtgagcttcacatttctcatctgtaaaacaggtatagtaatacctgcctaccaattttatgtagtgcacaagctcaaatgagactagaatacttactagttataaacagtcatcatccctactcctcctcctctctaacccaattgaaggctggtggaggaggtgagagagcacagaagcagtgggaggtttgggagccatg

SEQ ID NO: 55051 - DNA, 430 bp, Homo sapiens
aaaattggtgtttctgttgggcaagacagttctcttccaagaacccagcctccttccattttgtagctcctccagcttcaatgtacggtttccaaagttgctgacaaaggggtaagaagcatgaaggattgtgcctttttcaggcacattttcaagggccatggctggaaaggcacattgcatttctgcccacattccattgtttgtaactcagtcacatgactttgcctaaccacaaaggaacctgggtaatggagttaactatgtgcctaggagaggaaatgagtttggtgagtaagaaccagactttgccacagtacttaacctccacccagggacattctttcctccgactttctgattctttccaaatgctctcctattttcttcataaataaactcttgacccggaatagaataaaagtatcta

SEQ ID NO: 55052 - DNA, 181 bp, Homo sapiens
tgcaggtattttgaacatcagcagctgaggcaactgaacatgtttctgtgctgtcttgcacccacttctctttggaagcttcctatgtattactgcacaccttttccatgcctcctctgtcctccgcttcaaccttccagagatgctccagggtatcagtgggtcccatggaagactgtct

SEQ ID NO: 55053 - DNA, 279 bp, Homo sapiens
cagttttaggttcacagccaaaggtacacattttctgtgtacctccttgcctgcagacttgcgttgacttcttctattatccacatccccaattagagtgctgcatttgttacaattagcctgcacctaaggtccatactttacattgaggttcattcttggtgttgtttgttttctgggtttggacaagtttataatgacatatattcaccattacagtattgtacagtctcacttcactgaaaaccttttgtgctctaccttttaaagaagtttttt

SEQ ID NO: 55054 - DNA, 474 bp, Homo sapiens
aattctatcccatatcttattgaactgctttactcctaatttctctttatgatcatttcattactctagtagttttctatctcttcattttctaacttcactttttttttataaagagtttcccttataaaaagtatatagttgaattttcttttctgaaccaggcaacacttcattccatgaaatagaataagtgttcccaatttttttcttttatagagatgaagtcttgctatgttgcccaggctggctttgaactcctaggctcaaacaatcctcccacctcagtctcccaagtagctgggactacaggtatccaccactgtttctggcttgaatttttaatttcttaacccaatctgtcttttgatagaaaaatttaatccatgtctatttcatcagtggcatatttggatgtatttctgccatcttatttcatgttttctccttaaaatgctttctagacaccccacc

SEQ ID NO: 55055 - DNA, 287 bp, Homo sapiens
cttgccttaggggtctagtcaccttcaggtcctttatttgtcaaaaacttcatatttctccctgatattggggcagggtaagcaggggcacattagctgggctctgcagctcttcactccccctacagcttctagtcgttcctggggtacatgaggtattacctattccttagggtgcctgagaggattcttttggtggagccacgccttagagttgccattcttcctgccactagaggaaaatgtaattaatcacaccaaaggcagggaagacgtcccactcccag

SEQ ID NO: 55056 - DNA, 438 bp, Homo sapiens
cacatctgtgttctccatctgctctggaatgccctccctgccaacgcacagagctctccagcctcggggaacttgctgctttggttgggaaattccccttgggattaagcgttcctgccttcccgcagcactttcctagctcagagcaggctcacagaccgtgtgagtgtccttgggtacagaataccacaggcaagtgagatcattctccattgcatttcttttcaactacaatttgagtgatttttcagaagtacaagatttacctgattcttacatggaggtagtgatgtattattaaatacacagaatacaaaggcaaggatgggtggggcgtgcacctgtaatcccagcactttgggaggccaaggtgggagaattgcttgaggccaagagttcgagaccagcctgggaaatatagtgagacgccatatctac

SEQ ID NO: 55057 - DNA, 243 bp, Homo sapiens
tgacctatcaatgcagggggtggctcttgggttaaatcacttcctaaagagacatctccgtgccctgctgggaggcctatggtgaaccctgtgatagacctggggaccaggacttggtgaagggggcataggtctgagggaggaggtgcacaagagctccataccatgcaggctgaaactggagtcggctggtctagggcgtcccacaggactaggtgtgggtggtagagggtagcattgggg

SEQ ID NO: 55058 - DNA, 554 bp, Homo sapiens
actttcatccatttgcctgtaggagaatcttccagggccccagagcagtgcttgaggacttattacagatcctttgacatctctactaggctgcactttcacaaaaggcaagagtattataaagtgttttgtaactttatgtcaaaaatatgaacctgtcagagccagatgtggtggtacctatcattcaaactacaacagggctggtgaggcgtgaggatcgcttaagcccagcttgttatgattatgcatgtgaatagccaccgtagtccatcttgagcagcgtagcgaaacacagtctcttaaaaaaaattgcgacctatacatttcatataagttaaatacacatcttccctatgagccagcaatcccacatctaggtatttatccagagaaataaaagcatatatcgataaaaagacatgtacaaaaatgtccgtaacaactttattcatggtcaccaaaaactataaactgcccagatgtccatcagtgggagaacggattaataaactgatatattcatctaattaaatactactcagcaacacaag

SEQ ID NO: 55059 - DNA, 304 bp, Homo sapiens
aaaaaaaaaaaaaaaaaagaatccttaaatgatgggtattctctaaagcatgcggggcttaaaacctagatgatggattgataggtgcagcaaaccaccgtggcacatatatacctatgtaacaaacctgcacattcagcacatgtatcccaagacttaaagtaaaagtaaaaattaaaaaagatgggtattctatatttatctttcatgttacatttttctttgtggggtttctaaataaaacttgtaacatgaatgttttattctcattctgtattttaaaaagaagctgagtaacaaaagg

SEQ ID NO: 55060 - DNA, 1547 bp, Homo sapiens
agcgggtgcggcgcgcgtgggcaggtcattgcagttgggcgctcagcagctgtggcagccggttgaggtctggaagtagcgttgggctgaagcagcggagttcgccatgcgcgagtgtatctctatccacgtggggcaggcgggtgtccagatcggcaatgcctgctgggaactgtactgccttgaacatggaattcagcccgatggtcaaatgccaagtgataaaaccattggtggcggggacgactccttcaacacgttcttcagtgagactggagctggcaagcacgtgcccagagcagtgtttgtggacctggagcccactgtggtcgatgaagtgcgcacagggacctacaggcagctcttccacccagagcagctgatcaccgggaaggaagatgcagccagtaattacgccaggggccattacaccatcggcaaggagattgttgacctagtcctggaccggatccgcaaactggcggatctgtgcacaggactgcagggcttcctcatcttccacagctttgggggcggcactggctctgggttcgcatctctgctcatggagcggctctcagtggattacagcaagaagtccaagctagagtttgccatttacccagccccccaggtctccacagccgtggtggagccctacaactccatcctaaccacccacacgaccctggaacattctgactgtgccttcatggtcgacaatgaagccatctatgacatatgtcggcgcaacctggacattgaacgtcccacgtacaccaacctcaatcgcctgattgggcagatcgtgtcctccatcacggcctccctgcgatttgatggggccctgaatgtggacttgacggaattccagaccaacctcgtgccgtacccccgcatccacttccccctggccacctacgccccagtcatctcagctgagaaggcctaccacgagcagctgtctgtggctgagatcaccaatgcctgcttcgagccagccaatcagatggtcaagtgtgaccctcgccatggcaagtacatggcctgctgcatgttgtacaggggggacgtggtccccaaagacgtcaatgcggccatcgccaccatcaagaccaagcgcactatccagtttgtggattggtgcccgactggatttaaggtgggcattaactaccagccccccacagtggtccccgggggagacctggccaaggtgcagcgggccgtgtgcatgctgagcaacaccacggccattgcggaggcctgggcccgcctggtccataagttcgatctcatgtatgccaagtgggcctttgtgcactggtacgtgggcgaaggcatggaagagggagagttctctgaggcccgcgaggacctggcagctctagagaaggattgtgaagaggtgggcgtggattccgtggaagctgaggctgaagaaggcgaagaatactgaggggagggtgtggtgggttctcccctgccacccctaggatggctgctttcaagttgtttgcaattaaagattctgtataaaaccaaga

SEQ ID NO: 55061 - DNA, 1492 bp, Homo sapiens
agcgggtggtaaggaactcgggccgtgactgaccgggattacgactacccgcgagtgatatgtctatccgcgtgtgtcatagggccctggtcctatatcggcaatgcctgctgggaactgtactgccttgaacatggaattcagcccgatggtcaaatgccaagtgataaaaccattggtggcggggacgactccttcaacacgttcttcagtgagactggagctggcaagcacgtgcccagagcagtgtttgtggacctggagcccactgtggtcgatgaagtgcgcacagggacctacaggcagctcttccacccagagcagctgatcaccgggaaggaagatgcagccagtaattacgccaggggccattacaccatcggcaaggagattgttgacctagtcctggaccggatccgcaaactggcggatctgtgcacaggactgcagggcttcctcatcttccacagctttgggggcggcactggctctgggttcgcatctctgctcatggagcggctctcagtggattacagcaagaagtccaagctagagtttgccatttacccagccccccaggtctccacagccgtggtggagccctacaactccatcctaaccacccacacgaccctggaacattctgactgtgccttcatggtcgacaatgaagccatctatgacatatgtcggcgcaacctggacattgaacgtcccacgtacaccaacctcaatcgcctgattgggcagatcgtgtcctccatcacggcctccctgcgatttgatggggccctgaatgtggacttgacggaattccagaccaacctcgtgccgtacccccgcatccacttccccctggccacctacgccccagtcatctcagctgagaaggcctaccacgagcagctgtctgtggctgagatcaccaatgcctgcttcgagccagccaatcagatggtcaagtgtgaccctcgccatggcaagtacatggcctgctgcatgttgtacaggggggacgtggtccccaaagacgtcaatgcggccatcgccaccatcaagaccaagcgcactatccagtttgtggattggtgcccgactggatttaaggtgggcattaactaccagccccccacagtggtccccgggggagacctggccaaggtgcagcgggccgtgtgcatgctgagcaacaccacggccattgcggaggcctgggcccgcctggtccataagttcgatctcatgtatgccaagtgggcctttgtgcactggtacgtgggcgaaggcatggaagagggagagttctctgaggcccgcgaggacctggcagctctagagaaggattgtgaagaggtgggcgtggattccgtggaagctgaggctgaagaaggcgaagaatactgaggggagggtgtggtgggttctcccctgccacccctaggatggctgctttcaagttgtttgcaattaaagattctgtataaaaccaaga

SEQ ID NO: 55062 - DNA, 3090 bp, Homo sapiens
gaattccgggcccggatagccggcggcggcggcggcggcggcggcggcggcggccgggagaggcccctccttcacgccctgcttctctccctcgctcgcagtcgagccgagccggcggacccgcctgggctccgaccctgcccaggccatggccggcaacgtgaagaagagctctggggccgggggcggcacgggctccgggggctcgggttcgggtggcctgattgggctcatgaaggacgccttccagccgcaccaccaccaccaccaccacctcagcccccacccgccggggacggtggacaagaagatggtggagaagtgctggaagctcatggacaaggtggtgcggttgtgtcagaacccaaagctggcgctaaagaatagcccaccttatatcttagacctgctaccagatacctaccagcatctccgtactatcttgtcaagatatgaggggaagatggagacacttggagaaaatgagtattttagggtgtttatggagaatttgatgaagaaaactaagcaaaccataagcctcttcaaggagggaaaagaaagaatgtatgaggagaattctcagcctaggcgaaacctaaccaaactgtccctcatcttcagccacatgctggcagaactaaaaggaatctttccaagtggactctttcagggagacacatttcggattactaaagcagatgctgcggaattttggagaaaagcttttggggaaaagacaatagtcccttggaagagctttcgacaggctctacatgaagtgcatcccatcagttctgggctggaggccatggctctgaaatccactattgatctgacctgcaatgattatatttcggtttttgaatttgacatctttacccgactctttcagccctggtcctctttgctcaggaattggaacagccttgctgtaactcatcctggctacatggcttttttgacgtatgacgaagtgaaagctcggctccagaaattcattcacaaacctggcagttatatcttccggctgagctgtactcgtctgggtcagtgggctattgggtatgttactgctgatgggaacattctccagacaatccctcacaataaacctctcttccaagcactgattgatggcttcagggaaggcttctatttgtttcctgatggacgaaatcagaatcctgatctgactggcttatgtgaaccaactccccaagaccatatcaaagtgacccaggaacaatatgaattatactgtgagatgggctccacattccaactatgtaaaatatgtgctgaaaatgataaggatgtaaagattgagccctgtggacacctcatgtgcacatcctgtcttacatcctggcaggaatcagaaggtcagggctgtcctttctgccgatgtgaaattaaaggtactgaacccatcgtggtagatccgtttgatcctagagggagtggcagcctgttgaggcaaggagcagagggagctccctccccaaattatgatgatgatgatgatgaacgagctgatgatactctcttcatgatgaaggaattggctggtgccaaggtggaacggccgccttctccattctccatggccccacaagcttcccttcccccggtgccaccacgacttgaccttctgccgcagcgagtatgtgttccctcaagtgcttctgctcttggaactgcttctaaggctgcttctggctcccttcataaagacaaaccattgccagtacctcccacacttcgagatcttccaccaccaccgcctccagaccggccatattctgttggagcagaatcccgacctcaaagacgccccttgccttgtacaccaggcgactgtccctccagagacaaactgccccctgtcccctctagccgccttggagactcatggctgccccggccaatccccaaagtaccagtatctgccccaagttccagtgatccctggacaggaagagaattaaccaaccggcactcacttccattttcattgccctcacaaatggagcccagaccagatgtgcctaggctcggaagcacgttcagtctggatacctccatgagtatgaatagcagcccattagtaggtccagagtgtgaccaccccaaaatcaaaccttcctcatctgccaatgccatttattctctggctgccagacctcttcctgtgccaaaactgccacctggggagcaatgtgagggtgaagaggacacagagtacatgactccctcttccaggcctctacggcctttggatacatcccagagttcacgagcatgtgattgcgaccagcagattgatagctgtacgtatgaagcaatgtataatattcagtcccaggcgccatctatcaccgagagcagcacctttggtgaagggaatttggccgcagcccatgccaacactggtcccgaggagtcagaaaatgaggatgatgggtatgatgtcccaaagccacctgtgccggccgtgctggcccgccgaactctctcagatatctctaatgccagctcctcctttggctggttgtctctggatggtgatcctacaacaaatgtcactgaaggttcccaagttcccgagaggcctccaaaaccattcccgcggagaatcaactctgaacggaaagctggcagctgtcagcaaggtagtggtcctgccgcctctgctgccaccgcctcacctcagctctccagtgagatcgagaacctcatgagtcaggggtactcctaccaggacatccagaaagctttggtcattgcccagaacaacatcgagatggccaaaaacatcctccgggaatttgtttccatttcttctcctgcccatgtagctacctagcacaccatctccctgctgcaggtttagaggaccagtgagttgggagttattactcaagtggcacctagaagggcaggagttcctttggtgacttcacagtgaagtcttgccctctctgtgggatatcacatcagtggttccaagatttcaaagtggtgaaatgaaaatggagcagctagtatgttttattattttatgggtcttgagtgcatttgaaggtg

SEQ ID NO: 55063 - DNA, 4930 bp, Homo sapiens
tcattaaagtcagaagattatagaccttctcaaactataagtccctcttcttgccgttggcctttctgactctggaatgaccactgttcattgaaaaatagttttctgactattggtctggctctaacagtttgtttgttcatccagcaaatgtttatgagtgatgaccatgtgccagaaatgtcaggtatgtgtccttcccttggcgccacatagtagtttactaatgtttgggggattgtacttggactgtcatagcctctgcgtttgaccttaaaatagctcttcccagtaagattgtgcaatttttattcacagctcttccatgtagacttacctttcctcatagagctatcctggttaataacaggccaagattctcccattatcccctgttgtctcctgtagctttgataatgcctgggagattccttggtgtaagtgtcatggataccgactgtttttatgttggaatttgttccaacataattagaatctgtttggtgagttgaaaggtaagttggctcagagttgcacagtagggcattaaatgtttaagcaaagcatctgcccacactcccctttccaatctagtgccttccttgaactttttcctgagctgctacgtccctaatcccccttgttgggaggattttcgtatcacccttatgggacctgtcaccatgtcctgtactatttggaattggttttccagtctttcaacaaccgttgtggctaactatgttttagaagggctggaggtgtgggccctgtcttcgggtctcaggacccaaagatcctttagtcagttgttgggtcttccaagagccagacattaatacagattgaactccatcagtcccctaattgtcagcctttacctccctcccagagcaaggagtttagggattctaaagcttagtgtccacacatcattctaccagaccttagagctttagaagctcaatctaaaatactgtaactcagcataaactattactatcactcctttgaactcagtctccatgagcagtgttttgttggaaatacatagaacggcttaatgcctagagggtggtggatagtgaaggacggtcaaggttatatttttgactgcttagggattctttggatccaagaaacagaaatgttcaagcggaataaaggagggagtggagttgtggtaaggatgcagggtatttcgcagaacccaggacgggaagtgccttggttcttgggtggagctggaactgcagagctttgcacctagtcctttctcccgcttcacagtctgcttatggtatatgtggcccccaaataggcactctagtcctcaagtctacaccaccttccaactctggggatcaccatgaacaaattctcaatttcccatacttaattttttttttttttggagatggagtctcgctgtgtcgcccaggctggagtgcagtggtgcagtctcaactcaccacaacctccgcctcccaggttcaagcagttctctgcctcaacctcccgagtagctgggattacaggcgcctgccaccatgcccagctaatgttcatattttaagtagagacagggtttcaccgtctgggctaggctggtcttgaactcctgaccctcatgatccacccacctcggcctcccaaagtgctaagattacaggcgtgagccaccgcgcccggcccatacttcgtattcttaaaaaaaactacactcagcccagcacattgatcaagtatctatctctgagcagttggccttgccagggagagcagagatgtggcaggctccttcagctggagacagggagcttctcagagaagtgagcagagactccacagacaccctaaaaaggcttctactcaagaagtaaagccactactcctgcctttttgcttagtggacaggaaggcacaggagtttgtctgggacatcatagaaattcttaggtttaacttaattctggtcattgtcttctttatttcctgtttttcttccctttgtcagtcttcgcatccaagatttcttccctccctcttgtgggccagcctgtcctgttccagagctagcctgttcctgggtagccttccttagcctccattcagcctcaggtcttttgccttcttccgtgtttatttagagagcagaatctaataacgggttccactgtagccactatccatggacttctgggtcctcttcaggtttgagtgcttgaaaatgttcattctctgggcttgtggcctgtctcctccactctcctcctcaccctctcgctccttcctgtgtgagggccgctctgcagtaatgttctcaggcaagccttcctaggcacctcagaaactactttgccagagccagtaagaatatataatattggagcagttgccaggatagaaattaaatatagattccagtttaggatagagtttttaccgagagctctttagacagtatacctgtgtcttctctggcaattgctttcattttagtcctatataaaagctttccttttctgtttttttttaaaactatgcttttgcttgcctaaatcttttgatcttatatttctctcatctcagagcctgtcctgagttgtaaggtatttcatactgccttacttaaaagttttttaaactactagagtcatttgatacacacagaagttacctaataatccaaagatgtccatcaagggaggaagggtgggtcatcagactttgcctttgatgttgtagactaggctcctgagttaagcagcagagggacagcagtgccatgtgccttcactgtgtcccaggaaatctgggttggttccagtgggaaataccagtatttcttggttctggaaagtagcaaaagagtaggagatggggaaatagggatggggagagcaagccccgcatgtccatggcgagtcaggtggggagcacgggtggaagggccggctgttgacagacagactaagctgtgtggtgctcttgccgccccttcctgggtacagagcttgagaaaaatgcagccgaccactccctgtgtttgtacagagcaaagcccaaaagccaacctcagatctcctgatttggcagctgaagaaatcagcagagtcctgattgcctgattcagtcccaaaaatgaatgtcaggccccgccccctccccaccaacattgcctctcctacattctccttctgcccctaaatcagacaggaggccagagaggagtattgctcaatgcgtgctatgtgcaactcctcaggccttgtgccacctccatgctgagccctgaagcagggtgtcctgggtgcctgtgtgtcagctccctcctctctacctacctctgaccttcttgtgggtgagggtggccatgcttatggccatcttaaaactggagaggcagagaactacttatgagtctgtagaccacgtgttgtcttccatggcctgtttctcctgctgtctgggtgagtgagcctgcaacgcaatgcccatgagagtaaatgcctcctgacctaccctgctcagcactgttctagtgtcttggccttgaaagaaaagcctgacttcctgctgacacatgtggtaggggcatggcagctatgaggcacctcctacgtctgttttctggctgtggtgacttgggatttttaaccttatatatctttttcctttactcaaaacaaaacaatttttagcacactgaaaaaaaaaaaaaagccaaatgttttgtgcctttctaaggcagcactgtatcccaggctgcattttaggacttaatatggaaataccagagtctgagctcctctaccttgagtttcattagtccttagtgtctaggagacaggaaagaatgctctctgtgactggagaggtgacatgcaggtgcagtgtgtctggagtccctttcccctgctgtgagacttcagtggaggagagaagcattgtaccctgggatcatttggttggttccaatcacaagcttagttatcaggttgcatgccttgtctcctgcaaaagacagaatgtttcacaattcccaggtaaactctggaccattccaagtgtcctagccttctgatgacattaattacctagttgtgtcgaggagtataggatggactctcctgagaaggggaggttggtggctttgtcttttctttttgctggatcctgaactggtctagacctcctgcccccaccccccagcccccatcagatgtggctggcctttcatttgaaggcttcagacttaaagcattaagcagctagtgccctctgcagggcctggtttccccagggaagggcagcaaggaacatgggaccagaagcctgtcctcagtaatgtgactatagtgagctttagcaaaagtttttctatataatgacatcttacttatcttttaccctttcctcagttttcccctgcctttaactaataaagaattgggagacagaaattttaaagtcctccttattcaagattttgaaattcttagcctgggagtgctggagagaacctgatgctttctccagaatgaagagtcccaatttgtatatcagtgttaagaagaaaacaaaacaaacacataggtgagattttcgtggactattttaaaaatgtgtcattaatataaaaaatttatattagcagtatttaatcattctcacctgtaaagaataagaaaaacagaaggtaaatattcttacagagaatagcagagctttaagattcattttcattttaagtccattttattttgccagtgtattaatgtttagaagtctgttttactaatgttatttattaattttttttcatttccatacacagttagttaactaaagagctttttcaagcacccatgtctgtaaaaaaatatttttaaataaagtttcttttgttgtagcagaaaaaaaatct

SEQ ID NO: 55064 - DNA, 4894 bp, Homo sapiens
tagccgcgggttaacggcacgagggctttctgactctggaatgaccactgttcattgaaaaatagttttctgactattggtctggctctaacagtttgtttgttcatccagcaaatgtttatgagtgatgaccatgtgccagaaatgtcaggtatgtgtccttcccttggcgccacatagtagtttactaatgtttgggggattgtacttggactgtcatagcctctgcgtttgaccttaaaatagctcttcccagtaagattgtgcaatttttattcacagctcttccatgtagacttacctttcctcatagagctatcctggttaataacaggccaagattctcccattatcccctgttgtctcctgtagctttgataatgcctgggagattccttggtgtaagtgtcatggataccgactgtttttatgttggaatttgttccaacataattagaatctgtttggtgagttgaaaggtaagttggctcagagttgcacagtagggcattaaatgtttaagcaaagcatctgcccacactcccctttccaatctagtgccttccttgaactttttcctgagctgctacgtccctaatcccccttgttgggaggattttcgtatcacccttatgggacctgtcaccatgtcctgtactatttggaattggttttccagtctttcaacaaccgttgtggctaactatgttttagaagggctggaggtgtgggccctgtcttcgggtctcaggacccaaagatcctttagtcagttgttgggtcttccaagagccagacattaatacagattgaactccatcagtcccctaattgtcagcctttacctccctcccagagcaaggagtttagggattctaaagcttagtgtccacacatcattctaccagaccttagagctttagaagctcaatctaaaatactgtaactcagcataaactattactatcactcctttgaactcagtctccatgagcagtgttttgttggaaatacatagaacggcttaatgcctagagggtggtggatagtgaaggacggtcaaggttatatttttgactgcttagggattctttggatccaagaaacagaaatgttcaagcggaataaaggagggagtggagttgtggtaaggatgcagggtatttcgcagaacccaggacgggaagtgccttggttcttgggtggagctggaactgcagagctttgcacctagtcctttctcccgcttcacagtctgcttatggtatatgtggcccccaaataggcactctagtcctcaagtctacaccaccttccaactctggggatcaccatgaacaaattctcaatttcccatacttaattttttttttttttggagatggagtctcgctgtgtcgcccaggctggagtgcagtggtgcagtctcaactcaccacaacctccgcctcccaggttcaagcagttctctgcctcaacctcccgagtagctgggattacaggcgcctgccaccatgcccagctaatgttcatattttaagtagagacagggtttcaccgtctgggctaggctggtcttgaactcctgaccctcatgatccacccacctcggcctcccaaagtgctaagattacaggcgtgagccaccgcgcccggcccatacttcgtattcttaaaaaaaactacactcagcccagcacattgatcaagtatctatctctgagcagttggccttgccagggagagcagagatgtggcaggctccttcagctggagacagggagcttctcagagaagtgagcagagactccacagacaccctaaaaaggcttctactcaagaagtaaagccactactcctgcctttttgcttagtggacaggaaggcacaggagtttgtctgggacatcatagaaattcttaggtttaacttaattctggtcattgtcttctttatttcctgtttttcttccctttgtcagtcttcgcatccaagatttcttccctccctcttgtgggccagcctgtcctgttccagagctagcctgttcctgggtagccttccttagcctccattcagcctcaggtcttttgccttcttccgtgtttatttagagagcagaatctaataacgggttccactgtagccactatccatggacttctgggtcctcttcaggtttgagtgcttgaaaatgttcattctctgggcttgtggcctgtctcctccactctcctcctcaccctctcgctccttcctgtgtgagggccgctctgcagtaatgttctcaggcaagccttcctaggcacctcagaaactactttgccagagccagtaagaatatataatattggagcagttgccaggatagaaattaaatatagattccagtttaggatagagtttttaccgagagctctttagacagtatacctgtgtcttctctggcaattgctttcattttagtcctatataaaagctttccttttctgtttttttttaaaactatgcttttgcttgcctaaatcttttgatcttatatttctctcatctcagagcctgtcctgagttgtaaggtatttcatactgccttacttaaaagttttttaaactactagagtcatttgatacacacagaagttacctaataatccaaagatgtccatcaagggaggaagggtgggtcatcagactttgcctttgatgttgtagactaggctcctgagttaagcagcagagggacagcagtgccatgtgccttcactgtgtcccaggaaatctgggttggttccagtgggaaataccagtatttcttggttctggaaagtagcaaaagagtaggagatggggaaatagggatggggagagcaagccccgcatgtccatggcgagtcaggtggggagcacgggtggaagggccggctgttgacagacagactaagctgtgtggtgctcttgccgccccttcctgggtacagagcttgagaaaaatgcagccgaccactccctgtgtttgtacagagcaaagcccaaaagccaacctcagatctcctgatttggcagctgaagaaatcagcagagtcctgattgcctgattcagtcccaaaaatgaatgtcaggccccgccccctccccaccaacattgcctctcctacattctccttctgcccctaaatcagacaggaggccagagaggagtattgctcaatgcgtgctatgtgcaactcctcaggccttgtgccacctccatgctgagccctgaagcagggtgtcctgggtgcctgtgtgtcagctccctcctctctacctacctctgaccttcttgtgggtgagggtggccatgcttatggccatcttaaaactggagaggcagagaactacttatgagtctgtagaccacgtgttgtcttccatggcctgtttctcctgctgtctgggtgagtgagcctgcaacgcaatgcccatgagagtaaatgcctcctgacctaccctgctcagcactgttctagtgtcttggccttgaaagaaaagcctgacttcctgctgacacatgtggtaggggcatggcagctatgaggcacctcctacgtctgttttctggctgtggtgacttgggatttttaaccttatatatctttttcctttactcaaaacaaaacaatttttagcacactgaaaaaaaaaaaaaagccaaatgttttgtgcctttctaaggcagcactgtatcccaggctgcattttaggacttaatatggaaataccagagtctgagctcctctaccttgagtttcattagtccttagtgtctaggagacaggaaagaatgctctctgtgactggagaggtgacatgcaggtgcagtgtgtctggagtccctttcccctgctgtgagacttcagtggaggagagaagcattgtaccctgggatcatttggttggttccaatcacaagcttagttatcaggttgcatgccttgtctcctgcaaaagacagaatgtttcacaattcccaggtaaactctggaccattccaagtgtcctagccttctgatgacattaattacctagttgtgtcgaggagtataggatggactctcctgagaaggggaggttggtggctttgtcttttctttttgctggatcctgaactggtctagacctcctgcccccaccccccagcccccatcagatgtggctggcctttcatttgaaggcttcagacttaaagcattaagcagctagtgccctctgcagggcctggtttccccagggaagggcagcaaggaacatgggaccagaagcctgtcctcagtaatgtgactatagtgagctttagcaaaagtttttctatataatgacatcttacttatcttttaccctttcctcagttttcccctgcctttaactaataaagaattgggagacagaaattttaaagtcctccttattcaagattttgaaattcttagcctgggagtgctggagagaacctgatgctttctccagaatgaagagtcccaatttgtatatcagtgttaagaagaaaacaaaacaaacacataggtgagattttcgtggactattttaaaaatgtgtcattaatataaaaaatttatattagcagtatttaatcattctcacctgtaaagaataagaaaaacagaaggtaaatattcttacagagaatagcagagctttaagattcattttcattttaagtccattttattttgccagtgtattaatgtttagaagtctgttttactaatgttatttattaattttttttcatttccatacacagttagttaactaaagagctttttcaagcacccatgtctgtaaaaaaatatttttaaataaagtttcttttgttgtagcagaaaaaaaatct

SEQ ID NO: 55065 - DNA, 3125 bp, Homo sapiens
tgctgctccctcttcacatttatctggaccaaacataatcgtataaggggtcttgtcatggaactgatccaggttgagttctggtgttttagaaagcagtttcacataggcaccaccacattctattccattttggaaattaacctcatactgaacaatgagaggcttggtgtcaaacaggaagggcttgttcagtttagcagagatggcatgatgcttggcccgagacatcaacacaagtcctttatcacctggaagctttgactccttcatttcctctacctcccactttccatcatatttggcaatttcatcatcggtatcgtctttcttggctttggataaaatccaccctgacagagttcctctgtcaaaagaatcagcaaaatatacttcccctgttggaactggagctttgtaagtaaccttgggagatgaagaagggaggcagcagctgatgcctctcctcctcaccctctcgctccttcctgtgtgagggccgctctgcagtaatgttctcaggcaagccttcctaggcacctcagaaactactttgccagagccagtaagaatatataatattggagcagttgccaggatagaaattaaatatagattccagtttaggatagagtttttaccgagagctctttagacagtatacctgtgtcttctctggcaattgctttcattttagtcctatataaaagctttccttttctgtttttttttaaaactatgcttttgcttgcctaaatcttttgatcttatatttctctcatctcagagcctgtcctgagttgtaaggtatttcatactgccttacttaaaagttttttaaactactagagtcatttgatacacacagaagttacctaataatccaaagatgtccatcaagggaggaagggtgggtcatcagactttgcctttgatgttgtagactaggctcctgagttaagcagcagagggacagcagtgccatgtgccttcactgtgtcccaggaaatctgggttggttccagtgggaaataccagtatttcttggttctggaaagtagcaaaagagtaggagatggggaaatagggatggggagagcaagccccgcatgtccatggcgagtcaggtggggagcacgggtggaagggccggctgttgacagacagactaagctgtgtggtgctcttgccgccccttcctgggtacagagcttgagaaaaatgcagccgaccactccctgtgtttgtacagagcaaagcccaaaagccaacctcagatctcctgatttggcagctgaagaaatcagcagagtcctgattgcctgattcagtcccaaaaatgaatgtcaggccccgccccctccccaccaacattgcctctcctacattctccttctgcccctaaatcagacaggaggccagagaggagtattgctcaatgcgtgctatgtgcaactcctcaggccttgtgccacctccatgctgagccctgaagcagggtgtcctgggtgcctgtgtgtcagctccctcctctctacctacctctgaccttcttgtgggtgagggtggccatgcttatggccatcttaaaactggagaggcagagaactacttatgagtctgtagaccacgtgttgtcttccatggcctgtttctcctgctgtctgggtgagtgagcctgcaacgcaatgcccatgagagtaaatgcctcctgacctaccctgctcagcactgttctagtgtcttggccttgaaagaaaagcctgacttcctgctgacacatgtggtaggggcatggcagctatgaggcacctcctacgtctgttttctggctgtggtgacttgggatttttaaccttatatatctttttcctttactcaaaacaaaacaatttttagcacactgaaaaaaaaaaaaaagccaaatgttttgtgcctttctaaggcagcactgtatcccaggctgcattttaggacttaatatggaaataccagagtctgagctcctctaccttgagtttcattagtccttagtgtctaggagacaggaaagaatgctctctgtgactggagaggtgacatgcaggtgcagtgtgtctggagtccctttcccctgctgtgagacttcagtggaggagagaagcattgtaccctgggatcatttggttggttccaatcacaagcttagttatcaggttgcatgccttgtctcctgcaaaagacagaatgtttcacaattcccaggtaaactctggaccattccaagtgtcctagccttctgatgacattaattacctagttgtgtcgaggagtataggatggactctcctgagaaggggaggttggtggctttgtcttttctttttgctggatcctgaactggtctagacctcctgcccccaccccccagcccccatcagatgtggctggcctttcatttgaaggcttcagacttaaagcattaagcagctagtgccctctgcagggcctggtttccccagggaagggcagcaaggaacatgggaccagaagcctgtcctcagtaatgtgactatagtgagctttagcaaaagtttttctatataatgacatcttacttatcttttaccctttcctcagttttcccctgcctttaactaataaagaattgggagacagaaattttaaagtcctccttattcaagattttgaaattcttagcctgggagtgctggagagaacctgatgctttctccagaatgaagagtcccaatttgtatatcagtgttaagaagaaaacaaaacaaacacataggtgagattttcgtggactattttaaaaatgtgtcattaatataaaaaatttatattagcagtatttaatcattctcacctgtaaagaataagaaaaacagaaggtaaatattcttacagagaatagcagagctttaagattcattttcattttaagtccattttattttgccagtgtattaatgtttagaagtctgttttactaatgttatttattaattttttttcatttccatacacagttagttaactaaagagctttttcaagcacccatgtctgtaaaaaaatatttttaaataaagtttcttttgttgtagcagaaaaaaaatct

SEQ ID NO: 55066 - DNA, 3742 bp, Homo sapiens
tcattaaagtcagaagattatagaccttctcaaactataagtccctcttcttgccgttggcctttctgactctggaatgaccactgttcattgaaaaatagttttctgactattggtctggctctaacagtttgtttgttcatccagcaaatgtttatgagtgatgaccatgtgccagaaatgtcaggtatgtgtccttcccttggcgccacatagtagtttactaatgtttgggggattgtacttggactgtcatagcctctgcgtttgaccttaaaatagctcttcccagtaagattgtgcaatttttattcacagctcttccatgtagacttacctttcctcatagagctatcctggttaataacaggccaagattctcccattatcccctgttgtctcctgtagctttgataatgcctgggagattccttggtgtaagtgtcatggataccgactgtttttatgttggaatttgttccaacataattagaatctgtttggtgagttgaaaggtaagttggctcagagttgcacagtagggcattaaatgtttaagcaaagcatctgcccacactcccctttccaatctagtgccttccttgaactttttcctgagctgctacgtccctaatcccccttgttgggaggattttcgtatcacccttatgggacctgtcaccatgtcctgtactatttggaattggttttccagtctttcaacaaccgttgtggctaactatgttttagaagggctggaggtgtgggccctgtcttcgggtctcaggacccaaagatcctttagtcagttgttgggtcttccaagagccagacattaatacagattgaactccatcagtcccctaattgtcagcctttacctccctcccagagcaaggagtttagggattctaaagcttagtgtccacacatcattctaccagaccttagagctttagaagctcaatctaaaatactgtaactcagcataaactattactatcactcctttgaactcagtctccatgagcagtgttttgttggaaatacatagaacggcttaatgcctagagggtggtggatagtgaaggacggtcaaggttatatttttgactgcttagggattctttggatccaagaaacagaaatgttcaagcggaataaaggagggagtggagttgtggtaaggatgcagggtatttcgcagaacccaggacgggaagtgccttggttcttgggtggagctggaactgcagagctttgcacctagtcctttctcccgcttcacagtctgcttatggtatatgtggcccccaaataggcactctagtcctcaagtctacaccaccttccaactctggggatcaccatgaacaaattctcaatttcccatacttaattttttttttttttggagatggagtctcgctgtgtcgcccaggctggagtgcagtggtgcagtctcaactcaccacaacctccgcctcccaggttcaagcagttctctgcctcaacctcccgagtagctgggattacaggcgcctgccaccatgcccagctaatgttcatattttaagtagagacagggtttcaccgtctgggctaggctggtcttgaactcctgaccctcatgatccacccacctcggcctcccaaagtgctaagattacaggcgtgagccaccgcgcccggcccatacttcgtattcttaaaaaaaactacactcagcccagcacattgatcaagtatctatctctgagcagttggccttgccagggagagcagagatgtggcaggctccttcagctggagacagggagcttctcagagaagtgagcagagactccacagacaccctaaaaaggcttctactcaagaagtaaagccactactcctgcctttttgcttagtggacaggaaggcacaggagtttgtctgggacatcatagaaattcttaggtttaacttaattctggtcattgtcttctttatttcctgtttttcttccctttgtcagtcttcgcatccaagatttcttccctccctcttgtgggccagcctgtcctgttccagagctagcctgttcctgggtagccttccttagcctccattcagcctcaggtcttttgccttcttccgtgtttatttagagagcagaatctaataacgggttccactgtagccactatccatggacttctgggtcctcttcaggtttgagtgcttgaaaatgttcattctctgggcttgtggcctgtctcctccactctcctcctcaccctctcgctccttcctgtgtgagggccgctctgcagtaatgttctcaggcaagccttcctaggcacctcagaaactactttgccagagccagtaagaatatataatattggagcagttgccaggatagaaattaaatatagattccagtttaggatagagtttttaccgagagctctttagacagtatacctgtgtcttctctggcaattgctttcattttagtcctatataaaagctttccttttctgtttttttttaaaactatgcttttgcttgcctaaatcttttgatcttatatttctctcatctcagagcctgtcctgagttgtaaggtatttcatactgccttacttaaaagttttttaaactactagagtcatttgatacacacagaagttacctaataatccaaagatgtccatcaagggaggaagggtgggtcatcagactttgcctttgatgttgtagactaggctcctgagttaagcagcagagggacagcagtgccatgtgccttcactgtgtcccaggaaatctgggttggttccagtgggaaataccagtatttcttggttctggaaagtagcaaaagagtaggagatggggaaatagggatggggagagcaagccccgcatgtccatggcgagtcaggtggggagcacgggtggaagggccggctgttgacagacagactaagctgtgtggtgctcttgccgccccttcctgggtacagagcttgagaaaaatgcagccgaccactccctgtgtttgtacagagcaaagcccaaaagccaacctcagatctcctgatttggcagctgaagaaatcagcagagtcctgattgcctgattcagtcccaaaaatgaatgtcaggccccgccccctccccaccaacattgcctctcctacattctccttctgcccctaaatcagacaggaggccagagaggagtattgctcaatgcgtgctatgtgcaactcctcaggccttgtgccacctccatgctgagccctgaagcagggtgtcctgggtgcctgtgtgtcagctccctcctctctacctacctctgaccttcttgtgggtgagggtggccatgcttatggccatcttaaaactggagaggcagagaactacttatgagtctgtagaccacgtgttgtcttccatggcctgtttctcctgctgtctgggtgagtgagcctgcaacgcaatgcccatgagagtaaatgcctcctgacctaccctgctcagcactgttctagtgtcttggccttgaaagaaaagcctgacttcctgctgacacatgtggtaggggcatggcagctatgaggcacctcctacgtctgttttctggctgtggtgacttgggatttttaaccttatatatctttttcctttactcaaaacaaaacaatttttagcacactgaaaaaaaaagcaggttatgcttgcggcgcaa

SEQ ID NO: 55067 - DNA, 1841 bp, Homo sapiens
cacgaggaaaaatcccaagtcaccacagccagaaaacagacgtaggaggtgcctcatagctgccatgcccctaccacatgtgtcagcaggaagtcaggcttttctttcaaggccaagacactagaacagtgctgagcagggtaggtcaggaggcatttactctatgtgcaactcctcaggccttgtgccacctccatgctgagccctgaagcagggtgtcctgggtgcctgtgtgtcagctccctcctctctacctacctctgaccttcttgtgggtgagggtggccatgcttatggccatcttaaaactggagaggcagagaactacttatgagtctgtagaccacgtgttgtcttccatggcctgtttctcctgctgtctgggtgagtgagcctgcaacgcaatgcccatgagagtaaatgcctcctgacctaccctgctcagcactgttctagtgtcttggccttgaaagaaaagcctgacttcctgctgacacatgtggtaggggcatggcagctatgaggcacctcctacgtctgttttctggctgtggtgacttgggatttttaaccttatatatctttttcctttactcaaaacaaaacaatttttagcacactgaaaaaaaaaaaaaagccaaatgttttgtgcctttctaaggcagcactgtatcccaggctgcattttaggacttaatatggaaataccagagtctgagctcctctaccttgagtttcattagtccttagtgtctaggagacaggaaagaatgctctctgtgactggagaggtgacatgcaggtgcagtgtgtctggagtccctttcccctgctgtgagacttcagtggaggagagaagcattgtaccctgggatcatttggttggttccaatcacaagcttagttatcaggttgcatgccttgtctcctgcaaaagacagaatgtttcacaattcccaggtaaactctggaccattccaagtgtcctagccttctgatgacattaattacctagttgtgtcgaggagtataggatggactctcctgagaaggggaggttggtggctttgtcttttctttttgctggatcctgaactggtctagacctcctgcccccaccccccagcccccatcagatgtggctggcctttcatttgaaggcttcagacttaaagcattaagcagctagtgccctctgcagggcctggtttccccagggaagggcagcaaggaacatgggaccagaagcctgtcctcagtaatgtgactatagtgagctttagcaaaagtttttctatataatgacatcttacttatcttttaccctttcctcagttttcccctgcctttaactaataaagaattgggagacagaaattttaaagtcctccttattcaagattttgaaattcttagcctgggagtgctggagagaacctgatgctttctccagaatgaagagtcccaatttgtatatcagtgttaagaagaaaacaaaacaaacacataggtgagattttcgtggactattttaaaaatgtgtcattaatataaaaaatttatattagcagtatttaatcattctcacctgtaaagaataagaaaaacagaaggtaaatattcttacagagaatagcagagctttaagattcattttcattttaagtccattttattttgccagtgtattaatgtttagaagtctgttttactaatgttatttattaattttttttcatttccatacacagttagttaactaaagagctttttcaagcacccatgtctgtaaaaaaatatttttaaataaagtttcttttgttgtagcagaaaaaaaatct

SEQ ID NO: 55068 - DNA, 4211 bp, Homo sapiens
tcattaaagtcagaagattatagaccttctcaaactataagtccctcttcttgccgttggcctttctgactctggaatgaccactgttcattgaaaaatagttttctgactattggtctggctctaacagtttgtttgttcatccagcaaatgtttatgagtgatgaccatgtgccagaaatgtcaggtatgtgtccttcccttggcgccacatagtagtttactaatgtttgggggattgtacttggactgtcatagcctctgcgtttgaccttaaaatagctcttcccagtaagattgtgcaatttttattcacagctcttccatgtagacttacctttcctcatagagctatcctggttaataacaggccaagattctcccattatcccctgttgtctcctgtagctttgataatgcctgggagattccttggtgtaagtgtcatggataccgactgtttttatgttggaatttgttccaacataattagaatctgtttggtgagttgaaaggtaagttggctcagagttgcacagtagggcattaaatgtttaagcaaagcatctgcccacactcccctttccaatctagtgccttccttgaactttttcctgagctgctacgtccctaatcccccttgttgggaggattttcgtatcacccttatgggacctgtcaccatgtcctgtactatttggaattggttttccagtctttcaacaaccgttgtggctaactatgttttagaagggctggaggtgtgggccctgtcttcgggtctcaggacccaaagatcctttagtcagttgttgggtcttccaagagccagacattaatacagattgaactccatcagtcccctaattgtcagcctttacctccctcccagagcaaggagtttagggattctaaagcttagtgtccacacatcattctaccagaccttagagctttagaagctcaatctaaaatactgtaactcagcataaactattactatcactcctttgaactcagtctccatgagcagtgttttgttggaaatacatagaacggcttaatgcctagagggtggtggatagtgaaggacggtcaaggttatatttttgactgcttagggattctttggatccaagaaacagaaatgttcaagcggaataaaggagggagtggagttgtggtaaggatgcagggtatttcgcagaacccaggacgggaagtgccttggttcttgggtggagctggaactgcagagctttgcacctagtcctttctcccgcttcacagtctgcttatggtatatgtggcccccaaataggcactctagtcctcaagtctacaccaccttccaactctggggatcaccatgaacaaattctcaatttcccatacttaattttttttttttttggagatggagtctcgctgtgtcgcccaggctggagtgcagtggtgcagtctcaactcaccacaacctccgcctcccaggttcaagcagttctctgcctcaacctcccgagtagctgggattacaggcgcctgccaccatgcccagctaatgttcatattttaagtagagacagggtttcaccgtctgggctaggctggtcttgaactcctgaccctcatgatccacccacctcggcctcccaaagtgctaagattacaggcgtgagccaccgcgcccggcccatacttcgtattcttaaaaaaaactacactcagcccagcacattgatcaagtatctatctctgagcagttggccttgccagggagagcagagatgtggcaggctccttcagctggagacagggagcttctcagagaagtgagcagagactccacagacaccctaaaaaggcttctactcaagaagtaaagccactactcctgcctttttgcttagtggacaggaaggcacaggagtttgtctgggacatcatagaaattcttaggtttaacttaattctggtcattgtcttctttatttcctgtttttcttccctttgtcagtcttcgcatccaagatttcttccctccctcttgtgggccagcctgtcctgttccagagctagcctgttcctgggtagccttccttagcctccattcagcctcaggtcttttgccttcttccgtgtttatttagagagcagaatctaataacgggttccactgtagccactatccatggacttctgggtcctcttcaggtttgagtgcttgaaaatgttcattctctgggcttgtggcctgtctcctccactctcctcctcaccctctcgctccttcctgtgtgagggccgctctgcagtaatgttctcaggcaagccttcctaggcacctcagaaactactttgccagagccagtaagaatatataatattggagcagttgccaggatagaaattaaatatagattccagtttaggatagagtttttaccgagagctctttagacagtatacctgtgtcttctctggcaattgctttcattttagtcctatataaaagctttccttttctgtttttttttaaaactatgcttttgcttgcctaaatcttttgatcttatatttctctcatctcagagcctgtcctgagttgtaaggtatttcatactgccttacttaaaagttttttaaactactagagtcatttgatacacacagaagttacctaataatccaaagatgtccatcaagggaggaagggtgggtcatcagactttgcctttgatgttgtagactaggctcctgagttaagcagcagagggacagcagtgccatgtgccttcactgtgtccctgctcagcactgttctagtgtcttggccttgaaagaaaagcctgacttcctgctgacacatgtggtaggggcatggcagctatgaggcacctcctacgtctgttttctggctgtggtgacttgggatttttaaccttatatatctttttcctttactcaaaacaaaacaatttttagcacactgaaaaaaaaaaaaaagccaaatgttttgtgcctttctaaggcagcactgtatcccaggctgcattttaggacttaatatggaaataccagagtctgagctcctctaccttgagtttcattagtccttagtgtctaggagacaggaaagaatgctctctgtgactggagaggtgacatgcaggtgcagtgtgtctggagtccctttcccctgctgtgagacttcagtggaggagagaagcattgtaccctgggatcatttggttggttccaatcacaagcttagttatcaggttgcatgccttgtctcctgcaaaagacagaatgtttcacaattcccaggtaaactctggaccattccaagtgtcctagccttctgatgacattaattacctagttgtgtcgaggagtataggatggactctcctgagaaggggaggttggtggctttgtcttttctttttgctggatcctgaactggtctagacctcctgcccccaccccccagcccccatcagatgtggctggcctttcatttgaaggcttcagacttaaagcattaagcagctagtgccctctgcagggcctggtttccccagggaagggcagcaaggaacatgggaccagaagcctgtcctcagtaatgtgactatagtgagctttagcaaaagtttttctatataatgacatcttacttatcttttaccctttcctcagttttcccctgcctttaactaataaagaattgggagacagaaattttaaagtcctccttattcaagattttgaaattcttagcctgggagtgctggagagaacctgatgctttctccagaatgaagagtcccaatttgtatatcagtgttaagaagaaaacaaaacaaacacataggtgagattttcgtggactattttaaaaatgtgtcattaatataaaaaatttatattagcagtatttaatcattctcacctgtaaagaataagaaaaacagaaggtaaatattcttacagagaatagcagagctttaagattcattttcattttaagtccattttattttgccagtgtattaatgtttagaagtctgttttactaatgttatttattaattttttttcatttccatacacagttagttaactaaagagctttttcaagcacccatgtctgtaaaaaaatatttttaaataaagtttcttttgttgtagcagaaaaaaaatct

SEQ ID NO: 55069 - DNA, 2374 bp, Homo sapiens
tcattaaagtcagaagattatagaccttctcaaactataagtccctcttcttgccgttggcctttctgactctggaatgaccactgttcattgaaaaatagttttctgactattggtctggctctaacagtttgtttgttcatccagcaaatgtttatgagtgatgaccatgtgccagaaatgtcaggtatgtgtccttcccttggcgccacatagtagtttactaatgtttgggggattgtacttggactgtcatagcctctgcgtttgaccttaaaatagctcttcccagtaagattgtgcaatttttattcacagctcttccatgtagacttacctttcctcatagagctatcctggttaataacaggccaagattctcccattatcccctgttgtctcctgtagctttgataatgcctgggagattccttggtgtaagtgtcatggataccgactgtttttatgttggaatttgttccaacataattagaatctgtttggtgagttgaaaggtaagttggctcagagttgcacagtagggcattaaatgtttaagcaaagcatctgcccacactcccctttccaatctagtgccttccttgaactttttcctgagctgctacgtccctaatcccccttgttgggaggattttcgtatcacccttatgggacctgtcaccatgtcctgtactatttggaattggttttccagtctttcaacaaccgttgtggctaactatgttttagaagggctggaggtgtgggccctgtcttcgggtctcaggacccaaagatcctttagtcagttgttgggtcttccaagagccagacattaatacagattgaactccatcagtcccctaattgtcagcctttacctccctcccagagcaaggagtttagggattctaaagcttagtgtccacacatcattctaccagaccttagagctttagaagctcaatctaaaatactgtaactcagcataaactattactatcactcctttgaactcagtctccatgagcagtgttttgttggaaatacatagaacggcttaatgcctagagggtggtggatagtgaaggacggtcaaggttatatttttgactgcttagggattctttggatccaagaaacagaaatgttcaagcggaataaaggagggagtggagttgtggtaaggatgcagggtatttcgcagaacccaggacgggaagtgccttggttcttgggtggagctggaactgcagagctttgcacctagtcctttctcccgcttcacagtctgcttatggtatatgtggcccccaaataggcactctagtcctcaagtctacaccaccttccaactctggggatcaccatgaacaaattctcaatttcccatacttaattttttttttttttggagatggagtctcgctgtgtcgcccaggctggagtgcagtggtgcagtctcaactcaccacaacctccgcctcccaggttcaagcagttctctgcctcaacctcccgagtagctgggattacaggcgcctgccaccatgcccagctaatgttcatattttaagtagagacagggtttcaccgtctgggctaggctggtcttgaactcctgaccctcatgatccacccacctcggcctcccaaagtgctaagattacaggcgtgagccaccgcgcccggcccatacttcgtattcttaaaaaaaactacactcagcccagcacattgatcaagtatctatctctgagcagttggccttgccagggagagcagagatgtggcaggctccttcagctggagacagggagcttctcagagaagtgagcagagactccactaaaacaacaaaaaaaaaaaaccccggggcctcacatgcgggggcgcgggacacaacggggtacgcgaagcgccatgggccactagcggtccctggacccaggtttcttggcacaacgggggcaaacctcgccggacccccccataaaaaggagagccgggtatataaacttcgggaaagagcccggggttaaaccgcgtgcttaagtaagaggcgggaacaaaagagtaagcgcggcaaaacgaggagagacgaaagacagagagcacaaacgaagaggggcgaacgaccaaaacgaaaggcaaaacaaagaaaaggggcgaaggacaacacacaggcacagagacacgcagatagaacgagcacaaaagcacaaccaactaaccacacaacaaacagaaaagaccgcatcaaacacctaggaaaagccatcgacggacaccaggataagcaaaccacaacaccaacagtaggaaccgagaaagactgcaccacacaacaaccgccgaaccacccaacgagagg

SEQ ID NO: 55070 - DNA, 1562 bp, Homo sapiens
  misc_feature (17)..(17): n is a, c, g, or t
aggagtcagcggtggcnctttatgagagtcactttagtggcacaacagccatggagtaaatggcatgccatttactccatggccccacaagcttcccttcccccggtgccaccacgacttgaccttctgccgcagcgagtatgtgttccctcaagtgcttctgctcttggaactgcttctaaggctgcttctggctcccttcataaagacaaaccattgccagtacctcccacacttcgagatcttccaccaccaccgcctccagaccggccatattctgttggagcagaatcccgacctcaaagacgccccttgccttgtacaccaggcgactgtccctccagagacaaactgccccctgtcccctctagccgccttggagactcatggctgccccggccaatccccaaagtaccagtatctgccccaagttccagtgatccctggacaggaagagaattaaccaaccggcactcacttccattttcattgccctcacaaatggagcccagaccagatgtgcctaggctcggaagcacgttcagtctggatacctccatgagtatgaatagcagcccattagtaggtccagagtgtgaccaccccaaaatcaaaccttcctcatctgccaatgccatttattctctggctgccagacctcttcctgtgccaaaactgccacctggggagcaatgtgagggtgaagaggacacagagtacatgactccctcttccaggcctctacggcctttggatacatcccagagttcacgagcatgtgattgcgaccagcagattgatagctgtacgtatgaagcaatgtataatattcagtcccaggcgccatctatcaccgagagcagcacctttggtgaagggaatttggccgcagcccatgccaacactggtcccgaggagtcagaaaatgaggatgatgggtatgatgtcccaaagccacctgtgccggccgtgctggcccgccgaactctctcagatatctctaatgccagctcctcctttggctggttgtctctggatggtgatcctacaacaaatgtcactgaaggttcccaagttcccgagaggcctccaaaaccattcccgcggagaatcaactctgaacggaaagctggcagctgtcagcaaggtagtggtcctgccgcctctgctgccaccgcctcacctcagctctccagtgagatcgagaacctcatgagtcaggggtactcctaccaggacatccagaaagctttggtcattgcccagaacaacatcgagatggccaaaaacatcctccgggaatttgtttccatttcttctcctgcccatgtagctacctagcacaccatctccctgctgcaggtttagaggaccagtgagttgggagttattactcaagtggcacctagaagggcaggagttcctttggtgacttcacagtgaagtcttgccctctctgtgggatatcacatcagtggttccaagatttcaaagtggtgaaatgaaaatggagcagctagtatgttttattattttatgggtcttgagtgcatttgaaggtg

SEQ ID NO: 55071 - DNA, 2765 bp, Homo sapiens
gaattccgggcccggatagccggcggcggcggcggcggcggcggcggcggcggccgggagaggcccctccttcacgccctgcttctctccctcgctcgcagtcgagccgagccggcggacccgcctgggctccgaccctgcccaggccatggccggcaacgtgaagaagagctctggggccgggggcggcacgggctccgggggctcgggttcgggtggcctgattgggctcatgaaggacgccttccagccgcaccaccaccaccaccaccacctcagcccccacccgccggggacggtggacaagaagatggtggagaagtgctggaagctcatggacaaggtggtgcggttgtgtcagaacccaaagctggcgctaaagaatagcccaccttatatcttagacctgctaccagatacctaccagcatctccgtactatcttgtcaagatatgaggggaagatggagacacttggagaaaatgagtattttagggtgtttatggagaatttgatgaagaaaactaagcaaaccataagcctcttcaaggagggaaaagaaagaatgtatgaggagaattctcagcctaggcgaaacctaaccaaactgtccctcatcttcagccacatgctggcagaactaaaaggaatctttccaagtggactctttcagggagacacatttcggattactaaagcagatgctgcggaattttggagaaaagcttttggggaaaagacaatagtcccttggaagagctttcgacaggctctacatgaagtgcatcccatcagttctgggctggaggccatggctctgaaatccactattgatctgacctgcaatgattatatttcggtttttgaatttgacatctttacccgactctttcagccctggtcctctttgctcaggaattggaacagccttgctgtaactcatcctggctacatggcttttttgacgtatgacgaagtgaaagctcggctccagaaattcattcacaaacctggcagttatatcttccggctgagctgtactcgtctgggtcagtgggctattgggtatgttactgctgatgggaacattctccagacaatccctcacaataaacctctcttccaagcactgattgatggcttcagggaaggcttctatttgtttcctgatggacgaaatcagaatcctgatctgactggcttatgtgaaccaactccccaagaccatatcaaagtgacccaggaacaatatgaattatactgtgagatgggctccacattccaactatgtaaaatatgtgctgaaaatgataaggatgtaaagattgagccctgtggacacctcatgtgcacatcctgtcttacatcctggcaggaatcagaaggtcagggctgtcctttctgccgatgtgaaattaaaggtactgaacccatcgtggtagatccgtttgatcctagagggagtggcagcctgttgaggcaaggagcagagggagctccctccccaaattatgatgatgatgatgatgaacgagctgatgatactctcttcatgatgaaggaattggctggtgccaaggtggaacggccgccttctccattctccatggccccacaagcttcccttcccccggtgccaccacgacttgaccttctgccgcagcgagtatgtgttccctcaagtgcttctgctcttggaactgcttctaaggctgcttctggctcccttcataaagacaaaccattgccagtacctcccacacttcgagatcttccaccaccaccgcctccagaccggccatattctgttggagcagaatcccgacctcaaagacgccccttgccttgtacaccaggcgactgtccctccagagacaaactgccccctgtcccctctagccgccttggagactcatggctgccccggccaatccccaaagtaccagtatctgccccaagttccagtgatccctggacaggaagagaattaaccaaccggcactcacttccattttcattgccctcacaaatggagcccagaccagatgtgcctaggctcggaagcacgttcagtctggatacctccatgagtatgaatagcagcccattagtaggtccagagtgtgaccaccccaaaatcaaaccttcctcatctgccaatgccatttattctctggctgccagacctcttcctgtgccaaaactgccacctggggagcaatgtgagggtgaagaggacacagagtacatgactccctcttccaggcctctacggcctttggatacatcccagagttcacgagcatgtgattgcgaccagcagattgatagctgtacgtatgaagcaatgtataatattcagtcccaggcgccatctatcaccgagagcagcacctttggtgaagggaatttggccgcagcccatgccaacactggtcccgaggagtcagaaaatgaggatgatgggtatgatgtcccaaagccacctgtgccggccgtgctggcccgccgaactctctcagatatctctaatgccagctcctcctttggctggttgtctctggatggtgatcctacaacaaatgtcactgaaggttcccaagttcccgagaggcctccaaaaccattcccgcggagaatcaactctgaacggaaagctggcagctgtcagcaagttagttaactaaagagctttttcaagcacccatgtctgtaaaaaaatatttttaaataaagtttcttttgttgtagcagaaaaaaaatct

SEQ ID NO: 55072 - DNA, 397 bp, Homo sapiens
acatttgaaggttcttcggagccttaaggcccctaagcgtttggtcagatgtgataacccctgggcatggcattgagagttaggtttgtatctgttattgttattttgaaaaggttcaataagagcagaggctcagctgtggtaagaaagttgtttttcaacacttttctttactttccagagtatgaatagcagcccattagtaggtccagagtgtgaccaccccaaaatcaaaccttcctcatctgccaatgccatttattctctggctgccaggtaagtctgctaaagctatattttgtacagtggagttgttacttgtaaaaagcttacttgcagaaaattgagaaaacccagaaaagtgtaaaaaagaaaataaaaatctctgcaccatgta

SEQ ID NO: 55073 - DNA, 246 bp, Homo sapiens
tgtgtgcgacctcaaacctaggtctggcccatttgtagtttaagtgttcccatggtatttgccatccacagctttaggagagttgaaagatgccatttccccaaacgaaagtaatctgttaaattttttatgtaccctaggtggaacggccgccttctccattctccatggccccacaagcttcccttcccccggtgccaccacgacttgaccttctgccgcagcgagtatgtgttccctcaagtg

SEQ ID NO: 55074 - DNA, 1085 bp, Homo sapiens
acgaggatccccgcctgagatgacagtcggcccagaccagatgtgcctaggctcggaagcacgttcagtctggatacctccatgagtatgaatagcagcccattagtaggtccagagtgtgaccaccccaaaatcaaaccttcctcatctgccaatgccatttattctctggctgccagacctcttcctgtgccaaaactgccacctggggagcaatgtgagggtgaagaggacacagagtacatgactccctcttccaggcctctacggcctttggatacatcccagagttcacgagcatgtgattgcgaccagcagattgatagctgtacgtatgaagcaatgtataatattcagtcccaggcgccatctatcaccgagagcagcacctttggtgaagggaatttggccgcagcccatgccaacactggtcccgaggagtcagaaaatgaggatgatgggtatgatgtcccaaagccacctgtgccggccgtgctggcccgccgaactctctcagatatctctaatgccagctcctcctttggctggttgtctctggatggtgatcctacaacaaatgtcactgaaggttcccaagttcccgagaggcctccaaaaccattcccgcggagaatcaactctgaacggaaagctggcagctgtcagcaaggtagtggtcctgccgcctctgctgccaccgcctcacctcagctctccagtgagatcgagaacctcatgagtcaggggtactcctaccaggacatccagaaagctttggtcattgcccagaacaacatcgagatggccaaaaacatcctccgggaatttgtttccatttcttctcctgcccatgtagctacctagcacaccatctccctgctgcaggtttagaggaccagtgagttgggagttattactcaagtggcacctagaagggcaggagttcctttggtgacttcacagtgaagtcttgccctctctgtgggatatcacatcagtggttccaagatttcaaagtggtgaaatgaaaatggagcagctagtatgttttattattttatgggtcttgagtgcatttgaaggtg

SEQ ID NO: 55075 - DNA, 1185 bp, Homo sapiens
gaattccgggcccggatagccggcggcggcggcggcggcggcggcggcggcggccgggagaggcccctccttcacgccctgcttctctccctcgctcgcagtcgagccgagccggcggacccgcctgggctccgaccctgcccaggccatggccggcaacgtgaagaagagctctggggccgggggcggcacgggctccgggggctcgggttcgggtggcctgattgggctcatgaaggacgccttccagccgcaccaccaccaccaccaccacctcagcccccacccgccggggacggtggacaagaagatggtggagaagtgctggaagctcatggacaaggtggtgcggttgtgtcagaacccaaagctggcgctaaagaatagcccaccttatatcttagacctgctaccagatacctaccagcatctccgtactatcttgtcaagatatgaggggaagatggagacacttggagaaaatgagtattttagggtgtttatggagaatttgatgaagaaaactaagcaaaccataagcctcttcaaggagggaaaagaaagaatgtatgaggagaattctcagcctaggcgaaacctaaccaaactgtccctcatcttcagccacatgctggcagaactaaaaggaatctttccaagtggactctttcagggagacacatttcggattactaaagcagatgctgcggaattttggagaaaagcttttggggaaaagacaatagtcccttggaagagctttcgacaggctctacatgaagtgcatcccatcagttctgggctggaggccatggctctgaaatccactattgatctgacctgcaatgattatatttcggtttttgaatttgacatctttacccgactctttcagccctggtcctctttgctcaggaattggaacagccttgctgtaactcatcctggctacatggcttttttgacgtatgacgaagtgaaagctcggctccagaaattcattcacaaacctggcagttatatcttccggctgagctgtactcgtctgggtcagtgggctattgggtatgttactgctgatgggaacattctccagacaatccctcacaataaacctctcttccaagcactgattgatggcttcagggaaggcttctatttgtttcctgatgggagcaagacgcg

SEQ ID NO: 55076 - DNA, 202 bp, Homo sapiens
cgtgagccaccacagccagtcagttttctcgtttataaaatgggaataatagcacctgtattgaagggttgttgtggagattgaatgggaatgtgtacttagaattccaggcatagtgcctgccacaagcactcaaggaatgagctggagttcagctgataataccaggcagtgtctctgggcaacacggaatgaagacaat

SEQ ID NO: 55077 - DNA, 277 bp, Homo sapiens
ctcagtcatcatgaccaccagcttgccctccacagttgctaatgtctagccattccttatctattggcaaggaatgcaaatggaatcagttctttcttttggggctgaggtaatagtggaatgctcccttacaggaagctacccaggacttcacaggccctgtgccagtgacttccttgaaaccaggaatattgatttgcagaaaagctgtcagtccagtcttgattctgatatctttctacaatatggcttcagacacttaaataggaaatgtgtg

SEQ ID NO: 55078 - DNA, 388 bp, Homo sapiens
agtctgttctcttcacggaatattttcacctgaatcagtgggtataattcatcagtgtctggttgcttcaagttatttttcttaatgctgatgttaatgcatgcccatctttatgcctcaacacattgcacaatgaaaaacaaaaattattttggaagacacagctgacatctatatgaaatattcagtatcagtgattgaacttcagcaagctcctgtggccagcagggttttacggaggtgcaactgctctcccacgatcacttatcataaagccagagacaattgggccaatgtagcctcttgcctgcttttgtgtacaaaatataaatagaatagagcaaataaggaaaaatagtcccgcagctggaaggcaactttaaagaaa

SEQ ID NO: 55079 - DNA, 311 bp, Homo sapiens
gaaaatacattcaatgcttgccagcaatttacctgtttatttttctgatgtttgtctctctcctagtggctcacctatatattgacactgcctttagaatttgggtgtcgtggcttcattgttgcatctgtgctcctctttccctactaaatgtcctttatcagggacggagccagcagcatttgcttgttctcagcaatctgagtctctggtcttccttgttccctgtttgggggcttctgcattgccatttggtggtggtggtggtggtggcagtgatgtatctgtgtttgcttctgtctgttccagct

SEQ ID NO: 55080 - DNA, 319 bp, Homo sapiens
tcatgttcacagcacatcccagtgtgaactagtcacaatgcaagtgttcagtggccacaagtggctagtgacaactgtattggaacccatagctccagactctgttcaattatctgtgctatcctctcgaggtactccttcctcagaaggagcctagacctggagggagatgcttgggcaacaatcctgctttgggtgaaaagctaagtccctgccacttatcaagcttccagaacacccacacctttagcacagcacaacctgctgcccccatttaacttaacaggtgttttgccacttgccaggaaggttcaatttg

SEQ ID NO: 55081 - DNA, 294 bp, Homo sapiens
aagcaggaaggacacactccataagtctcggcactgctcatcagcccatgtgtcagcacgctcttgctgatgggagcagcggggagaaacgccatactgggaagtcactgctggtgtgggacaagttacaagatgcttctgggggaggaaaatgtgtatcatcaactcctcaggtctggccaacttgctttatttcctttagcccccaaagggtggagcattgaagcataatagcttcaataagctttgttattttaacattattattttttaaactgaattcaccaccacagg

SEQ ID NO: 55082 - DNA, 175 bp, Homo sapiens
tagttgtaactttgaagcctttttatggatcaacatgaagattgagggatctcaaacagaaagggcatcctggtggcaaaggttaatcattaccagactgcaagagtagtttcaatggcaagaaagcagcaacagaatcaatgaaaacaaagcaatgattagaatgccctttccc

SEQ ID NO: 55083 - DNA, 395 bp, Homo sapiens
aggctcaaagtctcaggtggtatccagttggactcaaagatgtcccagtgctcaggaaatgctctttgagttaaggatcagcaagaaaaaaggaaaaagatgtgcaaacacacagggaggggaggcgaagtggagagaatgagggggaggttctccatcaagaaaccacaatacttaagcaatggcattcaggacagaatttctagcccctctaaagaaaagaactaatagcagcgttgccgctgtcccagcaaatccagtaagttctccagaatcaggaaagttcttcacagctcatttgttccctgactcttctgtgtccctccttttaccctttctcatgagagctggtttgccctgcctggcagcctgcagcaggcaccttgcagtgttct

SEQ ID NO: 55084 - DNA, 946 bp, Homo sapiens
agagaacctgcaaccgtttccgcctcctgctagagcggcgaaccgtgggcagtgaggtaacatctggggctgacgcccagggagccaggtctggctagtccctgggggtggccggggggtccagcctagggctcgaggagcgtagttggaggtgggcaagagagagagagtagggctgaattcctggggtggggggaggcagtctggcgttttgtgtcccatctcacgcagcctggcaccttcctctcccagcagcgctctgtcacctgtgcccctcatgttcgtctcccactttcctctgtgctggcctcctctgccctgtcccagcattctctaagcctgtgctccaaccccgctcatctcatggctttctttgccccaccagcctgactttttctccaaactggcagccatgtttaggggcttgatctttcacagcagcaggagcggtaaccgagaggtaagggtcggctctgggagcggggaactagtacgagcaaggtgtagctgcgccagagcccaggtgacagagcccgccactcagtcactcgtgcatcagatagatattgagcacctgctttactgtgaggacccagagggacataagtgcagacagtgctgactctcccaggagtttactcgtgagtaggggtggcagagaagccatgtgtgtaaaaatgcaaggtagaaagggctttgtctcactgatcctgaggagcaaggtaataatgtgggctaaggagatcgaggtcaaggaggtgtcacccaggtgtggctttgatgaatggggtgtgatttgaagatatgaaccagggcacaggataggaggcaggaaagacaacaggctggggaatagcagtgagttccttagttatgctggagctatgctatccagtacggtggccagtagccctatatggctatttaaattacaactaaatcaagt

SEQ ID NO: 55085 - DNA, 1999 bp, Homo sapiens
  misc_feature (1025)..(1025): n is a, c, g, or t
gttggcctactggaaaaaaaaaaaaaaaaaaaaaaaaaaaaaaaaaactaaaaaaagagaaatttgcactgatggctcagaaggcttacgtcatggagagtatgacctacctcacagcagggatgctggaccaacctggctttcccgactgctccatcgaggcagccatggtgaaggtgttcagctccgaggccgcctggcagtgtgtgagtgaggcgctgcagatcctcgggggcttgggctacacaagggactatccgtacgagcgcatactgcgtgacacccgcatcctcctcatcttcgagggaaccaatgagattctccggatgtacatcgccctgacgggtctgcagcatgccggccgcatcctgactaccaggatccatgagcttaaacaggccaaagtgagcacagtcatggataccgttggccggaggcttcgggactccctgggccgaactgtggacctggggctgacaggcaaccatggagttgtgcaccccagtcttgcggacagtgccaacaagtttgaggagaacacctactgcttcggccggaccgtggagacactgctgctccgctttggcaaggtaaccaggccctcccaggcctgggtcgcaagcggtcctccaatttggccagcattcatgagactactttttgtcaagcatcctttgggaccaggcctagaacagaaatgttgatcaccctggagggatggggtggtgaggtcaggctgactttgtcagcctggggcccacttagctactcggatgggtacccttgctgggtgagttttctgcagtgtttttctgtgcacctttcaggtagagaggctccctagaatcgggagggcagctccacctggggcctgaatctagggacctgattggtggggcccttgctgctgaaggtggcagtagcacagtaagcactggcttctggtctcagccaagcttctgggacctggtcttgccttaacccctccctgaatctagagctcaaagagaagggaaaacagaagntggctgggagccgttctcccacaacctgaagagaaaggtgttattgactccactttctcaaggaacacaggagactaagacaggcaaagatgcagcccagggagggaccatgtgggggactggtctaggtagtgagtccccacttggagcctctgtgatcccagaccatcatggaggagcagctggtactgaagcgggtggccaacatcctcatcaacctgtatggcatgacggccgtgctgtcgcgggccagccgctccatccgcattgggctccgcaaccacgaccacgaggttctcttggccaacaccttctgcgtggaagcttacttgcagaatctcttcagcctctctcagctggacaagtatgctccagaaaacctagatgagcagattaagaaagtgtcccagcagatccttgagaagcgagcctatatctgtgcccaccctctggacaggacatgctgaggcaggggacagtgtcccctgctaccgcccgcccctacccatggcccgttgctggatgactgttactcttttttcagaaggtgttgggattatcacaggttaagccttttgttccccgtctgcacctgaagggttgtcgcctggcctgggagagcctcttccaggttttgacctgcaggcagtgctctctaacaggaccatcacagcttctgaactgagccggagagagagaatggaattgctgacccctggaactggcgggtattctggtcattgaggagacaccatagtggaaactggggcttatgctgctgcctccagggtgtgaggtgggtggggacctgtgtcaggtgtggatagccatttctgctcaaccacacattctctaagaaacagcttgaaagctctgtctgggtcattcatttaaactagaagcagaggcacttaaaacatgtaccaggaaccatttaacaaagaatataaaatgtcacaatctgtgtactgtta

SEQ ID NO: 55086 - DNA, 2449 bp, Homo sapiens
tagcaggctggtacggccctggatttttggattaagaaggggagactgaggctgaggctggggaacatcgggcagcatgagcggctgcgggctcttcctgcgcaccacggctgcggctcgtgcctgccggggtctggtggtctctaccgcgaaccggcggctactgcgcaccagcccgcctgtacgagctttcgccaaagagcttttcctaggcaaaatcaagaagaaagaagttttcccatttccagaagttagccaagatgaacttaatgaaatcaatcagttcttgggacccgtggaaaaattcttcactgaagaggtggactcccgaaaaattgaccaggaagggaaaatcccagatgaaactttggagaaattgaagagcctagggctttttgggctgcaagtcccagaagaatatggtggcctgggcttctccaacaccatgtactcaagactaggggagatcatcagcatggatgggtccatcactgtgaccctggcagcgcaccaggctattggcctcaaggggatcatcttggctggcactgaggagcagaaagccaaatacttgcctaaactggcgtccggggagcacattgcagccttctgcctcacggagccagccagtgggagcgatgcagcctcaatccggagcagagccacactaagtgaagacaagaagcactacatcctcaatggctccaaggtctggattactaatggaggactggccaatatttttactgtgtttgcaaagactgaggtcgttgattctgatggatcagtgaaagacaaaatcacagcattcatagtagaaagagactttggtggagtcactaatgggaaacccgaagataaattaggcattcggggctccaacacttgtgaagtccattttgaaaacaccaagatacctgtggaaaacatccttggagaggtcggagatgggtttaaggtggccatgaacatcctcaacagcggccggttcagcatgggcagcgtcgtggctgggctgctcaagagattgattgaaatgactgctgagtacgcctgcacaaggaaacagtttaacaagaggctcagtgaatttggattgattcaggagaaatttgcactgatggctcagaaggcttacgtcatggagagtatgacctacctcacagcagggatgctggaccaacctggctttcccgactgctccatcgaggcagccatggtgaaggtgttcagctccgaggccgcctggcagtgtgtgagtgaggcgctgcagatcctcgggggcttgggctacacaagggactatccgtacgagcgcatactgcgtgacacccgcatcctcctcatcttcgagggaaccaatgagattctccggatgtacatcgccctgacgggtctgcagcatgccggccgcatcctgactaccaggatccatgagcttaaacaggccaaagtgagcacagtcatggataccgttggccggaggcttcgggactccctgggccgaactgtggacctggggctgacaggcaaccatggagttgtgcaccccagtcttgcggacagtgccaacaagtttgaggagaacacctactgcttcggccggaccgtggagacactgctgctccgctttggcaagaccatcatggaggagcagctggtactgaagcgggtggccaacatcctcatcaacctgtatggcatgacggccgtgctgtcgcgggccagccgctccatccgcattgggctccgcaaccacgaccacgaggttctcttggccaacaccttctgcgtggaagcttacttgcagaatctcttcagcctctctcagctggacaagtatgctccagaaaacctagatgagcagattaagaaagtgtcccagcagatccttgagaagcgagcctatatctgtgcccaccctctggacaggacatgctgaggcaggggacagtgtcccctgctaccgcccgcccctacccatggcccgttgctggatgactgttactcttttttcagaaggtgttgggattatcacaggttaagccttttgttccccgtctgcacctgaagggttgtcgcctggcctgggagagcctcttccaggttttgacctgcaggcagtgctctctaacaggaccatcacagcttctgaactgagccggagagagagaatggaattgctgacccctggaactggcgggtattctggtcattgaggagacaccatagtggaaactggggcttatgctgctgcctccagggtgtgaggtgggtggggacctgtgtcaggtgtggatagccatttctgctcaaccacacattctctaagaaacagcttgaaagctctgtctgggtcattcatttaaactagaagcagaggcacttaaaacatgtaccaggaaccatttaacaaagaatataaaatgtcacaatctgtgtactgtta

SEQ ID NO: 55087 - DNA, 2544 bp, Homo sapiens
agcaggctggtaccggcccgagtggttaggatctgcggcgctaagtaagaaggggagactgaggctgaggctggggaacatcgggcagcatgagcggctgcgggctcttcctgcgcaccacggctgcggctcgtgcctgccggggtctggtggtctctaccgcgaaccggcggctactgcgcaccagcccgcctgtacgagctttcgccaaagagcttttcctaggcaaaatcaagaaggtaacgcgagccctgggcgaacccttgctgtctggctcccgcttttcaccctcagctgcaagactggtgttgaactttgtgagattccccaaacctgccagagagatacaccctgcggccgaggcgtgttaacactccggattcctgagttccaggaaaaccttcccagagaaaggtggactcccgaaaaattgaccaggaagggaaaatcccagatgaaactttggagaaattgaagagcctagggctttttgggctgcaagtcccagaagaatatggtggcctgggcttctccaacaccatgtactcaagactaggggagatcatcagcatggatgggtccatcactgtgaccctggcagcgcaccaggctattggcctcaaggggatcatcttggctggcactgaggagcagaaagccaaatacttgcctaaactggcgtccggggagcacattgcagccttctgcctcacggagccagccagtgggagcgatgcagcctcaatccggagcagagccacactaagtgaagacaagaagcactacatcctcaatggctccaaggtctggattactaatggaggactggccaatatttttactgtgtttgcaaagactgaggtcgttgattctgatggatcagtgaaagacaaaatcacagcattcatagtagaaagagactttggtggagtcactaatgggaaacccgaagataaattaggcattcggggctccaacacttgtgaagtccattttgaaaacaccaagatacctgtggaaaacatccttggagaggtcggagatgggtttaaggtggccatgaacatcctcaacagcggccggttcagcatgggcagcgtcgtggctgggctgctcaagagattgattgaaatgactgctgagtacgcctgcacaaggaaacagtttaacaagaggctcagtgaatttggattgattcaggagaaatttgcactgatggctcagaaggcttacgtcatggagagtatgacctacctcacagcagggatgctggaccaacctggctttcccgactgctccatcgaggcagccatggtgaaggtgttcagctccgaggccgcctggcagtgtgtgagtgaggcgctgcagatcctcgggggcttgggctacacaagggactatccgtacgagcgcatactgcgtgacacccgcatcctcctcatcttcgagggaaccaatgagattctccggatgtacatcgccctgacgggtctgcagcatgccggccgcatcctgactaccaggatccatgagcttaaacaggccaaagtgagcacagtcatggataccgttggccggaggcttcgggactccctgggccgaactgtggacctggggctgacaggcaaccatggagttgtgcaccccagtcttgcggacagtgccaacaagtttgaggagaacacctactgcttcggccggaccgtggagacactgctgctccgctttggcaagaccatcatggaggagcagctggtactgaagcgggtggccaacatcctcatcaacctgtatggcatgacggccgtgctgtcgcgggccagccgctccatccgcattgggctccgcaaccacgaccacgaggttctcttggccaacaccttctgcgtggaagcttacttgcagaatctcttcagcctctctcagctggacaagtatgctccagaaaacctagatgagcagattaagaaagtgtcccagcagatccttgagaagcgagcctatatctgtgcccaccctctggacaggacatgctgaggcaggggacagtgtcccctgctaccgcccgcccctacccatggcccgttgctggatgactgttactcttttttcagaaggtgttgggattatcacaggttaagccttttgttccccgtctgcacctgaagggttgtcgcctggcctgggagagcctcttccaggttttgacctgcaggcagtgctctctaacaggaccatcacagcttctgaactgagccggagagagagaatggaattgctgacccctggaactggcgggtattctggtcattgaggagacaccatagtggaaactggggcttatgctgctgcctccagggtgtgaggtgggtggggacctgtgtcaggtgtggatagccatttctgctcaaccacacattctctaagaaacagcttgaaagctctgtctgggtcattcatttaaactagaagcagaggcacttaaaacatgtaccaggaaccatttaacaaagaatataaaatgtcacaatctgtgtactgtta

SEQ ID NO: 55088 - DNA, 2638 bp, Homo sapiens
agcaggctggtaccggcccgagtggttaggatctgcggcgctaagtaagaaggggagactgaggctgaggctggggaacatcgggcagcatgagcggctgcgggctcttcctgcgcaccacggctgcggctcgtgcctgccggggtctggtggtctctaccgcgaaccggcggctactgcgcaccagcccgcctgtacgagctttcgccaaagagcttttcctaggcaaaatcaagaaggtaacgcgagccctgggcgaacccttgctgtctggctcccgcttttcaccctcagctgcaagactggtgttgaactttgtgagattccccaaacctgccagagagatacaccctgcggccgaggcgtgttaacactccggattcctgagttccaggaaaaccttcccagagaaaggaaagaagttttcccatttccagaagttagccaagatgaacttaatgaaatcaatcagttcttgggacccgtggaaaaattcttcactgaagaggtggactcccgaaaaattgaccaggaagggaaaatcccagatgaaactttggagaaattgaagagcctagggctttttgggctgcaagtcccagaagaatatggtggcctgggcttctccaacaccatgtactcaagactaggggagatcatcagcatggatgggtccatcactgtgaccctggcagcgcaccaggctattggcctcaaggggatcatcttggctggcactgaggagcagaaagccaaatacttgcctaaactggcgtccggggagcacattgcagccttctgcctcacggagccagccagtgggagcgatgcagcctcaatccggagcagagccacactaagtgaagacaagaagcactacatcctcaatggctccaaggtctggattactaatggaggactggccaatatttttactgtgtttgcaaagactgaggtcgttgattctgatggatcagtgaaagacaaaatcacagcattcatagtagaaagagactttggtggagtcactaatgggaaacccgaagataaattaggcattcggggctccaacacttgtgaagtccattttgaaaacaccaagatacctgtggaaaacatccttggagaggtcggagatgggtttaaggtggccatgaacatcctcaacagcggccggttcagcatgggcagcgtcgtggctgggctgctcaagagattgattgaaatgactgctgagtacgcctgcacaaggaaacagtttaacaagaggctcagtgaatttggattgattcaggagaaatttgcactgatggctcagaaggcttacgtcatggagagtatgacctacctcacagcagggatgctggaccaacctggctttcccgactgctccatcgaggcagccatggtgaaggtgttcagctccgaggccgcctggcagtgtgtgagtgaggcgctgcagatcctcgggggcttgggctacacaagggactatccgtacgagcgcatactgcgtgacacccgcatcctcctcatcttcgagggaaccaatgagattctccggatgtacatcgccctgacgggtctgcagcatgccggccgcatcctgactaccaggatccatgagcttaaacaggccaaagtgagcacagtcatggataccgttggccggaggcttcgggactccctgggccgaactgtggacctggggctgacaggcaaccatggagttgtgcaccccagtcttgcggacagtgccaacaagtttgaggagaacacctactgcttcggccggaccgtggagacactgctgctccgctttggcaagaccatcatggaggagcagctggtactgaagcgggtggccaacatcctcatcaacctgtatggcatgacggccgtgctgtcgcgggccagccgctccatccgcattgggctccgcaaccacgaccacgaggttctcttggccaacaccttctgcgtggaagcttacttgcagaatctcttcagcctctctcagctggacaagtatgctccagaaaacctagatgagcagattaagaaagtgtcccagcagatccttgagaagcgagcctatatctgtgcccaccctctggacaggacatgctgaggcaggggacagtgtcccctgctaccgcccgcccctacccatggcccgttgctggatgactgttactcttttttcagaaggtgttgggattatcacaggttaagccttttgttccccgtctgcacctgaagggttgtcgcctggcctgggagagcctcttccaggttttgacctgcaggcagtgctctctaacaggaccatcacagcttctgaactgagccggagagagagaatggaattgctgacccctggaactggcgggtattctggtcattgaggagacaccatagtggaaactggggcttatgctgctgcctccagggtgtgaggtgggtggggacctgtgtcaggtgtggatagccatttctgctcaaccacacattctctaagaaacagcttgaaagctctgtctgggtcattcatttaaactagaagcagaggcacttaaaacatgtaccaggaaccatttaacaaagaatataaaatgtcacaatctgtgtactgtta

SEQ ID NO: 55089 - DNA, 2492 bp, Homo sapiens
cgcgcaagcgcagtgagtactgcacgttgtcgcgggccagtaacgtcatcagacgtgtgtgtgtccctgcggcgctaagaaggggagactgaggctgaggctggggaacatcgggcagcatgagcggctgcgggctcttcctgcgcaccacggctgcggctcgtgcctgccggggtctggtggtctctaccgcgaaccggcggctactgcgcaccagcccgcctgtacgagctttcgccaaagagcttttcctaggcaaaatcaagaagaaagaagttttcccatttccagaagttagccaagatgaacttaatgaaatcaatcagttcttgggacccgtggaaaaattcttcactgaagaggtggactcccgaaaaattgaccaggaagggaaaatcccagatgaaactttggagaaattgaagagcctagggctttttgggctgcaagtcccagaagaatatggtggcctgggcttctccaacaccatgtactcaagactaggggagatcatcagcatggatgggtccatcactgtgaccctggcagcgcaccaggctattggcctcaaggggatcatcttggctggcactgaggagcagaaagccaaatacttgcctaaactggcgtccggggagcacattgcagccttctgcctcacggagccagccagtgggagcgatgcagcctcaatccggagcagagccacactaagtgaagacaagaagcactacatcctcaatggctccaaggtctggattactaatggaggactggccaatatttttactgtgtttgcaaagactgaggtcgttgattctgatggatcagtgaaagacaaaatcacagcattcatagtagaaagagactttggtggagtcactaatgggaaacccgaagataaattaggcattcggggctccaacacttgtgaagtccattttgaaaacaccaagatacctgtggaaaacatccttggagaggtcggagatgggtttaaggtggccatgaacatcctcaacagcggccggttcagcatgggcagcgtcgtggctgggctgctcaagagattgattgaaatgactgctgagtacgcctgcacaaggaaacagtttaacaagaggctcagtgaatttggattgattcaggagaaatttgcactgatggctcagaaggcttacgtcatggagagtatgacctacctcacagcagggatgctggaccaacctggctttcccgactgctccatcgaggcagccatggtgaaggtgttcagctccgaggccgcctggcagtgtgtgagtgaggcgctgcagatcctcgggggcttgggctacacaagggactatccgtacgagcgcatactgcgtgacacccgcatcctcctcatcttcgagggaaccaatgagattctccggatgtacatcgccctgacgggtctgcagcatgccggccgcatcctgactaccaggatccatgagcttaaacaggccaaagtgagcacagtcatggataccgttggccggaggcttcgggactccctgggccgaactgtggacctggggctgacaggcaaccatggagttgtgcaccccagtcttgcggacagtgccaacaagtttgaggagaacacctactgcttcggccggaccgtggagacactgctgctccgctttggcaagaccatcatggaggagcagctggtactgaagcgggtggccaacatcctcatcaacctgtatggcatgacggccgtgctgtcgcgggccagccgctccatccgcattgggctccgcaaccacgaccacgaggttctcttggccaacaccttctgcgtggaagcttacttgcagaatctcttcagcctctctcagctggacaagtatgctccagaaaacctagatgagcagattaagaaagtgtcccagcagatccttgagaagcgagcctatatctgtgcccaccctctggacaggacatgctgaggcaggggacagtgtcccctgctaccgcccgcccctacccatggcccgttgctggatgactgttactcttttttcagaaggtgttgggattatcacaggttaagccttttgttccccgtctgcacctgaagggttgtcgcctggcctgggagagcctcttccaggttttgacctgcaggcagtgctctctaacaggaccatcacagcttctgaactgagccggagagagagaatggaattgctgacccctggaactggcgggtattctggtcattgaggagacaccatagtggaaactggggcttatgctgctgcctccagggtgtgaggtgggtggggacctgtgtcaggtgtggatagccatttctgctcaaccacacattctctaagaaacagcttgaaagctctgtctgggtcattcatttaaactagaagcagaggcacttaaaacatgtaccaggaaccatttaacaaagaatataaaatgtcacaatctgtgtactgtta

SEQ ID NO: 55090 - DNA, 2568 bp, Homo sapiens
cgcgcaagcgcagtgagtactgcacgttgtcgcgggccagtaacgtcatcagacgtgtgtgtgtccctgcggcgctaagaaggggagactgaggctgaggctggggaacatcgggcagcatgagcggctgcgggctcttcctgcgcaccacggctgcggctcgtgcctgccggggtctggtggtctctaccgcgaaccggcggctactgcgcaccagcccgcctgtacgagctttcgccaaagagcttttcctaggcaaaatcaagaagaaagaagttttcccatttccagaagttagccaagatgaacttaatgaaatcaatcagttcttgggacccgtggaaaaattcttcactgaagaggtggactcccgaaaaattgaccaggaagggaaaatcccagatgaaactttggagaaattgaagagcctagggctttttgggctgcaagtcccagaagaatatggtggcctgggcttctccaacaccatgtactcaagactaggggagatcatcagcatggatgggtccatcactgtgaccctggcagcgcaccaggctattggcctcaaggggatcatcttggctggcactgaggagcagaaagccaaatacttgcctaaactggcgtccggggagcacattgcagccttctgcctcacggagccagccagtgggagcgatgcagcctcaatccggagcagagccacactaagtgaagacaagaagcactacatcctcaatggctccaagggtcccgctctgtcacccaggctggagtgcagtggcacgatcttggctcactgcagcctcaacttcctgggctcaggtctggattactaatggaggactggccaatatttttactgtgtttgcaaagactgaggtcgttgattctgatggatcagtgaaagacaaaatcacagcattcatagtagaaagagactttggtggagtcactaatgggaaacccgaagataaattaggcattcggggctccaacacttgtgaagtccattttgaaaacaccaagatacctgtggaaaacatccttggagaggtcggagatgggtttaaggtggccatgaacatcctcaacagcggccggttcagcatgggcagcgtcgtggctgggctgctcaagagattgattgaaatgactgctgagtacgcctgcacaaggaaacagtttaacaagaggctcagtgaatttggattgattcaggagaaatttgcactgatggctcagaaggcttacgtcatggagagtatgacctacctcacagcagggatgctggaccaacctggctttcccgactgctccatcgaggcagccatggtgaaggtgttcagctccgaggccgcctggcagtgtgtgagtgaggcgctgcagatcctcgggggcttgggctacacaagggactatccgtacgagcgcatactgcgtgacacccgcatcctcctcatcttcgagggaaccaatgagattctccggatgtacatcgccctgacgggtctgcagcatgccggccgcatcctgactaccaggatccatgagcttaaacaggccaaagtgagcacagtcatggataccgttggccggaggcttcgggactccctgggccgaactgtggacctggggctgacaggcaaccatggagttgtgcaccccagtcttgcggacagtgccaacaagtttgaggagaacacctactgcttcggccggaccgtggagacactgctgctccgctttggcaagaccatcatggaggagcagctggtactgaagcgggtggccaacatcctcatcaacctgtatggcatgacggccgtgctgtcgcgggccagccgctccatccgcattgggctccgcaaccacgaccacgaggttctcttggccaacaccttctgcgtggaagcttacttgcagaatctcttcagcctctctcagctggacaagtatgctccagaaaacctagatgagcagattaagaaagtgtcccagcagatccttgagaagcgagcctatatctgtgcccaccctctggacaggacatgctgaggcaggggacagtgtcccctgctaccgcccgcccctacccatggcccgttgctggatgactgttactcttttttcagaaggtgttgggattatcacaggttaagccttttgttccccgtctgcacctgaagggttgtcgcctggcctgggagagcctcttccaggttttgacctgcaggcagtgctctctaacaggaccatcacagcttctgaactgagccggagagagagaatggaattgctgacccctggaactggcgggtattctggtcattgaggagacaccatagtggaaactggggcttatgctgctgcctccagggtgtgaggtgggtggggacctgtgtcaggtgtggatagccatttctgctcaaccacacattctctaagaaacagcttgaaagctctgtctgggtcattcatttaaactagaagcagaggcacttaaaacatgtaccaggaaccatttaacaaagaatataaaatgtcacaatctgtgtactgtta

SEQ ID NO: 55091 - DNA, 3067 bp, Homo sapiens
  misc_feature (2)..(2): n is a, c, g, or t
  misc_feature (4)..(4): n is a, c, g, or t
  misc_feature (7)..(7): n is a, c, g, or t
  misc_feature (9)..(9): n is a, c, g, or t
  misc_feature (2093)..(2093): n is a, c, g, or t
gncncgngnagtaacgtcatcagacgtgtgtgtccctgcggcgctaagaagtaagaaggggagactgaggctgaggctggggaacatcgggcagcatgagcggctgcgggctcttcctgcgcaccacggctgcggctcgtgcctgccggggtctggtggtctctaccgcgaaccggcggctactgcgcaccagcccgcctgtacgagctttcgccaaagagcttttcctaggcaaaatcaagaagaaagaagttttcccatttccagaagttagccaagatgaacttaatgaaatcaatcagttcttgggacccgtggaaaaattcttcactgaagaggtggactcccgaaaaattgaccaggaagggaaaatcccagatgaaactttggagaaattgaagagcctagggctttttgggctgcaagtcccagaagaatatggtggcctgggcttctccaacaccatgtactcaagactaggggagatcatcagcatggatgggtccatcactgtgaccctggcagcgcaccaggctattggcctcaaggggatcatcttggctggcactgaggagcagaaagccaaatacttgcctaaactggcgtccggggagcacattgcagccttctgcctcacggagccagccagtgggagcgatgcagcctcaatccggagcagagccacactaagtgaagacaagaagcactacatcctcaatggctccaaggtctggattactaatggaggactggccaatatttttactgtgtttgcaaagactgaggtcgttgattctgatggatcagtgaaagacaaaatcacagcattcatagtagaaagagactttggtggagtcactaatgggaaacccgaagataaattaggcattcggggctccaacacttgtgaagtccattttgaaaacaccaagatacctgtggaaaacatccttggagaggtcggagatgggtttaaggtggccatgaacatcctcaacagcggccggttcagcatgggcagcgtcgtggctgggctgctcaagagattgattgaaatgactgctgagtacgcctgcacaaggaaacagtttaacaagaggctcagtgaatttggattgattcaggagaaatttgcactgatggctcagaaggcttacgtcatggagagtatgacctacctcacagcagggatgctggaccaacctggctttcccgactgctccatcgaggcagccatggtgaaggtgttcagctccgaggccgcctggcagtgtgtgagtgaggcgctgcagatcctcgggggcttgggctacacaagggactatccgtacgagcgcatactgcgtgacacccgcatcctcctcatcttcgagggaaccaatgagattctccggatgtacatcgccctgacgggtctgcagcatgccggccgcatcctgactaccaggatccatgagcttaaacaggccaaagtgagcacagtcatggataccgttggccggaggcttcgggactccctgggccgaactgtggacctggggctgacaggcaaccatggagttgtgcaccccagtcttgcggacagtgccaacaagtttgaggagaacacctactgcttcggccggaccgtggagacactgctgctccgctttggcaaggtaaccaggccctcccaggcctgggtcgcaagcggtcctccaatttggccagcattcatgagactactttttgtcaagcatcctttgggaccaggcctagaacagaaatgttgatcaccctggagggatggggtggtgaggtcaggctgactttgtcagcctggggcccacttagctactcggatgggtacccttgctgggtgagttttctgcagtgtttttctgtgcacctttcaggtagagaggctccctagaatcgggagggcagctccacctggggcctgaatctagggacctgattggtggggcccttgctgctgaaggtggcagtagcacagtaagcactggcttctggtctcagccaagcttctgggacctggtcttgccttaacccctccctgaatctagagctcaaagagaagggaaaacagaagntggctgggagccgttctcccacaacctgaagagaaaggtgttattgactccactttctcaaggaacacaggagactaagacaggcaaagatgcagcccagggagggaccatgtgggggactggtctaggtagtgagtccccacttggagcctctgtgatcccagaccatcatggaggagcagctggtactgaagcgggtggccaacatcctcatcaacctgtatggcatgacggccgtgctgtcgcgggccagccgctccatccgcattgggctccgcaaccacgaccacgaggttctcttggccaacaccttctgcgtggaagcttacttgcagaatctcttcagcctctctcagctggacaagtatgctccagaaaacctagatgagcagattaagaaagtgtcccagcagatccttgagaagcgagcctatatctgtgcccaccctctggacaggacatgctgaggcaggggacagtgtcccctgctaccgcccgcccctacccatggcccgttgctggatgactgttactcttttttcagaaggtgttgggattatcacaggttaagccttttgttccccgtctgcacctgaagggttgtcgcctggcctgggagagcctcttccaggttttgacctgcaggcagtgctctctaacaggaccatcacagcttctgaactgagccggagagagagaatggaattgctgacccctggaactggcgggtattctggtcattgaggagacaccatagtggaaactggggcttatgctgctgcctccagggtgtgaggtgggtggggacctgtgtcaggtgtggatagccatttctgctcaaccacacattctctaagaaacagcttgaaagctctgtctgggtcattcatttaaactagaagcagaggcacttaaaacatgtaccaggaaccatttaacaaagaatataaaatgtcacaatctgtgtactgtta

SEQ ID NO: 55092 - DNA, 1898 bp, Homo sapiens
atcagtaatgctacttatgaacattcatgtcaagttttaatgtggaaataacgttttcaggtattttgatttatgcctaaaagtagaatttctgtttggcccaagttggtcttgaactcctgggctcaagcgatcctcttgccttggccttccaaaatgctggtactacaggtgggagccaccatgcccagctctggcatggtcctttggaataacgttcagtggtcttgtgtgtggggatgttggtagagctgcaacagtgactgaaccaccttgttctgaggcattaggatggtgctttctcccagcttgagggaaggcaagctgatccacctggcctggtttcgttgcggcctcctccctctgcctccttcagggcccctgggctctccctgttctccctgcaggtggccatgaacatcctcaacagcggccggttcagcatgggcagcgtcgtggctgggctgctcaagagattgattgaaatgactgctgagtacgcctgcacaaggaaacagtttaacaagaggctcagtgaatttggattgattcaggagaaatttgcactgatggctcagaaggcttacgtcatggagagtatgacctacctcacagcagggatgctggaccaacctggctttcccgactgctccatcgaggcagccatggtgaaggtgttcagctccgaggccgcctggcagtgtgtgagtgaggcgctgcagatcctcgggggcttgggctacacaagggactatccgtacgagcgcatactgcgtgacacccgcatcctcctcatcttcgagggaaccaatgagattctccggatgtacatcgccctgacgggtctgcagcatgccggccgcatcctgactaccaggatccatgagcttaaacaggccaaagtgagcacagtcatggataccgttggccggaggcttcgggactccctgggccgaactgtggacctggggctgacaggcaaccatggagttgtgcaccccagtcttgcggacagtgccaacaagtttgaggagaacacctactgcttcggccggaccgtggagacactgctgctccgctttggcaagaccatcatggaggagcagctggtactgaagcgggtggccaacatcctcatcaacctgtatggcatgacggccgtgctgtcgcgggccagccgctccatccgcattgggctccgcaaccacgaccacgaggttctcttggccaacaccttctgcgtggaagcttacttgcagaatctcttcagcctctctcagctggacaagtatgctccagaaaacctagatgagcagattaagaaagtgtcccagcagatccttgagaagcgagcctatatctgtgcccaccctctggacaggacatgctgaggcaggggacagtgtcccctgctaccgcccgcccctacccatggcccgttgctggatgactgttactcttttttcagaaggtgttgggattatcacaggttaagccttttgttccccgtctgcacctgaagggttgtcgcctggcctgggagagcctcttccaggttttgacctgcaggcagtgctctctaacaggaccatcacagcttctgaactgagccggagagagagaatggaattgctgacccctggaactggcgggtattctggtcattgaggagacaccatagtggaaactggggcttatgctgctgcctccagggtgtgaggtgggtggggacctgtgtcaggtgtggatagccatttctgctcaaccacacattctctaagaaacagcttgaaagctctgtctgggtcattcatttaaactagaagcagaggcacttaaaacatgtaccaggaaccatttaacaaagaatataaaatgtcacaatctgtgtactgtta

SEQ ID NO: 55093 - DNA, 1733 bp, Homo sapiens
  misc_feature (2)..(2): n is a, c, g, or t
  misc_feature (4)..(4): n is a, c, g, or t
  misc_feature (7)..(7): n is a, c, g, or t
  misc_feature (9)..(9): n is a, c, g, or t
  misc_feature (1589)..(1589): n is a, c, g, or t
  misc_feature (1594)..(1595): n is a, c, g, or t
  misc_feature (1599)..(1599): n is a, c, g, or t
  misc_feature (1611)..(1611): n is a, c, g, or t
  misc_feature (1618)..(1618): n is a, c, g, or t
  misc_feature (1620)..(1620): n is a, c, g, or t
  misc_feature (1624)..(1624): n is a, c, g, or t
  misc_feature (1629)..(1629): n is a, c, g, or t
gncncgngnagtaacgtcatcagacgtgtgtgtccctgcggcgctaagaagtaagaaggggagactgaggctgaggctggggaacatcgggcagcatgagcggctgcgggctcttcctgcgcaccacggctgcggctcgtgcctgccggggtctggtggtctctaccgcgaaccggcggctactgcgcaccagcccgcctgtacgagctttcgccaaagagcttttcctaggcaaaatcaagaagaaagaagttttcccatttccagaagttagccaagatgaacttaatgaaatcaatcagttcttgggacccgtggaaaaattcttcactgaagaggtggactcccgaaaaattgaccaggaagggaaaatcccagatgaaactttggagaaattgaagagcctagggctttttgggctgcaagtcccagaagaatatggtggcctgggcttctccaacaccatgtactcaagactaggggagatcatcagcatggatgggtccatcactgtgaccctggcagcgcaccaggctattggcctcaaggggatcatcttggctggcactgaggagcagaaagccaaatacttgcctaaactggcgtccggggagcacattgcagccttctgcctcacggagccagccagtgggagcgatgcagcctcaatccggagcagagccacactaagtgaagacaagaagcactacatcctcaatggctccaaggtctggattactaatggaggactggccaatatttttactgtgtttgcaaagactgaggtcgttgattctgatggatcagtgaaagacaaaatcacagcattcatagtagaaagagactttggtggagtcactaatgggaaacccgaagataaattaggcattcggggctccaacacttgtgaagtccattttgaaaacaccaagatacctgtggaaaacatccttggagaggtcggagatgggtttaaggtggccatgaacatcctcaacagcggccggttcagcatgggcagcgtcgtggctgggctgctcaagagattgattgaaatgactgctgagtacgcctgcacaaggaaacagtttaacaagaggctcagtgaatttggattgattcaggagaaatttgcactgatggctcagaaggcttacgtcatggagagtatgacctacctcacagcagggatgctggaccaacctggctttcccgactgctccatcgaggcagccatggtgaaggtgttcagctccgaggccgcctggcagtgtgtgagtgaggcgctgcagatcctcgggggcttgggctacacaagggactatccgtacgagcgcatactgcgtgacacccgcatcctcctcatcttcgagggaaccaatgagattctccggatgtacatcgccctgacgggtctgcagcatgccggccgcatcctgactaccaggatccatgagcttaaacaggccaaagtgagcacagtcatggataccgttggccggaggcttcgggactccctgggccgaactgtggacctggggctgacaggcaaccatggagttgtgcaccccagtcttgcgacgtgcccnagttnngggnacactactgttnggcgacngngacntgtgnccgttggagactctggggggtgtgttggggggggccatccttcacgttgtaggggggggcggccgcccctgccccccgttgccttggtggtccccggtcacata

SEQ ID NO: 55094 - DNA, 1405 bp, Homo sapiens
agcaggctggtaccggcccgagtggttaggatctgcggcgctaagtaagaaggggagactgaggctgaggctggggaacatcgggcagcatgagcggctgcgggctcttcctgcgcaccacggctgcggctcgtgcctgccggggtctggtggtctctaccgcgaaccggcggctactgcgcaccagcccgcctgtacgagctttcgccaaagagcttttcctaggcaaaatcaagaaggtaacgcgagccctgggcgaacccttgctgtctggctcccgcttttcaccctcagctgcaagactggtgttgaactttgtgagattccccaaacctgccagagagatacaccctgcggccgaggcgtgttaacactccggattcctgagttccaggaaaaccttcccagagaaaggtggactcccgaaaaattgaccaggaagggaaaatcccagatgaaactttggagaaattgaagagcctagggctttttgggctgcaagtcccagaagaatatggtggcctgggcttctccaacaccatgtactcaagactaggggagatcatcagcatggatgggtccatcactgtgaccctggcagcgcaccaggctattggcctcaaggggatcatcttggctggcactgaggagcagaaagccaaatacttgcctaaactggcgtccggggagcacattgcagccttctgcctcacggagccagccagtgggagcgatgcagcctcaatccggagcagagccacactaagtgaagacaagaagcactacatcctcaatggctccaaggtctggattactaatggaggactggccaatatttttactgtgtttgcaaagactgaggtcgttgattctgatggatcagtgaaagacaaaatcacagcattcatagtagaaagagactttggtggagtcactaatgggaaacccgaagataaattaggcattcggggctccaacacttgtgaagtccattttgaaaacaccaagatacctgtggaaaacatccttggagaggtcggagatgggtttaaggtggccatgaacatccctccacagtcgcgccggatacacgcactgggcagaggtccgatgagcatggccttgatcaagacgaatgatagaactgaactgctgactacccctgcaccacggaaacagataaccagaaggctcagcgcgaagattggtacttggactccacgcacacacaattgggcccctgcattgtaactcacaacacgcatatccggtcatcgtacagctaatgaccctacctcaccattaggtgatttctgtcccaaactggatattcccccctgttcacacgcacgacccactgtcagatggtagtcagtacaaggactcccgtgctcgttcgaaatag

SEQ ID NO: 55095 - DNA, 219 bp, Homo sapiens
ggctctgcctgtggccgcttgctctgagttcttgctgtcttctcttgcccgaagtaaatatttgcctcagaaaggaaatgtttcacaaacacctcatgctctcctttctccccacagctgacattagtctgtgtctgttttgtttaggggatcatcttggctggcactgaggagcagaaagccaaatacttgcctaaactggcgtccggggagcacatt

SEQ ID NO: 55096 - DNA, 661 bp, Homo sapiens
catgttatgggtgagaaaggggtagtttagagagctgaagggatttggtgaaggccacataatgagtaagcctgaaatcaaggaccagacccccaggcttctaaatgttagtcttgggctccttgtttcatgggactattatcatcccttgtactgagaaggaaaactgatgaaaatcgggaagaacctatttgaacaggggagggagatggatgtgggtggtggagcctgcacatagtttctgtatctcaggaaccttgtgaggtttgctttccagttccttcagtacgtcatgtcccgctggccagggtggagtggagcacatgtttttccttcccttttaactgatatttccgtgatgggagtgtgctaaaaattaaattttttagaaaatatttactatttttagaaagaagttttcccatttccagaagttagccaagatgaacttaatgaaatcaatcagttcttgggacccgtggaaaaattcttcactgaagagggtatgtatggttttctttaccattgccgatttccattgtaagggctatttggttgatatttatattagaagtgacatacataggagaagtcttcttgagggagaaatggtttccactcataatattttgctttaggtttcatccctattgccatttaa

SEQ ID NO: 55097 - DNA, 2468 bp, Homo sapiens
  misc_feature (2)..(2): n is a, c, g, or t
  misc_feature (4)..(4): n is a, c, g, or t
  misc_feature (7)..(7): n is a, c, g, or t
  misc_feature (9)..(9): n is a, c, g, or t
gncncgngnagtaacgtcatcagacgtgtgtgtccctgcggcgctaagaagtaagaaggggagactgaggctgaggctggggaacatcgggcagcatgagcggctgcgggctcttcctgcgcaccacggctgcggctcgtgcctgccggggtctggtggtctctaccgcgaaccggcggctactgcgcaccagcccgcctgtacgagctttcgccaaagagcttttcctaggcaaaatcaagaagaaagaagttttcccatttccagaagttagccaagatgaacttaatgaaatcaatcagttcttgggacccgtggaaaaattcttcactgaagaggtggactcccgaaaaattgaccaggaagggaaaatcccagatgaaactttggagaaattgaagagcctagggctttttgggctgcaagtcccagaagaatatggtggcctgggcttctccaacaccatgtactcaagactaggggagatcatcagcatggatgggtccatcactgtgaccctggcagcgcaccaggctattggcctcaaggggatcatcttggctggcactgaggagcagaaagccaaatacttgcctaaactggcgtccggggagcacattgcagccttctgcctcacggagccagccagtgggagcgatgcagcctcaatccggagcagagccacactaagtgaagacaagaagcactacatcctcaatggctccaaggtctggattactaatggaggactggccaatatttttactgtgtttgcaaagactgaggtcgttgattctgatggatcagtgaaagacaaaatcacagcattcatagtagaaagagactttggtggagtcactaatgggaaacccgaagataaattaggcattcggggctccaacacttgtgaagtccattttgaaaacaccaagatacctgtggaaaacatccttggagaggtcggagatgggtttaaggtggccatgaacatcctcaacagcggccggttcagcatgggcagcgtcgtggctgggctgctcaagagattgattgaaatgactgctgagtacgcctgcacaaggaaacagtttaacaagaggctcagtgaatttggattgattcaggagaaatttgcactgatggctcagaaggcttacgtcatggagagtatgacctacctcacagcagggatgctggaccaacctggctttcccgactgctccatcgaggcagccatggtgaaggtgttcagctccgaggccgcctggcagtgtgtgagtgaggcgctgcagatcctcgggggcttgggctacacaagggactatccgtacgagcgcatactgcgtgacacccgcatcctcctcatcttcgagggaaccaatgagattctccggatgtacatcgccctgacgggtctgcagcatgccggccgcatcctgactaccaggatccatgagcttaaacaggccaaagtgagcacagtcatggataccgttggccggaggcttcgggactccctgggccgaactgtggacctggggctgacaggcaaccatggagttgtgcaccccagtcttgcggacagtgccaacaagtttgaggagaacacctactgcttcggccggaccgtggagacactgctgctccgctttggcaagaccatcatggaggagcagctggtactgaagcgggtggccaacatcctcatcaacctgtatggcatgacggccgtgctgtcgcgggccagccgctccatccgcattgggctccgcaaccacgaccacgaggttctcttggccaacaccttctgcgtggaagcttacttgcagaatctcttcagcctctctcagctggacaagtatgctccagaaaacctagatgagcagattaagaaagtgtcccagcagatccttgagaagcgagcctatatctgtgcccaccctctggacaggacatgctgaggcaggggacagtgtcccctgctaccgcccgcccctacccatggcccgttgctggatgactgttactcttttttcagaaggtgttgggattatcacaggttaagccttttgttccccgtctgcacctgaagggttgtcgcctggcctgggagagcctcttccaggttttgacctgcaggcagtgctctctaacaggaccatcacagcttctgaactgagccggagagagagaatggaattgctgacccctggaactggcgggtattctggtcattgaggagacaccatagtggaaactggggcttatgctgctgcctccagggtgtgaggtgggtggggacctgtgtcaggtgtggatagccatttctgctcaaccacacattctctaagaaacagcttgaaagctctgtctgggtcattcatttaaactagaagcagaggcacttaaaacatgtaccaggaaccatttaacaaagaatataaaatgtcacaatctgtgtactgtta

SEQ ID NO: 55098 - DNA, 2462 bp, Homo sapiens
agcaggctggtaccggcccgagtggttaggatctgcggcgctaagtaagaaggggagactgaggctgaggctggggaacatcgggcagcatgagcggctgcgggctcttcctgcgcaccacggctgcggctcgtgcctgccggggtctggtggtctctaccgcgaaccggcggctactgcgcaccagcccgcctgtacgagctttcgccaaagagcttttcctaggcaaaatcaagaagaaagaagttttcccatttccagaagttagccaagatgaacttaatgaaatcaatcagttcttgggacccgtggaaaaattcttcactgaagaggtggactcccgaaaaattgaccaggaagggaaaatcccagatgaaactttggagaaattgaagagcctagggctttttgggctgcaagtcccagaagaatatggtggcctgggcttctccaacaccatgtactcaagactaggggagatcatcagcatggatgggtccatcactgtgaccctggcagcgcaccaggctattggcctcaaggggatcatcttggctggcactgaggagcagaaagccaaatacttgcctaaactggcgtccggggagcacattgcagccttctgcctcacggagccagccagtgggagcgatgcagcctcaatccggagcagagccacactaagtgaagacaagaagcactacatcctcaatggctccaaggtctggattactaatggaggactggccaatatttttactgtgtttgcaaagactgaggtcgttgattctgatggatcagtgaaagacaaaatcacagcattcatagtagaaagagactttggtggagtcactaatgggaaacccgaagataaattaggcattcggggctccaacacttgtgaagtccattttgaaaacaccaagatacctgtggaaaacatccttggagaggtcggagatgggtttaaggtggccatgaacatcctcaacagcggccggttcagcatgggcagcgtcgtggctgggctgctcaagagattgattgaaatgactgctgagtacgcctgcacaaggaaacagtttaacaagaggctcagtgaatttggattgattcaggagaaatttgcactgatggctcagaaggcttacgtcatggagagtatgacctacctcacagcagggatgctggaccaacctggctttcccgactgctccatcgaggcagccatggtgaaggtgttcagctccgaggccgcctggcagtgtgtgagtgaggcgctgcagatcctcgggggcttgggctacacaagggactatccgtacgagcgcatactgcgtgacacccgcatcctcctcatcttcgagggaaccaatgagattctccggatgtacatcgccctgacgggtctgcagcatgccggccgcatcctgactaccaggatccatgagcttaaacaggccaaagtgagcacagtcatggataccgttggccggaggcttcgggactccctgggccgaactgtggacctggggctgacaggcaaccatggagttgtgcaccccagtcttgcggacagtgccaacaagtttgaggagaacacctactgcttcggccggaccgtggagacactgctgctccgctttggcaagaccatcatggaggagcagctggtactgaagcgggtggccaacatcctcatcaacctgtatggcatgacggccgtgctgtcgcgggccagccgctccatccgcattgggctccgcaaccacgaccacgaggttctcttggccaacaccttctgcgtggaagcttacttgcagaatctcttcagcctctctcagctggacaagtatgctccagaaaacctagatgagcagattaagaaagtgtcccagcagatccttgagaagcgagcctatatctgtgcccaccctctggacaggacatgctgaggcaggggacagtgtcccctgctaccgcccgcccctacccatggcccgttgctggatgactgttactcttttttcagaaggtgttgggattatcacaggttaagccttttgttccccgtctgcacctgaagggttgtcgcctggcctgggagagcctcttccaggttttgacctgcaggcagtgctctctaacaggaccatcacagcttctgaactgagccggagagagagaatggaattgctgacccctggaactggcgggtattctggtcattgaggagacaccatagtggaaactggggcttatgctgctgcctccagggtgtgaggtgggtggggacctgtgtcaggtgtggatagccatttctgctcaaccacacattctctaagaaacagcttgaaagctctgtctgggtcattcatttaaactagaagcagaggcacttaaaacatgtaccaggaaccatttaacaaagaatataaaatgtcacaatctgtgtactgtta

SEQ ID NO: 55099 - DNA, 2446 bp, Homo sapiens
  misc_feature (2)..(2): n is a, c, g, or t
  misc_feature (4)..(4): n is a, c, g, or t
  misc_feature (7)..(7): n is a, c, g, or t
  misc_feature (9)..(9): n is a, c, g, or t
gncncgngnagtaacgtcatcagacgtgtgtgtccctgcggcgctaagaagtaagaaggggagactgaggctgaggctggggaacatcgggcagcatgagcggctgcgggctcttcctgcgcaccacggctgcggctcgtgcctgccggggtctggtggtctctaccgcgaaccggcggctactgcgcaccagcccgcctgtacgagctttcgccaaagagcttttcctaggcaaaatcaagaagaagttagccaagatgaacttaatgaaatcaatcagttcttgggacccgtggaaaaattcttcactgaagaggtggactcccgaaaaattgaccaggaagggaaaatcccagatgaaactttggagaaattgaagagcctagggctttttgggctgcaagtcccagaagaatatggtggcctgggcttctccaacaccatgtactcaagactaggggagatcatcagcatggatgggtccatcactgtgaccctggcagcgcaccaggctattggcctcaaggggatcatcttggctggcactgaggagcagaaagccaaatacttgcctaaactggcgtccggggagcacattgcagccttctgcctcacggagccagccagtgggagcgatgcagcctcaatccggagcagagccacactaagtgaagacaagaagcactacatcctcaatggctccaaggtctggattactaatggaggactggccaatatttttactgtgtttgcaaagactgaggtcgttgattctgatggatcagtgaaagacaaaatcacagcattcatagtagaaagagactttggtggagtcactaatgggaaacccgaagataaattaggcattcggggctccaacacttgtgaagtccattttgaaaacaccaagatacctgtggaaaacatccttggagaggtcggagatgggtttaaggtggccatgaacatcctcaacagcggccggttcagcatgggcagcgtcgtggctgggctgctcaagagattgattgaaatgactgctgagtacgcctgcacaaggaaacagtttaacaagaggctcagtgaatttggattgattcaggagaaatttgcactgatggctcagaaggcttacgtcatggagagtatgacctacctcacagcagggatgctggaccaacctggctttcccgactgctccatcgaggcagccatggtgaaggtgttcagctccgaggccgcctggcagtgtgtgagtgaggcgctgcagatcctcgggggcttgggctacacaagggactatccgtacgagcgcatactgcgtgacacccgcatcctcctcatcttcgagggaaccaatgagattctccggatgtacatcgccctgacgggtctgcagcatgccggccgcatcctgactaccaggatccatgagcttaaacaggccaaagtgagcacagtcatggataccgttggccggaggcttcgggactccctgggccgaactgtggacctggggctgacaggcaaccatggagttgtgcaccccagtcttgcggacagtgccaacaagtttgaggagaacacctactgcttcggccggaccgtggagacactgctgctccgctttggcaagaccatcatggaggagcagctggtactgaagcgggtggccaacatcctcatcaacctgtatggcatgacggccgtgctgtcgcgggccagccgctccatccgcattgggctccgcaaccacgaccacgaggttctcttggccaacaccttctgcgtggaagcttacttgcagaatctcttcagcctctctcagctggacaagtatgctccagaaaacctagatgagcagattaagaaagtgtcccagcagatccttgagaagcgagcctatatctgtgcccaccctctggacaggacatgctgaggcaggggacagtgtcccctgctaccgcccgcccctacccatggcccgttgctggatgactgttactcttttttcagaaggtgttgggattatcacaggttaagccttttgttccccgtctgcacctgaagggttgtcgcctggcctgggagagcctcttccaggttttgacctgcaggcagtgctctctaacaggaccatcacagcttctgaactgagccggagagagagaatggaattgctgacccctggaactggcgggtattctggtcattgaggagacaccatagtggaaactggggcttatgctgctgcctccagggtgtgaggtgggtggggacctgtgtcaggtgtggatagccatttctgctcaaccacacattctctaagaaacagcttgaaagctctgtctgggtcattcatttaaactagaagcagaggcacttaaaacatgtaccaggaaccatttaacaaagaatataaaatgtcacaatctgtgtactgtta

SEQ ID NO: 55100 - DNA, 2466 bp, Homo sapiens
  misc_feature (2)..(2): n is a, c, g, or t
  misc_feature (4)..(4): n is a, c, g, or t
  misc_feature (7)..(7): n is a, c, g, or t
  misc_feature (9)..(9): n is a, c, g, or t
gncncgngnagtaacgtcatcagacgtgtgtgtccctgcggcgctaagaagtaagaaggggagactgaggctgaggctggggaacatcgggcagcatgagcggctgcgggctcttcctgcgcaccacggctgcggctcgtgcctgccggggtctggtggtctctaccgcgaaccggcggctactgcgcaccagcccgcctgtacgagctttcgccaaagagcttttcctaggcaaaatcaagaagaaagaagttttcccatttccagaagttagccaagatgaacttaatgaaatcaatcagttcttgggacccgtggaaaaattcttcactgaagaggtggactcccgaaaaattgaccaggaagggaaaatcccagatgaaactttggagaaattgaagagcctagggctttttgggctgcaagtcccagaagaatatggtggcctgggcttctccaacaccatgtactcaagactaggggagatcatcagcatggatgggtccatcactgtgaccctggcagcgcaccaggctattggcctcaaggggatcatcttggctggcactgaggagcagaaagccaaatacttgcctaaactggcgtccggggagcacattgcagccttctgcctcacggagccagccagtgggagcgatgcagcctcaatccggagcagagccacactaagtgaagacaagaagcactacatcctcaatggctccaaggtctggattactaatggaggactggccaatatttttactgtgtttgcaaagactgaggtcgttgattctgatggatcagtgaaagacaaaatcacagcattcatagtagaaagagactttggtggagtcactaatgggaaacccgaagataaattaggcattcggggctccaacacttgtgaagtccattttgaaaacaccaagatacctgtggaaaacatccttggagaggtcggagatgggtttaaggtggccatgaacatcctcaacagcggccggttcagcatgggcagcgtcgtggctgggctgctcaagagattgattgaaatgactgctgagtacgcctgcacaaggaaacagtttaacaagaggctcagtgaatttggattgattcaggagaaatttgcactgatggctcagaaggcttacgtcatggagagtatgacctacctcacagcagggatgctggaccaacctggctttcccgactgctccatcgaggcagccatggtgaaggtgttcagctccgaggccgcctggcagtgtgtgagtgaggcgctgcagatcctcgggggcttgggctacacaagggactatccgtacgagcgcatactgcgtgacacccgcatcctcctcatcttcgagggaaccaatgagattctccggatgtacatcgccctgacgggtctgcagcatgccggccgcatcctgactaccaggatccatgagcttaaacaggccaaagtgagcacagtcatggataccgttggccggaggcttcgggactccctgggccgaactgtggacctggggctgacaggcaaccatggagttgtgcaccccagtcttgcggacagtgccaacaagtttgaggagaacacctactgcttcggccggaccgtggagacactgctgctccgctttggcaagaccatcatggaggagcagctggtactgaagcgggtggccaacatcctcatcaacctgtatggcatgacggccgtgctgtcgcgggccagccgctccatccgcattgggctccgcaaccacgaccacgaggttctcttggccaacaccttctgcgtggaagcttacttgcagaatctcttcagcctctctcagctggacaagtatgctccagaaaacctagatgagcagattaagaaagtgtcccagcagatccttgagaagcgagcctatatctgtgcccaccctctggacaggacatgctgaggcaggggacagtgtcccctgctaccgcccgcccctacccatggcccgttgctggatgactgttactcttttttcagaaggtgttgggattatcacaggttaagccttttgttccccgtctgcacctgaagggttgtcgcctggcctgggagagcctcttccaggttttgacctgcaggcagtgctctctaacaggaccatcacagcttctgaactgagccggagagagagaatggaattgctgacccctggaactggcgggtattctggtcattgaggagacaccatagtggaaactggggcttatgctgctgcctccagggtgtgaggtgggtggggacctgtgtcaggtgtggatagccatttctgctcaaccacacattctctaagaaacagcttgaaagctctgtctgggtcattcatttaaactagaagcagaggcacttaagagatggggggcggggggagggggggggagggggtggaaatgttctattataaaaaa

SEQ ID NO: 55101 - DNA, 1759 bp, Homo sapiens
aattaggctagtacgaggctggggttgaatcggccgaggactggccaatatttttactgtgtttgcaaagactgaggtcgttgattctgatggatcagtgaaagacaaaatcacagcattcatagtagaaagagactttggtggagtcactaatgggaaacccgaagataaattaggcattcggggctccaacacttgtgaagtccattttgaaaacaccaagatacctgtggaaaacatccttggagaggtcggagatgggtttaaggtggccatgaacatcctcaacagcggccggttcagcatgggcagcgtcgtggctgggctgctcaagagattgattgaaatgactgctgagtacgcctgcacaaggaaacagtttaacaagaggctcagtgaatttggattgattcaggagaaatttgcactgatggctcagaaggcttacgtcatggagagtatgacctacctcacagcagggatgctggaccaacctggctttcccgactgctccatcgaggcagccatggtgaaggtgttcagctccgaggccgcctggcagtgtgtgagtgaggcgctgcagatcctcgggggcttgggctacacaagggactatccgtacgagcgcatactgcgtgacacccgcatcctcctcatcttcgagggaaccaatgagattctccggatgtacatcgccctgacgggtctgcagcatgccggccgcatcctgactaccaggatccatgagcttaaacaggccaaagtgagcacagtcatggataccgttggccggaggcttcgggactccctgggccgaactgtggacctggggctgacaggcaaccatggagttgtgcaccccagtcttgcggacagtgccaacaagtttgaggagaacacctactgcttcggccggaccgtggagacactgctgctccgctttggcaagaccatcatggaggagcagctggtactgaagcgggtggccaacatcctcatcaacctgtatggcatgacggccgtgctgtcgcgggccagccgctccatccgcattgggctccgcaaccacgaccacgaggttctcttggccaacaccttctgcgtggaagcttacttgcagaatctcttcagcctctctcagctggacaagtatgctccagaaaacctagatgagcagattaagaaagtgtcccagcagatccttgagaagcgagcctatatctgtgcccaccctctggacaggacatgctgaggcaggggacagtgtcccctgctaccgcccgcccctacccatggcccgttgctggatgactgttactcttttttcagaaggtgttgggattatcacaggttaagccttttgttccccgtctgcacctgaagggttgtcgcctggcctgggagagcctcttccaggttttgacctgcaggcagtgctctctaacaggaccatcacagcttctgaactgagccggagagagagaatggaattgctgacccctggaactggcgggtattctggtcattgaggagacaccatagtggaaactggggcttatgctgctgcctccagggtgtgaggtgggtggggacctgtgtcaggtgtggatagccatttctgctcaaccacacattctctaagaaacagcttgaaagctctgtctgggtcattcatttaaactagaagcagaggcacttaaaacatgtaccaggaaccatttaacaaagaatataaaatgtcacaatctgtgtactgtta

SEQ ID NO: 55102 - DNA, 2572 bp, Homo sapiens
  misc_feature (2)..(2): n is a, c, g, or t
  misc_feature (4)..(4): n is a, c, g, or t
  misc_feature (7)..(7): n is a, c, g, or t
  misc_feature (9)..(9): n is a, c, g, or t
gncncgngnagtaacgtcatcagacgtgtgtgtccctgcggcgctaagaagtaagaaggggagactgaggctgaggctggggaacatcgggcagcatgagcggctgcgggctcttcctgcgcaccacggctgcggctcgtgcctgccggggtctggtggtctctaccgcgaaccggcggctactgcgcaccagcccgcctgtacgagctttcgccaaagagcttttcctaggcaaaatcaagaagaaagaagttttcccatttccagaagttagccaagatgaacttaatgaaatcaatcagttcttgggacccgtggaaaaattcttcactgaagaggtggactcccgaaaaattgaccaggaagggaaaatcccagatgaaactttggagaaattgaagagcctagggctttttgggctgcaagtcccagaagaatatggtggcctgggcttctccaacaccatgtactcaagactaggggagatcatcagcatggatgggtccatcactgtgaccctggcagcgcaccaggctattggcctcaaggggatcatcttggctggcactgaggagcagaaagccaaatacttgcctaaactggcgtccggggagcacattgcagccttctgcctcacggagccagccagtgggagcgatgcagcctcaatccggagcagagccacactaagtgaagacaagaagcactacatcctcaatggctccaagggtcccgctctgtcacccaggctggagtgcagtggcacgatcttggctcactgcagcctcaacttcctgggctcaggtctggattactaatggaggactggccaatatttttactgtgtttgcaaagactgaggtcgttgattctgatggatcagtgaaagacaaaatcacagcattcatagtagaaagagactttggtggagtcactaatgggaaacccgaagataaattaggcattcggggctccaacacttgtgaagtccattttgaaaacaccaagatacctgtggaaaacatccttggagaggtcggagatgggtttaaggtggccatgaacatcctcaacagcggccggttcagcatgggcagcgtcgtggctgggctgctcaagagattgattgaaatgactgctgagtacgcctgcacaaggaaacagtttaacaagaggctcagtgaatttggattgattcagtttcttgtgttttttctgaacactccaggagaaatttgcactgatggctcagaaggcttacgtcatggagagtatgacctacctcacagcagggatgctggaccaacctggctttcccgactgctccatcgaggcagccatggtgaaggtgttcagctccgaggccgcctggcagtgtgtgagtgaggcgctgcagatcctcgggggcttgggctacacaagggactatccgtacgagcgcatactgcgtgacacccgcatcctcctcatcttcgagggaaccaatgagattctccggatgtacatcgccctgacgggtctgcagcatgccggccgcatcctgactaccaggatccatgagcttaaacaggccaaagtgagcacagtcatggataccgttggccggaggcttcgggactccctgggccgaactgtggacctggggctgacaggcaaccatggagttgtgcaccccagtcttgcggacagtgccaacaagtttgaggagaacacctactgcttcggccggaccgtggagacactgctgctccgctttggcaagaccatcatggaggagcagctggtactgaagcgggtggccaacatcctcatcaacctgtatggcatgacggccgtgctgtcgcgggccagccgctccatccgcattgggctccgcaaccacgaccacgaggttctcttggccaacaccttctgcgtggaagcttacttgcagaatctcttcagcctctctcagctggacaagtatgctccagaaaacctagatgagcagattaagaaagtgtcccagcagatccttgagaagcgagcctatatctgtgcccaccctctggacaggacatgctgaggcaggggacagtgtcccctgctaccgcccgcccctacccatggcccgttgctggatgactgttactcttttttcagaaggtgttgggattatcacaggttaagccttttgttccccgtctgcacctgaagggttgtcgcctggcctgggagagcctcttccaggttttgacctgcaggcagtgctctctaacaggaccatcacagcttctgaactgagccggagagagagaatggaattgctgacccctggaactggcgggtattctggtcattgaggagacaccatagtggaaactggggcttatgctgctgcctccagggtgtgaggtgggtggggacctgtgtcaggtgtggatagccatttctgctcaaccacacattctctaagaaacagcttgaaagctctgtctgggtcattcatttaaactagaagcagaggcacttaaaacatgtaccaggaaccatttaacaaagaatataaaatgtcacaatctgtgtactgtta

SEQ ID NO: 55103 - DNA, 1458 bp, Homo sapiens
ctccgccagcataccagcagcgtgaaagtctgtcagaatgatgaaatgactgctgagtacgcctgcacaaggaaacagtttaacaagaggctcagtgaatttggattgattcaggagaaatttgcactgatggctcagaaggcttacgtcatggagagtatgacctacctcacagcagggatgctggaccaacctggctttcccgactgctccatcgaggcagccatggtgaaggtgttcagctccgaggccgcctggcagtgtgtgagtgaggcgctgcagatcctcgggggcttgggctacacaagggactatccgtacgagcgcatactgcgtgacacccgcatcctcctcatcttcgagggaaccaatgagattctccggatgtacatcgccctgacgggtctgcagcatgccggccgcatcctgactaccaggatccatgagcttaaacaggccaaagtgagcacagtcatggataccgttggccggaggcttcgggactccctgggccgaactgtggacctggggctgacaggcaaccatggagttgtgcaccccagtcttgcggacagtgccaacaagtttgaggagaacacctactgcttcggccggaccgtggagacactgctgctccgctttggcaagaccatcatggaggagcagctggtactgaagcgggtggccaacatcctcatcaacctgtatggcatgacggccgtgctgtcgcgggccagccgctccatccgcattgggctccgcaaccacgaccacgaggttctcttggccaacaccttctgcgtggaagcttacttgcagaatctcttcagcctctctcagctggacaagtatgctccagaaaacctagatgagcagattaagaaagtgtcccagcagatccttgagaagcgagcctatatctgtgcccaccctctggacaggacatgctgaggcaggggacagtgtcccctgctaccgcccgcccctacccatggcccgttgctggatgactgttactcttttttcagaaggtgttgggattatcacaggttaagccttttgttccccgtctgcacctgaagggttgtcgcctggcctgggagagcctcttccaggttttgacctgcaggcagtgctctctaacaggaccatcacagcttctgaactgagccggagagagagaatggaattgctgacccctggaactggcgggtattctggtcattgaggagacaccatagtggaaactggggcttatgctgctgcctccagggtgtgaggtgggtggggacctgtgtcaggtgtggatagccatttctgctcaaccacacattctctaagaaacagcttgaaagctctgtctgggtcattcatttaaactagaagcagaggcacttaaaacatgtaccaggaaccatttaacaaagaatataaaatgtcacaatctgtgtactgtta

SEQ ID NO: 55104 - DNA, 1344 bp, Homo sapiens
ttaattgggaacacccattaaccgcggttgcgaagcgaggctacatcgtgcgtaaaattagccctcggtggaaaccaacctggctttcccgactgctccatcgaggcagccatggtgaaggtgttcagctccgaggccgcctggcagtgtgtgagtgaggcgctgcagatcctcgggggcttgggctacacaagggactatccgtacgagcgcatactgcgtgacacccgcatcctcctcatcttcgagggaaccaatgagattctccggatgtacatcgccctgacgggtctgcagcatgccggccgcatcctgactaccaggatccatgagcttaaacaggccaaagtgagcacagtcatggataccgttggccggaggcttcgggactccctgggccgaactgtggacctggggctgacaggcaaccatggagttgtgcaccccagtcttgcggacagtgccaacaagtttgaggagaacacctactgcttcggccggaccgtggagacactgctgctccgctttggcaagaccatcatggaggagcagctggtactgaagcgggtggccaacatcctcatcaacctgtatggcatgacggccgtgctgtcgcgggccagccgctccatccgcattgggctccgcaaccacgaccacgaggttctcttggccaacaccttctgcgtggaagcttacttgcagaatctcttcagcctctctcagctggacaagtatgctccagaaaacctagatgagcagattaagaaagtgtcccagcagatccttgagaagcgagcctatatctgtgcccaccctctggacaggacatgctgaggcaggggacagtgtcccctgctaccgcccgcccctacccatggcccgttgctggatgactgttactcttttttcagaaggtgttgggattatcacaggttaagccttttgttccccgtctgcacctgaagggttgtcgcctggcctgggagagcctcttccaggttttgacctgcaggcagtgctctctaacaggaccatcacagcttctgaactgagccggagagagagaatggaattgctgacccctggaactggcgggtattctggtcattgaggagacaccatagtggaaactggggcttatgctgctgcctccagggtgtgaggtgggtggggacctgtgtcaggtgtggatagccatttctgctcaaccacacattctctaagaaacagcttgaaagctctgtctgggtcattcatttaaactagaagcagaggcacttaaaacatgtaccaggaaccatttaacaaagaatataaaatgtcacaatctgtgtactgtta

SEQ ID NO: 55105 - DNA, 1634 bp, Homo sapiens
  misc_feature (660)..(660): n is a, c, g, or t
catacctggaccttctgcagtgagcttaaacaggccaaagtgagcacagtcatggataccgttggccggaggcttcgggactccctgggccgaactgtggacctggggctgacaggcaaccatggagttgtgcaccccagtcttgcggacagtgccaacaagtttgaggagaacacctactgcttcggccggaccgtggagacactgctgctccgctttggcaaggtaaccaggccctcccaggcctgggtcgcaagcggtcctccaatttggccagcattcatgagactactttttgtcaagcatcctttgggaccaggcctagaacagaaatgttgatcaccctggagggatggggtggtgaggtcaggctgactttgtcagcctggggcccacttagctactcggatgggtacccttgctgggtgagttttctgcagtgtttttctgtgcacctttcaggtagagaggctccctagaatcgggagggcagctccacctggggcctgaatctagggacctgattggtggggcccttgctgctgaaggtggcagtagcacagtaagcactggcttctggtctcagccaagcttctgggacctggtcttgccttaacccctccctgaatctagagctcaaagagaagggaaaacagaagntggctgggagccgttctcccacaacctgaagagaaaggtgttattgactccactttctcaaggaacacaggagactaagacaggcaaagatgcagcccagggagggaccatgtgggggactggtctaggtagtgagtccccacttggagcctctgtgatcccagaccatcatggaggagcagctggtactgaagcgggtggccaacatcctcatcaacctgtatggcatgacggccgtgctgtcgcgggccagccgctccatccgcattgggctccgcaaccacgaccacgaggttctcttggccaacaccttctgcgtggaagcttacttgcagaatctcttcagcctctctcagctggacaagtatgctccagaaaacctagatgagcagattaagaaagtgtcccagcagatccttgagaagcgagcctatatctgtgcccaccctctggacaggacatgctgaggcaggggacagtgtcccctgctaccgcccgcccctacccatggcccgttgctggatgactgttactcttttttcagaaggtgttgggattatcacaggttaagccttttgttccccgtctgcacctgaagggttgtcgcctggcctgggagagcctcttccaggttttgacctgcaggcagtgctctctaacaggaccatcacagcttctgaactgagccggagagagagaatggaattgctgacccctggaactggcgggtattctggtcattgaggagacaccatagtggaaactggggcttatgctgctgcctccagggtgtgaggtgggtggggacctgtgtcaggtgtggatagccatttctgctcaaccacacattctctaagaaacagcttgaaagctctgtctgggtcattcatttaaactagaagcagaggcacttaaaacatgtaccaggaaccatttaacaaagaatataaaatgtcacaatctgtgtactgtta

SEQ ID NO: 55106 - DNA, 413 bp, Homo sapiens
acggctgcggctcgtgcctgccggggtctggtggtctctaccgcgaaccggcggctactgcgcaccagcccgcctgtacgagctttcgccaaagagcttttcctaggcaaaatcaagaaggtaacgcgagccctgggcgaacccttgctgtctggctcccgcttttcaccctcagctgcaagactggtgttgaactttgtgagattccccaaacctgccagagagatacaccctgcggccgaggcgtgttaacactccggattcctgagttccaggaaaaccttcccagagaaagggtgagacatttccaagacgggggacccttggaaatgtggtggtgacgtgttccagctaaattttgtcaggggaattcggaaaactctaggctaggtaattaacaaagcagccttcat

SEQ ID NO: 55107 - DNA, 266 bp, Homo sapiens
cattggctcataccttctgtcctctgatcatatttctgcaacactgtccataaaaatataatttttcctctttctttgggtcttcatttctgaaggcttctgtgtcacataaatttaaattaaataaatgtgtatgcttttctcttgttaatctgtcttgttataggggcctcagccatgaagtttgtgatgggtgaggaaaagctatcactggtccccaacacctttctttgtgctgtgtgccccgcacacaacacatgcttctt

SEQ ID NO: 55108 - DNA, 291 bp, Homo sapiens
cttgggctctttttaaggtcctggtctctctttttttaatatatttttggtttccccagaagccaattccgaggcaaggattaaagttcaagtggggctgggcacggtggctcacgccggtaatcccagcactttgggaggccgaggcgggcagatcacgaggtcaggagtttgagaccagcgtggccaacatggcgaaaccccgtctctactgaaaatacaaaaattagccaggcgtgatggcaggcgcctgtaatcccagctactcaggaggctgaggcaggagaattg

SEQ ID NO: 55109 - DNA, 344 bp, Homo sapiens
tgcatacctttggagagagattaaaatacttgctgaagttaagtcaatattgtcaactagattctaggcctcttgaagatgtgcaccgggtctcagttctctctcccgacctctgtccacatagctccagtctgatggtccacaggcttagtgagtgcatagtgctgagtctgaaggactaaagtgtcaaggacaatgcttgtgccatgccgagagaggtgaaaagagtttgctccagtggctactaaccagaagcgactgagggctaattaacatatattcgacttgtgattctcgatgtgcatattatccattttgcgtagagatagaatattttaaaattc

SEQ ID NO: 55110 - DNA, 2030 bp, Homo sapiens
ctccgctttagcagcggcgaagggaggacccccgggagccggtccccggcgtccggtcgcccagcccttttcaggcttgggcccgcatggaggggaccgtggagtcccagacgcctgacctgcgggatgtggagggtaaggtgggcaggaagacccctgaagggctgctccgcgggctgcgaggcgagtgtgagctgggaacctctggcgccctgctgctcccaggggcgtctagcaccggccacgacttgggggacaagatcatggcgctgaagatggagctggcttacctgcgagccatcgatgtgaagatcctgcagcagctggtgaccttgaatgagggcatcgaggcagtgcgctggctgttggaggagcgggggacgttgaccagtcattgcagcagcctcaccagcagtcaatatagcctgacaggcgggagcccaggccgctcaaggcgaggcagctgggacagcctgccagacaccagcaccaccgaccggctggacagtgtctctattggcagcttcctggacacagtggcccccagcgagctggatgaacagggcccacctggggctccacgttccgagatggactgggcaaaagttatagctggtggagagagggccaggactgaggtggatgtggcagccaccaggctagggagcttgagagctgtgtggaagcccccaggggagaggcttcaaggtggaccacctgagtcaccagaggatgagagtgccaagctgggcttcgaggcccactggttctgggagcagtgccaggatgatgtgaccttcttgtaacaactattccacccttttgtaatcctgtggctcttttatccattagatgtggtctcccccaaaattgattctccctcagtctgagactaggaagaggctgcactgaaatcagttaccatggaaacctggctcatcatttctctagtccctagggagtctctgcctttatccctcaattattgggtccctagagctagcttgctctttctttctttctttctttttttgagacagggtcttatgctgttacccaagatagagagcagtggcatgatcacagctcactgcagccttgacctcctgggctcaagcgatcctcctatttcagcctcccccatagttaggaccacaggcatgcaccaccatgcccagctaattgtttatttatttattttttttttgtagagatagggtttccctgtgttgcccaggctggtctcaaactcctgggctcaagggatcctcccgcctcagcctcccaaagtgctgggattatgcccagcccctagagatacttctatagagatattgactctaaaggattgacctatggcttttggtatttagtatctctcactactccccccagctaagtaaggatttaaggaatttaggactccctggagttaacagatgaagagatgggggcataattacttcacccaaagtctagaagccttggcctctctcttggccaagatggaggattgaggagggacatggaccttcaggactaaccctctatggattggccctcccagaagcgtttgggctggtagacccaccccttcctacctgctgagtgatgtcatttcctgccaggatgggtagccctttgtacgggtccttggatggtagtaggtcatataggggcatctgagcccctgctgctaagtgagatcacattatttatcgtccataccattacttcttgtgaacagtaacatgtcactcctcctggcaggaaagtttctcattgtcagatgtttgtgcttcttttcaggtcttactttttaaatagagtgttctcattttatcctaggggatctcacttcctctgtggctccatccctgcatccctgtctgggccagcactcctgactgcttttagggagagaagctttcaggggcctccatttatttctctcaagtctgtttggctcaccctgccatggtcccctgtcttaccctgtccctgtgttgcccctattcctgtattccatt

SEQ ID NO: 55111 - DNA, 1361 bp, Homo sapiens
agttcgacggagactctcatcctcgggagaggcttcaaggtggaccacctgagtcaccagaggatgagagtgccaagctgggcttcgaggcccactggttctgggagcagtgccaggatgatgtgaccttcttgtaacaactattccacccttttgtaatcctgtggctcttttatccattagatgtggtctcccccaaaattgattctccctcagtctgagactaggaagaggctgcactgaaatcagttaccatggaaacctggctcatcatttctctagtccctagggagtctctgcctttatccctcaattattgggtccctagagctagcttgctctttctttctttctttctttttttgagacagggtcttatgctgttacccaagatagagagcagtggcatgatcacagctcactgcagccttgacctcctgggctcaagcgatcctcctatttcagcctcccccatagttaggaccacaggcatgcaccaccatgcccagctaattgtttatttatttattttttttttgtagagatagggtttccctgtgttgcccaggctggtctcaaactcctgggctcaagggatcctcccgcctcagcctcccaaagtgctgggattatgcccagcccctagagatacttctatagagatattgactctaaaggattgacctatggcttttggtatttagtatctctcactactccccccagctaagtaaggatttaaggaatttaggactccctggagttaacagatgaagagatgggggcataattacttcacccaaagtctagaagccttggcctctctcttggccaagatggaggattgaggagggacatggaccttcaggactaaccctctatggattggccctcccagaagcgtttgggctggtagacccaccccttcctacctgctgagtgatgtcatttcctgccaggatgggtagccctttgtacgggtccttggatggtagtaggtcatataggggcatctgagcccctgctgctaagtgagatcacattatttatcgtccataccattacttcttgtgaacagtaacatgtcactcctcctggcaggaaagtttctcattgtcagatgtttgtgcttcttttcaggtcttactttttaaatagagtgttctcattttatcctaggggatctcacttcctctgtggctccatccctgcatccctgtctgggccagcactcctgactgcttttagggagagaagctttcaggggcctccatttatttctctcaagtctgtttggctcaccctgccatggtcccctgtcttaccctgtccctgtgttgcccctattcctgtattccatt

SEQ ID NO: 55112 - DNA, 987 bp, Homo sapiens
  misc_feature (926)..(926): n is a, c, g, or t
ctccgctttagcagcggcgaagggaggacccccgggagccggtccccggcgtccggtcgcccagcccttttcaggcttgggcccgcatggaggggaccgtggagtcccagacgcctgacctgcgggatgtggagggtaaggtgggcaggaagacccctgaagggctgctccgcgggctgcgaggcgagtgtgagctgggaacctctggcgccctgctgctcccaggggcgtctagcaccggccacgacttgggggacaagatcatggcgctgaagatggagctggcttacctgcgagccatcgatgtgaagatcctgcagcagctggtgaccttgaatgagggcatcgaggcagtgcgctggctgttggaggagcgggggacgttgaccagtcattgcagcagcctcaccagcagtcaatatagcctgacaggcgggagcccaggccgctcaaggcgaggcagctgggacagcctgccagacaccagcaccaccgaccggctggacagtgtctctattggcagcttcctggacacagtggcccccagcgagctggatgaacagggcccacctggggctccacgttccgagatggactgggcaaaagttatagctggtggagagagggccaggactgaggtggatgtggcagccaccaggctagggagcttgagagctgtgtggaagcccccaggggagaggcttcaaggtggaccacctgagtcaccagaggatgagagtgccaagctgggcttcgaggcccactggttctgggagcagtgccaggatgatgtgaccttcttgagcctgtgtcagacacaggctcaagatggataaataccacgttttcacacatatgtgggagctaaaaagttgacatcatagaagcagcatagcattggctgggcacggtggctcatgcctgtnatcccagcactttgggaggccaaggcaggtggaccatcttgagcctgtgtcggggatcctc

SEQ ID NO: 55113 - DNA, 180 bp, Homo sapiens
gggaaatgagatgggctttatgattggagcactgactgataggatggtatataagaagtctggtggagaagaaagcgaatgctttctaccagcagagctgctgcacagccgacagggccctgcgcgtcctgtttttgcagagggtggacaggccagcttcgcatgcctaaagggaacagt

SEQ ID NO: 55114 - DNA, 248 bp, Homo sapiens
tttacttaacaatcattttcatttgaaattccattttaacaggactggttactgataaacttaagaaggttccaggcttgaccaaagggagaccgaccctaactggccctaatctctttgccacagcagtcagcatacccgtgccacagataagcgaaccaaggtttagtgtgtgtggtgaagcactagagctgtttccctgtcagaggcgccaacagccaagagcccacgacagccagccaggggcc

SEQ ID NO: 55115 - DNA, 535 bp, Homo sapiens
tgagtaaaggaaattacattatattacataaataaatgaagctttaattttgttctccatatttctcaacagctttgcagatggtattaagaaacagggcatctgtgtctccctgtggaaaaacccaggctcttctggaactgtgggctccttgtgttgctgtcatgtaatcaagaagctagagcatctgcccattatcacatttctaatgttgaagtggagatatgaggattttgaaagttcccaattggatgcctctaaaggaagtgagggctctttcaagtaagaaaaactcattttatattaccttttaagctagctgttattaattttcaattttatgctagaaatttgcaactcacaaaaagaaaggaaaaaagttaaaccctgattttaaatatcattgttccccatttttcatgtctcagttaccacatttaaaaagaagatggcaccatttgtccaaggaatctcattactgggtatatgcccaaaggaatataaatcattctattataaagatacaagcaagtgt

SEQ ID NO: 55116 - DNA, 411 bp, Homo sapiens
tcttttttttgagacagggtcttgctctgtcacccaggctggagttcagtggcccatccatagctcactgcagcctcgacctcctgggcttcaaagtgatcctcctgcctcagcctgccaagcagctaggactctttgcagatggtattaagaaacagggcatctgtgtctccctgtggaaaaacccaggctcttctggaactgtgggctccttgtgttgctgtcatgtaatcaagaagctagaggtagcagaacccaatccttacacccaaaacactagccaagggcatctttctctcttgcatctagctatgactccaaaagagaagagcaaatggtcgctacatgcaaaacaagttgccaaccaccataggttttgtctttcaaattatcaaatatatgtatacatac

SEQ ID NO: 55117 - DNA, 536 bp, Homo sapiens
ttaggggccaatttgttcagctaggccaaggtgctaggcaggtactgagaagaccacagatcacaagggatgctctattttttaaatatggataaccctttccttaataacaaaatttccagcctatgttccgattatcaagtgagtcattctgaaaaccctgtttatttctctttcacccaaagcatctgcccattatcacatttctaatgttgaagtggagatatgaggattttgaaagttcccaattggatgcctctaaaggaagtgagggctctttcaagtaagaaaaactcattttatattaccttttaagctagctgttattaattttcaattttatgctagaaatttgcaactcacaaaaagaaaggaaaaaagttaaaccctgattttaaatatcattgttccccatttttcatgtctcagttaccacatttaaaaagaagatggcaccatttgtccaaggaatctcattactgggtatatgcccaaaggaatataaatcattctattataaagatacaagcaagtgt

SEQ ID NO: 55118 - DNA, 381 bp, Homo sapiens
gtctgcctggggctggtaatcaggaagttcctaaacagctccgaattctgcagtaaaaagtgagcctccgccttggaggagactactggttcgcccatctgtttggagtttctgttgttgctattgttggtttgttttcaaatttcattgtgttttcttctttgctcaaggaaggtgctgcaaaaccatagggaaaaagttcactgctacaaagggatcccaacccactggaggctttgaagtagggaggttggcaggggtggtcaagcgggagggagatagtcacttgttcttgcccctggaaaaaattcaggtgatgtctttgacatccagggatttctcaaaggcagtgagtaaaatcccaaataaagccccaaagag

SEQ ID NO: 55119 - DNA, 630 bp, Homo sapiens
tatgttgcccaggctggtctcaaagtcctgagctcaagcgatctgcctgcctcgtatgtctattccgatggaatctgcagcagtggttctcaaagtgtggtccaggagatcattaaaaccttttcagggagtttgcaaagtcaaaactgatttcacagtattactgaggtctatttttccttttcactctcattctgtaccttgaagttttccagagactgcatgttctgatagccacaggctaaacgcagaaactgtcttctattaaaccagacattaaagagatccacaaaagtgtcaaacagtggccactttttttccaatgttttttgctttgaaaaacataattatttatcataaaatatgttgtcttcacgtattacatgataggttttcattatttttaattaaaaaaaaattttaatttttctccttcttattttctgatgtggtaaatattgacagatataatccctataaaccaaagctctttgtttttctcacaatttttaagagaataaaataattcttagagtaaaaagtttggttgggtgcagcgactcacacctgtgatcccagcactttgggaggccaaggcaggaggatcacttgaggtcaggagtttgagac

SEQ ID NO: 55120 - DNA, 410 bp, Homo sapiens
tcctggcgacgtggtcccggtaggagacttagacctgagctggatctgttgaccccaaattgtgcttttcccaccaagaagaaagacagggagagaaacattagtacaagtgctgaactaaaatatagcagagaagaaacataatctctgaaatcacacagctattcggtttcaaagcgttcctagcgcccagctctcctaactcctggccagtgttcttgacattatggtaatacataaagactttgtttccgctggtgtgtgtctgtgggaagcctctgactcacctccgtgctccagtagcaccctgtgcagccttccaatgtcgcccttattgcgtggcgcggaagataatagtttggatttcctctgcaagtcagataatagctgtatccacttactggcacagt

SEQ ID NO: 55121 - DNA, 276 bp, Homo sapiens
tcctcctgtgaccctgggcatgggcttggacagggctctggaaatagatttcctatagcagctgcttctgcaaggactgcagaagaagcaaaatggtagaaaagcctccaacattaaaattttatctctccgatttcactggaacatggcagggagctcccccacccaagcttcataaataaccactgcacttccagaaggctctccctctacatattgagagtaattttaggttactgctctgagcttcacagaagaaagctgcttctccaaaat

SEQ ID NO: 55122 - DNA, 297 bp, Homo sapiens
  misc_feature (230)..(230): n is a, c, g, or t
  misc_feature (252)..(252): n is a, c, g, or t
gccagcgggcatgagtcatcctgtcccctgcccgggccccgaggctctggggttcccaggctgaggaggaacacacagctctcggttccccaacccggggtctggcccactccttcttccttctttttgcctctctgtcagcacctcttcctgttgcctccctcttgctcctgggcctgcctgcatctcccttcccctgtccggccagagaccccggcctgggaggatantttgagcccaggagttttgggntgtagtgcgctatgccgatcgggtgtccgcaataagttgggaata

SEQ ID NO: 55123 - DNA, 379 bp, Homo sapiens
ggaggctgaggcaggagaattgcttgaacctggaaggtggaggttgaagtgagctgagatcacaccactgcactccagcctgggtgacagagcaagactcggtctcaaaggaagtgaagatgttgttagaagggaaacaaactcaattatacaaacagtaaataatatattgttaaagggtgacaaccctgaataaatagctttttcttttctgcaatttcaccaactctcagttgactagaattagaaatataaaaacagaaatggcagaggaagtgaaagtgtggtccctttggagctagctttataatttccgaaagatccacctctgctttattatatggggcaatgaaaactctcagcagttcgcttcacaggg

SEQ ID NO: 55124 - DNA, 456 bp, Homo sapiens
acgtaatttgcccacctcggcctcccaaagtgctgggattacaggcgtgagccacatcaccggcccaatccaagtctttaaaacaaacctcagagacagctaatgggtttgctttgaagttcccagcagtgagaagatacttggttggtggtagagctatgcctttccgaagaaagtcttcaggaactccatttcactcctaggtgcgtgcttactctgaaatccagatacataaaaaagcactagctgggtgcagtggctcacctgtaaatccagcactttgggaggctaaggcaggaccaaagttcaagaccagcctgggcaacggagtgatacgctgtctctacaaaaaacatgaaaatcaggcatgatggcacttgcttgtagtcccagctacttgggaagctgaggtggaaggatttcttgagcctgggaggtcaaggttgcaataagccg

SEQ ID NO: 55125 - DNA, 603 bp, Homo sapiens
tctgccttaaccattattcctgttcttcttccccacaacagaagcgagacatccagctgctaaaggcatacatgcgtgcaatccgcagtgtcaaccccaaccttcagaacctggaggagacaattgaatacaacgagatcctagagtgagtgtcactcaggacgtggagtgatttcatgtcctgacaacaaggcctgaaaggaggaagagcaggagagtagcagaaggagggcattggagagctgggctgggggtcactgcttctcagatattggcattaaggacaggggcagaggagaagaggataacccttagctccactacaggatgtcttatgcgtttgggtggatggagggaaagcctgcccaaggatgcactttatccagaattaggtgagtacccatgtacaaagccctgtattaaaggctgtggagtgctaggagggccaaaaagaaatagaagatatcgtcctgtcttcaggtagcttacaacccagagaagaggaggcagagtgcaagtccaggaaagtgatctctaaaatgcagcaaaaacaagcgaagtatacaagtgaagtctaagatctctttcagttctggagtccta

SEQ ID NO: 55126 - DNA, 3304 bp, Homo sapiens
agcgggcgtagcagcggtgggcggggcaaaggatccgtctgaggcggcgacgagtggtaggagtcttctttcccctccttcccctttcccttcccttcccgggagaggctgggacccggcaccagggcagtactgtggccgctgcggcctcagctccgactgggtcaggttgcggagactccaggccgcttccagggcgagtactcctgattgtgacatcacattcatcccctgggcgatggagcttgtcactgggaaggaatactcagtcggagaatagccaacaagatgggttactgggagaatctcttcagtggcactgagtggaggcatcagggggttggagccttgtgaacagggaacctgccccccaacacttggaaggacctgggtttcagtgatgagacatggggtatgatgtaacccgtttccagggggatgttgacgaagatcttatctgccctatttgcagtggagtcttggaggagccagtacaggcacctcattgtgaacatgctttctgcaacgcctgcatcacccagtggttctctcagcaacagacatgtccagtggaccgtagtgttgtgacggtcgcccatctgcgcccagtacctcggatcatgcggaacatgttgtcaaagctgcagattgcctgtgacaacgctgtgttcggctgtagtgccgttgtccggcttgacaacctcatgtctcacctcagcgactgtgagcacaacccgaagcggcctgtgacctgtgaacagggctgtggcctggagatgcccaaagatgagctgcccaaccataactgcattaagcacctgcgctcagtggtacagcagcagcagacacgcatcgcagagctggagaagacgtcagctgaacacaaacaccagctggcggagcagaagcgagacatccagctgctaaaggcatacatgcgtgcaatccgcagtgtcaaccccaaccttcagaacctggaggagacaattgaatacaacgagatcctagagtgggtgaactcccttcagccagcaagagtgacccgctggggagggatgatctcgactcctgatgctgtgctccaggctgtaatcaagcgctccctggtggagagtggctgtcctgcttctattgtcaacgagctgattgaaaatgcccacgagcgtagctggccccagggtctggccacactagagactagacagatgaaccgacgctactatgagaactacgtggccaagcgcatccctggcaagcaggctgttgtcgtgatggcctgtgagaaccagcacatgggggatgacatggtgcaagagccaggccttgtcatgatatttgcgcatggcgtggaagagatataagagaactcgactggctatcaggaagagatggaaatcagaaaatcccatcactccagcagctgggacctgagtcctacccaccattcttaatactgtggcttatacctgagccacacatctccctgcccttctggcactgaagggccttggggtagtttgctcagcctttcaggtgggaaacccagatttcctccctttgccatattcccctaaaatgtctataaattatcagtctgggtgggaaagcccccacctccatccattttcctgcttagggtccctggttccagttattttcagaaagcacaaagagattcaatttccctggaggatcaggacagaggaaggaatctctaatcgtccctctcctccaaaaccagggaatcagagcagtcaggcctgttgactctaagcagcagacatcctgaagaaatggtaagggtggagccaaatctctagaaataagtagtgaggccgttaattggccatcactgatggcccttagggaaagactggacctctgtgccaagcagtatccctgttcagcccaccttaaaggtgtaggcacccactgggtctaccagtatgcaggttgggatactgaaaatttccagatgagctcttctttcctacaagttttcataattagggaatgccagggtttagggtaggggttaatctgttgggggttgatgtgtttagcaagaagctactcctagcttttgctaaaatatggttggcactgcctcttgtggcacaggccataattgttccatagacccctctctagccctgtgactgtagttagttactttgataattttctttggccattgtttgtttatatttcacaaactccacctactgcccccccccctcttttttttaagaatggcctgatcatggctatctcagccacattgttggcaatttaatttatttacttccttttttttttttaagaaaggaaaaaagaaaaaaaaatcaaacttgaaacttttcttttgatgttcctattgtgggggttctggatagggtgggacagggatgggggtgtgttttatattttttccttttcagcacaacctttggctttaatataggaagagccaagggagtcctcggctgaacttacgatatctgccccaaacctctgtaaccccaactgaaatgaggagcttcctctcttcctgtgaaggatatgacagtccagcatcgatgcctgtgccctctggaaaaatttcctcctagcccttccagggccttatcataaaactctggatttagagtattcattttgaaggcaactcccccttccccaagtttccttggagctgtatagctgggttctaagcttcaccatgcaaatcagaaattttatctctaagtacaggctgtgccgtgtctcacccacacccccctggggacttcagttccatttcaggttacctggggtataccttgatccctagagtgactggcagagtaagagaaggggagagataataggtgtgattattttaatatggaggtgggagtgtggttggagatagaaaggctcctccccaccatgtaatggcttcctctcagaattttattccaggctagcttgctgcaggtctgggtagttggatcatggctccactgggattggggtggaaagcttgaggggagtagggttccagctctgggacattgtgctcaggaatttgaaaacgctgctatacttactctggttactacatttcttccactcccctttcccctacctgccttaaccaaggctcatactgtcctgtccttaccctcagatggagccaggaagctcagtgaaaggcttccctaccctttgcactagtgtctctgcaggttgctggttgtgttgtatgtgctgttccatggtgttgactgcactaataataaaccttttactcaactctcta

SEQ ID NO: 55127 - DNA, 4237 bp, Homo sapiens
agcgggcgtagcagcggtgggcggggcaaaggatccgtctgaggcggcgacgagtggtaggagtcttctttcccctccttcccctttcccttcccttcccgggagaggctgggacccggcaccagggcagtactgtggccgctgcggcctcagctccgactgggtcaggttgcggagactccaggccgcttccagggcgagtactcctgattgtgacatcacattcatcccctgggcgatggagcttgtcactgggaaggaatactcagtcggagaatagccaacaagatgggttactgggagaatctcttcagtggcactgagtggaggcatcagggggttggagccttgtgaacagggaacctgccccccaacacttggaaggacctgggtttcagtgatgagacatggggtatgatgtaacccgtttccagggggatgttgacgaagatcttatctgccctatttgcagtggagtcttggaggagccagtacaggcacctcattgtgaacatgctttctgcaacgcctgcatcacccagtggttctctcagcaacagacatgtccagtggaccgtagtgttgtgacggtcgcccatctgcgcccagtacctcggatcatgcggaacatgttgtcaaagctgcagattgcctgtgacaacgctgtgttcggctgtagtgccgttgtccggcttgacaacctcatgtctcacctcagcgactgtgagcacaacccgaagcggcctgtgacctgtgaacagggctgtggcctggagatgcccaaagatgagctgcccaaccataactgcattaagcacctgcgctcagtggtacagcagcagcagacacgcatcgcagagctggagaagacgtcagctgaacacaaacaccagctggcggagcagaagcgagacatccagctgctaaaggcatacatgcgtgcaatccgcagtgtcaaccccaaccttcagaacctggaggagacaattgaatacaacgagatcctagagtgggtgaactcccttcagccagcaagagtgacccgctggggagggatgatctcgactcctgatgctgtgctccaggctgtaatcaagcgctccctggtggagagtggctgtcctgcttctattgtcaacgagctgattgaaaatgcccacgagcgtagctggccccagggtctggccacactagagactagacagatgaaccgacgctactatgagaactacgtggccaagcgcatccctggcaagcaggctgttgtcgtgatggcctgtgagaaccagcacatgggggatgacatggtgcaagagccaggccttgtcatgatatttgcgcatggcgtggaagagatataagagaactcgactggctatcaggaagagatggaaatcagaaaatcccatcactccagcagctgggacctgagtcctacccaccattcttaatactgtggcttatacctgagccacacatctccctgcccttctggcactgaagggccttggggtagtttgctcagcctttcaggtgggaaacccagatttcctccctttgccatattcccctaaaatgtctataaattatcagtctgggtgggaaagcccccacctccatccattttcctgcttagggtccctggttccagttattttcagaaagcacaaagagattcaatttccctggaggatcaggacagaggaaggaatctctaatcgtccctctcctccaaaaccagggaatcagagcagtcaggcctgttgactctaagcagcagacatcctgaagaaatggtaagggtggagccaaatctctagaaataagtagtgaggccgttaattggccatcactgatggcccttagggaaagactggacctctgtgccaagcagtatccctgttcagcccaccttaaaggtgtaggcacccactgggtctaccagtatgcaggttgggatactgaaaatttccagatgagctcttctttcctacaagttttcataattagggaatgccagggtttagggtaggggttaatctgttgggggttgatgtgtttagcaagaagctactcctagcttttgctaaaatatggttggcactgcctcttgtggcacaggccataattgttccatagacccctctctagccctgtgactgtagttagttactttgataattttctttggccattgtttgtttatatttcacaaactccacctactgcccccccccctcttttttttaagaatggcctgatcatggctatctcagccacattgttggcaatttaatttatttacttccttttttttttttaagaaaggaaaaaagaaaaaaaaatcaaacttgaaacttttcttttgatgttcctattgtgggggttctggatagggtgggacagggatgggggtgtgttttatattttttccttttcagcacaacctttggctttaatataggaagagccaagggagtcctcggctgaacttacgatatctgccccaaacctctgtaaccccaactgaaatgaggagcttcctctcttcctgtgaaggatatgacagtccagcatcgatgcctgtgccctctggaaaaatttcctcctagcccttccagggccttatcataaaactctggatttagagtattcattttgaaggcaactcccccttccccaagtttccttggagctgtatagctgggttctaagcttcaccatgcaaatcagaaattttatctctaagtacaggctgtgccgtgtctcacccacacccccctggggacttcagttccatttcaggttacctggggtataccttgatccctagagtgactggcagagtaagagaaggggagagataataggtgtgattattttaatatggaggtgggagtgtggttggagatagaaaggctcctccccaccatgtaatggcttcctctcagaattttattccaggctagcttgctgcaggtctgggtagttggatcatggctccactgggattggggtggaaagcttgaggggagtagggttccagctctgggacattgtgctcaggaatttgaaaacgctgctatacttactctggttactacatttcttccactcccctttcccctacctgccttaaccaaggctcatactgtcctgtccttaccctcagatggagccaggaagctcagtgaaaggcttccctaccctttgcactagtgtctctgcaggttgctggttgtgttgtatgtgctgttccatggtgttgactgcactaataataaaccttttactcaactctctaaattcttcagcattactccctttcttgagaaggtttcccctctgcttttgcctttctctcaccttaattccctttcttccttactttgttacctacccttatcttagtgctaacttctctttcaggaggatgtctgggagtagtgtgcacttcacagctgctttcccatgtaccctcctgcattcttccctcctatctcctgttctgtagcagccaaagctctctagtgatctgaactgtgtacttcccagggtctgcctttatcctaaattccatgtcttccctgagtggtcctgagtttttgggataatttctacagaagatatgtatatatctttttcctttgtcccacaagcaactttgctttagaatctagaattcctttgcaggcagagaagtctctacctcccagtgtttcctagctaagaacgtaaatgtgaggagggaaatgtacttgcagaggtttcataattatttacttataaaaatagtcttcatagccgggcgcggtggctcacgcctgtaatcccagcactttgggaggccgaggtgggtggatcacaaggtcaggagttcgagaccatcctggctaacacagtgaaaccccgtctctactaaaaatacaaaaaattagccgggcgtggtggcaggcacctgtagtcccagctacttaggaggctgaggcaggagaatggcgtgaacctgggaggcagagcttgcagtgagcagagattgggccactgcattccagcctgggcgacagagcgaggctccgtctaaaaaaaaaaagagaaaaaaagaatagtcttcataggccgggcacgggggctcacgtcgtgtaatcccagcactttgggaggccaaggtgggtggatcacaaggtcaggagatcgagaccatcctggctaacatggtgaaaccctgtctctacta

SEQ ID NO: 55128 - DNA, 3161 bp, Homo sapiens
agcgggcgtagcagcggtgggcggggcaaaggatccgtctgaggcggcgacgagtgagtactcctgattgtgacatcacattcatcccctgggcgatggagcttgtcactgggaaggaatactcagtcggagaatagccaacaagatgggttactgggagaatctcttcagtggcactgagtggaggcatcagggggttggagccttgtgaacagggaacctgccccccaacacttggaaggacctgggtttcagtgatgagacatggggtatgatgtaacccgtttccagggggatgttgacgaagatcttatctgccctatttgcagtggagtcttggaggagccagtacaggcacctcattgtgaacatgctttctgcaacgcctgcatcacccagtggttctctcagcaacagacatgtccagtggaccgtagtgttgtgacggtcgcccatctgcgcccagtacctcggatcatgcggaacatgttgtcaaagctgcagattgcctgtgacaacgctgtgttcggctgtagtgccgttgtccggcttgacaacctcatgtctcacctcagcgactgtgagcacaacccgaagcggcctgtgacctgtgaacagggctgtggcctggagatgcccaaagatgagctgcccaaccataactgcattaagcacctgcgctcagtggtacagcagcagcagacacgcatcgcagagctggagaagacgtcagctgaacacaaacaccagctggcggagcagaagcgagacatccagctgctaaaggcatacatgcgtgcaatccgcagtgtcaaccccaaccttcagaacctggaggagacaattgaatacaacgagatcctagagtgggtgaactcccttcagccagcaagagtgacccgctggggagggatgatctcgactcctgatgctgtgctccaggctgtaatcaagcgctccctggtggagagtggctgtcctgcttctattgtcaacgagctgattgaaaatgcccacgagcgtagctggccccagggtctggccacactagagactagacagatgaaccgacgctactatgagaactacgtggccaagcgcatccctggcaagcaggctgttgtcgtgatggcctgtgagaaccagcacatgggggatgacatggtgcaagagccaggccttgtcatgatatttgcgcatggcgtggaagagatataagagaactcgactggctatcaggaagagatggaaatcagaaaatcccatcactccagcagctgggacctgagtcctacccaccattcttaatactgtggcttatacctgagccacacatctccctgcccttctggcactgaagggccttggggtagtttgctcagcctttcaggtgggaaacccagatttcctccctttgccatattcccctaaaatgtctataaattatcagtctgggtgggaaagcccccacctccatccattttcctgcttagggtccctggttccagttattttcagaaagcacaaagagattcaatttccctggaggatcaggacagaggaaggaatctctaatcgtccctctcctccaaaaccagggaatcagagcagtcaggcctgttgactctaagcagcagacatcctgaagaaatggtaagggtggagccaaatctctagaaataagtagtgaggccgttaattggccatcactgatggcccttagggaaagactggacctctgtgccaagcagtatccctgttcagcccaccttaaaggtgtaggcacccactgggtctaccagtatgcaggttgggatactgaaaatttccagatgagctcttctttcctacaagttttcataattagggaatgccagggtttagggtaggggttaatctgttgggggttgatgtgtttagcaagaagctactcctagcttttgctaaaatatggttggcactgcctcttgtggcacaggccataattgttccatagacccctctctagccctgtgactgtagttagttactttgataattttctttggccattgtttgtttatatttcacaaactccacctactgcccccccccctcttttttttaagaatggcctgatcatggctatctcagccacattgttggcaatttaatttatttacttccttttttttttttaagaaaggaaaaaagaaaaaaaaatcaaacttgaaacttttcttttgatgttcctattgtgggggttctggatagggtgggacagggatgggggtgtgttttatattttttccttttcagcacaacctttggctttaatataggaagagccaagggagtcctcggctgaacttacgatatctgccccaaacctctgtaaccccaactgaaatgaggagcttcctctcttcctgtgaaggatatgacagtccagcatcgatgcctgtgccctctggaaaaatttcctcctagcccttccagggccttatcataaaactctggatttagagtattcattttgaaggcaactcccccttccccaagtttccttggagctgtatagctgggttctaagcttcaccatgcaaatcagaaattttatctctaagtacaggctgtgccgtgtctcacccacacccccctggggacttcagttccatttcaggttacctggggtataccttgatccctagagtgactggcagagtaagagaaggggagagataataggtgtgattattttaatatggaggtgggagtgtggttggagatagaaaggctcctccccaccatgtaatggcttcctctcagaattttattccaggctagcttgctgcaggtctgggtagttggatcatggctccactgggattggggtggaaagcttgaggggagtagggttccagctctgggacattgtgctcaggaatttgaaaacgctgctatacttactctggttactacatttcttccactcccctttcccctacctgccttaaccaaggctcatactgtcctgtccttaccctcagatggagccaggaagctcagtgaaaggcttccctaccctttgcactagtgtctctgcaggttgctggttgtgttgtatgtgctgttccatggtgttgactgcactaataataaaccttttactcaactctcta

SEQ ID NO: 55129 - DNA, 3767 bp, Homo sapiens
agcgggcgtagcagcggtgggcggggcaaaggatccgtctgaggcggcgacgagtggtaggagtcttctttcccctccttcccctttcccttcccttcccgggagaggctgggacccggcaccagggcagtactgtggccgctgcggcctcagctccgactgggtcaggttgcggagactccaggccgcttccagggcgagtactcctgattgtgacatcacattcatcccctgggcgatggagcttgtcactgggaaggaatactcagtcggagaatagccaacaagatgggttactgggagaatctcttcagtggcactgagtggaggcatcagggggttggagccttgtgaacagggaacctgccccccaacacttggaaggacctgggtttcagtgatgagacatggggtatgatgtaacccgtttccagggggatgttgacgaagatcttatctgccctatttgcagtggagtcttggaggagccagtacaggcacctcattgtgaacatgctttctgcaacgcctgcatcacccagtggttctctcagcaacagacatgtccagtggaccgtagtgttgtgacggtcgcccatctgcgcccagtacctcggatcatgcggaacatgttgtcaaagctgcagattgcctgtgacaacgctgtgttcggctgtagtgccgttgtccggcttgacaacctcatgtctcacctcagcgactgtgagcacaacccgaagcggcctgtgacctgtgaacagggctgtggcctggagatgcccaaagatgagctgcccaaccataactgcattaagcacctgcgctcagtggtacagcagcagcagacacgcatcgcagagctggagaagacgtcagctgaacacaaacaccagctggcggagcagaagcgagacatccagctgctaaaggcatacatgcgtgcaatccgcagtgtcaaccccaaccttcagaacctggaggagacaattgaatacaacgagatcctagagtgggtgaactcccttcagccagcaagagtgacccgctggggagggatgatctcgactcctgatgctgtgctccaggctgtaatcaagcgctccctggtggagagtggctgtcctgcttctattgtcaacgagctgattgaaaatgcccacgagcgtagctggccccagggtctggccacactagagactagacagatgaaccgacgctactatgagaactacgtggccaagcgcatccctggcaagcaggctgttgtcgtgatggcctgtgagaaccagcacatgggggatgacatggtgcaagagccaggccttgtcatgatatttgcgcatggcgtggaagagatataagagaactcgactggctatcaggaagagatggaaatcagaaaatcccatcactccagcagctgggacctgagtcctacccaccattcttaatactgtggcttatacctgagccacacatctccctgcccttctggcactgaagggccttggggtagtttgctcagcctttcaggtgggaaacccagatttcctccctttgccatattcccctaaaatgtctataaattatcagtctgggtgggaaagcccccacctccatccattttcctgcttagggtccctggttccagttattttcagaaagcacaaagagattcaatttccctggaggatcaggacagaggaaggaatctctaatcgtccctctcctccaaaaccagggaatcagagcagtcaggcctgttgactctaagcagcagacatcctgaagaaatggtaagggtggagccaaatctctagaaataagtagtgaggccgttaattggccatcactgatggcccttagggaaagactggacctctgtgccaagcagtatccctgttcagcccaccttaaaggtgtaggcacccactgggtctaccagtatgcaggttgggatactgaaaatttccagatgagctcttctttcctacaagttttcataattagggaatgccagggtttagggtaggggttaatctgttgggggttgatgtgtttagcaagaagctactcctagcttttgctaaaatatggttggcactgcctcttgtggcacaggccataattgttccatagacccctctctagccctgtgactgtagttagttactttgataattttctttggccattgtttgtttatatttcacaaactccacctactgcccccccccctcttttttttaagaatggcctgatcatggctatctcagccacattgttggcaatttaatttatttacttccttttttttttttaagaaaggaaaaaagaaaaaaaaatcaaacttgaaacttttcttttgatgttcctattgtgggggttctggatagggtgggacagggatgggggtgtgttttatattttttccttttcagcacaacctttggctttaatataggaagagccaagggagtcctcggctgaacttacgatatctgccccaaacctctgtaaccccaactgaaatgaggagcttcctctcttcctgtgaaggatatgacagtccagcatcgatgcctgtgccctctggaaaaatttcctcctagcccttccagggccttatcataaaactctggatttagagtattcattttgaaggcaactcccccttccccaagtttccttggagctgtatagctgggttctaagcttcaccatgcaaatcagaaattttatctctaagtacaggctgtgccgtgtctcacccacacccccctggggacttcagttccatttcaggttacctggggtataccttgatccctagagtgactggcagagtaagagaaggggagagataataggtgtgattattttaatatggaggtgggagtgtggttggagatagaaaggctcctccccaccatgtaatggcttcctctcagaattttattccaggctagcttgctgcaggtctgggtagttggatcatggctccactgggattggggtggaaagcttgaggggagtagggttccagctctgggacattgtgctcaggaatttgaaaacgctgctatacttactctggttactacatttcttccactcccctttcccctacctgccttaaccaaggctcatactgtcctgtccttaccctcagatggagccaggaagctcagtgaaaggcttccctaccctttgcactagtgtctctgcaggttgctggttgtgttgtatgtgctgttccatggtgttgactgcactaataataaaccttttactcaactctctaaattcttcagcattactccctttcttgagaaggtttcccctctgcttttgcctttctctcaccttaattccctttcttccttactttgttacctacccttatcttagtgctaacttctctttcaggaggatgtctgggagtagtgtgcacttcacagctgctttcccatgtaccctcctgcattcttccctcctatctcctgttctgtagcagccaaagctctctagtgaacctgggaggcagagcttgcagtgagcagagattgggccactgcattccagcctgggcgacagagcgaggctccgtctaaaaaaaaaaagagaaaaaaagaatagtcttcataggccgggcacgggggctcacgtcgtgtaatcccagcactttgggaggccaaggtgggtggatcacaaggtcaggagatcgagaccatcctggctaacatggtgaaaccctgtctctacta

SEQ ID NO: 55130 - DNA, 3277 bp, Homo sapiens
agcgggcgtagcagcggtgggcggggcaaaggatccgtctgaggcggcgacgagtggtaggagtcttctttcccctccttcccctttcccttcccttcccgggagaggctgggacccggcaccagggcagtactgtggccgctgcggcctcagctccgactgggtcaggttgcggagactccaggccgcttccagggcgagtactcctgattgtgacatcacattcatcccctgggcgatggagcttgtcactgggaaggaatactcagtcggagaatagccaacaagatgggttactgggagaatctcttcagtggcactgagtggaggcatcagggggttggagccttgtgaacagggaacctgccccccaacacttggaaggacctgggtttcagtgatgagacatggggtatgatgtaacccgtttccagggggatgttgacgaagatcttatctgccctatttgcagtggagtcttggaggagccagtacaggcacctcattgtgaacatgctttctgcaacgcctgcatcacccagtggttctctcagcaacagacatgtccagtggaccgtagtgttgtgacggtcgcccatctgcgcccagtacctcggatcatgcggaacatgttgtcaaagctgcagattgcctgtgacaacgctgtgttcggctgtagtgccgttgtccggcttgacaacctcatgtctcacctcagcgactgtgagcacaacccgaagcggcctgtgacctgtgaacagggctgtggcctggagatgcccaaagatgagctgcccaaccataactgcattaagcacctgcgctcagtggtacagcagcagcagacacgcatcgcagagctggagaagacgtcagctgaacacaaacaccagctggcggagcagaagcgagacatccagctgctaaaggcatacatgcgtgcaatccgcagtgtcaaccccaaccttcagaacctggaggagacaattgaatacaacgagatcctagagtgggtgaactcccttcagccagcaagagtgacccgctggggagggatgatctcgactcctgatgctgtgctccaggctgtaatcaagcgctccctggtggagagtggctgtcctgcttctattgtcaacgagctgattgaaaatgcccacgagcgtagctggccccagggtctggccacactagagactagacagatgaaccgacgctactatgagaactacgtggccaagcgcatccctggcaagcaggctgttgtcgtgatggcctgtgagaaccagcacatgggggatgacatggtgcaagagccaggccttgtcatgatatttgcgcatggcgtggaagagatataagagaactcgactggctatcaggaagagatggaaatcagaaaatcccatcactccagcagctgggacctgagtcctacccaccattcttaatactgtggcttatacctgagccacacatctccctgcccttctggcactgaagggccttggggtagtttgctcagcctttcaggtgggaaacccagatttcctccctttgccatattcccctaaaatgtctataaattatcagtctgggtgggaaagcccccacctccatccattttcctgcttagggtccctggttccagttattttcagaaagcacaaagagattcaatttccctggaggatcaggacagaggaaggaatctctaatcgtccctctcctccaaaaccagggaatcagagcagtcaggcctgttgactctaagcagcagacatcctgaagaaatggtaagggtggagccaaatctctagaaataagtagtgaggccgttaattggccatcactgatggcccttagggaaagactggacctctgtgccaagcagtatccctgttcagcccaccttaaaggtgtaggcacccactgggtctaccagtatgcaggttgggatactgaaaatttccagatgagctcttctttcctacaagttttcataattagggaatgccagggtttagggtaggggttaatctgttgggggttgatgtgtttagcaagaagctactcctagcttttgctaaaatatggttggcactgcctcttgtggcacaggccataattgttccatagacccctctctagccctgtgactgtagttagttactttgataattttctttggccattgtttgtttatatttcacaaactccacctactgcccccccccctcttttttttaagaatggcctgatcatggctatctcagccacattgttggcaatttaatttatttacttccttttttttttttaagaaaggaaaaaagaaaaaaaaatcaaacttgaaacttttcttttgatgttcctattgtgggggttctggatagggtgggacagggatgggggtgtgttttatattttttccttttcagcacaacctttggctttaatataggaagagccaagggagtcctcggctgaacttacgatatctgccccaaacctctgtaaccccaactgaaatgaggagcttcctctcttcctgtgaaggatatgacagtccagcatcgatgcctgtgccctctggaaaaatttcctcctagcccttccagggccttatcataaaactctggatttagagtattcattttgaaggcaactcccccttccccaagtttccttggagctgtatagctgggttctaagcttcaccatgcaaatcagaaattttatctctaagtacaggctgtgccgtgtctcacccacacccccctggggacttcagttccatttcaggttacctggggtataccttgatccctagagtgactggcagagtaagagaaggggagagataataggtgtgattattttaatatggaggtgggagtgtggttggagatagaaaggctcctccccaccatgtaatggcttcctctcagaattttattccaggctagcttgctgcaggtctgggtagttggatcatggctccactgggattggggtggaaagcttgaggggagtagggttccagctctgggacattgtgctcaggaatttgaaaacgctgctatacttactctggttactacatttcttccactcccctttcccctacctgccttaaccaaggctcatactgtcctgtccttaccctcagatggagccaggaagctcagtgaaaggcttccctaccctttgcactagtgtctctgcaggttgtcgggtacgcagcagtgtggtcttgtgcagcaagagtggcctg

SEQ ID NO: 55131 - DNA, 3447 bp, Homo sapiens
agcgggcgtagcagcggtgggcggggcaaaggatccgtctgaggcggcgacgagtggtaggagtcttctttcccctccttcccctttcccttcccttcccgggagaggctgggacccggcaccagggcagtactgtggccgctgcggcctcagctccgactgggtcaggttgcggagactccaggccgcttccagggcgagtactcctgattgtgacatcacattcatcccctgggcgatggagcttgtcactgggaaggaatactcagtcggagaatagccaacaagatgggttactgggagaatctcttcagtggcactgagtggaggcatcagggggttggagccttgtgaacagggaacctgccccccaacacttggaaggacctgggtttcagtgatgagacatggggtatgatgtaacccgtttccagggggatgttgacgaagatcttatctgccctatttgcagtggagtcttggaggagccagtacagaccagcttttgatacagccatgcactctgcattttgatgtgaaagctgccaccttcaataggtcatttctctgccagccttgccagaccagagtcagttgtatcatcctggggcaagtatgaggagaagctcacgattaccaggcacctcattgtgaacatgctttctgcaacgcctgcatcacccagtggttctctcagcaacagacatgtccagtggaccgtagtgttgtgacggtcgcccatctgcgcccagtacctcggatcatgcggaacatgttgtcaaagctgcagattgcctgtgacaacgctgtgttcggctgtagtgccgttgtccggcttgacaacctcatgtctcacctcagcgactgtgagcacaacccgaagcggcctgtgacctgtgaacagggctgtggcctggagatgcccaaagatgagctgcccaaccataactgcattaagcacctgcgctcagtggtacagcagcagcagacacgcatcgcagagctggagaagacgtcagctgaacacaaacaccagctggcggagcagaagcgagacatccagctgctaaaggcatacatgcgtgcaatccgcagtgtcaaccccaaccttcagaacctggaggagacaattgaatacaacgagatcctagagtgggtgaactcccttcagccagcaagagtgacccgctggggagggatgatctcgactcctgatgctgtgctccaggctgtaatcaagcgctccctggtggagagtggctgtcctgcttctattgtcaacgagctgattgaaaatgcccacgagcgtagctggccccagggtctggccacactagagactagacagatgaaccgacgctactatgagaactacgtggccaagcgcatccctggcaagcaggctgttgtcgtgatggcctgtgagaaccagcacatgggggatgacatggtgcaagagccaggccttgtcatgatatttgcgcatggcgtggaagagatataagagaactcgactggctatcaggaagagatggaaatcagaaaatcccatcactccagcagctgggacctgagtcctacccaccattcttaatactgtggcttatacctgagccacacatctccctgcccttctggcactgaagggccttggggtagtttgctcagcctttcaggtgggaaacccagatttcctccctttgccatattcccctaaaatgtctataaattatcagtctgggtgggaaagcccccacctccatccattttcctgcttagggtccctggttccagttattttcagaaagcacaaagagattcaatttccctggaggatcaggacagaggaaggaatctctaatcgtccctctcctccaaaaccagggaatcagagcagtcaggcctgttgactctaagcagcagacatcctgaagaaatggtaagggtggagccaaatctctagaaataagtagtgaggccgttaattggccatcactgatggcccttagggaaagactggacctctgtgccaagcagtatccctgttcagcccaccttaaaggtgtaggcacccactgggtctaccagtatgcaggttgggatactgaaaatttccagatgagctcttctttcctacaagttttcataattagggaatgccagggtttagggtaggggttaatctgttgggggttgatgtgtttagcaagaagctactcctagcttttgctaaaatatggttggcactgcctcttgtggcacaggccataattgttccatagacccctctctagccctgtgactgtagttagttactttgataattttctttggccattgtttgtttatatttcacaaactccacctactgcccccccccctcttttttttaagaatggcctgatcatggctatctcagccacattgttggcaatttaatttatttacttccttttttttttttaagaaaggaaaaaagaaaaaaaaatcaaacttgaaacttttcttttgatgttcctattgtgggggttctggatagggtgggacagggatgggggtgtgttttatattttttccttttcagcacaacctttggctttaatataggaagagccaagggagtcctcggctgaacttacgatatctgccccaaacctctgtaaccccaactgaaatgaggagcttcctctcttcctgtgaaggatatgacagtccagcatcgatgcctgtgccctctggaaaaatttcctcctagcccttccagggccttatcataaaactctggatttagagtattcattttgaaggcaactcccccttccccaagtttccttggagctgtatagctgggttctaagcttcaccatgcaaatcagaaattttatctctaagtacaggctgtgccgtgtctcacccacacccccctggggacttcagttccatttcaggttacctggggtataccttgatccctagagtgactggcagagtaagagaaggggagagataataggtgtgattattttaatatggaggtgggagtgtggttggagatagaaaggctcctccccaccatgtaatggcttcctctcagaattttattccaggctagcttgctgcaggtctgggtagttggatcatggctccactgggattggggtggaaagcttgaggggagtagggttccagctctgggacattgtgctcaggaatttgaaaacgctgctatacttactctggttactacatttcttccactcccctttcccctacctgccttaaccaaggctcatactgtcctgtccttaccctcagatggagccaggaagctcagtgaaaggcttccctaccctttgcactagtgtctctgcaggttgctggttgtgttgtatgtgctgttccatggtgttgactgcactaataataaaccttttactcaactctcta

SEQ ID NO: 55132 - DNA, 3960 bp, Homo sapiens
agcgggcgtagcagcggtgggcggggcaaaggatccgtctgaggcggcgacgagtggtaggagtcttctttcccctccttcccctttcccttcccttcccgggagaggctgggacccggcaccagggcagtactgtggccgctgcggcctcagctccgactgggtcaggttgcggagactccaggccgcttccagggcgagtactcctgattgtgacatcacattcatcccctgggcgatggagcttgtcactgggaaggaatactcagtcggagaatagccaacaagatgggttactgggagaatctcttcagtggcactgagtggaggcatcagggggttggagccttgtgaacagggaacctgccccccaacacttggaaggacctgggtttcagtgatgagacatggggtatgatgtaacccgtttccagggggatgttgacgaagatcttatctgccctatttgcagtggagtcttggaggagccagtacaggcacctcattgtgaacatgctttctgcaacgcctgcatcacccagtggttctctcagcaacagacatgtccagtggaccgtagtgttgtgacggtcgcccatctgcgcccagtacctcggatcatgcggaacatgttgtcaaagctgcagattgcctgtgacaacgctgtgttcggctgtagtgccgttgtccggcttgacaacctcatgtctcacctcagcgactgtgagcacaacccgaagcggcctgtgacctgtgaacagggctgtggcctggagatgcccaaagatgagctgcccaaccataactgcattaagcacctgcgctcagtggtacagcagcagcagacacgcatcgcagagctggagaagacgtcagctgaacacaaacaccagctggcggagcagaagcgagacatccagctgctaaaggcatacatgcgtgcaatccgcagtgtcaaccccaaccttcagaacctggaggagacaattgaatacaacgagatcctagagtgggtgaactcccttcagccagcaagagtgacccgctggggagggatgatctcgactcctgatgctgtgctccaggctgtaatcaagcgctccctggtggagagtggctgtcctgcttctattgtcaacgagctgattgaaaatgcccacgagcgtagctggccccagggtctggccacactagagactagacagatgaaccgacgctactatgagaactacgtggccaagcgcatccctggcaagcaggctgttgtcgtgatggcctgtgagaaccagcacatgggggatgacatggtgcaagagccaggccttgtcatgatatttgcgcatggcgtggaagagatataagagaactcgactggctatcaggaagagatggaaatcagaaaatcccatcactccagcagctgggacctgagtcctacccaccattcttaatactgtggcttatacctgagccacacatctccctgcccttctggcactgaagggccttggggtagtttgctcagcctttcaggtgggaaacccagatttcctccctttgccatattcccctaaaatgtctataaattatcagtctgggtgggaaagcccccacctccatccattttcctgcttagggtccctggttccagttattttcagaaagcacaaagagattcaatttccctggaggatcaggacagaggaaggaatctctaatcgtccctctcctccaaaaccagggaatcagagcagtcaggcctgttgactctaagcagcagacatcctgaagaaatggtaagggtggagccaaatctctagaaataagtagtgaggccgttaattggccatcactgatggcccttagggaaagactggacctctgtgccaagcagtatccctgttcagcccaccttaaaggtgtaggcacccactgggtctaccagtatgcaggttgggatactgaaaatttccagatgagctcttctttcctacaagttttcataattagggaatgccagggtttagggtaggggttaatctgttgggggttgatgtgtttagcaagaagctactcctagcttttgctaaaatatggttggcactgcctcttgtggcacaggccataattgttccatagacccctctctagccctgtgactgtagttagttactttgataattttctttggccattgtttgtttatatttcacaaactccacctactgcccccccccctcttttttttaagaatggcctgatcatggctatctcagccacattgttggcaatttaatttatttacttccttttttttttttaagaaaggaaaaaagaaaaaaaaatcaaacttgaaacttttcttttgatgttcctattgtgggggttctggatagggtgggacagggatgggggtgtgttttatattttttccttttcagcacaacctttggctttaatataggaagagccaagggagtcctcggctgaacttacgatatctgccccaaacctctgtaaccccaactgaaatgaggagcttcctctcttcctgtgaaggatatgacagtccagcatcgatgcctgtgccctctggaaaaatttcctcctagcccttccagggccttatcataaaactctggatttagagtattcattttgaaggcaactcccccttccccaagtttccttggagctgtatagctgggttctaagcttcaccatgcaaatcagaaattttatctctaaaaaaaaaaaaaaaaaaaaaaaaaaaaaaaaaaaaaaaaaaaaaaaaaaagaaaaaaaagcggggggggcgcagccacaaagaagtatccccgcaggggggggccccagaatatgcagagacgtacccacggacttttgtgtcacacgagggggcgccccaaagggagggccgtcaataaataaacacacagggcacaggggcggcggcatgtataaacaagatgctgggcgagaaggagcggagacaaaacgctggcgagaccgcgccggggggcaacacacaccgggggaggaaaagagcaccaccactaccaacgtcggcaggggggggggggagcacacaccaagagtcggggacacaacacaacgaacccgtccacagacgagaagactgatcactgaacgcacccctcgagcgcgggcgaacgaagccatatacacaccactcgatgaaggacgcgtgacacgcacgcagggcttacaaaccaccaccgagcgggccaacagatgaatgatctcgtaggccgacggcagctgagcaaagagaacgtcgtcgggcccccacgaggggcgccgatcatcattccgagctcggcaaacacacaaattttattacaccgcaggcgggagcaatcgtggtagtatacaaacaaaacgacgagcatgaaacgagaaagagtcagaacacgaaccagagacaacgcacagcaagcaactcatgaagaacacgagacgaaggaagaaaaaagagaggagagaaagaacaagaaaggaaaagaacacataataaaaatgaagagaacagagaaagaagcagagagagaagcgaagaaaagcaaagaagagaagagaaagacaagaaagaagaaaaaaaacaacgagaaagacaaaaaagaacagaaagaaacgaccacacaagaagaacaagcaaaacacaagcaaaaaaggagcacaagaacgaacacaaaggagaaaaacgaaggacagagaaagaagaacacgcaacaacgaaagaaacaggaaagagcagaagaaagagaagagacaacaacacaagagcagagcaaaagaacacagaaaagcaaaagacgggaaagaaaagaacacacaaggaagcagagacagcggagcgcgacgccagaccagacacgacacacaaaaacaaaaaggacaaaaaacgagagaggacagggagaacaccacgagcgaaca

SEQ ID NO: 55133 - DNA, 1893 bp, Homo sapiens
agtaggaagcttggacgaagaaagtgaagggaataaacaagagggaggcctgaaatgaatgttagaaattttgggtaggacaaaatctacttagcagttatctgccacagaataggccatttgcatacatgtcccagggatcacctctgttctgctctttccccaccctggtctgcagcctggagatgcccaaagatgagctgctccatccattttcctgcttagggtccctggttccagttattttcagaaagcacaaagagattcaatttccctggaggatcaggacagaggaaggaatctctaatcgtccctctcctccaaaaccagggaatcagagcagtcaggcctgttgactctaagcagcagacatcctgaagaaatggtaagggtggagccaaatctctagaaataagtagtgaggccgttaattggccatcactgatggcccttagggaaagactggacctctgtgccaagcagtatccctgttcagcccaccttaaaggtgtaggcacccactgggtctaccagtatgcaggttgggatactgaaaatttccagatgagctcttctttcctacaagttttcataattagggaatgccagggtttagggtaggggttaatctgttgggggttgatgtgtttagcaagaagctactcctagcttttgctaaaatatggttggcactgcctcttgtggcacaggccataattgttccatagacccctctctagccctgtgactgtagttagttactttgataattttctttggccattgtttgtttatatttcacaaactccacctactgcccccccccctcttttttttaagaatggcctgatcatggctatctcagccacattgttggcaatttaatttatttacttccttttttttttttaagaaaggaaaaaagaaaaaaaaatcaaacttgaaacttttcttttgatgttcctattgtgggggttctggatagggtgggacagggatgggggtgtgttttatattttttccttttcagcacaacctttggctttaatataggaagagccaagggagtcctcggctgaacttacgatatctgccccaaacctctgtaaccccaactgaaatgaggagcttcctctcttcctgtgaaggatatgacagtccagcatcgatgcctgtgccctctggaaaaatttcctcctagcccttccagggccttatcataaaactctggatttagagtattcattttgaaggcaactcccccttccccaagtttccttggagctgtatagctgggttctaagcttcaccatgcaaatcagaaattttatctctaagtacaggctgtgccgtgtctcacccacacccccctggggacttcagttccatttcaggttacctggggtataccttgatccctagagtgactggcagagtaagagaaggggagagataataggtgtgattattttaatatggaggtgggagtgtggttggagatagaaaggctcctccccaccatgtaatggcttcctctcagaattttattccaggctagcttgctgcaggtctgggtagttggatcatggctccactgggattggggtggaaagcttgaggggagtagggttccagctctgggacattgtgctcaggaatttgaaaacgctgctatacttactctggttactacatttcttccactcccctttcccctacctgccttaaccaaggctcatactgtcctgtccttaccctcagatggagccaggaagctcagtgaaaggcttccctaccctttgcactagtgtctctgcaggttgctggttgtgttgtatgtgctgttccatggtgttgactgcactaataataaaccttttactcaactctcta

SEQ ID NO: 55134 - DNA, 1393 bp, Homo sapiens
  misc_feature (21)..(21): n is a, c, g, or t
  misc_feature (23)..(24): n is a, c, g, or t
cgctgggtcgatctagaggancnnacgtaatatgtaaccaggttgggatactgaaaatttccagatgagctcttctttcctacaagttttcataattagggaatgccagggtttagggtaggggttaatctgttgggggttgatgtgtttagcaagaagctactcctagcttttgctaaaatatggttggcactgcctcttgtggcacaggccataattgttccatagacccctctctagccctgtgactgtagttagttactttgataattttctttggccattgtttgtttatatttcacaaactccacctactgcccccccccctcttttttttaagaatggcctgatcatggctatctcagccacattgttggcaatttaatttatttacttccttttttttttttaagaaaggaaaaaagaaaaaaaaatcaaacttgaaacttttcttttgatgttcctattgtgggggttctggatagggtgggacagggatgggggtgtgttttatattttttccttttcagcacaacctttggctttaatataggaagagccaagggagtcctcggctgaacttacgatatctgccccaaacctctgtaaccccaactgaaatgaggagcttcctctcttcctgtgaaggatatgacagtccagcatcgatgcctgtgccctctggaaaaatttcctcctagcccttccagggccttatcataaaactctggatttagagtattcattttgaaggcaactcccccttccccaagtttccttggagctgtatagctgggttctaagcttcaccatgcaaatcagaaattttatctctaagtacaggctgtgccgtgtctcacccacacccccctggggacttcagttccatttcaggttacctggggtataccttgatccctagagtgactggcagagtaagagaaggggagagataataggtgtgattattttaatatggaggtgggagtgtggttggagatagaaaggctcctccccaccatgtaatggcttcctctcagaattttattccaggctagcttgctgcaggtctgggtagttggatcatggctccactgggattggggtggaaagcttgaggggagtagggttccagctctgggacattgtgctcaggaatttgaaaacgctgctatacttactctggttactacatttcttccactcccctttcccctacctgccttaaccaaggctcatactgtcctgtccttaccctcagatggagccaggaagctcagtgaaaggcttccctaccctttgcactagtgtctctgcaggttgctggttgtgttgtatgtgctgttccatggtgttgactgcactaataataaaccttttactcaactctcta

SEQ ID NO: 55135 - DNA, 2372 bp, Homo sapiens
agcgggcgtagcagcggtgggcggggcaaaggatccgtctgaggcggcgacgagtggtaggagtcttctttcccctccttcccctttcccttcccttcccgggagaggctgggacccggcaccagggcagtactgtggccgctgcggcctcagctccgactgggtcaggttgcggagactccaggccgcttccagggcgagtactcctgattgtgacatcacattcatcccctgggcgatggagcttgtcactgggaaggaatactcagtcggagaatagccaacaagatgggttactgggagaatctcttcagtggcactgagtggaggcatcagggggttggagccttgtgaacagggaacctgccccccaacacttggaaggacctgggtttcagtgatgagacatggggtatgatgtaacccgtttccagggggatgttgacgaagatcttatctgccctatttgcagtggagtcttggaggagccagtacaggcacctcattgtgaacatgctttctgcaacgcctgcatcacccagtggttctctcagcaacagacatgtccagtggaccgtagtgttgtgacggtcgcccatctgcgcccagtacctcggatcatgcggaacatgttgtcaaagctgcagattgcctgtgacaacgctgtgttcggctgtagtgccgttgtccggcttgacaacctcatgtctcacctcagcgactgtgagcacaacccgaagcggcctgtgacctgtgaacagggctgtggcctggagatgcccaaagatgagctgcccaaccataactgcattaagcacctgcgctcagtggtacagcagcagcagacacgcatcgcagagctggagaagacgtcagctgaacacaaacaccagctggcggagcagaagcgagacatccagctgctaaaggcatacatgcgtgcaatccgcagtgtcaaccccaaccttcagaacctggaggagacaattgaatacaacgagatcctagagtgggtgaactcccttcagccagcaagagtgacccgctggggagggatgatctcgactcctgatgctgtgctccaggctgtaatcaagcgctccctggtggagagtggctgtcctgcttctattgtcaacgagctgattgaaaatgcccacgagcgtagctggccccagggtctggccacactagagactagacagatgaaccgacgctactatgagaactacgtggccaagcgcatccctggcaagcaggctgttgtcgtgatggcctgtgagaaccagcacatgggggatgacatggtgcaagagccaggccttgtcatgatatttgcgcatggcgtggaagagatataagagaactcgactggctatcaggaagagatggaaatcagaaaatcccatcactccagcagctgggacctgagtcctacccaccattcttaatactgtggcttatacctgagccacacatctccctgcccttctggcactgaagggccttggggtagtttgctcagcctttcaggtgggaaacccagatttcctccctttgccatattcccctaaaatgtctataaattatcagtctgggtgggaaagcccccacctccatccattttcctgcttagggtccctggttccagttattttcagaaagcacaaagagattcaatttccctggaggatcaggacagaggaaggaatctctaatcgtccctctcctccaaaaccagggaatcagagcagtcaggcctgttgactctaagcagcagacatcctgaagaaatggtaagggtggagccaaatctctagaaataagtagtgaggccgttaattggccatcactgatggcccttagggaaagactggacctctgtgccaagcagtatccctgttcagcccaccttaaaggtgtaggcacccactgggtctaccagtatgcaggttgggatactgaaaatttccagatgagctcttctttcctacaagttttcataattagggaatgccagggtttagggtaggggttaatctgttgggggttgatgtgtttagcaagaagctactcctagcttttgctaaaatatggttggcactgcctcttgtggcacaggccataattgttccatagacccctctctagccctgtgactgtagttagttactttgataattttctttggccattgtttgtttatatttcacaaactccacctactgcccccccccctcttttttttaagaatggcctgatcatggctatctcagccacattgttggcaatttaatttatttacttccttttttttttttttttttttttttttttttttttttttttttttttttttttttttttttttt

SEQ ID NO: 55136 - DNA, 1678 bp, Homo sapiens
agcgggcgtagcagcggtgggcggggcaaaggatccgtctgaggcggcgacgagtggtaggagtcttctttcccctccttcccctttcccttcccttcccgggagaggctgggacccggcaccagggcagtactgtggccgctgcggcctcagctccgactgggtcaggttgcggagactccaggccgcttccagggcgagtactcctgattgtgacatcacattcatcccctgggcgatggagcttgtcactgggaaggaatactcagtcggagaatagccaacaagatgggttactgggagaatctcttcagtggcactgagtggaggcatcagggggttggagccttgtgaacagggaacctgccccccaacacttggaaggacctgggtttcagtgatgagacatggggtatgatgtaacccgtttccagggggatgttgacgaagatcttatctgccctatttgcagtggagtcttggaggagccagtacaggcacctcattgtgaacatgctttctgcaacgcctgcatcacccagtggttctctcagcaacagacatgtccagtggaccgtagtgttgtgacggtcgcccatctgcgcccagtacctcggatcatgcggaacatgttgtcaaagctgcagattgcctgtgacaacgctgtgttcggctgtagtgccgttgtccggcttgacaacctcatgtctcacctcagcgactgtgagcacaacccgaagcggcctgtgacctgtgaacagggctgtggcctggagatgcccaaagatgagctgcccaaccataactgcattaagcacctgcgctcagtggtacagcagcagcagacacgcatcgcagagctggagaagacgtcagctgaacacaaacaccagctggcggagcagaagcgagacatccagctgctaaaggcatacatgcgtgcaatccgcagtgtcaaccccaaccttcagaacctggaggagacaattgaatacaacgagatcctagagtgggtgaactcccttcagccagcaagagtgacccgctggggagggatgatctcgactcctgatgctgtgctccaggctgtaatcaagcgctccctggtggagagtggctgtcctgcttctattgtcaacgagctgattgaaaatgcccacgagcgtagctggccccagggtctggccacactagagactagacagatgaaccgacgctactatgagaactacgtggccaagcgcatccctggcaagcaggctgttgtcgtgatggcctgtgagaaccagcacatgggggatgacatggtgcaagagccaggccttgtcatgatatttgcgcatggcgtggaagagatataagagaactcgactggctatcaggaagagatggaaatcagaaaatcccatcactccagcagctgggacctgagtcctacccaccattcttaatactgtggcttatacctgagccacacatctccctgcccttctggcactgaagggccttggggtagtttgctcagcctttcaggtgggaaacccagatttcctccctttgccatattcccctaaaatgtctataaattatcagtctgggtgggaaagcccccacctccatccattttcctgcttagggtccctgggcttaaggaccttggggttcacgacgctcgatc

SEQ ID NO: 55137 - DNA, 1640 bp, Homo sapiens
agcgggcgtagcagcggtgggcggggcaaaggatccgtctgaggcggcgacgagtggtaggagtcttctttcccctccttcccctttcccttcccttcccgggagaggctgggacccggcaccagggcagtactgtggccgctgcggcctcagctccgactgggtcaggttgcggagactccaggccgcttccagggcgagtactcctgattgtgacatcacattcatcccctgggcgatggagcttgtcactgggaaggaatactcagtcggagaatagccaacaagatgggttactgggagaatctcttcagtggcactgagtggaggcatcagggggttggagccttgtgaacagggaacctgccccccaacacttggaaggacctgggtttcagtgatgagacatggggtatgatgtaacccgtttccagggggatgttgacgaagatcttatctgccctatttgcagtggagtcttggaggagccagtacaggcacctcattgtgaacatgctttctgcaacgcctgcatcacccagtggttctctcagcaacagacatgtccagtggaccgtagtgttgtgacggtcgcccatctgcgcccagtacctcggatcatgcggaacatgttgtcaaagctgcagattgcctgtgacaacgctgtgttcggctgtagtgccgttgtccggcttgacaacctcatgtctcacctcagcgactgtgagcacaacccgaagcggcctgtgacctgtgaacagggctgtggcctggagatgcccaaagatgagctgcccaaccataactgcattaagcacctgcgctcagtggtacagcagcagcagacacgcatcgcagagctggagaagacgtcagctgaacacaaacaccagctggcggagcagaagcgagacatccagctgctaaaggcatacatgcgtgcaatccgcagtgtcaaccccaaccttcagaacctggaggagacaattgaatacaacgagatcctagagtgggtgaactcccttcagccagcaagagtgacccgctggggagggatgatctcgactcctgatgctgtgctccaggctgtaatcaagcgctccctggtggagagtggctgtcctgcttctattgtcaacgagctgattgaaaatgcccacgagcgtagctggccccagggtctggccacactagagactagacagatgaaccgacgctactatgagaactacgtggccaagcgcatccctggcaagcaggctgttgtcgtgatggcctgtgagaaccagcacatgggggatgacatggtgcaagagccaggccttgtcatgatatttgcgcatggcgtggaagagatataagagaactcgactggctatcaggaagagatggaaatcagaaaatcccatcactccagcagctgggacctgagtcctacccaccattcttaatactgtggcttatacctgagccacacatctccctgcccttctggcactgaagggccttggggtagtttgctcagcctttcaggtgggaaacccagatttcctccctttgccatattcccctaaaatgtctataaattatcagtctgggtgggaaagcccccacctcatcaaaaaaagacaaaaaaaaaa

SEQ ID NO: 55138 - DNA, 1031 bp, Homo sapiens
agcgggcgtagcagcggtgggcggggcaaaggatccgtctgaggcggcgacgagtggtaggagtcttctttcccctccttcccctttcccttcccttcccgggagaggctgggacccggcaccagggcagtactgtggccgctgcggcctcagctccgactgggtcaggttgcggagactccaggccgcttccagggcgagtactcctgattgtgacatcacattcatcccctgggcgatggagcttgtcactgggaaggaatactcagtcggagaatagccaacaagatgggttactgggagaatctcttcagtggcactgagtggaggcatcagggggttggagccttgtgaacagggaacctgccccccaacacttggaaggacctgggtttcagtgatgagacatggggtatgatgtaacccgtttccagggggatgttgacgaagatcttatctgccctatttgcagtggagtcttggaggagccagtacaggcacctcattgtgaacatgctttctgcaacgcctgcatcacccagtggttctctcagcaacagacatgtccagtggaccgtagtgttgtgacggtcgcccatctgcgcccagtacctcggatcatgcggaacatgttgtcaaagctgcagattgcctgtgacaacgctgtgttcggctgtagtgccgttgtccggcttgacaacctcatgtctcacctcagcgactgtgagcacaacccgaagcggcctgtgacctgtgaacagggctgtgggtgagatttgttcccttctgccccacatggataagggccatctcatttatgcccctgtctctggctgccctcctcactagctgaggaggtctctttggcatgttggcaaggagtattcttagcctccttggcttcctgctctaagatcttactttcttgctgcttttccaactataatcattttgctcttgctttaacaaaagaaggggcacagcaatttagtaaatttgtgtaataacattaaaggttgattgactctatt

SEQ ID NO: 55139 - DNA, 217 bp, Homo sapiens
aaaaaaaaacaaaaacaaataggaagtggggaactgtatgtactgacctatttttttcctgggatctactgaaaagaccagcttttgatacagccatgcactctgcattttgatgtgaaagctgccaccttcaataggtcatttctctgccagccttgccagaccagagtcagttgtatcatcctggggcaagtatgaggagaagctcacgattacc

SEQ ID NO: 55140 - DNA, 288 bp, Homo sapiens
gtaacttactttctccattttaacttcttaactcttggactctgtgaggaagggaaagctgtttgagaatctcactgcatcagtcactgactgggacagttgtggggattgcttgaagttgagatgacatcatctggatagacatctactaaatgtgagacaatgcattgtacacttaatgatcttgtagttatcagaagagtggttaaggtgcctgcaaaagtgaagtattagattggcagccctggtgccatctactcttcagtagtgaaatgaacacagaccttt

SEQ ID NO: 55141 - DNA, 2950 bp, Homo sapiens
aagaatttggactcatatcaagatgctctgaagaagaacaaccctttaggatagccactgcaacatcatgaccaaagacaaagaacctattgttaaaagcttccattttgtttgccttatgatcataatagttggaaccagaatccagttctccgacggaaatgaatttgcagtagacaagtcaaaaagaggtcttattcatgttccaaaagacctaccgctgaaaaccaaagtcttagatatgtctcagaactacatcgctgagcttcaggtctctgacatgagctttctatcagagttgacagttttgagactttcccataacagaatccagctacttgatttaagtgttttcaagttcaaccaggatttagaatatttggatttatctcataatcagttgcaaaagatatcctgccatcctattgtgagtttcaggcatttagatctctcattcaatgatttcaaggccctgcccatctgtaaggaatttggcaacttatcacaactgaatttcttgggattgagtgctatgaagctgcaaaaattagatttgctgccaattgctcacttgcatctaagttatatccttctggatttaagaaattattatataaaagaaaatgagacagaaagtctacaaattctgaatgcaaaaacccttcaccttgtttttcacccaactagtttattcgctatccaagtgaacatatcagttaatactttagggtgcttacaactgactaatattaaattgaatgatgacaactgtcaagttttcattaaatttttatcagaactcaccagaggtccaaccttactgaattttaccctcaaccacatagaaacgacttggaaatgcctggtcagagtctttcaatttctttggcccaaacctgtggaatatctcaatatttacaatttaacaataattgaaagcattcgtgaagaagattttacttattctaaaacgacattgaaagcattgacaatagaacatatcacgaaccaagtttttctgttttcacagacagctttgtacaccgtgttttctgagatgaacattatgatgttaaccatttcagatacaccttttatacacatgctgtgtcctcatgcaccaagcacattcaagtttttgaactttacccagaacgttttcacagatagtatttttgaaaaatgttccacgttagttaaattggagacacttatcttacaaaagaatggattaaaagaccttttcaaagtaggtctcatgacgaaggatatgccttctttggaaatactggatgttagctggaattctttggaatctggtagacataaagaaaactgcacttgggttgagagtatagtggtgttaaatttgtcttcaaatatgcttactgactctgttttcagatgtttacctcccaggatcaaggtacttgatcttcacagcaataaaataaagagcgttcctaaacaagtcgtaaaactggaagctttgcaagaactcaatgttgctttcaattctttaactgaccttcctggatgtggcagctttagcagcctttctgtattgatcattgatcacaattcagtttcccacccatcggctgatttcttccagagctgccagaagatgaggtcaataaaagcaggggacaatccattccaatgtacctgtgagctaagagaatttgtcaaaaatatagaccaagtatcaagtgaagtgttagagggctggcctgattcttataagtgtgactacccagaaagttatagaggaagcccactaaaggactttcacatgtctgaattatcctgcaacataactctgctgatcgtcaccatcggtgccaccatgctggtgttggctgtgactgtgacctccctctgcatctacttggatctgccctggtatctcaggatggtgtgccagtggacccagactcggcgcagggccaggaacatacccttagaagaactccaaagaaacctccagtttcatgcttttatttcatatagtgaacatgattctgcctgggtgaaaagtgaattggtaccttacctagaaaaagaagatatacagatttgtcttcatgagaggaactttgtccctggcaagagcattgtggaaaatatcatcaactgcattgagaagagttacaagtccatctttgttttgtctcccaactttgtccagagtgagtggtgccattacgaactctattttgcccatcacaatctctttcatgaaggatctaataacttaatcctcatcttactggaacccattccacagaacagcattcccaacaagtaccacaagctgaaggctctcatgacgcagcggacttatttgcagtggcccaaggagaaaagcaaacgtgggctcttttgggctaacattagagccgcttttaatatgaaattaacactagtcactgaaaacaatgatgtgaaatcttaaaaaaatttaggaaattcaacttaagaaaccattatttacttggatgatggtgaatagtacagtcgtaagtaactgtctggaggtgcctccattatcctcatgccttcaggaaagacttaacaaaaacaatgtttcatctggggaactgagctaggcggtgaggttagcctgccagttagagacagcccagtctcttctggtttaatcattatgtttcaaattgaaacagtctcttttgagtaaatgctcagtttttcagctcctctccactctgctttcccaaatggattctgttgtgagcaagagtttatatggcttcatggcagcaagggaacagtcaacttcagcatcatatgcaccagtcctcggagtgccctgtgaatcatattggtctttgggtcagtgtcatcattctcttcaagtctggggcttggggaaaaaattagatcagctacggcatataaaaaagtcttttgtttcacatatgtgtaa

SEQ ID NO: 55142 - DNA, 832 bp, Homo sapiens
  misc_feature (194)..(194): n is a, c, g, or t
tctaaaccattcgattggggcccgtggcccatctcatgtcatgtagaggatgcgtacttaacttagttcccttcatgagtacctctcgtggttcacatgtatcctagcatgacattaggacattctctccacacacaatgataaacacagacgccggaagggacatcctgttgcagctgcatgacggcaacatntcctagtatctaggaggtcctagacggatcaataaagtgagatctctagtgcaatcatgtgaggtgcataagcagatgacacgactatcataaataactcacccgttaccctgctagtcactgaaaacaatgatgtgaaatcttaaaaaaatttaggaaattcaacttaagaaaccattatttacttggatgatggtgaatagtacagtcgtaagtaactgtctggaggtgcctccattatcctcatgccttcaggaaagacttaacaaaaacaatgtttcatctggggaactgagctaggcggtgaggttagcctgccagttagagacagcccagtctcttctggtttaatcattatgtttcaaattgaaacagtctcttttgagtaaatgctcagtttttcagctcctctccactctgctttcccaaatggattctgttgtgagcaagagtttatatggcttcatggcagcaagggaacagtcaacttcagcatcatatgcaccagtcctcggagtgccctgtgaatcatattggtctttgggtcagtgtcatcattctcttcaagtctggggcttggggaaaaaattagatcagctacggcatataaaaaagtcttttgtttcacatatgtgtaa

SEQ ID NO: 55143 - DNA, 1720 bp, Homo sapiens
aatatgaactttcaaaaatagctgaaatgactacacagatgaagatctctgcaacaattggcatgtgagccagaattctgtaagctatgatgaaaagaaaggagactgttcttggactaaaagtttattaagtataaatttgtcttcaaatatgcttactgactctgttttcagatgtttacctcccaggatcaaggtacttgatcttcacagcaataaaataaagagcgttcctaaacaagtcgtaaaactggaagctttgcaagaactcaatgttgctttcaattctttaactgaccttcctggatgtggcagctttagcagcctttctgtattgatcattgatcacaattcagtttcccacccatcggctgatttcttccagagctgccagaagatgaggtcaataaaagcaggggacaatccattccaatgtacctgtgagctaagagaatttgtcaaaaatatagaccaagtatcaagtgaagtgttagagggctggcctgattcttataagtgtgactacccagaaagttatagaggaagcccactaaaggactttcacatgtctgaattatcctgcaacataactctgctgatcgtcaccatcggtgccaccatgctggtgttggctgtgactgtgacctccctctgcatctacttggatctgccctggtatctcaggatggtgtgccagtggacccagactcggcgcagggccaggaacatacccttagaagaactccaaagaaacctccagtttcatgcttttatttcatatagtgaacatgattctgcctgggtgaaaagtgaattggtaccttacctagaaaaagaagatatacagatttgtcttcatgagaggaactttgtccctggcaagagcattgtggaaaatatcatcaactgcattgagaagagttacaagtccatctttgttttgtctcccaactttgtccagagtgagtggtgccattacgaactctattttgcccatcacaatctctttcatgaaggatctaataacttaatcctcatcttactggaacccattccacagaacagcattcccaacaagtaccacaagctgaaggctctcatgacgcagcggacttatttgcagtggcccaaggagaaaagcaaacgtgggctcttttgggctaacattagagccgcttttaatatgaaattaacactagtcactgaaaacaatgatgtgaaatcttaaaaaaatttaggaaattcaacttaagaaaccattatttacttggatgatggtgaatagtacagtcgtaagtaactgtctggaggtgcctccattatcctcatgccttcaggaaagacttaacaaaaacaatgtttcatctggggaactgagctaggcggtgaggttagcctgccagttagagacagcccagtctcttctggtttaatcattatgtttcaaattgaaacagtctcttttgagtaaatgctcagtttttcagctcctctccactctgctttcccaaatggattctgttgtgagcaagagtttatatggcttcatggcagcaagggaacagtcaacttcagcatcatatgcaccagtcctcggagtgccctgtgaatcatattggtctttgggtcagtgtcatcattctcttcaagtctggggcttggggaaaaaattagatcagctacggcatataaaaaagtcttttgtttcacatatgtgtaa

SEQ ID NO: 55144 - DNA, 591 bp, Homo sapiens
ggcacactgtttgagcttcaggaaggcgaaagcctggcatagccgctgggtggagcaggagagaaagtcagcccggcctgaaggaatcgatggagtccaagggagcatagtggtacagggcctggggatggaggtgctgtgtccccagcttgagcaggagggtttttctactctgaacacggggtaggagtgggggaggtggtttgtagccctggtgtggggttggtgcctgggagaagcatgaggcactggggaggcacagggagctgatgaaaaagtggttctgatgaaaactatggtcagcaggaaacaggtaagagaccaagaggagaggggcttcagggcatctggggaggagtggagctccacagtacacgccaggagccttggtcctgtttcaggagtagcctgcctgagtgccaccatcaattacacatgtctggcttggttgtagatgtggcaagatagcaagaagtttcttggcttaaagaactctgtgaatgttggattcatggattgggtgttgactgctcttgggtcttgccacccccagaaagttttagcacgggtcacagagcagcgtcgggaggc

SEQ ID NO: 55145 - DNA, 625 bp, Homo sapiens
atgctgcagagtcagccccagcaatagtccaaaacagtgggactctttttgatgatttcaaaatggatagtttagttagccccaggccagataaattcactaagttgcctgtttggcaatggagggcagagttatcagcaaagtaggctgacccttctgtgggcagaatgaatattttgctaatgtttagaagaattccttttgtaagcatcaaagaagaactttaataaggattaagtgtctgagcttccttagcattattctattccaagacccaaaaaggaaaataacctccccaaatggtaaaaactgcttgtatatttagaattctctgatcaaagacctaatgaaaagattctatagtgtttgcgtcatcataagttaaatcttcatctaccacccaactgatacctgcctttctgtgagtgaaatcagaaacggctgttctttaataaatgctttcaatctgaaagtcagaaagtgatttatgaaacacccaggtgaggggagactacaagtccctttgccttttagttttcaagcaatactggttgcagtaactgctctgatgtaattattgctaacatttacgtttttattaaactgaaaatgctaactgtgaatg

SEQ ID NO: 55146 - DNA, 172 bp, Homo sapiens
caagagtaaaactccctctcaaaacaaacaaacaaaccaaaaaaacaaatagcaacagcaaccacaatcatcatcaccatcaaggctggaacaaggatgaggcaggcaggctctgatagcaacaggaggaagcagaccaaggagggagagaaaggaaggcagagaaggggaa

SEQ ID NO: 55147 - DNA, 340 bp, Homo sapiens
ttcagctcaactaggactttaaacatggaatggtccttatagaacccaaagcagccatttcctcaggtgtgtgtgtgtgtgtgtatgtgtgcgtgtgtgtgtgtgtgtgtgtgtgtgagagagagagagatgtctgtctgatcatagtacttgaattcatgatacatgaagtactacaattgactgcaaataacaacagcttaaaatttctttaactagtcttaacaccatgcaaaaaatgccctcacagcatgagccctcccggtgacagtacactaaagagctataagggaggatagagagagcctacacagggcatgatccgaatttggacaccagt

SEQ ID NO: 55148 - DNA, 420 bp, Homo sapiens
gaaaacaaggcagctgtggaggaatggaaagagaactagactgagagcaggagctcagatttccaggaccagctcatatgacggctttatgactacagccaccttgaagcatctctgaacatcagtgtcctcatctgtaaaatgaggtatttgattatgcgatctctaaggtcctttctaatgctaacacttcatgattctaagatgttatgaaatcatctgagtcactgtcaaactcaaaatcaagctttgccaaggagagccatttgtgaattgcaggatggccaattatcttgactggacaatataacagttcaaaagagagaacaacaaattataattcttttttttcttgtccaaggcaagatgattggttctgaaaatcacgcactgttcttagctcaaaatcccagacaagtt

SEQ ID NO: 55149 - DNA, 353 bp, Homo sapiens
cttgtttacaggttttgaaaggtttgttagattagtatttacttttaattttttgagtaatagaatgcgtttaggttctaaattactatggaaatggcatagtgaggattcttcacagatattagagaccttcaacaacatagtgaaaatagatttgttctttcttgtaaatagctgaactatgagaatttgatctgtcactggagggggcatttgctctgaagtttgccaaagtaaaaataactttgctctttagtaagaaaaagctatatttttcaatactggctgccacagcaaacaaacaaagtcttgtttgtgttttaatattggcaaaggaaaaattctctatataa

SEQ ID NO: 55150 - DNA, 387 bp, Homo sapiens
ctttgggaaggaattcagctcatggcttgattctgaaacaaaactgacaaagccttttcccaaaaagaccccctttttgccttgggaccagtctgcccttgcaagactaacaaattagctacaagattagaaattacagtttaggggtcatgcagcctctggctccaagagtctgaacctccctaaattcctcctggggataacatcagcattgtaaaacctaaggtcagtgcttgagatattttgtagaccctatgttggatggatcagctgacaccaaggagaccagtaatctggctcaaccagttctgccatcccacccaggaaaagacagcaagaaaacctcacttgaacccactatgattccatcttcaacctgaccagtca

SEQ ID NO: 55151 - DNA, 241 bp, Homo sapiens
tatcttgttgaatttggtttgctagtattttgctaacaatttttgcatcaatattcatcagggatattggcctgtagttttattttttaattatttttgaggtgtctttttttggttttggtttcagagtaataccagtcttgcagaatgcatttggaagtattccctcctcttctatattttgaaatagtttgagtagaattggtattagttcttctttaaatatttggtagaattcagc

SEQ ID NO: 55152 - DNA, 1438 bp, Homo sapiens
ctggaagaggcctcagcaggcccaggccacctggagggagagcagacctgcggctgaggatgcagggctcccgggcacggtgctagccctgccttgagacaccccgagagctgtgggaagagctgtgggatcccctattgcatcacaaagcggccctggagggctggtctttattttgatgaggctgagaagggaaggctgcgggcatgtttaatccgcatgctttagactccccggctgtgatttttgacaatggctcggggttctgcaaagcgggcctgtctggggagtttggaccccggcacatggtcagctccatcgtggggcacctgaaattccaggctccctcagcagaggccaaccagaagaagtactttgtgggggaggaggccctgtacaagcaggaggccctgcagctgcactcccctttcgagcgtggcctgatcacagggtgggatgacgtggagagactctggaagcacctctttgagtgggagctaggcgtgaaacccagcgaccagcccctgcttgcaacggagccctccctgaaccccagggagaaccgtgagaagatggcagaagtcatgttcgagaacttcggcgtgcccgctttctacctgtcggaccaggcggtgctggctctctacgcctctgcctgtgtcacgggcctggtggtggacagcggggatgcggtcacctgcactgtccccatctttgagggttactccctgccccacgcagtcaccaagctccacgtggcgggcagggacatcacggagctcctcatgcagctgctcctggccagcggccacaccttcccctgccagctggacaagggtctcgtggacgacatcaaaaagaagctgtgctacgtggccttggagcccgagaaggagctttcccggaggccggaggaggtcctgagggagtacaagctgcccgacgggaacatcatcagcctcggggacccgctgcaccaggcgcccgaggccctgttcgtgccccagcagctgggcagccagagccccgggctctcgaatatggtctccagcagcatcaccaagtgtgataccgacatccagaagatcctctttggggagattgtgctgtcggggggcactaccctgttccacgggctggatgaccggcttctcaaggagctggagcagctggcctccaaggacacccccatcaagatcacggctccccccgaccggtggttctccacctggattggagcctccatcgtcacctctctgagtagcttcaagcagatgtgggtcaccgccgcagacttcaaggagtttgggacctccgtggtgcagagaagatgcttctgaaggccgcttctcgttgggtaccgtggggggtgaaccctagccccagctttgggaggatgttcaataaaggaccaatgccggaaaaacctggccacctc

SEQ ID NO: 55153 - DNA, 1438 bp, Homo sapiens
tgctgctggccccggtatggatggccatgcactgtaggagagcagacctgcggctgaggatgcagggctcccgggcacggtgctagccctgccttgagacaccccgagagctgtgggaagagctgtgggatcccctattgcatcacaaagcggccctggagggctggtctttattttgatgaggctgagaagggaaggctgcgggcatgtttaatccgcatgctttagactccccggctgtgatttttgacaatggctcggggttctgcaaagcgggcctgtctggggagtttggaccccggcacatggtcagctccatcgtggggcacctgaaattccaggctccctcagcagaggccaaccagaagaagtactttgtgggggaggaggccctgtacaagcaggaggccctgcagctgcactcccctttcgagcgtggcctgatcacagggtgggatgacgtggagagactctggaagcacctctttgagtgggagctaggcgtgaaacccagcgaccagcccctgcttgcaacggagccctccctgaaccccagggagaaccgtgagaagatggcagaagtcatgttcgagaacttcggcgtgcccgctttctacctgtcggaccaggcggtgctggctctctacgcctctgcctgtgtcacgggcctggtggtggacagcggggatgcggtcacctgcactgtccccatctttgagggttactccctgccccacgcagtcaccaagctccacgtggcgggcagggacatcacggagctcctcatgcagctgctcctggccagcggccacaccttcccctgccagctggacaagggtctcgtggacgacatcaaaaagaagctgtgctacgtggccttggagcccgagaaggagctttcccggaggccggaggaggtcctgagggagtacaagctgcccgacgggaacatcatcagcctcggggacccgctgcaccaggcgcccgaggccctgttcgtgccccagcagctgggcagccagagccccgggctctcgaatatggtctccagcagcatcaccaagtgtgataccgacatccagaagatcctctttggggagattgtgctgtcggggggcactaccctgttccacgggctggatgaccggcttctcaaggagctggagcagctggcctccaaggacacccccatcaagatcacggctccccccgaccggtggttctccacctggattggagcctccatcgtcacctctctgagtagcttcaagcagatgtgggtcaccgccgcagacttcaaggagtttgggacctccgtggtgcagagaagatgcttctgaaggccgcttctcgttgggtaccgtggggggtgaaccctagccccagctttgggaggatgttcaataaaggaccaatgccggaaaaacctggccacctc

SEQ ID NO: 55154 - DNA, 1248 bp, Homo sapiens
atcagaactcttcggctctggattgaagccgacgccactgttcctggcaagcctcattgccctccgatcccggcgttggcctccgtccctgtcaggtcttgtacgatgctgctctctgccatcctgccgtctccagctctgcctgcatgttggtcctgcattgctctccacctcacagactcttattccacggctctggccagtccaaagcatacatggcccagttagttcccttttacttgaaatattccctgaggagcccccaggtatttttccttactcactggagacttgtagtcagggccacactgatgtcatttgggaattatttgcaaagtcacagatctggacttctctctccagctaaatcatgagttcctcagctaaatcacgggcccacagttctgcagcagctggtaaacacttttagtcacggaaggaagcctttttcggttctcagctctgcaaggaacttatttcacgtacacaaaaccacaaaccgtgagaggattgctgcctgtatcctgttcccctcatctttttttttctttgaaaagatggtaaagctgattataagaatttaaataacgtggccctagaactacactctgactctgatccgcgtgtcctgcccacagcaccaggccacgaagacagaccatgtcgctatcctcacatttgcttgtaacttaggaggcttgccagtaaaatcgatactaacagtggacgtacttctctttgaataagtttattctatttccttctcccattttctttatttgttgaaaagaatgatgctgattgagaagccaaatattgttaaccattttccccgtctggcacggttcttttgcacagcactggattaggccaggggactggcctaaccctgcaaatatcaggaaaggactcttctagggaaagtcgtactaatttgaattgatcactagaaatacatggtctccacctaaaagatgctttgtcacttaaaaggctgagtagtcatcataatgtaaagaaacctctattgtcatgcaaccatttgcacccagacattgtgcctggttggcacttaacattttatcacttgattctcacaccacccttgcaatgtgatgaaaccaaggctcctaggtgctaagtgacattcccctagtcacgcagcctagtgctagtcacgcagcctagtggtagagcgaggattcaaacccagtttttgttttcctttgagctggagctgcaagaaaa

SEQ ID NO: 55155 - DNA, 378 bp, Homo sapiens
gcattcatccaagttattggatccagtgcttcatttctctccagctggaatactgccatgaatcaacaggtctctcaaaacctgatcataacctgcttaacttccagcagtgaccataacttagaatttgttagtgccatctgcattggctggggtcagtattggccataactgcacttgagctcaactcatcaatgagacactttatgctgaaaatgtttcttctaaaattggtcttgctccactagcctcaggtttattccccagggaaaacaaaacattgttaaccaaaaatatttacctaatgtacaacttggtcttgacccatctttgtttattgtctgtcttgtctcaaaattaaagatcttagcttctgtc

SEQ ID NO: 55156 - DNA, 293 bp, Homo sapiens
tggaggacgctggggtgggccatctgggcctctcgtggacagaggttgactctaccacccagtgggcaacaagagaatccagtacctcccatgtgtggtgtgtgacctgccaccaagcacagcacattgcacacccgtgtcacatccaccgcacacaccagtcagagactccagtcctttttcgggtgtaagccatcatttgctgagcctgtgctccgggccaggcctgcactaagcactttgcatcccctctcttagtgagtcatcacagaaacccttagggtatgttatta

SEQ ID NO: 55157 - DNA, 286 bp, Homo sapiens
ccaacttcctgtggttacaaacagggttgaattatctaggaacatgggcaaacactggtctgtaaatctcctaagtggtaatgtgggaaccccctaagagtttagcagttgagctctttcttccaaacttctctttctctaggcggaacttcccaagctgccaatggcctccattggggcctggtcatttagagggaaaaatgacatcagcaacctaggtgctgacagctgacaaagttctttcaaatgcacaatgaaaccggcctttgcaatcatgccttagaaa

SEQ ID NO: 55158 - DNA, 217 bp, Homo sapiens
ctgatcctacacagctaacatgccttcaggggtcactgcataaagagacttaagtaagctccccaagtaacagcagctagtcccaggaaaagggaagacttaaaatattttgaaattgagtgagaaggtatcaggtgtctcataaatgaggagaaacttggtttgcttgacttccctgtgctgccctccctgcctctcccttttcatcaaatgtagt

SEQ ID NO: 55159 - DNA, 247 bp, Homo sapiens
atatgataaatgattatttcatctctgttttctgctccttatacattttaaaccgtattcatataaacatttatagtaccttgtttcagttctattttgaatagtcataatattgaagtcagttcactgttgtcttcagggaagtttgaagagaagtcacatacctagactgatgttttgcatgtttaaaaaaatcatctttctatttacatcatgcagcaattagcaagaacaagttttgcaagag

SEQ ID NO: 55160 - DNA, 270 bp, Homo sapiens
gacccatctgtgttaggtcccggaggctctggaatccctccacttctctctaccatcactcgcctcagctattctaatctcctaataatagatatccccttcaaataggttccctattcagagcccaagtgatctgttaaaaagggaacttgaatcctgtcatcccactgctcaaaggagttctagttttgtatgactctgaagacaaagatggaaatcagtactgtggccctcaaggccccaagggatctggtccctcttacctcctct

SEQ ID NO: 55161 - DNA, 933 bp, Homo sapiens
tcaacacttagacattgcaaatattcagtaacaaaactgattgaaggaaaagagtacctcttccgtgtaagagctgaaaacagatttgggccaggtccaccatgtgtttcaaagccacttgtggctaaagatccatttggaccacctgatgcaccagataagcccattgtggaagatgttaccagcaacagtatgctagtgaaatggaatgaaccaaaagataatggaagccccattttgggttactggcttgaaaaacgtgaagttaacagtacacattggtctcgtgtcaacaaaagccttctgaatgccttgaaagccaatgtagatggcttattagaaggactcacctatgtcttcagagtatgtgctgaaaatgcagctggacctggaaagttcagtccaccttcagatcccaaaacagcacatgatccaatctgtaagtagttccttaagaagaaggtggagtagaacaagctattgtacattttaaaaccatcagggagtttgatttgtctatcttcattcattctagctcctcctgggccacctatcccaagagtcactgacacaagctctacaactattgaactagaatgggaacccccagctttcaatggtggtggggaaattgttggctattttgttgataagcagttggttggcacaaatgaatggtcacgctgcacagagaagatgatcaaggtccgtcagtacaccgtcaaagaaatccgagagggtgctgattacaaacttcgggtgagtgctgtcaatgccgcaggggaaggaccgcctggagaaacacaacctgttactgtggctgaaccacaagagcctccagctgtggaactggatgtttctgtcaagggtggaatacaaataatggctgggaagactcttagaattccagctgtggtgactggtcgccctgta

SEQ ID NO: 55162 - DNA, 3547 bp, Homo sapiens
gcgtcgccctcctcccattgagcgaggctgtgtcgcgtggcccagcgtcggcgtgacggttggacgcgggcgcggcactgcgggtcccgattgctgcagccgcttgtcagtgtgatgaagattggcacccagacaccattcgcttttcacccaagatgatttgatgtcttataaaactctgatgaaccatgatggctacacagacattaagtatagacagctatcaagatgggcaacagatgcaagtagtaacagagttaaagacagaacaagatccaaactgctctgaacccgatgcagaaggagtgagccctccccctgtggagtctcagaccccgatggatgtggacaagcaggccatttataggcatccactatttccattattagctttgttgtttgaaaaatgtgaacaatctacacagggctctgaaggcacaacttctgccagttttgatgtagacatcgaaaattttgtaagaaagcaagagaaggaagggaaacctttcttttgtgaagatccagaaaccgataatttaatggtaaaagcaatccaggttttgcgcattcatcttcttgagctggaaaaggttaacgaactctgcaaagatttctgcagtcgatacattgcttgtctgaaaacaaaaatgaacagtgaaactctgttgagtggagagcctggaagcccgtactcaccagtgcagtcccagcagattcaaagtgccatcacaggcaccatcagccctcagggaattgtggtgccggcgtccgcgctgcagcagggaaacgtagccatggcgacggtggcaggtggcacagtgtatcagcctgtcacggtcgtcactccccaaggccaagtggtcacacagacattgtcgcctgggacaattaggatccagaactcccagcttcagttacagttaaaccaagatctcagcatcttgcatcaagatgatggttcatctaagaacaagaggggcgtcctgccaaagcatgccacgaacgtgatgcggtcctggctcttccagcacatcgggcatccctacccaacagaggatgagaaaaaacagattgctgctcagacaaatttgacactactccaagtcaacaactggttcatcaatgccagaagacgaattcttcagccaatgttggattcaagttgttcagagacccccaaaacaaagaaaaaaactgctcagaaccggccagttcagaggttttggcctgattctattgcatcaggagtcgcacagccaccgccgagcgagctcaccatgtcggaaggagctgttgtcaccatcaccacgcccgtgaacatgaacgtggacagccttcagtctctgtcctcggacggggccaccctggcggtgcagcaggtcatgatggcagggcagagcgaggacgagtctgtggacagcacagaggaggatgcgggtgccctggcccctgcccacatcagcgggctggtcttggagaacagtgactccctgcagtaggggcaggagcagacgcacctgactttttggagtttgcacagcaaacattttacacagttttatttctaatatgttttatatgtagatatagaagagtgcacttttgtatttcatagtaagcttaaagcgcgtctttgccggtgcagcgacttctttcaagtgtgtgtgtgtgtgtgtgtgtgcgtgtgtgcgtgtgtgtggatttttaaagaaattctttaaaggtttaacgctagattgtgaggaatgacacaccactccctccccaccttgaatccctaattagattaaggaatagcgctgccattttctaaaccgtgatgcggttgtcacttagttctgtggttccagcagatctcagtgggctggttgatttgtgtggcccatggatttgaaagaagctgctgcacccgaaactgccagtgtgcggtgacaacggcacacgcctagactgagtgtggtttcgtcgtgagtggatggacggcaagcttagcaagcctaagtcccctcatgttcagtgagcctgtttcatttgctatatagaaaaagaaactcctatttttaccttgctggaattattggataaaaaagctatttttataaattcgttatgaattggatgatgactatattgaggataaaatttctagagaagaaacaatacatgcttgctattaatatttcaatttggaatgttctgaattgaccaaatttaatgaacctgcccaaagttagctaccgttccatggttctttgctctccccgggtagtgatgaacatttactactataaaagaaacagctatttaatgaaattttgatatctgcaaatttttgttgatatgtaatgctcagattgcattttacacttgatctaaacatatatcgaaagatatctgctaaacaggacttcaggtaagtgaggtgaaatggtagccagtgacccgttaggagctctcaccgtacatactccagtctaatttaaatctgaccacagttgcatggtcgctttaccatgttagctgtgtattgttttaaaagttttaacttcaaaatatgttatgcacagaatgtttattataaactaatataaaatgtgctctaccccattggctcagagctagggcaaacagcagatattcagactttattacttaactagcggacatccctggagtcccagcagcgagttggtctggcgagggcacctcggcagcccccacgggttggctcctacgtttgcgtttgtggctggtctcctggtgtcagtgttctcttgtacgttgttgctttcgacttttcagagccctcctgctcacttgaccacgtgagatttggaataactgtaggacttctgtttcctggtaacaagatgaaccgagagagtgggctgggttctgttttctttggtttcgatttgttttcattgtttacttaggagtggtgctttttctcagaaaacaggccacggtgtttcatacagaatgtcttcatatcatctgaaatggtatggctgaagttcatttgtttacagggtcgggaatgtcttcagttcttgagagtcaacagtaatgattggttgtaagccaagggacattttaagctagtgaagagttttttctggaattgatttttcccaaaagaatatattaattgaggttaagaagtcagtgggaaacacacagaaatttgttttaaaatctttcaggagctttactgaaagacttggttatcaagtcttttggggagagtctccgtcgaacttttttttttgagacagagttttgctcttgttgcccaggctggagggcaatggtgcccccgctccccacccttgaattatgcacatctcatggttttttttgctgctttttttttcaaaagcagctttactgagatataatttatattctataaaattcacctgtttcaagtatacaattcaatgactttgagtaaatgtacagcgttgtgtgaccatcgccacaatctaattttagaacattttcatcacagcaaaaatgatcccttgtacccattccggaattc

SEQ ID NO: 55163 - DNA, 1532 bp, Homo sapiens
ggctcatgcctgtaatcccagcactttgggaggccgaggcgggtggatctcctgaggtcgggagttcgagaccagcctgaccaacatggagaaaccccgtctctactaaaaacacaaaattatccaggcatggtggcacatgactgtaatcccagctactagggaggctgaggcaggagaaacacttgaacctgggaggcggaggttgaggtgagccgagatcgcgccattgcactccagcctgggcaacaagagtgaaactcggtctcaaaaaaaaaaaatttgatgttatggaatgagggagacaaaaaatgctctacaactattaactgatgcttttctggttttgttctccagacaccattcgcttttcacccaagatgatttgatgtcttataaaactctgatgaaccatgatggctacacagacattaagtatagacagctatcaagatgggcaacagatgcaagtagtaacagagttaaagacagaacaagatccaaactgctctgaacccgatgcagaaggagtgagccctccccctgtggagtctcagaccccgatggatgtggacaagcaggccatttataggcatccactatttccattattagctttgttgtttgaaaaatgtgaacaatctacacagggctctgaaggcacaacttctgccagttttgatgtagacatcgaaaattttgtaagaaagcaagagaaggaagggaaacctttcttttgtgaagatccagaaaccgataatttaatggtaaaagcaatccaggttttgcgcattcatcttcttgagctggaaaaggttaacgaactctgcaaagatttctgcagtcgatacattgcttgtctgaaaacaaaaatgaacagtgaaactctgttgagtggagagcctggaagcccgtactcaccagtgcagtcccagcagattcaaagtgccatcacaggcaccatcagccctcagggaattgtggtgccggcgtccgcgctgcagcagggaaacgtagccatggcgacggtggcaggtacgatgacagaaaaatggacacgctctccatgagtttttgcagaaaatggtcctgtgtgttagaatgacagtataaatataatttcaagttcatgccattttctaatatagcaatgttagaagctagaggtctctgaatgcctctttcttgttaatactcaataacaaatattttatgcagattgtgtttctttgtttctctaccaaaaatatattggaaagaaaaaaggttttatgtaggaattgaaaatatacaccaaaaaccagttgtcattttcaaataacatagctttttgttgtgcttttaatagcaccgtgaaaatcttaagttttatcattaattgatgacaaataaaaatgcagtcttagcattggtattacttgtagaacaaaaccgttacaggaaagggacagattccagagttccctgatgcgtagagaacattgaaaacacaaagcatcatggaaatgggacacggcaaagagggaggggta

SEQ ID NO: 55164 - DNA, 2183 bp, Homo sapiens
gcgtcgccctcctcccattgagcgaggctgtgtcgcgtggcccagcgtcggcgtgacggttggacgcgggcgcggcactgcgggtcccgattgctgcagccgcttgtcagtgtgatgaagattggcacccagacaccattcgcttttcacccaagatgatttgatgtcttataaaactctgatgaaccatgatggctacacagacattaagtatagacagctatcaagatgggcaacagatgcaagtagtaacagagttaaagacagaacaagatccaaactgctctgaacccgatgcagaaggagtgagccctccccctgtggagtctcagaccccgatggatgtggacaagcaggccatttataggcatccactatttccattattagctttgttgtttgaaaaatgtgaacaatctacacagggctctgaaggcacaacttctgccagttttgatgtagacatcgaaaattttgtaagaaagcaagagaaggaagggaaacctttcttttgtgaagatccagaaaccgataatttaatggtaaaagcaatccaggttttgcgcattcatcttcttgagctggaaaaggttaacgaactctgcaaagatttctgcagtcgatacattgcttgtctgaaaacaaaaatgaacagtgaaactctgttgagtggagagcctggaagcccgtactcaccagtgcagtcccagcagattcaaagtgccatcacaggcaccatcagccctcagggaattgtggtgccggcgtccgcgctgcagcagggaaacgtagccatggcgacggtggcaggtggcacagtgtatcagcctgtcacggtcgtcactccccaaggccaagtggtcacacagacattgtcgcctgggacaattaggatccagaactcccagcttcagttacagttaaaccaagatctcagcatcttgcatcaagatgatggttcatctaagaacaagaggggcgtcctgccaaagcatgccacgaacgtgatgcggtcctggctcttccagcacatcgggcatccctacccaacagaggatgagaaaaaacagattgctgctcagacaaatttgacactactccaagtcaacaactggttcatcaatgccagaagacgaattcttcagccaatgttggattcaagttgttcagagacccccaaaacaaagaaaaaaactgctcagaaccggccagttcagaggttttggcctgattctattgcatcaggagtcgcacagccaccgccgagcgagctcaccatgtcggaaggagctgttgtcaccatcaccacgcccgtgaacatgaacgtggacagccttcagtctctgtcctcggacggggccaccctggcggtgcagcaggtcatgatggcagggcagagcgaggacgagtctgtggacagcacagaggaggatgcgggtgccctggcccctgcccacatcagcgggctggtcttggagaacagtgactccctgcagtaggggcaggagcagacgcacctgactttttggagtttgcacagcaaacattttacacagttttatttctaatatgttttatatgtagatatagaagagtgcacttttgtatttcatagtaagcttaaagcgcgtctttgccggtgcagcgacttctttcaagtgtgtgtgtgtgtgtgtgtgtgcgtgtgtgcgtgtgtgtggatttttaaagaaattctttaaaggtttaacgctagattgtgaggaatgacacaccactccctccccaccttgaatccctaattagattaaggaatagcgctgccattttctaaaccgtgatgcggttgtcacttagttctgtggttccagcagatctcagtgggctggttgatttgtgtggcccatggatttgaaagaagctgctgcacccgaaactgccagtgtgcggtgacaacggcacacgcctagactgagtgtggtttcgtcgtgagtggatggacggcaagcttagcaagcctaagtcccctcatgttcagtgagcctgtttcatttgctatatagaaaaagaaactcctatttttaccttgctggaattattggataaaaaagctatttttataaattcgttatgaattggatgatgactatattgaggataaaatttctagagaagaaacaatacatgcttgctattaatatttc

SEQ ID NO: 55165 - DNA, 3539 bp, Homo sapiens
gcgtcgccctcctcccattgagcgaggctgtgtcgcgtggcccagcgtcggcgtgacggttggacgcgggcgcggcactgcgggtcccgattgctgcagccgcttgtcagtgtgatgaagattggcacccagacaccattcgcttttcacccaagatgatttgatgtcttataaaactctgatgaaccatgatggctacacagacattaagtatagacagctatcaagatgggcaacagatgcaagtagtaacagagttaaagacagaacaagatccaaactgctctgaacccgatgcagaaggagtgagccctccccctgtggagtctcagaccccgatggatgtggacaagcaggccatttataggcatccactatttccattattagctttgttgtttgaaaaatgtgaacaatctacacagggctctgaaggcacaacttctgccagttttgatgtagacatcgaaaattttgtaagaaagcaagagaaggaagggaaacctttcttttgtgaagatccagaaaccgataatttaatggtaaaagcaatccaggttttgcgcattcatcttcttgagctggaaaaggttaacgaactctgcaaagatttctgcagtcgatacattgcttgtctgaaaacaaaaatgaacagtgaaactctgttgagtggagagcctggaagcccgtactcaccagtgcagtcccagcagattcaaagtgccatcacaggcaccatcagccctcagggaattgtggtgccggcgtccgcgctgcagcagggaaacgtagccatggcgacggtggcaggtggcacagtgtatcagcctgtcacggtcgtcactccccaaggccaagtggtcacacagacattgtcgcctgggacaattaggatccagaactcccagcttcagttacagttaaaccaagatctcagcatcttgcatcaagatgatggttcatctaagaacaagaggggcgtcctgccaaagcatgccacgaacgtgatgcggtcctggctcttccagcacatcgggcatccctacccaacagaggatgagaaaaaacagattgctgctcagacaaatttgacactactccaagtcaacaactggttcatcaatgccagaagacgaattcttcagccaatgttggattcaagttgttcagagacccccaaaacaaagaaaaaaactgctcagaaccggccagttcagaggttttggcctgattctattgcatcaggagtcgcacagccaccgccgagcgagctcaccatgtcggaaggagctgttgtcaccatcaccacgcccgtgaacatgaacgtggacagccttcagtctctgtcctcggacggggccaccctggcggtgcagcaggtcatgatggcagggcagagcgaggacgagtctgtggacagcacagaggaggatgcgggtgccctggcccctgcccacatcagcgggctggtcttggagaacagtgactccctgcagtaggggcaggagcagacgcacctgactttttggagtttgcacagcaaacattttacacagttttatttctaatatgttttatatgtagatatagaagagtgcacttttgtatttcatagtaagcttaaagcgcgtctttgccggtgcagcgacttctttcaagtgtgtgtgtgtgtgcgtgtgtgcgtgtgtgtggatttttaaagaaattctttaaaggtttaacgctagattgtgaggaatgacacaccactccctccccaccttgaatccctaattagattaaggaatagcgctgccattttctaaaccgtgatgcggttgtcacttagttctgtggttccagcagatctcagtgggctggttgatttgtgtggcccatggatttgaaagaagctgctgcacccgaaactgccagtgtgcggtgacaacggcacacgcctagactgagtgtggtttcgtcgtgagtggatggacggcaagcttagcaagcctaagtcccctcatgttcagtgagcctgtttcatttgctatatagaaaaagaaactcctatttttaccttgctggaattattggataaaaaagctatttttataaattcgttatgaattggatgatgactatattgaggataaaatttctagagaagaaacaatacatgcttgctattaatatttcaatttggaatgttctgaattgaccaaatttaatgaacctgcccaaagttagctaccgttccatggttctttgctctccccgggtagtgatgaacatttactactataaaagaaacagctatttaatgaaattttgatatctgcaaatttttgttgatatgtaatgctcagattgcattttacacttgatctaaacatatatcgaaagatatctgctaaacaggacttcaggtaagtgaggtgaaatggtagccagtgacccgttaggagctctcaccgtacatactccagtctaatttaaatctgaccacagttgcatggtcgctttaccatgttagctgtgtattgttttaaaagttttaacttcaaaatatgttatgcacagaatgtttattataaactaatataaaatgtgctctaccccattggctcagagctagggcaaacagcagatattcagactttattacttaactagcggacatccctggagtcccagcagcgagttggtctggcgagggcacctcggcagcccccacgggttggctcctacgtttgcgtttgtggctggtctcctggtgtcagtgttctcttgtacgttgttgctttcgacttttcagagccctcctgctcacttgaccacgtgagatttggaataactgtaggacttctgtttcctggtaacaagatgaaccgagagagtgggctgggttctgttttctttggtttcgatttgttttcattgtttacttaggagtggtgctttttctcagaaaacaggccacggtgtttcatacagaatgtcttcatatcatctgaaatggtatggctgaagttcatttgtttacagggtcgggaatgtcttcagttcttgagagtcaacagtaatgattggttgtaagccaagggacattttaagctagtgaagagttttttctggaattgatttttcccaaaagaatatattaattgaggttaagaagtcagtgggaaacacacagaaatttgttttaaaatctttcaggagctttactgaaagacttggttatcaagtcttttggggagagtctccgtcgaacttttttttttgagacagagttttgctcttgttgcccaggctggagggcaatggtgcccccgctccccacccttgaattatgcacatctcatggttttttttgctgctttttttttcaaaagcagctttactgagatataatttatattctataaaattcacctgtttcaagtatacaattcaatgactttgagtaaatgtacagcgttgtgtgaccatcgccacaatctaattttagaacattttcatcacagcaaaaatgatcccttgtacccattccggaattc

SEQ ID NO: 55166 - DNA, 2408 bp, Homo sapiens
ggctcatgcctgtaatcccagcactttgggaggccgaggcgggtggatctcctgaggtcgggagttcgagaccagcctgaccaacatggagaaaccccgtctctactaaaaacacaaaattatccaggcatggtggcacatgactgtaatcccagctactagggaggctgaggcaggagaaacacttgaacctgggaggcggaggttgaggtgagccgagatcgcgccattgcactccagcctgggcaacaagagtgaaactcggtctcaaaaaaaaaaaatttgatgttatggaatgagggagacaaaaaatgctctacaactattaactgatgcttttctggttttgttctccagacaccattcgcttttcacccaagatgatttgatgtcttataaaactctgatgaaccatgatggctacacagacattaagtatagacagctatcaagatgggcaacagatgcaagtagtaacagagttaaagacagaacaagatccaaactgctctgaacccgatgcagaaggagtgagccctccccctgtggagtctcagaccccgatggatgtggacaagcaggccatttataggcatccactatttccattattagctttgttgtttgaaaaatgtgaacaatctacacagggctctgaaggcacaacttctgccagttttgatgtagacatcgaaaattttgtaagaaagcaagagaaggaagggaaacctttcttttgtgaagatccagaaaccgataatttaatggtaaaagcaatccaggttttgcgcattcatcttcttgagctggaaaaggttaacgaactctgcaaagatttctgcagtcgatacattgcttgtctgaaaacaaaaatgaacagtgaaactctgttgagtggagagcctggaagcccgtactcaccagtgcagtcccagcagattcaaagtgccatcacaggcaccatcagccctcagggaattgtggtgccggcgtccgcgctgcagcagggaaacgtagccatggcgacggtggcaggtggcacagtgtatcagcctgtcacggtcgtcactccccaaggccaagtggtcacacagacattgtcgcctgggacaattaggatccagaactcccagcttcagttacagttaaaccaagatctcagcatcttgcatcaagatgatggttcatctaagaacaagaggggcgtcctgccaaagcatgccacgaacgtgatgcggtcctggctcttccagcacatcgggcatccctacccaacagaggatgagaaaaaacagattgctgctcagacaaatttgacactactccaagtcaacaactggttcatcaatgccagaagacgaattcttcagccaatgttggattcaagttgttcagagacccccaaaacaaagaaaaaaactgctcagaaccggccagttcagaggttttggcctgattctattgcatcaggagtcgcacagccaccgccgagcgagctcaccatgtcggaaggagctgttgtcaccatcaccacgcccgtgaacatgaacgtggacagccttcagtctctgtcctcggacggggccaccctggcggtgcagcaggtcatgatggcagggcagagcgaggacgagtctgtggacagcacagaggaggatgcgggtgccctggcccctgcccacatcagcgggctggtcttggagaacagtgactccctgcagtaggggcaggagcagacgcacctgactttttggagtttgcacagcaaacattttacacagttttatttctaatatgttttatatgtagatatagaagagtgcacttttgtatttcatagtaagcttaaagcgcgtctttgccggtgcagcgacttctttcaagtgtgtgtgtgtgtgtgtgtgtgcgtgtgtgcgtgtgtgtggatttttaaagaaattctttaaaggtttaacgctagattgtgaggaatgacacaccactccctccccaccttgaatccctaattagattaaggaatagcgctgccattttctaaaccgtgatgcggttgtcacttagttctgtggttccagcagatctcagtgggctggttgatttgtgtggcccatggatttgaaagaagctgctgcacccgaaactgccagtgtgcggtgacaacggcacacgcctagactgagtgtggtttcgtcgtgagtggatggacggcaagcttagcaagcctaagtcccctcatgttcagtgagcctgtttcatttgctatatagaaaaagaaactcctatttttaccttgctggaattattggataaaaaagctatttttataaattcgttatgaattggatgatgactatattgaggataaaatttctagagaagaaacaatacatgcttgctattaatatttc

SEQ ID NO: 55167 - DNA, 2966 bp, Homo sapiens
gctggaagagccaggaccgcatcacgttcgtggcatgctttggcaggacgcccctcttgttcttagatgaacagtgaaactctgttgagtggagagcctggaagcccgtactcaccagtgcagtcccagcagattcaaagtgccatcacaggcaccatcagccctcagggaattgtggtgccggcgtccgcgctgcagcagggaaacgtagccatggcgacggtggcaggtggcacagtgtatcagcctgtcacggtcgtcactccccaaggccaagtggtcacacagacattgtcgcctgggacaattaggatccagaactcccagcttcagttacagttaaaccaagatctcagcatcttgcatcaagatgatggttcatctaagaacaagaggggcgtcctgccaaagcatgccacgaacgtgatgcggtcctggctcttccagcacatcgggcatccctacccaacagaggatgagaaaaaacagattgctgctcagacaaatttgacactactccaagtcaacaactggttcatcaatgccagaagacgaattcttcagccaatgttggattcaagttgttcagagacccccaaaacaaagaaaaaaactgctcagaaccggccagttcagaggttttggcctgattctattgcatcaggagtcgcacagccaccgccgagcgagctcaccatgtcggaaggagctgttgtcaccatcaccacgcccgtgaacatgaacgtggacagccttcagtctctgtcctcggacggggccaccctggcggtgcagcaggtcatgatggcagggcagagcgaggacgagtctgtggacagcacagaggaggatgcgggtgccctggcccctgcccacatcagcgggctggtcttggagaacagtgactccctgcagtaggggcaggagcagacgcacctgactttttggagtttgcacagcaaacattttacacagttttatttctaatatgttttatatgtagatatagaagagtgcacttttgtatttcatagtaagcttaaagcgcgtctttgccggtgcagcgacttctttcaagtgtgtgtgtgtgtgtgtgtgtgcgtgtgtgcgtgtgtgtggatttttaaagaaattctttaaaggtttaacgctagattgtgaggaatgacacaccactccctccccaccttgaatccctaattagattaaggaatagcgctgccattttctaaaccgtgatgcggttgtcacttagttctgtggttccagcagatctcagtgggctggttgatttgtgtggcccatggatttgaaagaagctgctgcacccgaaactgccagtgtgcggtgacaacggcacacgcctagactgagtgtggtttcgtcgtgagtggatggacggcaagcttagcaagcctaagtcccctcatgttcagtgagcctgtttcatttgctatatagaaaaagaaactcctatttttaccttgctggaattattggataaaaaagctatttttataaattcgttatgaattggatgatgactatattgaggataaaatttctagagaagaaacaatacatgcttgctattaatatttcaatttggaatgttctgaattgaccaaatttaatgaacctgcccaaagttagctaccgttccatggttctttgctctccccgggtagtgatgaacatttactactataaaagaaacagctatttaatgaaattttgatatctgcaaatttttgttgatatgtaatgctcagattgcattttacacttgatctaaacatatatcgaaagatatctgctaaacaggacttcaggtaagtgaggtgaaatggtagccagtgacccgttaggagctctcaccgtacatactccagtctaatttaaatctgaccacagttgcatggtcgctttaccatgttagctgtgtattgttttaaaagttttaacttcaaaatatgttatgcacagaatgtttattataaactaatataaaatgtgctctaccccattggctcagagctagggcaaacagcagatattcagactttattacttaactagcggacatccctggagtcccagcagcgagttggtctggcgagggcacctcggcagcccccacgggttggctcctacgtttgcgtttgtggctggtctcctggtgtcagtgttctcttgtacgttgttgctttcgacttttcagagccctcctgctcacttgaccacgtgagatttggaataactgtaggacttctgtttcctggtaacaagatgaaccgagagagtgggctgggttctgttttctttggtttcgatttgttttcattgtttacttaggagtggtgctttttctcagaaaacaggccacggtgtttcatacagaatgtcttcatatcatctgaaatggtatggctgaagttcatttgtttacagggtcgggaatgtcttcagttcttgagagtcaacagtaatgattggttgtaagccaagggacattttaagctagtgaagagttttttctggaattgatttttcccaaaagaatatattaattgaggttaagaagtcagtgggaaacacacagaaatttgttttaaaatctttcaggagctttactgaaagacttggttatcaagtcttttggggagagtctccgtcgaacttttttttttgagacagagttttgctcttgttgcccaggctggagggcaatggtgcccccgctccccacccttgaattatgcacatctcatggttttttttgctgctttttttttcaaaagcagctttactgagatataatttatattctataaaattcacctgtttcaagtatacaattcaatgactttgagtaaatgtacagcgttgtgtgaccatcgccacaatctaattttagaacattttcatcacagcaaaaatgatcccttgtacccattccggaattc

SEQ ID NO: 55168 - DNA, 2791 bp, Homo sapiens
aaacatcagtccacacagggttcccgtgcatgggcctcgactacaatcatttccctgtccgatccttggctgttttctccacctgcagttgtaagtacttggatatgtgagaatttcctatgctttctaatgttatttttcaactttaaaagcttcagttacagttaaaccaagatctcagcatcttgcatcaagatgatggttcatctaagaacaagaggggcgtcctgccaaagcatgccacgaacgtgatgcggtcctggctcttccagcacatcgggcatccctacccaacagaggatgagaaaaaacagattgctgctcagacaaatttgacactactccaagtcaacaactggttcatcaatgccagaagacgaattcttcagccaatgttggattcaagttgttcagagacccccaaaacaaagaaaaaaactgctcagaaccggccagttcagaggttttggcctgattctattgcatcaggagtcgcacagccaccgccgagcgagctcaccatgtcggaaggagctgttgtcaccatcaccacgcccgtgaacatgaacgtggacagccttcagtctctgtcctcggacggggccaccctggcggtgcagcaggtcatgatggcagggcagagcgaggacgagtctgtggacagcacagaggaggatgcgggtgccctggcccctgcccacatcagcgggctggtcttggagaacagtgactccctgcagtaggggcaggagcagacgcacctgactttttggagtttgcacagcaaacattttacacagttttatttctaatatgttttatatgtagatatagaagagtgcacttttgtatttcatagtaagcttaaagcgcgtctttgccggtgcagcgacttctttcaagtgtgtgtgtgtgtgtgtgtgtgcgtgtgtgcgtgtgtgtggatttttaaagaaattctttaaaggtttaacgctagattgtgaggaatgacacaccactccctccccaccttgaatccctaattagattaaggaatagcgctgccattttctaaaccgtgatgcggttgtcacttagttctgtggttccagcagatctcagtgggctggttgatttgtgtggcccatggatttgaaagaagctgctgcacccgaaactgccagtgtgcggtgacaacggcacacgcctagactgagtgtggtttcgtcgtgagtggatggacggcaagcttagcaagcctaagtcccctcatgttcagtgagcctgtttcatttgctatatagaaaaagaaactcctatttttaccttgctggaattattggataaaaaagctatttttataaattcgttatgaattggatgatgactatattgaggataaaatttctagagaagaaacaatacatgcttgctattaatatttcaatttggaatgttctgaattgaccaaatttaatgaacctgcccaaagttagctaccgttccatggttctttgctctccccgggtagtgatgaacatttactactataaaagaaacagctatttaatgaaattttgatatctgcaaatttttgttgatatgtaatgctcagattgcattttacacttgatctaaacatatatcgaaagatatctgctaaacaggacttcaggtaagtgaggtgaaatggtagccagtgacccgttaggagctctcaccgtacatactccagtctaatttaaatctgaccacagttgcatggtcgctttaccatgttagctgtgtattgttttaaaagttttaacttcaaaatatgttatgcacagaatgtttattataaactaatataaaatgtgctctaccccattggctcagagctagggcaaacagcagatattcagactttattacttaactagcggacatccctggagtcccagcagcgagttggtctggcgagggcacctcggcagcccccacgggttggctcctacgtttgcgtttgtggctggtctcctggtgtcagtgttctcttgtacgttgttgctttcgacttttcagagccctcctgctcacttgaccacgtgagatttggaataactgtaggacttctgtttcctggtaacaagatgaaccgagagagtgggctgggttctgttttctttggtttcgatttgttttcattgtttacttaggagtggtgctttttctcagaaaacaggccacggtgtttcatacagaatgtcttcatatcatctgaaatggtatggctgaagttcatttgtttacagggtcgggaatgtcttcagttcttgagagtcaacagtaatgattggttgtaagccaagggacattttaagctagtgaagagttttttctggaattgatttttcccaaaagaatatattaattgaggttaagaagtcagtgggaaacacacagaaatttgttttaaaatctttcaggagctttactgaaagacttggttatcaagtcttttggggagagtctccgtcgaacttttttttttgagacagagttttgctcttgttgcccaggctggagggcaatggtgcccccgctccccacccttgaattatgcacatctcatggttttttttgctgctttttttttcaaaagcagctttactgagatataatttatattctataaaattcacctgtttcaagtatacaattcaatgactttgagtaaatgtacagcgttgtgtgaccatcgccacaatctaattttagaacattttcatcacagcaaaaatgatcccttgtacccattccggaattc

SEQ ID NO: 55169 - DNA, 2545 bp, Homo sapiens
cgaaggccatggtaaccttctttttttattttcagcatccctacccaacagaggatgagaaaaaacagattgctgctcagacaaatttgacactactccaagtcaacaactggttcatcaatgccagaagacgaattcttcagccaatgttggattcaagttgttcagagacccccaaaacaaagaaaaaaactgctcagaaccggccagttcagaggttttggcctgattctattgcatcaggagtcgcacagccaccgccgagcgagctcaccatgtcggaaggagctgttgtcaccatcaccacgcccgtgaacatgaacgtggacagccttcagtctctgtcctcggacggggccaccctggcggtgcagcaggtcatgatggcagggcagagcgaggacgagtctgtggacagcacagaggaggatgcgggtgccctggcccctgcccacatcagcgggctggtcttggagaacagtgactccctgcagtaggggcaggagcagacgcacctgactttttggagtttgcacagcaaacattttacacagttttatttctaatatgttttatatgtagatatagaagagtgcacttttgtatttcatagtaagcttaaagcgcgtctttgccggtgcagcgacttctttcaagtgtgtgtgtgtgtgtgtgtgtgcgtgtgtgcgtgtgtgtggatttttaaagaaattctttaaaggtttaacgctagattgtgaggaatgacacaccactccctccccaccttgaatccctaattagattaaggaatagcgctgccattttctaaaccgtgatgcggttgtcacttagttctgtggttccagcagatctcagtgggctggttgatttgtgtggcccatggatttgaaagaagctgctgcacccgaaactgccagtgtgcggtgacaacggcacacgcctagactgagtgtggtttcgtcgtgagtggatggacggcaagcttagcaagcctaagtcccctcatgttcagtgagcctgtttcatttgctatatagaaaaagaaactcctatttttaccttgctggaattattggataaaaaagctatttttataaattcgttatgaattggatgatgactatattgaggataaaatttctagagaagaaacaatacatgcttgctattaatatttcaatttggaatgttctgaattgaccaaatttaatgaacctgcccaaagttagctaccgttccatggttctttgctctccccgggtagtgatgaacatttactactataaaagaaacagctatttaatgaaattttgatatctgcaaatttttgttgatatgtaatgctcagattgcattttacacttgatctaaacatatatcgaaagatatctgctaaacaggacttcaggtaagtgaggtgaaatggtagccagtgacccgttaggagctctcaccgtacatactccagtctaatttaaatctgaccacagttgcatggtcgctttaccatgttagctgtgtattgttttaaaagttttaacttcaaaatatgttatgcacagaatgtttattataaactaatataaaatgtgctctaccccattggctcagagctagggcaaacagcagatattcagactttattacttaactagcggacatccctggagtcccagcagcgagttggtctggcgagggcacctcggcagcccccacgggttggctcctacgtttgcgtttgtggctggtctcctggtgtcagtgttctcttgtacgttgttgctttcgacttttcagagccctcctgctcacttgaccacgtgagatttggaataactgtaggacttctgtttcctggtaacaagatgaaccgagagagtgggctgggttctgttttctttggtttcgatttgttttcattgtttacttaggagtggtgctttttctcagaaaacaggccacggtgtttcatacagaatgtcttcatatcatctgaaatggtatggctgaagttcatttgtttacagggtcgggaatgtcttcagttcttgagagtcaacagtaatgattggttgtaagccaagggacattttaagctagtgaagagttttttctggaattgatttttcccaaaagaatatattaattgaggttaagaagtcagtgggaaacacacagaaatttgttttaaaatctttcaggagctttactgaaagacttggttatcaagtcttttggggagagtctccgtcgaacttttttttttgagacagagttttgctcttgttgcccaggctggagggcaatggtgcccccgctccccacccttgaattatgcacatctcatggttttttttgctgctttttttttcaaaagcagctttactgagatataatttatattctataaaattcacctgtttcaagtatacaattcaatgactttgagtaaatgtacagcgttgtgtgaccatcgccacaatctaattttagaacattttcatcacagcaaaaatgatcccttgtacccattccggaattc

SEQ ID NO: 55170 - DNA, 1307 bp, Homo sapiens
gcgtcgccctcctcccattgagcgaggctgtgtcgcgtggcccagcgtcggcgtgacggttggacgcgggcgcggcactgcgggtcccgattgctgcagccgcttgtcagtgtgatgaagattggcacccagacaccattcgcttttcacccaagatgatttgatgtcttataaaactctgatgaaccatgatggctacacagacattaagtatagacagctatcaagatgggcaacagatgcaagtagtaacagagttaaagacagaacaagatccaaactgctctgaacccgatgcagaaggagtgagccctccccctgtggagtctcagaccccgatggatgtggacaagcaggccatttataggcatccactatttccattattagctttgttgtttgaaaaatgtgaacaatctacacagggctctgaaggcacaacttctgccagttttgatgtagacatcgaaaattttgtaagaaagcaagagaaggaagggaaacctttcttttgtgaagatccagaaaccgataatttaatggtaaaagcaatccaggttttgcgcattcatcttcttgagctggaaaaggttaacgaactctgcaaagatttctgcagtcgatacattgcttgtctgaaaacaaaaatgaacagtgaaactctgttgagtggagagcctggaagcccgtactcaccagtgcagtcccagcagattcaaagtgccatcacaggcaccatcagccctcagggaattgtggtgccggcgtccgcgctgcagcagggaaacgtagccatggcgacggtggcaggtacgatgacagaaaaatggacacgctctccatgagtttttgcagaaaatggtcctgtgtgttagaatgacagtataaatataatttcaagttcatgccattttctaatatagcaatgttagaagctagaggtctctgaatgcctctttcttgttaatactcaataacaaatattttatgcagattgtgtttctttgtttctctaccaaaaatatattggaaagaaaaaaggttttatgtaggaattgaaaatatacaccaaaaaccagttgtcattttcaaataacatagctttttgttgtgcttttaatagcaccgtgaaaatcttaagttttatcattaattgatgacaaataaaaatgcagtcttagcattggtattacttgtagaacaaaaccgttacaggaaagggacagattccagagttccctgatgcgtagagaacattgaaaacacaaagcatcatggaaatgggacacggcaaagagggaggggta

SEQ ID NO: 55171 - DNA, 571 bp, Homo sapiens
agctcggtacccagttcgacggagactctcaagaactgaagttcatttgtttacagggtcgggaatgtcttcagttcttgagagtcaacagtaatgattggttgtaagccaagggacattttaagctagtgaagagttttttctggaattgatttttcccaaaagaatatattaattgaggttaagaagtcagtgggaaacacacagaaatttgttttaaaatctttcaggagctttactgaaagacttggttatcaagtcttttggggagagtctccgtcgaacttttttttttgagacagagttttgctcttgttgcccaggctggagggcaatggtgcccccgctccccacccttgaattatgcacatctcatggttttttttgctgctttttttttcaaaagcagctttactgagatataatttatattctataaaattcacctgtttcaagtatacaattcaatgactttgagtaaatgtacagcgttgtgtgaccatcgccacaatctaattttagaacattttcatcacagcaaaaatgatcccttgtacccattccggaattc

SEQ ID NO: 55172 - DNA, 530 bp, Homo sapiens
tgttgggaaactttaatttattacctggcagtttttctaaatagttccttcatactagtaattaagttatatctctatttcttaaggagcttagaacacgttgttactttagtaaaattcgatgtgtcttcaggaatgcaaaataggaggaaatggacttaaactgcatcagaaggaatctgggccaaatgcaaagaatttccccattatcatgagtgacatcaaaagcttgtttagcctgcttcccaagaaaaggaaagacctatctctctggaaggtttagcatagctctgtgtagaggtatggtgttgaagttcatgtccctggaaacagttttataagtgggcgaatctgctcatctaccatgcttcagtcgtgaatgagtcagcagcacagctgccgatggagtgggcagaagggcatctaaatttagtcgttattcacttgagaagattttcagggactatatgtctctcatccatgctttagtctctcatccatgctttagtcatattccttcttctggaggc

SEQ ID NO: 55173 - DNA, 623 bp, Homo sapiens
gcgcttttaactgcttgtggttgagtggcagcatgagcgagctctgcgtattccaacccggcgttaagaatccttcactagcttttcttcccgacgctgcttatttatctatcggtagcatgacgggtaattgacgccctcggatggctttgaggtcgccatttttggttggtgcctttgtcttggtgtcaggactgggatatcatctgggacacattaccccacaggtatcctgttggacctcaacgaggaagttggcaacagaggaaccaggagatgagagagatcgatacctacagccgctgagagccggtattccaacgccatgagacgccttctgtcgtgagcagttgacaagaaagacccagcacttactgcaaccggaaggagcggttcctccctcgctcgcgcagccgctcttccccgccactccctcggtgcccgccagcacattcccagcaagccctgagtatatttgcatatcaactcactacatttttttcttctaactaaaaaatcgaaaggacaaattccagattctccttgtgaagtcttcctttcagttcagaagaaatggaattcgctcttcaacttcaggaagttgaaataaagagttgcttgga

SEQ ID NO: 55174 - DNA, 693 bp, Homo sapiens
cactgcagcctgggcgacagagcgagactccgtctcaaaaaaaaaaaaattgtgttgataaagatctacttcagtcatctgaggtacagtatttcatttttcacattaatgctatgctgtaccttattctacaactcttttcactcgatttaaaaaaaaaaaattctaatactccttcgaagtgcagcatatagcatgccacaatatgaacacaccatgacaatcagcttatgcgtgaccttgtgaccttgtgcttccactgcacgcctgcctgggctgctccaaggtggtggctaggggtggcacaagttacacattttcaatttggataggttgtgattcttgtcttccccagtcagatacctacagccgctgagagccggtattccaacgccatgagacgccttctgtcgtgagcagttgacaagaaagacccagcacttactgcaaccggaaggagcggttcctccctcgctcgcgcagccgctcttccccgccactccctcggtgcccgccagcacattcccagcaagccctgagtatatttgcatatcaactcactacatttttttcttctaactaaaaaatcgaaaggacaaattccagattctccttgtgaagtcttcctttcagttcagaagaaatggaattcgctcttcaacttcaggaagttgaaataaagagttgcttgga

SEQ ID NO: 55175 - DNA, 628 bp, Homo sapiens
ctgtaatgctgggtgggaacatgtaacttgtagactggagaagataggcatttgagtggctgagagggcttttgggtgggaatgcaaaaattctctgctaagactttttcaggtgaacataacagacttggccaagctagcatcttagcggaagctgatctccaatgctcttcagtagggtcatgaaggtttttcttttcctgagaaaacaacacgtattgttttctcaggttttgctttttggcctttttctagcttaaaaaaaaaaaaagcaaaagatgctggtggttggcactcctggtttccaggacggggttcaaatccctgcggcgtctttgctttgactactaatctgtcttcaggactctttctgtatttctccttttctctgcaggtgctagttcttggagttttggggaggtgggaggtaacagcacaatatctttgaactatatacatccttgatgtataatttgtcaggagcttgacttgattgtatattcatatttacacgagaacctaatataactgccttgtctttttcaggtaatagcctgcagctggtgttttgagaagccctactgctgaaaacttaacaattttgtgtaataaaaatggagaagctcta

SEQ ID NO: 55176 - DNA, 698 bp, Homo sapiens
ctgtaatgctgggtgggaacatgtaacttgtagactggagaagataggcatttgagtggctgagagggcttttgggtgggaatgcaaaaattctctgctaagactttttcaggtgaacataacagacttggccaagctagcatcttagcggaagctgatctccaatgctcttcagtagggtcatgaaggtttttcttttcctgagaaaacaacacgtattgttttctcaggttttgctttttggcctttttctagcttaaaaaaaaaaaaagcaaaagatgctggtggttggcactcctggtttccaggacggggttcaaatccctgcggcgtctttgctttgactactaatctgtcttcaggactctttctgtatttctccttttctctgcaggtgctagttcttggagttttggggaggtgggaggtaacagcacaatatctttgaactatatacatccttgatgtataatttgtcaggagcttgacttgattgtatattcatatttacacgagaacctaatataactgccttgtctttttcaggtaatagcctgcagctggtgttttgagaagccctactgctgaaaacttaacaattttgtgtaataaaaatggagaagctctaaattgttgtggttcttttgtgaataaaaaaatcttgattggggaaaaaagatgggtgttctgtgggcttg

SEQ ID NO: 55177 - DNA, 729 bp, Homo sapiens
tttccaggaaggcctagctcagctcacctctggaaaggtctccaagctgtgtgatctggggaatcgtggaggggttttgagctcaggtgtcttctgccagctggactctgagaccctggcctgctggggcgaggatgaggctctgatgtggtctggtcaactctgggttggccatctgcaccacagggctctaacaagggcctgctataggccatgagaaccactgtgtcaaggagcccatctccattttagaaagacagagatgcgttctgggccgttgcccgggaaagaatgtctaccaggacagttctgagaaggctcagcatcatatctaaacacaggaaaggaattccctgttggaaaattcaggatgacaactgtgggtagcaagccaaggcaaagggcagaacgtggagcagcatttgaggctccagccaattccagcctgtctgcaggcactgcctgcctccacggctgtcaggtgtcgcccccaggagctacgtagggcgaagctaggcaggctttcagtgccagctgtggtttccccaacagctcacaggccagaggccccgcccaggccacctcctccagtccccctgccgcggggtggtcttcggtggtctcactctccctcccactgcatttccatctctgctgtaatataccacctcagcccttcctttttgattcccaagagcaaattttggaaataaagcaacctgaaaacat

SEQ ID NO: 55178 - DNA, 159 bp, Homo sapiens
atagatatataaagcaaagagccacagaacttcatgaccaaggtcacccagctaataagcagagccagaatactatctctttccactctaccacagtgcctctataggccatgccacaccagcaactcttctgccgggccatcaccattctccgtattc

SEQ ID NO: 55179 - DNA, 352 bp, Homo sapiens
gtggtaaacaggatagaaaatgtctctgctctagtggatcttaattcaaattaggcaggagatgatggtaactttgatgtgagcattggaggcagaagagaggagaatggatgcaggatgcattttggagggagatctgatgaaatttgtgatggattagatgtgggtgataagagaaagctatggaaagaatgaaatcaaggatgagcaagtaggtgagtaatggtaatatttactgagatgaggaagactccatttctcccagcagccctttaagttgggttcacctatcccaccctattcctgtatctattttattctatatctatacatctaacctttatctatattg

SEQ ID NO: 55180 - DNA, 365 bp, Homo sapiens
tctgtagcagttggaattgaatttgtgcacaatctaaaactatagaaggagaaattacagttggccctctgtatctggattctgcatctgtggttggttgaatcgaaaatattgggagggaaaaatggatggttgtgtctatactgaacacaaagtctttttttcttgtcattccctaaacaatacagcttaacgactatttacgtagcatttacgtcgtattaggtattatgagtaatctagagatgatttaagtatactggagggtgtgtgtggattatatgcaaatcaccactttatgtaagagacttgagcatctgtagatttcgatatcctagaaccaatccccccacaggtggcaaagg

SEQ ID NO: 55181 - DNA, 483 bp, Homo sapiens
ctaatgttagggaatcctaagaaatattaaagaattgggaaaagaggaacctggaaggtagagtagtaaacaggaaagggaggaaaaacaggaggtggtaataaagtagtgttaatgaatccaagagggagcagtcaccatcttcaaatgtgatattgaaattagctgggatgtccagttgtttaatccattaaattgtggaaacagtctttctagtgcttaattataggaatcattgatcatattaataaactttcagttgaagcatcagcagataattattccaaaaccctctggcaaagaaatgtagatgcttttatagtctaccattgaacacagttttacgtgacacttggcaaaacttggagatggatggcactattttgtaagagaatatgaaacactgctttgaagttgtcattaaaggatcttatcaggtgctttttctcttgtattttgtttataaattttgtcctatctgtc

SEQ ID NO: 55182 - DNA, 446 bp, Homo sapiens
caacagccctctgggagggcaagtggaagagtgagtagatcagctggataggagtgaggagttggaggaagggttggggtatggccagtgcagttaagtgacttgccttagtgcacacccccagaaagtgacagcaccagcatttgaaccctgacacaagcatctccaaaactgcattcttcccactgtgccacagttaagatgagtccaccagccctgtttagactttggtgtttgaactgcgttttgaaggcaaagaagtcagatagacaaatgaaagagagggaaaaggcactccaggtagcaggaacagcatgtgcagaatcaaagaggcatgaagaaaacttaaaatgtagtcttccaagtcatgtaccctagaacttaaagtataataaaaaaataaacatagaaaaataaaataaaataaacttttaaaaaatgtaaaa

SEQ ID NO: 55183 - DNA, 616 bp, Homo sapiens
caacagccctctgggagggcaagtggaagagtgagtagatcagctggataggagtgaggagttggaggaagggttggggtatggccagtgcagttaagtgacttgccttagtgcacacccccagaaagtgacagcaccagcatttgaaccctgacacaagcatctccaaaactgcattcttcccactgtgccacagttaagatgagtccaccagccctgtttaggtgagttctggccctccctgtgtgtccccacatgcagccaactgcatccaacctgtccatgccaggtcctgtcctgagaacagtgggcagtgctgggcttggggcgtgtgcaggggggcgaggggagcccagtggaggctcagactgatttcacctggcatttcctcaagactttggtgtttgaactgcgttttgaaggcaaagaagtcagatagacaaatgaaagagagggaaaaggcactccaggtagcaggaacagcatgtgcagaatcaaagaggcatgaagaaaacttaaaatgtagtcttccaagtcatgtaccctagaacttaaagtataataaaaaaataaacatagaaaaataaaataaaataaacttttaaaaaatgtaaaa

SEQ ID NO: 55184 - DNA, 187 bp, Homo sapiens
cccatcattacctattcacactcaactctcttggcttaaaaagtaccagaaaaacaaaaacctgtagctatggtcttctctcctttccaacacacttcttgaaagcaatatcactcagtctctagttgttcacccctactgactaacccacctgctccggaaagggagactcgaatcccttgccttt

SEQ ID NO: 55185 - DNA, 127 bp, Homo sapiens
attgtgctgaggatttcctggaggacagcccctcccctccagccaacaagggctgcataggcaggggcacacagggagggacttctcccaggcagggagccagagggagagatgaaggggaggtgag

SEQ ID NO: 55186 - DNA, 2435 bp, Homo sapiens
ggcacgcgctctactcctgtaacggaaaggtcgcggcttgtgtgcctgcgggcagccgtgccgagaatgaaccccagcacccccagctacccaacggcctcgctctacgtgggggacctccaccccgacgtgactgaggcgatgctctacgagaagttcagcccggcagggcccatcctctccatccggatctgcagggacttgatcaccagcggctcctccaactacgcgtatgtgaacttccagcatacgaaggacgcggagcatgctctggacaccatgaattttgatgttataaagggcaagccagtacgcatcatgtggtctcagcgtgatccatcacttcgaaaaagtggagtgggcaacatattcgttaaaaatctggataagtccattaataataaagcactgtatgatacagtttctgcttttggtaacatcctttcgtgtaacgtggtttgtgatgaaaatggttccaagggttatggatttgtacactttgagacacacgaagcagctgaaagagctattaaaaaaatgaacggaatgctcctaaatggtcgcaaagtatttgttggacaatttaagtctcgtaaagaacgagaagctgaacttggagctagggcaaaagagttccccaatgtttacatcaagaattttggagaagacatggatgatgagcgccttaaggatctctttggcaagttcgggcccgccttaagtgtgaaagtaatgaccgatgaaagtggaaaatccaaaggatttggatttgtaagctttgaaaggcatgaagatgcacagaaagctgtagatgagatgaatggaaaggagctcaatggaaaacaaatttacgttggtcgagctcagaaaaaagtggaacggcagacggaacttaagcgcacatttgaacagatgaagcaagataggatcaccagataccaggttgttaatctttatgtgaaaaatcttgatgatggtattgatgatgaacgtctccggaaagcgttttctccatttggtacaatcactagtgcaaaggttatgatggaaggtggtcgcagcaaagggtttggttttgtatgtttctcctccccagaagaagccactaaagcagttacagaaatgaacggtagaattgtggccacaaagccattgtatgtagctttagctcagcgcaaagaagagcgccaggcttacctcactaacgagtatatgcagagaatggcaagtgtacgagctgtgcccaaccagcgagcacctccttcaggttacttcatgacagctgtcccacagactcagaaccatgctgcatactatcctcctagccaaattgctcgactaagaccaagtcctcgctggactgctcagggtgccagacctcatccattccaaaataagcccagtgctatccgcccaggtgctcctagagtaccatttagtactatgagaccagcttcttcacaggttccacgagtcatgtcaacgcagcgtgttgctaacacatcaacacagacagtgggtccacgtcctgcagctgctgctgctgctgcagctacccctgctgtgcgcacggttccacggtataaatatgctgcgggagttcgcaatcctcagcaacatcgtaatgcacagccacaagttacaatgcaacagcttgctgttcatgtacaaggtcaggaaactttgactgcctccaggttggcatctgcccctcctcaaaagcaaaagcaaatgttaggtgaacggctctttcctcttattcaagccatgcaccctactcttgctgggaaaatcactggcatgttgttggagattgataattcagaacttctttatatgctcgagtctccagagtcactccgttctaaggttgatgaagctgtagctgtactacaagcccaccaagctaaagaggctacccagaaagcagttaacagtgctaccggtgttccaactgtttaaaattgatcagagaccacgaaaagaaatttgtgcttcaccgaagaaaaatatctaaacatcgagaaactatgggaaaaaaaattgcaaaatctaaaataaaaaatgcaaaatctaaaataaaaaatggaaaggaaactttgaaccttatgtaccgagcaaatgcaaggtctagcaaatataatgctagtcctagattacttattgatttaaaaacaaaaaaaagattacttaattttgatttaaaaacaaaaaatcgtaaaatacaaaaaccagttaatgttttgtagaccctgggaaaagaattttcagcaaagtacaaaaatttaaagcattcctttaattttttaattctttactgtggaatagctcaaaatgtccattctgttttaagtaacagaattgataactgagcaaggaaacatggtttggattataaaattcttgctttaataaaaatttcttaaacagtgaaa

SEQ ID NO: 55187 - DNA, 2075 bp, Homo sapiens
ggcacgcgctctactcctgtaacggaaaggtcgcggcttgtgtgcctgcgggcagccgtgccgagaatgaaccccagcacccccagctacccaacggcctcgctctacgtgggggacctccaccccgacgtgactgaggcgatgctctacgagaagttcagcccggcagggcccatcctctccatccggatctgcagggacttgatcaccagcggctcctccaactacgcgtatgtgaacttccagcatacgaaggacgcggagcatgctctggacaccatgaattttgatgttataaagggcaagccagtacgcatcatgtggtctcagcgtgatccatcacttcgaaaaagtggagtgggcaacatattcgttaaaaatctggataagtccattaataataaagcactgtatgatacagtttctgcttttggtaacatcctttcgtgtaacgtggtttgtgatgaaaatggttccaagggttatggatttgtacactttgagacacacgaagcagctgaaagagctattaaaaaaatgaacggaatgctcctaaatggtcgcaaagtatttgttggacaatttaagtctcgtaaagaacgagaagctgaacttggagctagggcaaaagagttccccaatgtttacatcaagaattttggagaagacatggatgatgagcgccttaaggatctctttggcaagttcgggcccgccttaagtgtgaaagtaatgaccgatgaaagtggaaaatccaaaggatttggatttgtaagctttgaaaggcatgaagatgcacagaaagctgtagatgagatgaatggaaaggagctcaatggaaaacaaatttacgttggtcgagctcagaaaaaagtggaacggcagacggaacttaagcgcacatttgaacagatgaagcaagataggatcaccagataccaggttgttaatctttatgtgaaaaatcttgatgatggtattgatgatgaacgtctccggaaagcgttttctccatttggtacaatcactagtgcaaaggttatgatggaaggtggtcgcagcaaagggtttggttttgtatgtttctcctccccagaagaagccactaaagcagttacagaaatgaacggtagaattgtggccacaaagccattgtatgtagctttagctcagcgcaaagaagagcgccaggcttacctcactaacgagtatatgcagagaatggcaagtgtacgagctgtgcccaaccagcgagcacctccttcaggttacttcatgacagctgtcccacagactcagaaccatgctgcatactatcctcctagccaaattgctcgactaagaccaagtcctcgctggactgctcagggtgccagacctcatccattccaaaataagcccagtgctatccgcccaggtgctcctagagtaccatttagtactatgagaccagcttcttcacaggttccacgagtcatgtcaacgcagcgtgttgctaacacatcaacacagacagtgggtccacgtcctgcagctgctgctgctgctgcagctacccctgctgtgcgcacggttccacggtataaatatgctgcgggagttcgcaatcctcagcaacatcgtaatgcacagccacaagttacaatgcaacagcttgctgttcatgtacaaggtcaggaaactttgactgcctccaggttggcatctgcccctcctcaaaagcaaaagcaaatgttaggtgaacggctctttcctcttattcaagccatgcaccctactcttgctgggaaaatcactggcatgttgttggagattgataattcagaacttctttatatgctcgagtctccagagtcactccgttctaaggttgatgaagctgtagctgtactacaagcccaccaagctaaagaggctacccagaaagcagttaacagtgctaccggtgttccaactgtttaaaattgatcagagaccacgaaaagaaatttgtgcttcaccgaagaaaaatatctaaacatcgagaaactatgggaaaaaaaattgcaaaatctaaaataaaaaatgcaaaatct

SEQ ID NO: 55188 - DNA, 175 bp, Homo sapiens
cctttccaaatctctgccaaccccaaggaaatcacaatacggtaaagcagaggaaaaagtcaagcttttcatttgctcaaggtcacccaaaaagcttaattagaaaaaaaaattaattcacagtaagataagaatatctaaagtgtatcattgtttctttaaaagaagagaaagg

SEQ ID NO: 55189 - DNA, 692 bp, Homo sapiens
ctccaaatgcttccctgggtaaaatactggcctctccagactttatttttctcatctttaaaatgggttgattcttatttggcctatccctgaccaaaaaaaataatattttttaaaatataaacttttacacaaatcgatctgaaaatcagcatcctgctcccacttggctctggtgcccttgatggagctgaagtctgtctgggtggttcctgagttttctcagattccttcagggctgccagttgaaccaccaatgtgtggagttttacttaagcctcattttataaatcagaccatttgacttgtctcccactaacttgtcaaagttccagcgagcaagttttagttccagaagccagatgcttgccactgccagctccctgaggtgggcgttctcaccagccccattccctgctgagcagccacgggcccatctcccagcccagggcaaggccacatttcctcagacctctgagagctctgaagtcagcctgtgtggctggggtggatacaggccagctgaagtggacagaggataccggtgaacaataaaaataacagatagctatggcagtcagtggaacacagctaaaccattctgcccggcggagtggctcagtcagagtgccagatgtgggtgattcataagcgtagtggccatcatgttgaattgttactattgtcactga

SEQ ID NO: 55190 - DNA, 917 bp, Homo sapiens
  misc_feature (1)..(2): n is a, c, g, or t
nnttacagaactcccacggacacaccatgataaggacgctgctgctgtccactttggtggctggagccctcagttgtggggaccccacttacccaccttatgtgactagggtggttggcggtgaagaagcgaggcccaacagctggccctggcaggtctccctgcagtacagctccaatggcaagtggtaccacacctgcggagggtccctgatagccaacagctgggtcctgacggctgcccactgcatcagctcctccaggacctaccgcgtggggctgggccggcacaacctctacgttgcggagtccggctcgctggcagtcagtgtctctaagattgtggtgcacaaggactggaactccaaccaaatctccaaagggaacgacattgccctgctcaaactggctaaccccgtctccctcaccgacaagatccagctggcctgcctccctcctgccggcaccattctacccaacaactacccctgctacgtcacgggctggggaaggctgcagaccaacggggctgttcctgatgtcctgcagcagggccggttgctggttgtggactatgccacctgctccagctctgcctggtggggcagcagcgtgaaaaccagtatgatctgtgctgggggtgatggcgtgatctccagctgcaacggagactctggcgggccactgaactgtcaggcgtctgacggccggtggcaggtgcacggcatcgtcagcttcgggtctcgcctcggctgcaactactaccacaagccctccgtcttcacgcgggtctccaattacatcgactggatcaattcggtgattgcaaataactaaccaaaagaagtccctgggactgtttcagacttggaaaggtcacagaaggaaaataatataataaagtgacaactatgcaaa

SEQ ID NO: 55191 - DNA, 773 bp, Homo sapiens
tttttttttccagcaatccttagtttttattctttttccagaaggtaatacatactctttgtaaaaatattaaaagaatacaggagagtatcaagtaaaaaagtagaagtcccccctcattttacatctccaattccactctccagaggtaatcattgtttttgttttgttttttttcaaatggagtctcgctctgttgcacaggctggagtacagtggcttgatctcagctcactgcaacctgcgcctcccgggctcaagcaattctcccgcctcagcctcctaactagctgggactacaggtggccgaggcggaaggatctcttgagcccaggaggtcgagactgcaataagccaagattgcgtcattgcactccagcctgggcgacagagcgagaccccatctccaaaaaaaaaggcccaaaaaacaagaaataggctggcataaggacagcttaaaagacctcagggtggagccttgtggggaagcccagcgtgtcactattgcacagcacgttcacactgcagtccgggggtgcttcagcaagtaaggcacatgggaagcatggctaggactcaggggacccaggttctggccaggtctcttctctggataatcgttttccccggacaagagacctaacctccctgagcacagggttctcacccttgttgccttcctgggatgggataaggatcaagtgaaataagacatgaataaatggggctgggtgcaatggtgcacgcctgtagtaagagctacttgggagggt

SEQ ID NO: 55192 - DNA, 798 bp, Homo sapiens
tttttttttccagcaatccttagtttttattctttttccagaaggtaatacatactctttgtaaaaatattaaaagaatacaggagagtatcaagtaaaaaagtagaagtcccccctcattttacatctccaattccactctccagaggtaatcattgtttttgttttgttttttttcaaatggagtctcgctctgttgcacaggctggagtacagtggcttgatctcagctcactgtactcgtctgggcaacagagcaagactgtctcaaaaaaaaaaaaaaaagtttaacagatactgatcaacagcctctggaaacagttatagccccaaccacagtgcataactgccttgcaaacagcagttttgatgagaaacaaatgaaatctaaaaatatgccatccgcacatttggcatataatttttagggggttcgaaggccccctgacctgaagcccacacaggactcctggctaagaccccctttacaggaagaccctaacaggtcaatgaaaagctgtgattgcatctttttctccgaaacatcatctgaactcctcaggcaggagctactgtagtgtgggctgcctgtgactcacttgagtagcttagcccaggaggacagagacaggaaactgccacgcacagctctgtggttacgtgaacctgacaattttcttgtgtgtgtgtcctgcaggtgattgcaaataactaaccaaaagaagtccctgggactgtttcagacttggaaaggtcacagaaggaaaataatattatataaagtgacaactatgcaaa

SEQ ID NO: 55193 - DNA, 723 bp, Homo sapiens
tcttgatgagggttttattattattattaattcagaaatccatcctaacatccagggccctaagaaccagaaataggtcaggcgcaatggctcaagcctgtaacccctgcactttgggaggctaaggcaggctgatcgcttgagtccaggagttcaagaccagcctgagtaacatggcataactctgtctctactaaaaatacaaaaattaactgggagaggtggtgcacacctgtagtccaagctactcaggtggccgaggcggaaggatctcttgagcccaggaggtcgagactgcaataagccaagattgcgtcattgcactccagcctgggcgacagagcgagaccccatctccaaaaaaaaaggcccaaaaaacaagaaataggctggcataaggacagcttaaaagacctcagggtggagccttgtggggaagcccagcgtgtcactattgcacagcacgttcacactgcagtccgggggtgcttcagcaagtaaggcacatgggaagcatggctaggactcaggggacccaggttctggccaggtctcttctctggataatcgttttccccggacaagagacctaacctccctgagcacagggttctcacccttgttgccttcctgggatgggataaggatcaagtgaaataagacatgaataaatggggctgggtgcaatggtgcacgcctgtagtaagagctacttgggagggt

SEQ ID NO: 55194 - DNA, 760 bp, Homo sapiens
  misc_feature (1)..(2): n is a, c, g, or t
nnttacagaactcccacggacacaccatgataaggacgctgctgctgtccactttggtggctggagccctcagttgtggggaccccacttacccaccttatgtgactagggtggttggcggtgaagaagcgaggcccaacagctggccctggcaggtgagttgaccacactgtacttctccccgtccctgccccactccctttacatctcccctttgcccttccaccatggcgtctattgtgctggcaaagtgagtattgatgggactcagagagcagcacaggcaactttagcaataagatatatttccggctgggcgcagtggctcatgcctgttatcccagcactgtgggaggctgtggtgggcagatcacctgaagtcaggagtttgagaccagcctggccaacatggtgaaacctgcctctactaataatacacaagtagccaggtgtggtggcacacgcctgtaatcccagcaactggggaggcttaggcaggaggatcgcttgaacccaggaggcagaggttgcagtgagctgaaattgcaccactgtactccagcctgggcaacaaagcaagactctgtctcaaaaaaaaaaacaacaaacaaaacaaaattttcgggggcgccgcgcccgaaaaactttctcaaaacattcgtgtgggccccgccccgcgggatgggacacacggccacagggccaaggaaccggctcaacagggtggttccccaaaaaacccggggccggcgtttaaaac

SEQ ID NO: 55195 - DNA, 757 bp, Homo sapiens
  misc_feature (1)..(2): n is a, c, g, or t
nnttacagaactcccacggacacaccatgataaggacgctgctgctgtccactttggtggctggaggaacgacattgccctgctcaaactggctaaccccgtctccctcaccgacaagatccagctggcctgcctccctcctgccggcaccattctacccaacaactacccctgctacgtcacgggctggggaaggctgcagaccaacggggctgttcctgatgtcctgcagcagggccggttgctggttgtggactatgccacctgctccagctctgcctggtggggcagcagcgtgaaaaccagtatgatctgtgctgggggtgatggcgtgatctccagctgcaacgtctccctgcagtacagctccaatggccagtggtaccacacctgcggagggtccctgatagccaacagctgggtcctgacggctgcccactgcatcagctcctccaggatctaccgcgtgatgctgggccagcataacctctacgttgcagagtccggctcgctggccgtcagtgtctctaagattgtggtgcacaaggactggaactccaaccaggtctccaaagggaacgaattgcctgtcaaatggtaacccgtttccctcacaaataatacaaagccctcgtcttcacgcgggtctccaattacatcgactggatcaattcggtgattgaataataacaaagagtcctgggactgttcagacttggaagggtccagaggaatattataaggcacttgcattctt

SEQ ID NO: 55196 - DNA, 1174 bp, Homo sapiens
  misc_feature (1)..(2): n is a, c, g, or t
nnttacagaactcccacggacacaccatgataaggacgctgctgctgtccactttggtggctggagccctcagttgtggggaccccacttacccaccttatgtgactagggtggttggcggtgaagaagcgaggcccaacagctggccctggcaggtctccctgcagtacagctccaatggcaagtggtaccacacctgcggagggtccctgatagccaacagctgggtcctgacggctgcccactgcatcagctcctccaggacctaccgcgtggggctgggccggcacaacctctacgttgcggagtccggctcgctggcagtcagtgtctctaagattgtggtgcacaaggactggaactccaaccaaatctccaaagggaacgacattgccctgctcaaactggctaaccccgtctccctcaccgacaagatccagctggcctgcctccctcctgccggcaccattctacccaacaactacccctgctacgtcacgggctggggaaggctgcagaccaacggggctgttcctgatgtcctgcagcagggccggttgctggttgtggactatgccacctgctccagctctgcctggtggggcagcagcgtgaaaaccagtatgatctgtgctgggggtgatggcgtgatctccagctgcaacggagactctggcgggccactgaactgtcaggcgtctgacggccggtggcaggtgcacggcatcgtcagcttcgggtctcgcctcggctgcaactactaccacaagccctccgtcttcacgcgggtctccaattacatcgactggatcaattcggtgattgcaaataactaaccaaaagaagtccctgggactgtttcagacttggaaaggtcacagaaggaaaataatataataaagtgacaactatgcaaaaaaaaaaacaccaccacgaccacaaccaaaacctgggtccggccgcgcggccccctcgaaaaaagtttgtaaaacccatctcgtgagggcgcgggggcccagtaggttagtggcccagtggcccaacagctgtcccagagaagacgggtcagacatcgggcgggatccccccataaaaaagccgcggtaaccgaggtttgacaaacccagagggagtcgagccacagggcctcaaccgggtccaggagacgattcaa

SEQ ID NO: 55197 - DNA, 1449 bp, Homo sapiens
  misc_feature (1)..(2): n is a, c, g, or t
nnttacagaactcccacggacacaccatgataaggacgctgctgctgtccactttggtggctggagccctcagttgtggggaccccacttacccaccttatgtgactagggtggttggcggtgaagaagcgaggcccaacagctggccctggcaggtctccctgcagtacagctccaatggcaagtggtaccacacctgcggagggtccctgatagccaacagctgggtcctgacggctgcccactgcatcagctcctccaggacctaccgcgtggggctgggccggcacaacctctacgttgcggagtccggctcgctggcagtcagtgtctctaagattgtggtgcacaaggactggaactccaaccaaatctccaaagggaacgacattgccctgctcaaactggctaaccccgtctccctcaccgacaagatccagctggcctgcctccctcctgccggcaccattctacccaacaactacccctgctacgtcacgggctggggaaggctgcagaccaacggggctgttcctgatgtcctgcagcagggccggttgctggttgtggactatgccacctgctccagctctgcctggtggggcagcagcgtgaaaaccagtatgatctgtgctgggggtgatggcgtgatctccagctgcaacggagactctggcgggccactgaactgtcaggcgtctgacggccggtggcaggtgcacggcatcgtcagcttcgggtctcgcctcggctgcaactactaccacaagccctccgtcttcacgcgggtctccaattacatcgactggatcaattcgcgcctcagttgtggggtctccacttacgcgcctgatatgtctaggatagcttggaggtgacagaagcgaggccctaacagtctgtgctcctggtcgaggtctccctgcagtacagctccaatggccagtggtaccacacctgcggagggtccctgatagccaacagctgggtcctgacggctgcccactgcatcagctcctccaggatctaccgcgtgatgctgggccagcataacctctacgttgcagagtccggctcgctggccgtcagtgtctctaagattgtggtgcacaaggactggaactccaaccaggtctccaaagggaacgacattgccctgctcaaactggctaaccccgtctccctcaccgacaagatccagctggcctgcctccctcctgccggcaccattctacccaacaactacccctgctacgtcacgggctggggaaggctgcagaccaacggggctctccctgatgacctgaagcagggccagttgctggttgtggactatgccacctgctccagctctggctggtggggcagcaccgtgaagacgaatatgatctgtgctgggggtgatggcgtgatatgcacctgcaacgtgagtaccaaaaatcaggggcc

SEQ ID NO: 55198 - DNA, 2164 bp, Homo sapiens
  misc_feature (1)..(2): n is a, c, g, or t
nnttacagaactcccacggacacaccatgataaggacgctgctgctgtccactttggtggctggagccctcagttgtggggaccccacttacccaccttatgtgactagggtggttggcggtgaagaagcgaggcccaacagctggccctggcaggtctccctgcagtacagctccaatggcaagtggtaccacacctgcggagggtccctgatagccaacagctgggtcctgacggctgcccactgcatcagctcctccaggacctaccgcgtggggctgggccggcacaacctctacgttgcggagtccggctcgctggcagtcagtgtctctaagattgtggtgcacaaggactggaactccaaccaaatctccaaagggaacgacattgccctgctcaaactggctaaccccgtctccctcaccgacaagatccagctggcctgcctccctcctgccggcaccattctacccaacaactacccctgctacgtcacgggctggggaaggctgcagaccaacggggctgttcctgatgtcctgcagcagggccggttgctggttgtggactatgccacctgctccagctctgcctggtggggcagcagcgtgaaaaccagtatgatctgtgctgggggtgatggcgtgatctccagctgcaacgcaacgtgagtaccaaaatcaggggctccgctccatgacaaaatgtggctggggataaggctatagaggtccatccctccataggtccatcctcccacctcctggcagaattaccccgaaacatgttccagatatatctttggccaggcacggtggctcacacctgtaatcccagcactttgagaggccaggcgggcagaccacttgaggtcagcagttcaagaccagcctggccaacatggtgaaaccttgtgtctactaaaactaaaaaaattagccgggcatggtggcaggcgcctgtactcacagctactcgggaggctgaggcaggagaatcacttgaacccatgaggcggaggttgcagtgagctgagatcacaccgctgcaatccagcctgggtgacagagcgaaactcaaaaaaaaaaacaaaaaaacttgatcttggttcttttttgttcttgttttgagatgttttgagattctccttgtagtatccacccatctcactgctgggaagtccttccctgggtctcatcaaggtctctcgtgactgtcactatgtatcctttcctctatgctggaagggaaccaaaggaaagtattccctggcttagggcctttctacgatgacttctggtttttctgttgaattagtctcatcaatggcgcagcgtgtcccctccaggtagctgccacggaaaccttcctggagacagtgtcttaaccaccaggaactgctctgtgcttggacttagcagtgaagtggggatggagtaggaaagagttccacacgcccttcagatcacactgtgccctacacactctgcccacatagaccacccgcgggaagacggaaccagtggggaagagcctggcagctgaagtctgggatgtggcctcagctcctttacaaactgcctgtgcaaccttgggcaagtcccaacctctcaacactccagtttctcctcttccgtggcctggggatgctacgaatatttacctcataggattttgtgaggattaatgagatgaggcatagaacatgcttagctcagctctggccacacaggaagaataagtgttggctcttgttggaattatggtaccaccttgggctatgaccacaagggtcagcttccgaggacagtgacctgcagcagaacaatagaaatgcattgagaacaatggttccaatgggcagccccttcctctccctttacctgcctataactctggccttcctcagggagactctggcgggccactgaactgtcaggcgtctgacggccggtggcaggtgcacggcatcgtcagcttcgggtctcgcctcggctgcaactactaccacaagccctccgtcttcacgcgggtctccaattacatcgactggatcaattcggtgattgcaaataactaaccaaaagaagtccctgggactgtttcagacttggaaaggtcacagaaggaaaataatataataaagtgacaactatgcaaa

SEQ ID NO: 55199 - DNA, 1369 bp, Homo sapiens
tgttataaggatttaaaagttttatcccaagggcagagatacagccaggcatcaggaacaagctagaatcaggggctggaaacctgtaagaaacacaggaaaccctccctcagaatttctgttctttgtgggtctacttcattctccacataaaacaaaatgtcagtcattgccaacagcttcccagaattatgtcctctgaaaccggaatctcatagaccccatctcagaatcccaggggagggagctcattggcttagcttgagtcaggtgttcactgctgaaccaatcaaccgtgaggacacagtatagacaaacgtggctgttcgcatgttgcaatggatggaagcaggaacaggggaaacctaagacgggtccatcacttcctttttctcaggagtccctgcatccctaatggcttctctctgatctcattcagccaacggggctgttcctgatgtcctgcagcagggccggttgctggttgtggactatgccacctgctccagctctgcctggtggggcagcagcgtgaaaaccagtatgatctgtgctgggggtgatggcgtgatctccagctgcaacggagactctggcgggccactgaactgtcaggcgtctgacggccggtggcaggtgcacggcatcgtcagcttcgggtctcgcctcggctgcaactactaccacaagccctccgtcttcacgcgggtctccaattacatcgactggatcaattcgcgcctcagttgtggggtctccacttacgcgcctgatatgtctaggatagcttggaggtgacagaagcgaggccctaacagtctgtgctcctggtcgaggtctccctgcagtacagctccaatggccagtggtaccacacctgcggagggtccctgatagccaacagctgggtcctgacggctgcccactgcatcagctcctccaggatctaccgcgtgatgctgggccagcataacctctacgttgcagagtccggctcgctggccgtcagtgtctctaagattgtggtgcacaaggactggaactccaaccaggtctccaaagggaacgacattgccctgctcaaactggctaaccccgtctccctcaccgacaagatccagctggcctgcctccctcctgccggcaccattctacccaacaactacccctgctacgtcacgggctggggaaggctgcagaccaacggggctctccctgatgacctgaagcagggccagttgctggttgtggactatgccacctgctccagctctggctggtggggcagcaccgtgaagacgaatatgatctgtgctgggggtgatggcgtgatatgcacctgcaacgtgagtaccaaaaatcaggggcc

SEQ ID NO: 55200 - DNA, 2084 bp, Homo sapiens
tgttataaggatttaaaagttttatcccaagggcagagatacagccaggcatcaggaacaagctagaatcaggggctggaaacctgtaagaaacacaggaaaccctccctcagaatttctgttctttgtgggtctacttcattctccacataaaacaaaatgtcagtcattgccaacagcttcccagaattatgtcctctgaaaccggaatctcatagaccccatctcagaatcccaggggagggagctcattggcttagcttgagtcaggtgttcactgctgaaccaatcaaccgtgaggacacagtatagacaaacgtggctgttcgcatgttgcaatggatggaagcaggaacaggggaaacctaagacgggtccatcacttcctttttctcaggagtccctgcatccctaatggcttctctctgatctcattcagccaacggggctgttcctgatgtcctgcagcagggccggttgctggttgtggactatgccacctgctccagctctgcctggtggggcagcagcgtgaaaaccagtatgatctgtgctgggggtgatggcgtgatctccagctgcaacgcaacgtgagtaccaaaatcaggggctccgctccatgacaaaatgtggctggggataaggctatagaggtccatccctccataggtccatcctcccacctcctggcagaattaccccgaaacatgttccagatatatctttggccaggcacggtggctcacacctgtaatcccagcactttgagaggccaggcgggcagaccacttgaggtcagcagttcaagaccagcctggccaacatggtgaaaccttgtgtctactaaaactaaaaaaattagccgggcatggtggcaggcgcctgtactcacagctactcgggaggctgaggcaggagaatcacttgaacccatgaggcggaggttgcagtgagctgagatcacaccgctgcaatccagcctgggtgacagagcgaaactcaaaaaaaaaaacaaaaaaacttgatcttggttcttttttgttcttgttttgagatgttttgagattctccttgtagtatccacccatctcactgctgggaagtccttccctgggtctcatcaaggtctctcgtgactgtcactatgtatcctttcctctatgctggaagggaaccaaaggaaagtattccctggcttagggcctttctacgatgacttctggtttttctgttgaattagtctcatcaatggcgcagcgtgtcccctccaggtagctgccacggaaaccttcctggagacagtgtcttaaccaccaggaactgctctgtgcttggacttagcagtgaagtggggatggagtaggaaagagttccacacgcccttcagatcacactgtgccctacacactctgcccacatagaccacccgcgggaagacggaaccagtggggaagagcctggcagctgaagtctgggatgtggcctcagctcctttacaaactgcctgtgcaaccttgggcaagtcccaacctctcaacactccagtttctcctcttccgtggcctggggatgctacgaatatttacctcataggattttgtgaggattaatgagatgaggcatagaacatgcttagctcagctctggccacacaggaagaataagtgttggctcttgttggaattatggtaccaccttgggctatgaccacaagggtcagcttccgaggacagtgacctgcagcagaacaatagaaatgcattgagaacaatggttccaatgggcagccccttcctctccctttacctgcctataactctggccttcctcagggagactctggcgggccactgaactgtcaggcgtctgacggccggtggcaggtgcacggcatcgtcagcttcgggtctcgcctcggctgcaactactaccacaagccctccgtcttcacgcgggtctccaattacatcgactggatcaattcggtgattgcaaataactaaccaaaagaagtccctgggactgtttcagacttggaaaggtcacagaaggaaaataatataataaagtgacaactatgcaaa

SEQ ID NO: 55201 - DNA, 510 bp, Homo sapiens
agctttcatgtttcctatttttcactcttacattgtgcaatgaacatccttggacataattcttgcacacttgagtatttgtgctgtagcagctggatatcctgccgtttacagcactggatcatgaagttggcatatcaaaatgtttaacaggctgggcgcggtggctcacgcctgtaatccgagcactttgggaagccgagacgggtagatcacttgaggtcagcagttcgagaccagcctggccaacatggtgaaaccctgtctctactaaaaatgcaaaaaaatcagccaggcatggtggtgcacacctgtaatatcagctactcgggaggctaaggcaggagaatcgcttgaacctgggaggcagaggttgcagtgagcctagaatatgccacctgtactcgtctgggcaacagagcaagactgtctcaaaaaaaaaaaaaaaagtttaacagatactgatcaacagcctctggaaacagttatagccccaaccacagtgcataa

SEQ ID NO: 55202 - DNA, 194 bp, Homo sapiens
ttgaaagatattattaaataaatgaaaagataaaaaaacttggaaaaaatacttgcaaaatgcctatgtgataaagctttgtatccaaaatatataaagagcatttgcaactcagtaaaaagaaaacaatccaacagaaaatgatcaaaagatctgaagaggtacttcagcttttattaatgatgactgaaatt

SEQ ID NO: 55203 - DNA, 340 bp, Homo sapiens
gaaccctggaaggtctaggctacagtgagccatgtttgcaccactgcaccccagcctgggtgacagagtgagacactgtctccaaaaataatagtgataataataatagtcatttattttaagtctacatgctgagatgccagaacaagtaaaattggattatagattcaagcagtatgtaggtatactttcataaactgaatactgatgtaattttggatgattaaaaacagacttttagtaggtgttcaaaaatctggataattcctttcatgacattcaaacatttaggtggcctgtctttgtttttttaggatataactgcaaacattcaattgtt

SEQ ID NO: 55204 - DNA, 355 bp, Homo sapiens
tcgtgagtttgtaaaacattttgttttaaaagagtttctgtatgattagtcctgatggttaaaccatagctttgaataatgaagtatataaagcatgaaaagttagaggtggatataacaaatatatctaccatctgggttaactgtctagttgaaagttcttgtactccccctttcttccatccctcatccattcctttaggtaactactatcctgaagttgagaatattcttcctgtgtgttttgacacacccacacctatatacatttatacacacacacagacagaggaggccatacagacccgtaagttgaacagttttgcctagctgctttcataggtaaacacaaatt

SEQ ID NO: 55205 - DNA, 345 bp, Homo sapiens
aaatgtggctgcctaataacctgtgcaagttttaaaactcagaatttcaaactgcaaatattttagaagatatttattttttcacttagtttcaatctggatgcccagatgaagagaatggaaactctaattgttactattttgaaaagatccagcctacccttgtcaattactgaatagacctttcacaggactggaaaagtgttttgggctccacctgctggacccacggagcttttgtgttcagtatgtgactgtactttagaaaacaaattaaatcagtggaattgggaacaaattgtccttctcaacagggctggtagacaaagacatgtaaaaatgaat

SEQ ID NO: 55206 - DNA, 284 bp, Homo sapiens
cagaaggggaggctcgccctacacctcaatttgggtgacagcaaagcgcggctcagcagcagcttgccctctgccaccctgggcagcctcctggatgaccagcactggcactcggtcctcattgagcgggtgggcaagcaggtgaacttcacggtggacaagcacacacagcacttccgcaccaagggcgagacggatgccttagacattgactatgagcttagttttggaggaattccagtaccaggaaaacctgggacctttttaaagaaaaacttccatgg

SEQ ID NO: 55207 - DNA, 249 bp, Homo sapiens
gtgagcagtgaccagagaaacacaaaatcctgttggttctagcccaggagaggctgccagttctgatggtgagccaggacacaaggataggagaacaggaagcaggaggcaggaaaaagaccaagagagaggagtggctgccaccaaggaagcagagcgctctgaccagagttcaagatccagggttcgggcaggacttgggagctggggcctgcagctggaaggagcgctccagaagaaggattgtat

SEQ ID NO: 55208 - DNA, 809 bp, Homo sapiens
ggagaccaggctgcacagaccgtcacgtccattccctctctggccccagccccgcgggaagaaaacgagggcgttcagcctggcagttcattcacttattaggaagaagacatcccacacccccacccagcacacacacagatgtcagggaccagccactaggaaccactccctgagcgaatgaaggcatccccgtagccacgtgcctggtacatcacaagcactcaaaacgtggctgccacctttcgaaattgcatgcccaaaactttatgagatcctcacaacacacttgggaaacagacaaaagagtttgaatgcccgcctacttaacagatacagaaaatggtgttccgtgtacaagcgacttactcatgtctgctggtaactcataatgtgccgtttgacctccttaggacataattaataatggtaattaacagtgctacgatatgccaggcattgagcttagcgccttaaaagtcatagctaactatgtttcacagcaaaccctcagaggcaaatgtgacccgcctcctacgcaggaggcaacagaggctcagacatgttaaagaagcttggcctgagtctcccagcagagaaagggcagagcgtgtagccctgacaacgtgcttaattgcaactcctgtgggtcccatcacaactctctcttcctatgtggtgtccgcaacattaatacatagagacaccgaggagcctcagttctgcttgtgggcgggcctgtctttcaccaggctggcaaaagcagtgcaaacatcattttggaggtgataaaataaaatctctcacag

SEQ ID NO: 55209 - DNA, 653 bp, Homo sapiens
ctgttcatcgctgagccagtaaagatactgcactccagctgcataaacataatataacccagtgggaaaagatcaagtatgccattacagaagggtttatatggtttcagccagaccctgaagttgaaggatgcagtagagttttaggaagacgagatgaagtgtagaatatttcaggcagagaagaacatagtgtggacacaaagggatgaaatttggacttcaagtgtcaggagtggaacttggagttcaagtgtcagaagatttggttacagatgtttggtaaaattgtagtgccagaaaggtggggttggtgctttgaatgcttggtaaaaaaaattaggaagtcattaaaggatgttttaaaaataaggaggccgggcgtggtggctcacacttgtaatcccattactttgggaggctgaggcaggcacatcacctgaggtcaggagcgtgagaccatcatggtcaacatggtgaaaccctgcctctactaaaaaaaaatacaaagaactagccaggcgtggtggtatgcgcctgtaatcccagctattcaggaggctgaggcaggaggattgcatgaacccagaagctggaggttgcagtgagccgagattgtgccattgcattccagcctgggcaacaagagcaaa

SEQ ID NO: 55210 - DNA, 511 bp, Homo sapiens
aatctctcattccagcccaacctatttaactttttgtggaggaattttacatggaggaagtgagcacatgtcatgctagccaagaggacattattgtcattaaagagaggcattatttatacaccctgcaatgtgcacattaaaatatggaaattttaaaattatgaccaagggcttgaaacatattggattacatgctcacatttaacaaagagaggaaatgtgtttcagtttctggagtggctggaatttacaagctaattgttcaataaatctactcaagatagttacctaaggctttgtggcaatgaccttgaactgagagcctgtatctggatttagcacttgaaagatctaactggatatttgggttaaaagaatcacatttattcccaaatcggaatgctttgtttttcctgtcagttaattgccagttgccaacaaatctagttctatacagtttcttgggatgatgataataaacatttattgagcaattgtcccataactt

SEQ ID NO: 55211 - DNA, 429 bp, Homo sapiens
ccccctaaatatgcagatttttaaaaaaccacgttggggctcataaagtaacattgcatttgcacattttctaacattaagctttgtatggcttaaatctctgtaggaatgggctttcctcgttcccttggaggagactgcgtgggtttctagactatactaaggttggtgagttgatatgcagtaagcatgaagtcagttactcccgacgccagggcctggggccaaggaaggggctgtgttctggatactccccactctcaccgcctgtcccgggggaatgcccttgtctcgttttttgttttgttttgtttgtttgttttgagacagagtctcacattgtcatgcaggctggagtgcagtggtgtgatctcggctcactgcaagctccgcctccctggttcaagcgattctcctgcctcagcctct

SEQ ID NO: 55212 - DNA, 442 bp, Homo sapiens
gatctctgactttaaggcaagtcaatctcaaaacaatctggataccttaaaaatcaggggggaatcgttgagaggccaaggtaggcagatcacttaaggtcagaagtttgagaccccagcctggccaacatggcaaaatcccgtctctacaaaaatacaaaaattagccaggcatggtggcgcacacctgtaatcccacatatcaggaggctgagttgggagaaacccttgaccctgggaggcagaggtcgcagccagcctgggtgacagagtgagactctgaatctaaaaaaaaaaaacaagggaaaaaaaaatgggggggatccttttttttttgcaccccgtgttacattcacactgtatctacttgcaaagaaaaaaggggtagggagttccaagtcatgggagtcagagacccagagaaatcagatagcctaggaag

SEQ ID NO: 55213 - DNA, 377 bp, Homo sapiens
aaaatagagttgtttacaagatttaaagtttccaaaatatgaaaaactaagcagtattccaaagaagcacagtgtttccagattctgagatatgagcaaaatttctcctccaggctctagtaaagaggacaatgttcttgttagcattctgaccctagattataaaagtttgttcttaaattgccctctaatgtttaatgaaacaatgctgcttaaatttggatttatctgttacccagtgaactgctcagctaaaaattattccataaacagcgtttcttcttgtctggcttctgacaagttttgaactgcaaagagtttagggttgtagtctctggtaaggatctgtaatgccagagttctatgtactaattaag

SEQ ID NO: 55214 - DNA, 447 bp, Homo sapiens
tcctggactcaagcgatcttcccacctcagtctcccgtgtagctgagagtacaggcctgcatggcaattcagggctaatttatttttttttggacgtggggtctcgctatgttgcccaggctggtcgcaaattcctgtcctcaagcagtccccccacctcggtctgccaaagtgctgggattacaggtgcgagccaccctgcctggcctatacatgttttcaagtgctgatcatttattaatagtgaagtgattgtagtcaggcgtggctcccccatttactggcaggtcccatttagacctgcggttgcagaagtacagcacagctctgtgcatgattggtggaaatattccaggagatgaggctgttacagtaacagcagatttttccattgtgaaaatgtaactattcctgctttgttgaagagaaagatttttttggaaaatg

SEQ ID NO: 55215 - DNA, 206 bp, Homo sapiens
tcggggagcctcctcagccagaggaggtgacaacaaagcagtggcggcggtggctccccaacatccgcagtttctattctttatagcagtgtaagaatggactaatacagtactgttaatatttccggatcctctcatttataaggccctgaatactctgcaactaggatttgaaactacagttctgggccccttagaacctctcg

SEQ ID NO: 55216 - DNA, 395 bp, Homo sapiens
ttgtccattgtccatccatccatccattcactcatccattcatccatttatccatccatccatctatgcatccatccatccatccacccatccatccatccatccatccatccgcctgcccatccattcatccatttatctacccatccacctactcattcattcatctatccatccacccacccgcccatttattcacccactcatccacccatcatctcttgaatctcttcggcatgctaaggactgccctgggtattggagagacagaaatgaaaggcattattcttgccttcaaggaactcacagtctagtgggctgtcagaaaactaagcaaatgattccagtccagagtgttaggtgcccagagggacaagtggccagctgtctgtccc

SEQ ID NO: 55217 - DNA, 267 bp, Homo sapiens
cataaggttctgaactaattatgtaactgaatcattaatagttttccttggaaacactgtggaaaacaaattacgccgcctttaaaggagtgtttccactggtagcagcattcacagagccgctgccatcagctctgcagcgtgagctcagtcagatgcatgcctggacacacgccaccagctggtcactgtttcaatagggtcgggaactagatggtcgggaactagagagacattgtcaggagaaacaaggtcgcagactgagca

SEQ ID NO: 55218 - DNA, 409 bp, Homo sapiens
agaaagtttcctgttcctataatgtacaatgaataatcagctgcaatttcagtggatgtcagctgggctagatgatgctggagtttctgggacaaaagatgcacttcctaagttattttcatgcatgtaatgaaaaaattagaagacagcagaattgggtttaataaactttcctatttttaattgccactgaatgatgttttaaggacaataagtccttagaggaaagaaaaggctttaaaagcacccacttcttctcttccattgaaatgacatgtttcacctatgtgatgacttaattgcctaagagcaaggaacagtggaactacagataaccttagttgggctttagagcagggaatggatttctacctatatggcaattatataccatgttctctgagggtta

SEQ ID NO: 55219 - DNA, 796 bp, Homo sapiens
gggcacgagggtgcaaccttcaagacctcagggaagcctgggcttggtgctgccatcagtggggagctatagagtgtgcttgagctctagagggctgtagtgaaaaggaagttttctctgtgggggtgcggatcattaaacatgtcctcctctgacctgccagagctctgttgtctccagccacatgccgctcccccacagccaacatcatttctcctgcccctctaactgatcctccccagccagacaagcccggctcaaagtccccaacgctccatctccaagaaaccccccggggaaaatccctctggctctcaagacccgtggagcctgttgctggggaaggggagtaggaggaaggaagataggggtggcagaccctggcttcttccgcctaaagctttccattgctgagacagctgaggcccaagtgcagcctatgaggggaaagggatggaggtggggggtctttgaggagccaggcagacaggtctacccactgtcactctcgtccccaaaccacctcccagccctcccaaccctggtctctttgtttctgtgtctttgttttttgtttttagagacagagcctcgctcttattgcccaggctggagtacagtggcgcaatcacagctcctggcagcctgaaacttctgggctcaagaaatcctcctgattcagctcccagctacacaggaggctgaggtgggaggatcccttgagcccaggttgcagtgagccaagatcgagccactgcactccagcctgggtggcagagcaaaaccctgtatcaag

SEQ ID NO: 55220 - DNA, 479 bp, Homo sapiens
gggcacgagggtgcaaccttcaagacctcagggaagcctgggcttggtgctgccatcagtggggagctatagagtgtgcttgagctctagagggctgtagtgaaaaggaagttttctctgtgggggtgcggatcattaaacatgtcctcctctgacctgccagagctctgttgtctccagccacatgccgctcccccacagccaacatcatttctcctgcccctctaactgatcctccccagccagacaagcccggctcaaagtccccaacgctccatctccaagaaaccccccggggaaaatccctctggctctcaagacccgtggagcctgttgctggggaaggggagtaggaggaaggaagataggggtgttacactttttcttttttttcttgagttttaaattgttggtcatatggtgtcacatgaaaacaatttgtggtaaactttgttcttatattattcattctaaataat

SEQ ID NO: 55221 - DNA, 432 bp, Homo sapiens
gaacgcgtgccgcgcggccctcacggtgcttaggctgggtgcaacctagaacggaggttcctttcgtaccgtacatccaggtttgcacagcgcgcttatgtccctcctccaatctgatcttgcaccagctctgcagtagtttttcttattatcctcattttacggaggagagggagctgtggcttagagaagttaagagacgtgtccaaattcatacaacctgttgggcacctctttatcccgaacgctgttctaggggatagggttagtgaacaaaaaacgcaaaagcccctgaccgcctgggccttacatctattaggaggaggaagacagataaactaaggctcgtgcaaaggagaaaaataaagcaaggtgactttctgcagacttcggactcaccagtggtgtttcattctatttaatgtcatccta

SEQ ID NO: 55222 - DNA, 369 bp, Homo sapiens
ccaagacaagtgccttgtatatagtaaataagcttttatccaaacaagcaagaaaacaaccaactaacactttactcagtgttcactttgtgccaaatactggaatcagcagcactggagaagacagagacacgatgcctgctgtccaggagaccataatctagtggaagaaatagataatatatcacaataaacacttaaaatagagtgtactgctaaatgctgtgagaggtccgtatagggttcaatgagggcaaaaacaggaatagaggtgaagcctgaatgaacacgtgtcctttccttttttaggtgactttctgcagacttcggactcaccagtggtgtttcattctatttaatgtcatccta

SEQ ID NO: 55223 - DNA, 321 bp, Homo sapiens
cctaccttgaggagtatagcttgcgtgcgagtgggtgtggacctgtgtgcacactcggggtgtatatgaaacccacatctactggtctctgcccatgcagacccctcatgggagcggtatttatgtgaatgatttaccctggtgacttcaagaccacagaactccatccaacaaaggagctcatttactttctgacatggttaatgtcctgatttaatggccctcttatatcacactcagcaccctaaattatagggcaacccagacaataacactgcagggtttcaggctgtacctctccccagagctgccctcccatac

SEQ ID NO: 55224 - DNA, 462 bp, Homo sapiens
aagcaaaattccttgtttctcggagaatctcagtcttttctcctaagaccttcaaataattgattgttggaggcccacttacattatggatggtagtttgctttactcaatgtagatttaaatctactgatttaatttcttatcacatctgacatataccttcacggcaacatctagatggatgtttgaccgaacagctgggcaccatagcctagccaagttgacacatgaggttaaccatcacagttgtgaaaatatagttgacctttgaagaaaacaggtttgagctgcgtgggtccccttacgtgtggattttcttccacctctgctacccctaagacagcaagacgaactcttctacttcctcctcaacatgaaagcaaggaagataaagacttttgatgatccacttccacttaatgaatagtaaatatattttctcttccttatgattttcttaat

SEQ ID NO: 55225 - DNA, 1859 bp, Homo sapiens
aaaataatttctaggttaagttggaaacatgtgataacattaaaaaatttaaaatgtctttgggcctgaaagattatgcctttacattcaacatgaaatccatggatggagtttatataaataaccatgtaggcttaccaatccttaaccctcttgtattagtccatactcacatggatatttccatatccacttttactcttgtgtcaaaagacaaaattaaaactcatttagttatgtatctaattggcttttattctcgattcatgaatcggtgcagcctccattctaatagaatcacagcttctactgggcaatggcagactattgggttttgtgaggtgggaatgaggaaacataacaatggggaaaataagctgattagttaacaatagattacttcagtttactttttttttataagggttaaagcagaggggactttcttgttctgactcaggtaggctagaatctcctgtttttaggaaaaactcgtctgttttgggatctatctgctttcttacagttgcagtttgattatatgacatttggcatgagtgactccactttgttaacacttgaaaggttattattcccatatggagtattcacatggatgtagccattgtcagttatacaagatcgtgtttcttttctttgcccccctgcccccgtcacctaagaacttgttagatattccatttctttttttaaaaaaagatacagtgagtaaaggtgatagagagcatatggataaatagtgaagaagcttgatgaggggagtggttaggttagaaacacaagggaatttactcaggttaaaacactgtcattttatattcaagccaatatatatttgttttgttagcgttgacgtaatttttttctgggaaggctttcctgacctctggtttgagtaagcagctcctcctatgtgttttagtcagcactcttggcttaatccatagtaacttttgcttgtttgcattgtagttggttatatctgtctcctatagcttgtgggctcactttgacggggagaggccttgttctattcatcattaatcctcagggtctagcacctagtaaatactcagtaaatatttattaaatgtaattgctttatctgatttcttattgatattttttggagcagcagtgttgcgggaggtcatgttaatttaatcaaagtaaaaagaatttgggggttagtactggaaggtggttgggaagtgtatatatatatatttccaaactctttagattttcaaactttgttctcctgaggactttgccacttccagaactgtttcaggagctgctgtgggagaaggaggtcagtgcacgtccactgatgtggtttgaatgtgttctccaaagtttgtgtgttagaaacttaatccctggtgcaatagtgttgggagttggggcctattaggtgattcggtcatgacgggtctgcccctgtgaatggattactgtctttatttgggagtgggttagttataaaggagtgtgcaccgtctcttgctcttctgccctctgacctgggatgatgtaaaatgaagtcccttatcagatgcagacctcatggtcttgtacttctcagccagaactataagaaatacgtttattttcttcataaattaccgagtctcagatattctgttatagcagcataaaataaattaagacatctactttgcccatttatactggaggctttagccagaattctgtttataaagtttgcaggccaggcacggtggctcacgcctataatctcagcacattgggaggctgaggcaggaggatcacttgaacccaggggtttgagaccctgtctctacaaaaaaaaa

SEQ ID NO: 55226 - DNA, 386 bp, Homo sapiens
atcacctgagggtcaggagtttgagactggtctgaccaatatggtgaaaccccgtgtctactaaaaatacataaattagccgggcatggtggcatgtgcctgtagtcccagctactcgggaggctgagacaggagaattgcttgaacccaggaggcccaggttgcagtgagccgagatcatgccactgcactccagcctgggcaacagagtgagaccctgcctcaaaaaagaaaaaaaagtaaaaattaaataaaattaaaagtgctgtctcattgcctttgccttctcattgtaatggtcactgacaagaaggccgctgttatttatatctttggtcctctgtgtatgttatttgcctttttttcccccttcaggcactttcaag

SEQ ID NO: 55227 - DNA, 292 bp, Homo sapiens
catttatgagagcaaatgtctgtccctgcgcaatttctgtggggatagttgcagtcaggtctacaggatttgcttaaaaatttccaagacctgggtgtgtctgacagcctggacctcaacctcaaaaaggaactagctcctctctgatttccttgggacacctgggagcaagcacaggagcccatggagccacggagagtgtcacttcaagcgcctcctgggagctcttgcagatgccaagtgctctgcccttccccattacctgtgatttcaagtgggcttagagattctc

SEQ ID NO: 55228 - DNA, 345 bp, Homo sapiens
aaatggaactaacttataactattttctgagtgacgattgttacagagcatgaattaaaataatggtagagcaacatttttaggtgaaacttacaatagtgtattaaatctatgtagataacaattttggttttagtttaaaatctgcactatcctttatttttattttagtattattactattttttagagacagagtcttgctcttttttaaaaaagaaagaaaaaccctttcaatcttcaattactctttaaaagcccacttcttagctactgggccaatccacacccaattatttaaaattccactttgggtacacaccctgttgttcccacctgggggta

SEQ ID NO: 55229 - DNA, 1108 bp, Homo sapiens
gcggccgcgcccgtgcacgagcagtccctggggtctgtagtggcctctggagagcccttctccccaggccaggcgggaaggcccccgctccggcctggttgaagtaggggaacgggtcccaacgcggggccgactcccttgaccctctgacttgctggcttcccttgttttacagtcctcggcctggcggaagttttgcaggttgtgaagacccctagtctttcattctctccttgtcacagccttgtagggcgtgaaggggtcattgccccatttagggatgcgcacctcctgatttcccgtccactgctctgcgccctgaagtggctgaaaagtgctcttaaaaggatgggaatcccgtcgccctcagctggtgcgctctccactgggtcgtggggctcctcatttcatcctaagtgagcccctccatcacctgtgtgttaaggaggcatttctttcccatcagtaaacacatttcgcctcttcggccgaggtaggaatataaaaggcccctggcctacccaagttttggtccagcaggggagccaggccgggaaagggccaagccgccacactcggcttgtggggctgtgtggtgccgtgatgcagctgtgggtttggccaccgacagacctgggctcaaattggacctgctgcttttgactgtgagaccttccataagctccttttgctccaagcctcagttttctcctctgtgaaacagagaaaatcgttcctatcagagttcttatgaggatgaaatgggattttggatgtaaaatgcttccatccagtacctgctaaacaaaatgcttactaatggccgggcgcggtcgtcacgcctgtaatcccagcactttgggaggctgaggcgggcggatcgcttgaggtcaggagttcgagaccagcctggccaatatggtgaaaccctgtctctactaaaagtgcaaaaattacccgggcgtggtggtgagtgcctgtaatcccagctatccagaggctgaggcacaagaattatttgaacctgggaggtggagtttgcagtgagctgagattacgccactgcactccagcctaggcaaaagagcaagagtctgtctcaaaaaaa

SEQ ID NO: 55230 - DNA, 716 bp, Homo sapiens
  misc_feature (32)..(33): n is a, c, g, or t
cggacgcgtgggtcgacccacgcgtccggcgnnggctttggcagagaacgcaactcaggcaccaaactattcaacatctctggccatgtcaaccacccttgcactgtggaggaggagatgtctgtgcccttgaaagaactgattgagaagcatgctgggggtgtcacgggcggctgggacaacctccttgctgtgatccctggcggctcgtctaccccactgatccccaagtctgtgtgtgagacggtgctgatggacttcgatgcgctggtgcaggcacagacaggcctgggcacagctgcggtgatcgtcatggaccgctcgacggacatcgtgaaagccatcgcccgcctcattgagttctataagcacgagagctgtggccagtgtaccccatgccgtgagggtgtggactggatgaacaaggtgatggcacgtttcgtgaggggggatgcccggccggccgagatcgactccctgtgggagatcagcaagcagatagaaggccatacgatttgtgctctgggtgacggggccgcctggcctgtgcagggtctgatccgccactttcggccggagctcgaggagcggatgcagcggtttgcccagcagcatcaggcccggcaggctgcctcttagcccaccaccctggcctgctgtcctgcgtctatccatgtggaatgctggacaataaagcgagtgctgcccaccctcca

SEQ ID NO: 55231 - DNA, 1059 bp, Homo sapiens
  misc_feature (18)..(18): n is a, c, g, or t
  misc_feature (818)..(818): n is a, c, g, or t
  misc_feature (821)..(821): n is a, c, g, or t
  misc_feature (1058)..(1058): n is a, c, g, or t
ataggctagtacgaggcnggtgtaaattcggccgagggtgctatgaaggtgacagcgtgaggtgacccatctggcccgccgcgatgctggcaacacggcggctgctcggctggtcgcttcccgcgcgggtatctgtgcgtttcagcggcgacacgacagcacccaagaaaacctcatttggctcgctgaaggatgaagaccggattttcaccaacctgtacggccgccatgactggaggctgaaaggttccctgagtcgaggtgactggtacaagacaaaggagatcctgctgaaggggcccgactggatcctgggcgagatcaagacatcgggtttgaggggccgtggaggcgctggcttccccactggcctcaagtggagcttcatgaataagccctcagatggcaggcccaagtatctggtggtgaacgcagacgagggggagccgggcacctgcaaggaccgggagatcttacgccatgatcctcacaagctgctggaaggctgcctggtggggggccgggccatgggcgcccgcgctgcctatatctacatccgaggggaattctacaatgaggcctccaatctgcaggtggccatccgagaggcctatgaggcaggtctgattggcaagaatgcttgtggctctggctatgattttgacgtgtttgtggtgcgcggggctggggcctacatctgtggagaggagacagcgctcatcgagtccattgagggcaagcagggcaagccccgcctgaagccccccttccccgcagacgtggagtgttggtgcccacaatgtggcacgtggagacgnggngtgtcccaaatctgcggcgggaggtccgggttgtggcttggagggacgcatcaggccatatccatttctgggctgtacacctgctgtgggggttttggccttcaatgttggcagtgcgggttcgggggcaccctgtgatccgggcttaccttccactgttacggtgtctgcgggacagcgctggttggcgttgacgtttagcgtctcggtggtggctcctgtggttgtgtgctctcng

SEQ ID NO: 55232 - DNA, 863 bp, Homo sapiens
  misc_feature (18)..(18): n is a, c, g, or t
ataggctagtacgaggcnggtgtaaattcggccgaggggctttggcagagaacgcaactcaggcaccaaactattcaacatctctggccatgtcaaccacccttgcactgtggaggaggagatgtctgtgcccttgaaagaactgattgagaagcatgctgggggtgtcacgggcggctgggacaacctccttgctgtgatccctggcggctcgtctaccccactgatccccaagtctgtgtgtgagacggtgctgatggacttcgatgcgctggtgcaggcacagacaggcctgggcacagctgcggtgatcgtcatggaccgctcgacggacatcgtgaaagccatcgcccgcctcattgagttctataagcacgagagctgtggccagtgtaccccatgccgtgagggtgtggactggatgaacaaggtgatggcacgtttcgtgaggggggatgcccggccggccgagatcgactccctgtgggagatcagcaagcagatagaaggccatacgatttgtgctctgggtgacggggccgcctggcctgtgcagggtctgatccgccactttcggccggagctcgaggagcggatgcagcggtttgcccagcagcatcaggcccggcaggctgcctcttagcccaccaccctggcctgctgtcctgcgtctatccatgtggaatgctggacaataaagcgagtgctgcccaccctccaaaaaaaaaaaaaaaaaaaaaacaaaaaaaatcgggcgttttttggggcggaaaaggggttaggggggggttttgtttttctgcccccctttttggacagggggaacggcggcccaagggaggtttatgaacgggactttggag

SEQ ID NO: 55233 - DNA, 518 bp, Homo sapiens
gcggccgcgcccgtgcacgagcagtccctggggtctgtagtggcctctggagagcccttctccccaggccaggcgggaaggcccccgctccggcctggttgaagtaggggaacgggtcccaacgcggggccgactcccttgaccctctgacttgctggcttcccttgttttacagtcctcggcctggcggaagttttgcaggttgtgaagacccctagtctttcattctctccttgtcacagccttgtagggcgtgaaggggtcattgccccatttagggatgcgcacctcctgatttcccgtccactgctctgcgccctgaagtggctgaaaagtgctcttaaaaggatgggaatcccgtcgccctcagctggtgcgctctccactgggtcgtggggctcctcatttcatcctaagtgagcccctccatcacctgtgtgttaaggaggcatttctttcccaaagtgctgggattataggcataagccggcgcacccagcccttatttctaatatact

SEQ ID NO: 55234 - DNA, 197 bp, Homo sapiens
cgagcttttaccagtgttgctgtggctgtgctaggtctgatccgccactttcggccggagctcgaggagcggatgcagcggtttgcccagcagcatcaggcccggcaggctgcctcttagcccaccaccctggcctgctgtcctgcgtctatccatgtggaatgctggacaataaagcgagtgctgcccaccctcca

SEQ ID NO: 55235 - DNA, 1625 bp, Homo sapiens
gaagttgaaggggcgcagcgataccggtgcgcggcgctggcgtcgggcgcgtgacgtctttcctgcgcgccacctagcgtctctatcgcgccagttcctcagcctcagtgctatgaaggtgacagcgtgaggtgacccatctggcccgccgcgatgctggcaacacggcggctgctcggctggtcgcttcccgcgcgggtatctgtgcgtttcagcggcgacacgacagcacccaagaaaacctcatttggctcgctgaaggatgaagaccggattttcaccaacctgtacggccgccatgactggaggctgaaaggttccctgagtcgaggtgactggtacaagacaaaggagatcctgctgaaggggcccgactggatcctgggcgagatcaagacatcgggtttgaggggccgtggaggcgctggcttccccactggcctcaagtggagcttcatgaataagccctcagatggcaggcccaagtatctggtggtgaacgcagacgagggggagccgggcacctgcaaggaccgggagatcttacgccatgatcctcacaagctgctggaaggctgcctggtggggggccgggccatgggcgcccgcgctgcctatatctacatccgaggggaattctacaatgaggcctccaatctgcaggtggccatccgagaggcctatgaggcaggtctgattggcaagaatgcttgtggctctggctatgattttgacgtgtttgtggtgcgcggggctggggcctacatctgtggagaggagacagcgctcatcgagtccattgagggcaagcagggcaagccccgcctgaagccccccttccccgcagacgtgggagtgtttggctgccccacaactgtggccaacgtggagacagtggcagtgtcccccacaatctgccgccgtggaggtacctggtttgctggctttggcagagaacgcaactcaggcaccaaactattcaacatctctggccatgtcaaccacccttgcactgtggaggaggagatgtctgtgcccttgaaagaactgattgagaagcatgctgggggtgtcacgggcggctgggacaacctccttgctgtgatccctggcggctcgtctaccccactgatccccaagtctgtgtgtgagacggtgctgatggacttcgatgcgctggtgcaggcacagacaggcctgggcacagctgcggtgatcgtcatggaccgctcgacggacatcgtgaaagccatcgcccgcctcattgagttctataagcacgagagctgtggccagtgtaccccatgccgtgagggtgtggactggatgaacaaggtgatggcacgtttcgtgaggggggatgcccggccggccgagatcgactccctgtgggagatcagcaagcagatagaaggccatacgatttgtgctctgggtgacggggccgcctggcctgtgcagggtctgatccgccactttcggccggagctcgaggagcggatgcagcggtttgcccagcagcatcaggcccggcaggctgcctcttagcccaccaccctggcctgctgtcctgcgtctatccatgtggaatgctggacaataaagcgagtgctgcccaccctcca

SEQ ID NO: 55236 - DNA, 1582 bp, Homo sapiens
ggctggtactggtcgccaagccctgtagatctagcgtctctatcgcgccagttcctcagcctcagtgctatgaaggtgacagcgtgaggtgacccatctggcccgccgcgatgctggcaacacggcggctgctcggctggtcgcttcccgcgcgggtatctgtgcgtttcagcggcgacacgacagcacccaagaaaacctcatttggctcgctgaaggatgaagaccggattttcaccaacctgtacggccgccatgactggaggctgaaaggttccctgagtcgaggtgactggtacaagacaaaggagatcctgctgaaggggcccgactggatcctgggcgagatcaagacatcgggtttgaggggccgtggaggcgctggcttccccactggcctcaagtggagcttcatgaataagccctcagatggcaggcccaagtatctggtggtgaacgcagacgagggggagccgggcacctgcaaggaccgggagatcttacgccatgatcctcacaagctgctggaaggctgcctggtggggggccgggccatgggcgcccgcgctgcctatatctacatccgaggggaattctacaatgaggcctccaatctgcaggtggccatccgagaggcctatgaggcaggtctgattggcaagaatgcttgtggctctggctatgattttgacgtgtttgtggtgcgcggggctggggcctacatctgtggagaggagacagcgctcatcgagtccattgagggcaagcagggcaagccccgcctgaagccccccttccccgcagacgtgggagtgtttggctgccccacaactgtggccaacgtggagacagtggcagtgtcccccacaatctgccgccgtggaggtacctggtttgctggctttggcagagaacgcaactcaggcaccaaactattcaacatctctggccatgtcaaccacccttgcactgtggaggaggagatgtctgtgcccttgaaagaactgattgagaagcatgctgggggtgtcacgggcggctgggacaacctccttgctgtgatccctggcggctcgtctaccccactgatccccaagtctgtgtgtgagacggtgctgatggacttcgatgcgctggtgcaggcacagacaggcctgggcacagctgcggtgatcgtcatggaccgctcgacggacatcgtgaaagccatcgcccgcctcattgagttctataagcacgagagctgtggccagtgtaccccatgccgtgagggtgtggactggatgaacaaggtgatggcacgtttcgtgaggggggatgcccggccggccgagatcgactccctgtgggagatcagcaagcagatagaaggccatacgatttgtgctctgggtgacggggccgcctggcctgtgcagggtctgatccgccactttcggccggagctcgaggagcggatgcagcggtttgcccagcagcatcaggcccggcaggctgcctcttagcccaccaccctggcctgctgtcctgcgtctatccatgtggaatgctggacaataaagcgagtgctgcccaccctcca

SEQ ID NO: 55237 - DNA, 1546 bp, Homo sapiens
tcggtaggtacgaggctgggtggtgcaggtgctatgaaggtgacagcgtgaggtgacccatctggcccgccgcgatgctggcaacacggcggctgctcggctggtcgcttcccgcgcgggtatctgtgcgtttcagcggcgacacgacagcacccaagaaaacctcatttggctcgctgaaggatgaagaccggattttcaccaacctgtacggccgccatgactggaggctgaaaggttccctgagtcgaggtgactggtacaagacaaaggagatcctgctgaaggggcccgactggatcctgggcgagatcaagacatcgggtttgaggggccgtggaggcgctggcttccccactggcctcaagtggagcttcatgaataagccctcagatggcaggcccaagtatctggtggtgaacgcagacgagggggagccgggcacctgcaaggaccgggagatcttacgccatgatcctcacaagctgctggaaggctgcctggtggggggccgggccatgggcgcccgcgctgcctatatctacatccgaggggaattctacaatgaggcctccaatctgcaggtggccatccgagaggcctatgaggcaggtctgattggcaagaatgcttgtggctctggctatgattttgacgtgtttgtggtgcgcggggctggggcctacatctgtggagaggagacagcgctcatcgagtccattgagggcaagcagggcaagccccgcctgaagccccccttccccgcagacgtgggagtgtttggctgccccacaactgtggccaacgtggagacagtggcagtgtcccccacaatctgccgccgtggaggtacctggtttgctggctttggcagagaacgcaactcaggcaccaaactattcaacatctctggccatgtcaaccacccttgcactgtggaggaggagatgtctgtgcccttgaaagaactgattgagaagcatgctgggggtgtcacgggcggctgggacaacctccttgctgtgatccctggcggctcgtctaccccactgatccccaagtctgtgtgtgagacggtgctgatggacttcgatgcgctggtgcaggcacagacaggcctgggcacagctgcggtgatcgtcatggaccgctcgacggacatcgtgaaagccatcgcccgcctcattgagttctataagcacgagagctgtggccagtgtaccccatgccgtgagggtgtggactggatgaacaaggtgatggcacgtttcgtgaggggggatgcccggccggccgagatcgactccctgtgggagatcagcaagcagatagaaggccatacgatttgtgctctgggtgacggggccgcctggcctgtgcagggtctgatccgccactttcggccggagctcgaggagcggatgcagcggtttgcccagcagcatcaggcccggcaggctgcctcttagcccaccaccctggcctgctgtcctgcgtctatccatgtggaatgctggacaataaagcgagtgctgcccaccctcca

SEQ ID NO: 55238 - DNA, 1573 bp, Homo sapiens
ccaccccgccagaccaccccccaccctacggctagtacgaggctggtgttatcaggtgctatgaaggtgacagcgtgaggtgacccatctggcccgccgcgatgctggcaacacggcggctgctcggctggtcgcttcccgcgcgggtatctgtgcgtttcagcggcgacacgacagcacccaagaaaacctcatttggctcgctgaaggatgaagaccggattttcaccaacctgtacggccgccatgactggaggctgaaaggttccctgagtcgaggtgactggtacaagacaaaggagatcctgctgaaggggcccgactggatcctgggcgagatcaagacatcgggtttgaggggccgtggaggcgctggcttccccactggcctcaagtggagcttcatgaataagccctcagatggcaggcccaagtatctggtggtgaacgcagacgagggggagccgggcacctgcaaggaccgggagatcttacgccatgatcctcacaagctgctggaaggctgcctggtggggggccgggccatgggcgcccgcgctgcctatatctacatccgaggggaattctacaatgaggcctccaatctgcaggtggccatccgagaggcctatgaggcaggtctgattggcaagaatgcttgtggctctggctatgattttgacgtgtttgtggtgcgcggggctggggcctacatctgtggagaggagacagcgctcatcgagtccattgagggcaagcagggcaagccccgcctgaagccccccttccccgcagacgtgggagtgtttggctgccccacaactgtggccaacgtggagacagtggcagtgtcccccacaatctgccgccgtggaggtacctggtttgctggctttggcagagaacgcaactcaggcaccaaactattcaacatctctggccatgtcaaccacccttgcactgtggaggaggagatgtctgtgcccttgaaagaactgattgagaagcatgctgggggtgtcacgggcggctgggacaacctccttgctgtgatccctggcggctcgtctaccccactgatccccaagtctgtgtgtgagacggtgctgatggacttcgatgcgctggtgcaggcacagacaggcctgggcacagctgcggtgatcgtcatggaccgctcgacggacatcgtgaaagccatcgcccgcctcattgagttctataagcacgagagctgtggccagtgtaccccatgccgtgagggtgtggactggatgaacaaggtgatggcacgtttcgtgaggggggatgcccggccggccgagatcgactccctgtgggagatcagcaagcagatagaaggccatacgatttgtgctctgggtgacggggccgcctggcctgtgcagggtctgatccgccactttcggccggagctcgaggagcggatgcagcggtttgcccagcagcatcaggcccggcaggctgcctcttagcccaccaccctggcctgctgtcctgcgtctatccatgtggaatgctggacaataaagcgagtgctgcccaccctcca

SEQ ID NO: 55239 - DNA, 1546 bp, Homo sapiens
  misc_feature (27)..(27): n is a, c, g, or t
aagcaggctgtaccgtctggggtttanggtgctatgaaggtgacagcgtgaggtgacccatctggcccgccgcgatgctggcaacacggcggctgctcggctggtcgcttcccgcgcgggtatctgtgcgtttcagcggcgacacgacagcacccaagaaaacctcatttggctcgctgaaggatgaagaccggattttcaccaacctgtacggccgccatgactggaggctgaaaggttccctgagtcgaggtgactggtacaagacaaaggagatcctgctgaaggggcccgactggatcctgggcgagatcaagacatcgggtttgaggggccgtggaggcgctggcttccccactggcctcaagtggagcttcatgaataagccctcagatggcaggcccaagtatctggtggtgaacgcagacgagggggagccgggcacctgcaaggaccgggagatcttacgccatgatcctcacaagctgctggaaggctgcctggtggggggccgggccatgggcgcccgcgctgcctatatctacatccgaggggaattctacaatgaggcctccaatctgcaggtggccatccgagaggcctatgaggcaggtctgattggcaagaatgcttgtggctctggctatgattttgacgtgtttgtggtgcgcggggctggggcctacatctgtggagaggagacagcgctcatcgagtccattgagggcaagcagggcaagccccgcctgaagccccccttccccgcagacgtgggagtgtttggctgccccacaactgtggccaacgtggagacagtggcagtgtcccccacaatctgccgccgtggaggtacctggtttgctggctttggcagagaacgcaactcaggcaccaaactattcaacatctctggccatgtcaaccacccttgcactgtggaggaggagatgtctgtgcccttgaaagaactgattgagaagcatgctgggggtgtcacgggcggctgggacaacctccttgctgtgatccctggcggctcgtctaccccactgatccccaagtctgtgtgtgagacggtgctgatggacttcgatgcgctggtgcaggcacagacaggcctgggcacagctgcggtgatcgtcatggaccgctcgacggacatcgtgaaagccatcgcccgcctcattgagttctataagcacgagagctgtggccagtgtaccccatgccgtgagggtgtggactggatgaacaaggtgatggcacgtttcgtgaggggggatgcccggccggccgagatcgactccctgtgggagatcagcaagcagatagaaggccatacgatttgtgctctgggtgacggggccgcctggcctgtgcagggtctgatccgccactttcggccggagctcgaggagcggatgcagcggtttgcccagcagcatcaggcccggcaggctgcctcttagcccaccaccctggcctgctgtcctgcgtctatccatgtggaatgctggacaataaagcgagtgctgcccaccctcca

SEQ ID NO: 55240 - DNA, 2239 bp, Homo sapiens
  misc_feature (1934)..(1934): n is a, c, g, or t
gaagttgaaggggcgcagcgataccggtgcgcggcgctggcgtcgggcgcgtgacgtctttcctgcgcgccacctagcgtctctatcgcgccagttcctcagcctcagtgctatgaaggtgacagcgtgaggtgacccatctggcccgccgcgatgctggcaacacggcggctgctcggctggtcgcttcccgcgcgggtatctgtgcgtttcagcggcgacacgacagcacccaagaaaacctcatttggctcgctgaaggatgaagaccggattttcaccaacctgtacggccgccatgactggaggctgaaaggttccctgagtcgaggtgactggtacaagacaaaggagatcctgctgaaggggcccgactggatcctgggcgagatcaagacatcgggtttgaggggccgtggaggcgctggcttccccactggcctcaagtggagcttcatgaataagccctcagatggcaggcccaagtatctggtggtgaacgcagacgagggggagccgggcacctgcaaggaccgggagatcttacgccatgatcctcacaagctgctggaaggctgcctggtggggggccgggccatgggcgcccgcgctgcctatatctacatccgaggggaattctacaatgaggcctccaatctgcaggtggccatccgagaggcctatgaggcaggtctgattggcaagaatgcttgtggctctggctatgattttgacgtgtttgtggtgcgcggggctggggcctacatctgtggagaggagacagcgctcatcgagtccattgagggcaagcagggcaagccccgcctgaagccccccttccccgcagacgtgggagtgtttggctgccccacaactgtggccaacgtggagacagtggcagtgtcccccacaatctgccgccgtggaggtacctggtttgctggctttggcagagaacgcaactcaggcaccaaactattcaacatctctggccatgtcaaccacccttgcactgtggaggaggagatgtctgtgcccttgaaagaactgattgagaagcatgctgggggtgtcacgggcggctgggacaacctccttgctgtgatccctggcggctcgtctaccccactgatccccaagtctgtgtgtgagacggtgctgatggacttcgatgcgctggtgcaggcacagacaggcctgggcacagctgcggtgatcgtcatggaccgctcgacggacatcgtgaaagccatcgcccgcctcattgagttctataagcacgagagctgtggccagtgtaccccatgccgtgagggtgtggactggatgaacaaggtgatggcacgtttcgtgaggggggatgcccggccggccgagatcgactccctgtgggagatcagcaagcagatagaaggccatacgatttgtgctctgggtgacggggccgcctggcctgtgcagggtctgatccgccactttcggccggagctcgaggagcggatgcagcggtttgcccagcagcatcaggcccggcaggctgcctcttagcccaccaccctggcctgctgtcctgcgtctatccatgtggaatgctggacaataaagcgagtgctgcccaccctccaaaaaaaaaaaaaatgcttactaagtggcagtggtatctatgatgctatagatgcttccctagccctagcccagcccctcctaaatagggagacccaagattctgtagcttctggcccaatccctcatggccccagagcactctgggcctcctgaccctttgtctcctagacagcaccaagaaaactcatttggctcgctgaaggatgaagaccggattttcaccaacctgtacggccgccatgactggaggtgagacagtgcccttagtgtgttgggtcccggagcaaggtgtccccttcattgccttncctattctgtccaggctgaaaggttccctgagtcgaggtgactggtacaagacaaaggagatcctgctgaaggggcccgactggatcctgggcgagatcaagacatcgggtttgaggggccgtggaggcgctggcttccccactggcctcaagtggagcttcatgaataagccctcagatggcaggcccaagtatctggtggtgaacgcagacgagggggagccgggcacctgcaaggaccgggagatcttacgccatgatcctcacaagctgctggaaggctgcctggtggggggccgggccat

SEQ ID NO: 55241 - DNA, 1820 bp, Homo sapiens
gaagttgaaggggcgcagcgataccggtgcgcggcgctggcgtcgggcgcgtgacgtctttcctgcgcgccacctagcgtctctatcgcgccagttcctcagcctcagtgctatgaaggtgacagcgtgaggtgacccatctggcccgccgcgatgctggcaacacggcggctgctcggctggtcgcttcccgcgcgggtatctgtgcgtttcagcggcgacacgacagcacccaagaaaacctcatttggctcgctgaaggatgaagaccggattttcaccaacctgtacggccgccatgactggaggctgaaaggttccctgagtcgaggtgactggtacaagacaaaggagatcctgctgaaggggcccgactggatcctgggcgagatcaagacatcgggtttgaggggccgtggaggcgctggcttccccactggcctcaagtggagcttcatgaataagccctcagatggcaggcccaagtatctggtggtgaacgcagacgagggggagccgggcacctgcaaggaccgggagatcttacgccatgatcctcacaagctgctggaaggctgcctggtggggggccgggccatgggcgcccgcgctgcctatatctacatccgaggggaattctacaatgaggcctccaatctgcaggtggccatccgagaggcctatgaggcaggtctgattggcaagaatgcttgtggctctggctatgattttgacgtgtttgtggtgcgcggggctggggcctacatctgtggagaggagacagcgctcatcgagtccattgagggcaagcagggcaagccccgcctgaagccccccttccccgcagacgtgggagtgtttggctgccccacaactgtggccaacgtggagacagtggcagtgtcccccacaatctgccgccgtggaggtacctggtttgctggctttggcagagaacgcaactcaggcaccaaactattcaacatctctggccatgtcaaccacccttgcactgtggaggaggagatgtctgtgcccttgaaagaactgattgagaagcatgctggtaaggcctggggccagccaggtggtgggggggtgcgcagtgggggcaggtgtccacaaagagagcctgggcgggagggctcaggagacggggctgggtctaggggctgactaagggcctgggctcaggactaggcaggtgtgccggccccagccctgaccatgcatccctttggggaccgacttggggccccagggggtgtcacgggcggctgggacaacctccttgctgtgatccctggcggctcgtctaccccactgatccccaagtctgtgtgtgagacggtgctgatggacttcgatgcgctggtgcaggcacagacaggcctgggcacagctgcggtgatcgtcatggaccgctcgacggacatcgtgaaagccatcgcccgcctcattgagttctataagcacgagagctgtggccagtgtaccccatgccgtgagggtgtggactggatgaacaaggtgatggcacgtttcgtgaggggggatgcccggccggccgagatcgactccctgtgggagatcagcaagcagatagaaggccatacgatttgtgctctgggtgacggggccgcctggcctgtgcagggtctgatccgccactttcggccggagctcgaggagcggatgcagcggtttgcccagcagcatcaggcccggcaggctgcctcttagcccaccaccctggcctgctgtcctgcgtctatccatgtggaatgctggacaataaagcgagtgctgcccaccctcca

SEQ ID NO: 55242 - DNA, 1527 bp, Homo sapiens
gaagttgaaggggcgcagcgataccggtgcgcggcgctggcgtcgggcgcgtgacgtctttcctgcgcgccacctagcgtctctatcgcgccagttcctcagcctcagtgctatgaaggtgacagcgtgaggtgacccatctggcccgccgcgatgctggcaacacggcggctgctcggctggtcgcttcccgcgcgggtatctgtgcgtttcagcggcgacacgacagcacccaagaaaacctcatttggctcgctgaaggatgaagaccggattttcaccaacctgtacggccgccatgactggaggctgaaaggttccctgagtcgaggtgactggtacaagacaaaggagatcctgctgaaggggcccgactggatcctgggcgagatcaagacatcgggtttgaggggccgtggaggcgctggcttccccactggcctcaagtggagcttcatgaataagccctcagatggcaggcccaagtatctggtggtgaacgcagacgagggggagccgggcacctgcaaggaccgggagatcttacgccatgatcctcacaagctgctggaaggctgcctggtggggggccgggccatgggcgcccgcgctgcctatatctacatccgaggggaattctacaatgaggcctccaatctgcaggtggccatccgagaggcctatgaggcaggtctgattggcaagaatgcttgtggctctggctatgattttgacgtgtttgtggtgcgcggggctggggcctacatctgtggagaggagacagcgctcatcgagtccattgagggcaagcagggcaagccccgcctgaagccccccttccccgcagacgtgggagtgtttggctgccccacaactgtggccaacgtggagacagtggcagtgtcccccacaatctgccgccgtggaggtacctggtttgctggctttggcagagaacgcaactcaggcaccaaactattcaacatctctggccatgtcaaccacccttgcactgtggaggaggagatgtctgtgcccttgaaagaactgattgagaagcatgctgggggtgtcacgggcggctgggacaacctccttgctgtgatccctggcggctcgtctaccccactgatccccaagtctgtgtgtgagacggtgctgatggacttcgatgcgctggtgcaggcacagacaggcctgggcacagctgcggtgatcgtcatggaccgctcgacggacatcgtgaaagccatcgcccgcctcattgagttctataagcacgagagctgtggccagtgtaccccatgccgtgagggtgtggactggatgaacaaggtgatggcacgtttcgtgaggggggatgcccggccggccgagatcgactccctgtgggagatcagcaagcagatagaaggccatacgatttgtgctctgggtgactgtggctactggccttgtcaaagtctgatccgcccttttcggccgaactcaatgaacggtgcatcggttggccacaacatctgcccg

SEQ ID NO: 55243 - DNA, 1543 bp, Homo sapiens
gaagttgaaggggcgcagcgataccggtgcgcggcgctggcgtcgggcgcgtgacgtctttcctgcgcgccacctagcgtctctatcgcgccagttcctcagcctcagtgctatgaaggtgacagcgtgaggtgacccatctggcccgccgcgatgctggcaacacggcggctgctcggctggtcgcttcccgcgcgggtatctgtgcgtttcagcggcgacacgacagcacccaagaaaacctcatttggctcgctgaaggatgaagaccggattttcaccaacctgtacggccgccatgactggaggctgaaaggttccctgagtcgaggtgactggtacaagacaaaggagatcctgctgaaggggcccgactggatcctgggcgagatcaagacatcgggtttgaggggccgtggaggcgctggcttccccactggcctcaagtggagcttcatgaataagccctcagatggcaggcccaagtatctggtggtgaacgcagacgagggggagccgggcacctgcaaggaccgggagatcttacgccatgatcctcacaagctgctggaaggctgcctggtggggggccgggccatgggcgcccgcgctgcctatatctacatccgaggggaattctacaatgaggcctccaatctgcaggtggccatccgagaggcctatgaggcaggtctgattggcaagaatgcttgtggctctggctatgattttgacgtgtttgtggtgcgcggggctggggcctacatctgtggagaggagacagcgctcatcgagtccattgagggcaagcagggcaagccccgcctgaagccccccttccccgcagacgtgggagtgtttggctgccccacaactgtggccaacgtggagacagtggcagtgtcccccacaatctgccgccgtggaggtacctggtttgctggctttggcagagaacgcaactcaggcaccaaactattcaacatctctggccatgtcaaccacccttgcactgtggaggaggagatgtctgtgcccttgaaagaactgattgagaagcatgctgggggtgtcacgggcggctgggacaacctccttgctgtgatccctggcggctcgtctaccccactgatccccaagtctgtgtgtgagacggtgctgatggacttcgatgcgctggtgcaggcacagacaggcctgggcacagctgcggtgatcgtcatggaccgctcggtgtggactggatgaacaaggtgatggcacgtttcgtgaggggggatgcccggccggccgagatcgactccctgtgggagatcagcaagcagatagaaggccatacgatttgtgctctgggtgacggggccgcctggcctgtgcagggtctgatccgccactttcggccggagctcgaggagcggatgcagcggtttgcccagcagcatcaggcccggcaggctgcctcttagcccaccaccctggcctgctgtcctgcgtctatccatgtggaatgctggacaataaagcgagtgctgcccaccctcca

SEQ ID NO: 55244 - DNA, 1555 bp, Homo sapiens
ggctggtactggtcgccaagccctgtagatctagcgtctctatcgcgccagttcctcagcctcagtgctatgaaggtgacagcgtgaggtgacccatctggcccgccgcgatgctggcaacacggcggctgctcggctggtcgcttcccgcgcggacagcacccaagaaaacctcatttggctcgctgaaggatgaagaccggattttcaccaacctgtacggccgccatgactggaggctgaaaggttccctgagtcgaggtgactggtacaagacaaaggagatcctgctgaaggggcccgactggatcctgggcgagatcaagacatcgggtttgaggggccgtggaggcgctggcttccccactggcctcaagtggagcttcatgaataagccctcagatggcaggcccaagtatctggtggtgaacgcagacgagggggagccgggcacctgcaaggaccgggagatcttacgccatgatcctcacaagctgctggaaggctgcctggtggggggccgggccatgggcgcccgcgctgcctatatctacatccgaggggaattctacaatgaggcctccaatctgcaggtggccatccgagaggcctatgaggcaggtctgattggcaagaatgcttgtggctctggctatgattttgacgtgtttgtggtgcgcggggctggggcctacatctgtggagaggagacagcgctcatcgagtccattgagggcaagcagggcaagccccgcctgaagccccccttccccgcagacgtgggagtgtttggctgccccacaactgtggccaacgtggagacagtggcagtgtcccccacaatctgccgccgtggaggtacctggtttgctggctttggcagagaacgcaactcaggcaccaaactattcaacatctctggccatgtcaaccacccttgcactgtggaggaggagatgtctgtgcccttgaaagaactgattgagaagcatgctgggggtgtcacgggcggctgggacaacctccttgctgtgatccctggcggctcgtctaccccactgatccccaagtctgtgtgtgagacggtgctgatggacttcgatgcgctggtgcaggcacagacaggcctgggcacagctgcggtgatcgtcatggaccgctcgacggacatcgtgaaagccatcgcccgcctcattgagttctataagcacgagagctgtggccagtgtaccccatgccgtgagggtgtggactggatgaacaaggtgatggcacgtttcgtgaggggggatgcccggccggccgagatcgactccctgtgggagatcagcaagcagatagaaggccatacgatttgtgctctgggtgacggggccgcctggcctgtgcagggtctgatccgccactttcggccggagctcgaggagcggatgcagcggtttgcccagcagcatcaggcccggcaggctgcctcttagcccaccaccctggcctgctgtcctgcgtctatccatgtggaatgctggacaataaagcgagtgctgcccaccctcca

SEQ ID NO: 55245 - DNA, 1433 bp, Homo sapiens
  misc_feature (32)..(33): n is a, c, g, or t
cggacgcgtgggtcgacccacgcgtccggcgnnacagcacccaagaaaacctcatttggctcgctgaaggatgaagaccggattttcaccaacctgtacggccgccatgactggaggctgaaaggttccctgagtcgaggtgactggtacaagacaaaggagatcctgctgaaggggcccgactggatcctgggcgagatcaagacatcgggtttgaggggccgtggaggcgctggcttccccactggcctcaagtggagcttcatgaataagccctcagatggcaggcccaagtatctggtggtgaacgcagacgagggggagccgggcacctgcaaggaccgggagatcttacgccatgatcctcacaagctgctggaaggctgcctggtggggggccgggccatgggcgcccgcgctgcctatatctacatccgaggggaattctacaatgaggcctccaatctgcaggtggccatccgagaggcctatgaggcaggtctgattggcaagaatgcttgtggctctggctatgattttgacgtgtttgtggtgcgcggggctggggcctacatctgtggagaggagacagcgctcatcgagtccattgagggcaagcagggcaagccccgcctgaagccccccttccccgcagacgtgggagtgtttggctgccccacaactgtggccaacgtggagacagtggcagtgtcccccacaatctgccgccgtggaggtacctggtttgctggctttggcagagaacgcaactcaggcaccaaactattcaacatctctggccatgtcaaccacccttgcactgtggaggaggagatgtctgtgcccttgaaagaactgattgagaagcatgctgggggtgtcacgggcggctgggacaacctccttgctgtgatccctggcggctcgtctaccccactgatccccaagtctgtgtgtgagacggtgctgatggacttcgatgcgctggtgcaggcacagacaggcctgggcacagctgcggtgatcgtcatggaccgctcgacggacatcgtgaaagccatcgcccgcctcattgagttctataagcacgagagctgtggccagtgtaccccatgccgtgagggtgtggactggatgaacaaggtgatggcacgtttcgtgaggggggatgcccggccggccgagatcgactccctgtgggagatcagcaagcagatagaaggccatacgatttgtgctctgggtgacggggccgcctggcctgtgcagggtctgatccgccactttcggccggagctcgaggagcggatgcagcggtttgcccagcagcatcaggcccggcaggctgcctcttagcccaccaccctggcctgctgtcctgcgtctatccatgtggaatgctggacaataaagcgagtgctgcccaccctcca

SEQ ID NO: 55246 - DNA, 1542 bp, Homo sapiens
gaagttgaaggggcgcagcgataccggtgcgcggcgctggcgtcgggcgcgtgacgtctttcctgcgcgccacctagcgtctctatcgcgccagttcctcagcctcagtgctatgaaggtgacagcgtgaggtgacccatctggcccgccgcgatgctggcaacacggcggctgctcggctggtcgcttcccgcgcgggtatctgtgcgtttcagcggcgacacggctgaaaggttccctgagtcgaggtgactggtacaagacaaaggagatcctgctgaaggggcccgactggatcctgggcgagatcaagacatcgggtttgaggggccgtggaggcgctggcttccccactggcctcaagtggagcttcatgaataagccctcagatggcaggcccaagtatctggtggtgaacgcagacgagggggagccgggcacctgcaaggaccgggagatcttacgccatgatcctcacaagctgctggaaggctgcctggtggggggccgggccatgggcgcccgcgctgcctatatctacatccgaggggaattctacaatgaggcctccaatctgcaggtggccatccgagaggcctatgaggcaggtctgattggcaagaatgcttgtggctctggctatgattttgacgtgtttgtggtgcgcggggctggggcctacatctgtggagaggagacagcgctcatcgagtccattgagggcaagcagggcaagccccgcctgaagccccccttccccgcagacgtgggagtgtttggctgccccacaactgtggccaacgtggagacagtggcagtgtcccccacaatctgccgccgtggaggtacctggtttgctggctttggcagagaacgcaactcaggcaccaaactattcaacatctctggccatgtcaaccacccttgcactgtggaggaggagatgtctgtgcccttgaaagaactgattgagaagcatgctgggggtgtcacgggcggctgggacaacctccttgctgtgatccctggcggctcgtctaccccactgatccccaagtctgtgtgtgagacggtgctgatggacttcgatgcgctggtgcaggcacagacaggcctgggcacagctgcggtgatcgtcatggaccgctcgacggacatcgtgaaagccatcgcccgcctcattgagttctataagcacgagagctgtggccagtgtaccccatgccgtgagggtgtggactggatgaacaaggtgatggcacgtttcgtgaggggggatgcccggccggccgagatcgactccctgtgggagatcagcaagcagatagaaggccatacgatttgtgctctgggtgacggggccgcctggcctgtgcagggtctgatccgccactttcggccggagctcgaggagcggatgcagcggtttgcccagcagcatcaggcccggcaggctgcctcttagcccaccaccctggcctgctgtcctgcgtctatccatgtggaatgctggacaataaagcgagtgctgcccaccctcca

SEQ ID NO: 55247 - DNA, 1377 bp, Homo sapiens
gcatcgcacgtcacgctgcggttcggatttcagcaaactgtacggtcggtatgactggaggctgaaaggttccctgagtcgaggtgactggtacaagacaaaggagatcctgctgaaggggcccgactggatcctgggcgagatcaagacatcgggtttgaggggccgtggaggcgctggcttccccactggcctcaagtggagcttcatgaataagccctcagatggcaggcccaagtatctggtggtgaacgcagacgagggggagccgggcacctgcaaggaccgggagatcttacgccatgatcctcacaagctgctggaaggctgcctggtggggggccgggccatgggcgcccgcgctgcctatatctacatccgaggggaattctacaatgaggcctccaatctgcaggtggccatccgagaggcctatgaggcaggtctgattggcaagaatgcttgtggctctggctatgattttgacgtgtttgtggtgcgcggggctggggcctacatctgtggagaggagacagcgctcatcgagtccattgagggcaagcagggcaagccccgcctgaagccccccttccccgcagacgtgggagtgtttggctgccccacaactgtggccaacgtggagacagtggcagtgtcccccacaatctgccgccgtggaggtacctggtttgctggctttggcagagaacgcaactcaggcaccaaactattcaacatctctggccatgtcaaccacccttgcactgtggaggaggagatgtctgtgcccttgaaagaactgattgagaagcatgctgggggtgtcacgggcggctgggacaacctccttgctgtgatccctggcggctcgtctaccccactgatccccaagtctgtgtgtgagacggtgctgatggacttcgatgcgctggtgcaggcacagacaggcctgggcacagctgcggtgatcgtcatggaccgctcgacggacatcgtgaaagccatcgcccgcctcattgagttctataagcacgagagctgtggccagtgtaccccatgccgtgagggtgtggactggatgaacaaggtgatggcacgtttcgtgaggggggatgcccggccggccgagatcgactccctgtgggagatcagcaagcagatagaaggccatacgatttgtgctctgggtgacggggccgcctggcctgtgcagggtctgatccgccactttcggccggagctcgaggagcggatgcagcggtttgcccagcagcatcaggcccggcaggctgcctcttagcccaccaccctggcctgctgtcctgcgtctatccatgtggaatgctggacaataaagcgagtgctgcccaccctcca

SEQ ID NO: 55248 - DNA, 1571 bp, Homo sapiens
gaagttgaaggggcgcagcgataccggtgcgcggcgctggcgtcgggcgcgtgacgtctttcctgcgcgccacctagcgtctctatcgcgccagttcctcagcctcagtgctatgaaggtgacagcgtgaggtgacccatctggcccgccgcgatgctggcaacacggcggctgctcggctggtcgcttcccgcgcgggtatctgtgcgtttcagcggcgacacgacagcacccaagaaaacctcatttggctcgctgaaggatgaagaccggattttcaccaacctgtacggccgccatgactggaggctgaaaggttccctgagtcgaggtgactggtacaagacaaaggagatcctgctgaaggggcccgactggatcctgggcgagatcaagacatcgggtttgaggggccgtggaggcgctggcttccccactggcctcaagtggagcttcatgaataagccctcagatggcaggcccaagtatctggtggtgaacgcagacgagggggagccgggcacctgcaaggaccgggagatcttacgccatgatcctcacaagctgctggaaggctgcctggtggggggccgggccatgggcgcccgcgctgcctatatctacatccgaggggcaggtctgattggcaagaatgcttgtggctctggctatgattttgacgtgtttgtggtgcgcggggctggggcctacatctgtggagaggagacagcgctcatcgagtccattgagggcaagcagggcaagccccgcctgaagccccccttccccgcagacgtgggagtgtttggctgccccacaactgtggccaacgtggagacagtggcagtgtcccccacaatctgccgccgtggaggtacctggtttgctggctttggcagagaacgcaactcaggcaccaaactattcaacatctctggccatgtcaaccacccttgcactgtggaggaggagatgtctgtgcccttgaaagaactgattgagaagcatgctgggggtgtcacgggcggctgggacaacctccttgctgtgatccctggcggctcgtctaccccactgatccccaagtctgtgtgtgagacggtgctgatggacttcgatgcgctggtgcaggcacagacaggcctgggcacagctgcggtgatcgtcatggaccgctcgacggacatcgtgaaagccatcgcccgcctcattgagttctataagcacgagagctgtggccagtgtaccccatgccgtgagggtgtggactggatgaacaaggtgatggcacgtttcgtgaggggggatgcccggccggccgagatcgactccctgtgggagatcagcaagcagatagaaggccatacgatttgtgctctgggtgacggggccgcctggcctgtgcagggtctgatccgccactttcggccggagctcgaggagcggatgcagcggtttgcccagcagcatcaggcccggcaggctgcctcttagcccaccaccctggcctgctgtcctgcgtctatccatgtggaatgctggacaataaagcgagtgctgcccaccctcca

SEQ ID NO: 55249 - DNA, 1488 bp, Homo sapiens
gaagttgaaggggcgcagcgataccggtgcgcggcgctggcgtcgggcgcgtgacgtctttcctgcgcgccacctagcgtctctatcgcgccagttcctcagcctcagtgctatgaaggtgacagcgtgaggtgacccatctggcccgccgcgatgctggcaacacggcggctgctcggctggtcgcttcccgcgcgggtatctgtgcgtttcagcggcgacacgacagcacccaagaaaacctcatttggctcgctgaaggatgaagaccggattttcaccaacctgtacggccgccatgactggaggctgaaaggttccctgagtcgaggtgactggtacaagacaaaggagatcctgctgaaggggcccgactggatcctgggcgagatcaagacatcgggtttgaggggccgtggaggcgctggcttccccactggcctcaagtggagcttcatgaataagccctcagatggcaggcccaagtatctggtggtgaacgcagacgagggggagccgggcacctgcaaggaccgggagatcttacgccatgatcctcacaagctgctggaaggctgcctggtggggggccgggccatgggcgcccgcgctgcctatatctacatccgaggggaattctacaatgaggcctccaatctgcaggtggccatccgagaggcctatgaggcaggtctgattggcaagaatgcttgtgggagtgtttggctgccccacaactgtggccaacgtggagacagtggcagtgtcccccacaatctgccgccgtggaggtacctggtttgctggctttggcagagaacgcaactcaggcaccaaactattcaacatctctggccatgtcaaccacccttgcactgtggaggaggagatgtctgtgcccttgaaagaactgattgagaagcatgctgggggtgtcacgggcggctgggacaacctccttgctgtgatccctggcggctcgtctaccccactgatccccaagtctgtgtgtgagacggtgctgatggacttcgatgcgctggtgcaggcacagacaggcctgggcacagctgcggtgatcgtcatggaccgctcgacggacatcgtgaaagccatcgcccgcctcattgagttctataagcacgagagctgtggccagtgtaccccatgccgtgagggtgtggactggatgaacaaggtgatggcacgtttcgtgaggggggatgcccggccggccgagatcgactccctgtgggagatcagcaagcagatagaaggccatacgatttgtgctctgggtgacggggccgcctggcctgtgcagggtctgatccgccactttcggccggagctcgaggagcggatgcagcggtttgcccagcagcatcaggcccggcaggctgcctcttagcccaccaccctggcctgctgtcctgcgtctatccatgtggaatgctggacaataaagcgagtgctgcccaccctcca

SEQ ID NO: 55250 - DNA, 1426 bp, Homo sapiens
tttagcaagagagcggaataattatgaatataaacaattcctatttggagaaaatacattatgttcattgcttggaactatgaataatacttatatctgtaggaaatatagaaaaataaaataggttaaggcaataaggatataggcaattacatttttattttaattttataaagacttttatttttcctttacagactagggtagttaggagacctgatagtagctacttcgtttttattttcctggcagcaaagcagcttacttatgtgttccttcttgcttatctgttccagatcatagtcaagttttccaattcgttttactaagctagcaaaattttttataccaggagcattaggagcttcaccgtgggaggccttcaagggcttcatgactcctgaagttataggctgactcctgggctgggggtgggctgggaaactcacacctttgtcctgcaggtggccatccgagaggcctatgaggcaggtctgattggcaagaatgcttgtggctctggctatgattttgacgtgtttgtggtgcgcggggctggggcctacatctgtggagaggagacagcgctcatcgagtccattgagggcaagcagggcaagccccgcctgaagccccccttccccgcagacgtgggagtgtttggctgccccacaactgtggccaacgtggagacagtggcagtgtcccccacaatctgccgccgtggaggtacctggtttgctggctttggcagagaacgcaactcaggcaccaaactattcaacatctctggccatgtcaaccacccttgcactgtggaggaggagatgtctgtgcccttgaaagaactgattgagaagcatgctgggggtgtcacgggcggctgggacaacctccttgctgtgatccctggcggctcgtctaccccactgatccccaagtctgtgtgtgagacggtgctgatggacttcgatgcgctggtgcaggcacagacaggcctgggcacagctgcggtgatcgtcatggaccgctcgacggacatcgtgaaagccatcgcccgcctcattgagttctataagcacgagagctgtggccagtgtaccccatgccgtgagggtgtggactggatgaacaaggtgatggcacgtttcgtgaggggggatgcccggccggccgagatcgactccctgtgggagatcagcaagcagatagaaggccatacgatttgtgctctgggtgacggggccgcctggcctgtgcagggtctgatccgccactttcggccggagctcgaggagcggatgcagcggtttgcccagcagcatcaggcccggcaggctgcctcttagcccaccaccctggcctgctgtcctgcgtctatccatgtggaatgctggacaataaagcgagtgctgcccaccctcca

SEQ ID NO: 55251 - DNA, 1076 bp, Homo sapiens
  misc_feature (913)..(913): n is a, c, g, or t
  misc_feature (917)..(917): n is a, c, g, or t
  misc_feature (922)..(922): n is a, c, g, or t
  misc_feature (928)..(928): n is a, c, g, or t
  misc_feature (932)..(932): n is a, c, g, or t
  misc_feature (939)..(939): n is a, c, g, or t
  misc_feature (1076)..(1076): n is a, c, g, or t
gaagttgaaggggcgcagcgataccggtgcgcggcgctggcgtcgggcgcgtgacgtctttcctgcgcgccacctagcgtctctatcgcgccagttcctcagcctcagtgctatgaaggtgacagcgtgaggtgacccatctggcccgccgcgatgctggcaacacggcggctgctcggctggtcgcttcccgcgcgggtatctgtgcgtttcagcggcgacacgacagcacccaagaaaacctcatttggctcgctgaaggatgaagaccggattttcaccaacctgtacggccgccatgactggaggctgaaaggttccctgagtcgaggtgactggtacaagacaaaggagatcctgctgaaggggcccgactggatcctgggcgagatcaagacatcgggtttgaggggccgtggaggcgctggcttccccactggcctcaagtggagcttcatgaataagccctcagatggcaggcccaagtatctggtggtgaacgcagacgagggggagccgggcacctgcaaggaccgggagatcttacgccatgatcctcacaagctgctggaaggctgcctggtggggggccgggccatgggcgcccgcgctgcctatatctacatccgaggggaattctacaatgaggcctccaatctgcaggtggccatccgagaggcctatgaggcaggtctgattggcaagaatgcttgtggctctggctatgattttgacgtgtttgtggtgcgcggggctggggcctacatctgtggagaggagacagcgctcatcgagtccattgagggcaagcagggcaagccccgcctgaagccccccttccccgcagacgtggagtgtttggtggcccacactgtggcaacgtggagaccgtggcgtgtccccattgcccggnggcngttgnggttgnggangctcggncatttcttttgccgtggccatgtcgggggggggtttgcccccaagttcatcgcgggcgggggcacctctttccgctccccactctgggagtctcgccggcctccctcttctctcgccagtctgcgcggctctcgcgn

SEQ ID NO: 55252 - DNA, 772 bp, Homo sapiens
gaagttgaaggggcgcagcgataccggtgcgcggcgctggcgtcgggcgcgtgacgtctttcctgcgcgccacctagcgtctctatcgcgccagttcctcagcctcagtgctatgaaggtgacagcgtgaggtgacccatctggcccgccgcgatgctggcaacacggcggctgctcggctggtcgcttcccgcgcgggtatctgtgcgtttcagcggcgacacgacagcacccaagaaaacctcatttggctcgctgaaggatgaagaccggattttcaccaacctgtacggccgccatgactggaggctgaaaggttccctgagtcgaggtgactggtacaagacaaaggagatcctgctgaaggggcccgactggatcctgggcgagatcaagacatcgggtttgaggggccgtggaggcgctggcttccccactggcctcaagtggagcttcatgaataagccctcagatggcaggcccaagtatctggtggtgaacgcagacgagggggagccgggcacctgcaaggaccgggagatcttacgccatgatcctcacaagctgctggaaggctgcctggtggggggccgggccatgggcgcccgcgctgcctatatctacatccgaggggaattctacaatgaggcctccaatctgcaggtgggtagggagagatgtagacagatgagaaggtgttcagtgtgcactcacacacccctcacccagcacagttgttctgaggtgttagtacgctggtgattccgagatc

SEQ ID NO: 55253 - DNA, 972 bp, Homo sapiens
gcggccgcgcccgtgcacgagcagtccctggggtctgtagtggcctctggagagcccttctccccaggccaggcgggaaggcccccgctccggcctggttgaagtaggggaacgggtcccaacgcggggccgactcccttgaccctctgacttgctggcttcccttgttttacagtcctcggcctggcggaagttttgcaggttgtgaagacccctagtctttcattctctccttgtcacagccttgtagggcgtgaaggggtcattgccccatttagggatgcgcacctcctgatttcccgtccactgctctgcgccctgaagtggctgaaaagtgctcttaaaaggatgggaatcccgtcgccctcagctggtgcgctctccactgggtcgtggggctcctcatttcatcctaagtgagcccctccatcacctgtgtgttaaggaggcatttctttcccatcagtaaacacatttcgcctcttcggccgaggtaggaatataaaaggcccctggcctacccaagttttggtccagcaggggagccaggccgggaaagggccaagccgccacactcggcttgtggggctgtgtggtgccgtgatgcagctgtgggtttggccaccgacagacctgggctcaaattggacctgctgcttttgactgtgagaccttccataagctccttttgctccaagcctcagttttctcctctgtgaaacagagaaaatcgttcctatcagagttcttatgaggatgaaatgggattttggatgtaaaatgcttccatccagtacctgctaaacaaaatgcttactaatggccgggcgcggtcgtcacgcctgtaatcccactatccagaggctgaggcacaagaattatttgaacctgggaggtggagtttgcagtgagctgagattacgccactgcactccagcctaggcaaaagagcaagagtctgtctcaaaaaaa

SEQ ID NO: 55254 - DNA, 1115 bp, Homo sapiens
ggctggtactggtcgccaagccctgtagatctagcgtctctatcgcgccagttcctcagcctcagtgctatgaaggtgacagcgtgaggtgacccatctggcccgccgcgatgctggcaacacggcggctgctcggctggtcgcttcccgcgcgggtatctgtgcgtttcagcggcgacacgtcctcggcctggcggaagttttgcaggttgtgaagacccctagtctttcattctctccttgtcacagccttgtagggcgtgaaggggtcattgccccatttagggatgcgcacctcctgatttcccgtccactgctctgcgccctgaagtggctgaaaagtgctcttaaaaggatgggaatcccgtcgccctcagctggtgcgctctccactgggtcgtggggctcctcatttcatcctaagtgagcccctccatcacctgtgtgttaaggaggcatttctttcccatcagtaaacacatttcgcctcttcggccgaggtaggaatataaaaggcccctggcctacccaagttttggtccagcaggggagccaggccgggaaagggccaagccgccacactcggcttgtggggctgtgtggtgccgtgatgcagctgtgggtttggccaccgacagacctgggctcaaattggacctgctgcttttgactgtgagaccttccataagctccttttgctccaagcctcagttttctcctctgtgaaacagagaaaatcgttcctatcagagttcttatgaggatgaaatgggattttggatgtaaaatgcttccatccagtacctgctaaacaaaatgcttactaatggccgggcgcggtcgtcacgcctgtaatcccagcactttgggaggctgaggcgggcggatcgcttgaggtcaggagttcgagaccagcctggccaatatggtgaaaccctgtctctactaaaagtgcaaaaattacccgggcgtggtggtgagtgcctgtaatcccagctatccagaggctgaggcacaagaattatttgaacctgggaggtggagtttgcagtgagctgagattacgccactgcactccagcctaggcaaaagagcaagagtctgtctcaaaaaaa

SEQ ID NO: 55255 - DNA, 244 bp, Homo sapiens
aaggctgctctgaggagaataccccggagtctgggcagcacagggggcccagggaggctggaggaggccagaacgctgggtgggctgggaagagcttctggaactgggggaggggctgctgctagggggctgaggcccaggcttctgtctggccgtgggtgcctgctaattgcccctcgtcacccagacggacatcgtgaaagccatcgcccgcctcattgagttctataagcacgagagctgt

SEQ ID NO: 55256 - DNA, 405 bp, Homo sapiens
agggcagtaaaggattggctgtcagaggagacatctttgaggcctccctgggtggagtggggtggcatggagttgaagacccagtcctgatggccctgtagcctgtctgacctgtgggcccctgcaggcccaagtatctggtggtgaacgcagacgagggggagccgggcacctgcaaggaccgggagatcttacgccatgatcctcacaagctgctggaaggctgcctggtggggggccgggccatgggcgcccgcgctgcctatatctacatccgaggggaattctacaatgaggcctccaatctgcaggtgggtagggagagatgtagacagatgagaaggtgttcagtgtgcactcacacacccctcacccagcacagttgttctgaggtgttagtacgct

SEQ ID NO: 55257 - DNA, 1769 bp, Homo sapiens
gaagttgaaggggcgcagcgataccggtgcgcggcgctggcgtcgggcgcgtgacgtctttcctgcgcgccacctagcgtctctatcgcgccagttcctcagcctcagtgctatgaaggtgacagcgtgaggtgacccatctggcccgccgcgatgctggcaacacggcggctgctcggctggtcgcttcccgcgcgggtatctgtgcgtttcagcggcgacacgacagcacccaagaaaacctcatttggctcgctgaaggatgaagaccggattttcaccaacctgtacggccgccatgactggaggctgaaaggttccctgagtcgaggtgactggtacaagacaaaggagatcctgctgaaggggcccgactggatcctgggcgagatcaagacatcgggtttgaggggccgtggaggcgctggcttccccactggcctcaagtggagcttcatgaataagccctcagatggcaggcccaagtatctggtggtgaacgcagacgagggggagccgggcacctgcaaggaccgggagatcttacgccatgatcctcacaagctgctggaaggctgcctggtggggggccgggccatgggcgcccgcgctgcctatatctacatccgaggggaattctacaatgaggcctccaatctgcaggtggccatccgagaggcctatgaggcaggtctgattggcaagaatgcttgtggctctggctatgattttgacgtgtttgtggtgcgcggggctggggcctacatctgtggagaggagacagcgctcatcgagtccattgagggcaagcagggcaagccccgcctgaagccccccttccccgcagacgtgggagtgtttggctgccccacaactgtggccaacgtggagacagtggcagtgtcccccacaatctgccgccgtggaggtacctggtttgctggctttggcagagaacgcaactcaggcaccaaactattcaacatctctggccatgtcaaccacccttgcactgtggaggaggagatgtctgtgcccttgaaagaactgattgagaagcatgctgggggtgtcacgggcggctgggacaacctccttgctgtgatccctggcggctcgtctaccccactgatccccaagtctgtgtgtgagacggtgctgatggacttcgatgcgctggtgcaggcacagacaggcctgggcacagctgcggtgatcgtcatggaccgctcgacggacatcgtgaaagccatcgcccgcctcattgagttctataagcacgagagctgtggccagtgtaccccatgccgtgagggtgtggactggatgaacaaggtgatggcacgtttcgtgaggggggatgcccggccggccgagatcgactccctgtgggagatcagcaagcagatagaaggccatacgatttgtgctctgggtgacggggccgcctggcctgtgcagggtctgatccgccactttcggccggagctcgaggagcggatgcagcggtttgcccagcagcatcaggcccggcaggctgcctcttagcccaccaccctggcctgctgtcctgcgtctatccatgtggaatgctggacaataaagcgagtgctgcccaccctccaggacaagaggaacttaaagaggtgggcattttttctttccagagcactggccaggggggttgtcttgaactactgcctcgggggggggcccggaccccaattttccctttgtggggtcgttttacatttaattggccggcgttt

SEQ ID NO: 55258 - DNA, 1506 bp, Homo sapiens
gaagttgaaggggcgcagcgataccggtgcgcggcgctggcgtcgggcgcgtgacgtctttcctgcgcgccacctagcgtctctatcgcgccagttcctcagcctcagtgctatgaaggtgacagcgtgaggtgacccatctggcccgccgcgatgctggcaacacggcggctgctcggctggtcgcttcccgcgcgggtatctgtgcgtttcagcggcgacacgacagcacccaagaaaacctcatttggctcgctgaaggatgaagaccggattttcaccaacctgtacggccgccatgactggaggctgaaaggttccctgagtcgaggtgactggtacaagacaaaggagatcctgctgaaggggcccgactggatcctgggcgagatcaagacatcgggtttgaggggccgtggaggcgctggcttccccactggcctcaagtggagcttcatgaataagccctcagatggcaggcccaagtatctggtggtgaacgcagacgagggggagccgggcacctgcaaggaccgggagatcttacgccatgatcctcacaagctgctggaaggctgcctggtggggggccgggccatgggcgcccgcgctgcctatatctacatccgaggggaattctacaatgaggcctccaatctgcaggtggccatccgagaggcctatgaggcaggtctgattggcaagaatgcttgtggctctggctatgattttgacgtgtttgtggtgcgcggggctggggcctacatctgtggagaggagacagcgctcatcgagtccattgagggcaagcagggcaagccccgcctgaagccccccttccccgcagacgtgggagtgtttggctgccccacaactgtggccaacgtggagacagtggcagtgtcccccacaatctgccgccgtggaggtacctggtttgctggctttggcagagaacgcaactcaggcaccaaactattcaacatctctggccatgtcaaccacccttgcactgtggaggaggagatgtctgtgcccttgaaagaactgattgagaagcatgctggcacagacaggcctgggcacagctgcggtgatcgtcatggaccgctcgacggacatcgtgaaagccatcgcccgcctcattgagttctataagcacgagagctgtggccagtgtaccccatgccgtgagggtgtggactggatgaacaaggtgatggcacgtttcgtgaggggggatgcccggccggccgagatcgactccctgtgggagatcagcaagcagatagaaggccatacgatttgtgctctgggtgacggggccgcctggcctgtgcagggtctgatccgccactttcggccggagctcgaggagcggatgcagcggtttgcccagcagcatcaggcccggcaggctgcctcttagcccaccaccctggcctgctgtcctgcgtctatccatgtggaatgctggacaataaagcgagtgctgcccaccctcca

SEQ ID NO: 55259 - DNA, 1766 bp, Homo sapiens
gaagttgaaggggcgcagcgataccggtgcgcggcgctggcgtcgggcgcgtgacgtctttcctgcgcgccacctagcgtctctatcgcgccagttcctcagcctcagtgctatgaaggtgacagcgtgaggtgacccatctggcccgccgcgatgctggcaacacggcggctgctcggctggtcgcttcccgcgcgggtatctgtgcgtttcagcggcgacacgacagcacccaagaaaacctcatttggctcgctgaaggatgaagaccggattttcaccaacctgtacggccgccatgactggaggctgaaaggttccctgagtcgaggtgactggtacaagacaaaggagatcctgctgaaggggcccgactggatcctgggcgagatcaagacatcgggtttgaggggccgtggaggcgctggcttccccactggcctcaagtggagcttcatgaataagccctcagatggcaggcccaagtatctggtggtgaacgcagacgagggggagccgggcacctgcaaggaccgggagatcttacgccatgatcctcacaagctgctggaaggctgcctggtggggggccgggccatgggcgcccgcgctgcctatatctacatccgaggggaattctacaatgaggcctccaatctgcaggtggccatccgagaggcctatgaggcaggtctgattggcaagaatgcttgtggctctggctatgattttgacgtgtttgtggtgcgcggggctggggcctacatctgtggagaggagacagcgctcatcgagtccattgagggcaagcagggcaagccccgcctgaagccccccttccccgcagacgtgggagtgtttggctgccccacaactgtggccaacgtggagacagtggcagtgtcccccacaatctgccgccgtggaggtacctggtttgctggctttggcagagaacgcaactcaggcaccaaactattcaacatctctggccatgtcaaccacccttgcactgtggaggaggagatgtctgtgcccttgaaagaactgattgagaagcatgctgggggtgtcacgggcggctgggacaacctccttgctgtgatccctggcggctcgtctaccccactgatccccaagtctgtgtgtgagacggtgctgatggacttcgatgcgctggtgcaggcacagacaggcctgggcacagctgcggtgatcgtcatggaccgctcgacggacatcgtgaaagccatcgcccgcctcattgagttctataagcacgagagctgtggccagtgtaccccatgccgtgagggtgagcatcgggcaggttgggggcttgcttgctgtggcttcatttaacctcctccccaccacgtggcctgcagccctcaagcgccgccccacatcctggctggggagatcatcaggccctctcttgtggctgtggctgcaggtgtggactggatgaacaaggtgatggcacgtttcgtgaggggggatgcccggccggccgagatcgactccctgtgggagatcagcaagcagatagaaggccatacgatttgtgctctgggtgacggggccgcctggcctgtgcagggtctgatccgccactttcggccggagctcgaggagcggatgcagcggtttgcccagcagcatcaggcccggcaggctgcctcttagcccaccaccctggcctgctgtcctgcgtctatccatgtggaatgctggacaataaagcgagtgctgcccaccctcca

SEQ ID NO: 55260 - DNA, 2157 bp, Homo sapiens
  misc_feature (1852)..(1852): n is a, c, g, or t
gaagttgaaggggcgcagcgataccggtgcgcggcgctggcgtcgggcgcgtgacgtctttcctgcgcgccacctagcgtctctatcgcgccagttcctcagcctcagtgctatgaaggtgacagcgtgaggtgacccatctggcccgccgcgatgctggcaacacggcggctgctcggctggtcgcttcccgcgcgggtatctgtgcgtttcagcggcgacacgacagcacccaagaaaacctcatttggctcgctgaaggatgaagaccggattttcaccaacctgtacggccgccatgactggaggctgaaaggttccctgagtcgaggtgactggtacaagacaaaggagatcctgctgaaggggcccgactggatcctgggcgagatcaagacatcgggtttgaggggccgtggaggcgctggcttccccactggcctcaagtggagcttcatgaataagccctcagatggcaggcccaagtatctggtggtgaacgcagacgagggggagccgggcacctgcaaggaccgggagatcttacgccatgatcctcacaagctgctggaaggctgcctggtggggggccgggccatgggcgcccgcgctgcctatatctacatccgaggggaattctacaatgaggcctccaatctgcaggtggccatccgagaggcctatgaggcaggtctgattggcaagaatgcttgtggctctggctatgattttgacgtgtttgtggtgcgcggggctggggcctacatctgtggagaggagacagcgctcatcgagtccattgagggcaagcagggcaagccccgcctgaagccccccttccccgcagacgtgggagtgtttggctgccccacaactgtggccaacgtggagacagtggcagtgtcccccacaatctgccgccgtggaggtacctggtttgctggctttggcagagaacgcaactcaggcaccaaactattcaacatctctggccatgtcaaccacccttgcactgtggaggaggagatgtctgtgcccttgaaagaactgattgagaagcatgctgggggtgtcacgggcggctgggacaacctccttgctgtgatccctggcggctcgtctaccccactgatccccaagtctgtgtgtgagacggtgctgatggacttcgatgcgctggtgcaggcacagacaggcctgggcacagctgcggtgatcgtcatggaccgctcggtgtggactggatgaacaaggtgatggcacgtttcgtgaggggggatgcccggccggccgagatcgactccctgtgggagatcagcaagcagatagaaggccatacgatttgtgctctgggtgacggggccgcctggcctgtgcagggtctgatccgccactttcggccggagctcgaggagcggatgcagcggtttgcccagcagcatcaggcccggcaggctgcctcttagcccaccaccctggcctgctgtcctgcgtctatccatgtggaatgctggacaataaagcgagtgctgcccaccctccaaaaaaaaaaaaaatgcttactaagtggcagtggtatctatgatgctatagatgcttccctagccctagcccagcccctcctaaatagggagacccaagattctgtagcttctggcccaatccctcatggccccagagcactctgggcctcctgaccctttgtctcctagacagcaccaagaaaactcatttggctcgctgaaggatgaagaccggattttcaccaacctgtacggccgccatgactggaggtgagacagtgcccttagtgtgttgggtcccggagcaaggtgtccccttcattgccttncctattctgtccaggctgaaaggttccctgagtcgaggtgactggtacaagacaaaggagatcctgctgaaggggcccgactggatcctgggcgagatcaagacatcgggtttgaggggccgtggaggcgctggcttccccactggcctcaagtggagcttcatgaataagccctcagatggcaggcccaagtatctggtggtgaacgcagacgagggggagccgggcacctgcaaggaccgggagatcttacgccatgatcctcacaagctgctggaaggctgcctggtggggggccgggccat

SEQ ID NO: 55261 - DNA, 1417 bp, Homo sapiens
gaagttgaaggggcgcagcgataccggtgcgcggcgctggcgtcgggcgcgtgacgtctttcctgcgcgccacctagcgtctctatcgcgccagttcctcagcctcagtgctatgaaggtgacagcgtgaggtgacccatctggcccgccgcgatgctggcaacacggcggctgctcggctggtcgcttcccgcgcgggtatctgtgcgtttcagcggcgacacgacagcacccaagaaaacctcatttggctcgctgaaggatgaagaccggattttcaccaacctgtacggccgccatgactggaggctgaaaggttccctgagtcgaggtgactggtacaagacaaaggagatcctgctgaaggggcccgactggatcctgggcgagatcaagacatcgggtttgaggggccgtggaggcgctggcttccccactggcctcaagtggagcttcatgaataagccctcagatggcaggcccaagtatctggtggtgaacgcagacgagggggagccgggcacctgcaaggaccgggagatcttacgccatgatcctcacaagctgctggaaggctgcctggtggggggccgggccatgggcgcccgcgctgcctatatctacatccgaggggaattctacaatgaggcctccaatctgcaggtggccatccgagaggcctatgaggcaggtctgattggcaagaatgcttgtggctctggctatgattttgacgtgtttgtggtgcgcggggctggggcctacatctgtggagaggagacagcgctcatcgagtccattgagggcaagcagggcaagccccgcctgaagccccccttccccgcagacgtgggagtgtttggctgccccacaactgtggccaactccttgctgtgatccctggcggctcgtctaccccactgatccccaagtctgtgtgtgagacggtgctgatggacttcgatgcgctggtgcaggcacagacaggcctgggcacagctgcggtgatcgtcatggaccgctcgacggacatcgtgaaagccatcgcccgcctcattgagttctataagcacgagagctgtggccagtgtaccccatgccgtgagggtgtggactggatgaacaaggtgatggcacgtttcgtgaggggggatgcccggccggccgagatcgactccctgtgggagatcagcaagcagatagaaggccatacgatttgtgctctgggtgacggggccgcctggcctgtgcagggtctgatccgccactttcggccggagctcgaggagcggatgcagcggtttgcccagcagcatcaggcccggcaggctgcctcttagcccaccaccctggcctgctgtcctgcgtctatccatgtggaatgctggacaataaagcgagtgctgcccaccctcca

SEQ ID NO: 55262 - DNA, 1077 bp, Homo sapiens
gaagttgaaggggcgcagcgataccggtgcgcggcgctggcgtcgggcgcgtgacgtctttcctgcgcgccacctagcgtctctatcgcgccagttcctcagcctcagtgctatgaaggtgacagcgtgaggtgacccatctggcccgccgcgatgctggcaacacggcggctgctcggctggtcgcttcccgcgcgggtatctgtgcgtttcagcggcgacacgacagcacccaagaaaacctcatttggctcgctgaaggatgaagaccggattttcaccaacctgtacggccgccatgactggaggctgaaaggttccctgagtcgaggtgactggtacaagacaaaggagatcctgctgaaggggcccgactggatcctgggcgagatcaagacatcgggtttgaggggccgtggaggcgctggcttccccactggcctcaagtggagcttcatgaataagccctcagatggcaggcccaagtatctggtggtgaacgcagacgagggggagccgggcacctgcaaggaccgggagatcttacgccatgatcctcacaagctgctggaaggctgcctggtggggggccgggccatgggcgcccgcgctgcctatatctacatccgaggggaattctacaatgaggcctccaatctgcaggtggccatccgagaggcctatgaggcaggtctgattggcaagaatgcttgtggctctggctatgattttgacgtgtttgtggtgcgcggggctggggcctacatctgtggagaggagacagcgctcatcgagtccattgagggcaagcagggcaagccccgcctgaagccccccttccccgcagacgtgggagtgtttggctgccccacaactgtggccaacgtggagacagtggcagtgtcccccacaatctgccgccgtggaggtacctggtttgctgtggttggaaaaagcatcaggccaatcttcatttggctgtaccctctggggagtttgcttaatgaaccgggggggggcacccatgacggcccagcacagttacaggtagggaaagcgtcccacggctacattcgc

SEQ ID NO: 55263 - DNA, 1520 bp, Homo sapiens
ggctggtactggtcgccaagccctgtagatctagcgtctctatcgcgccagttcctcagcctcagtgctatgaaggtgacagcgtgaggtgacccatctggcccgccgcgatgctggcaacacggcggctgctcggctggtcgcttcccgcgcgggtatctgtgcgtttcagcggcgacacggtgaggcccagcctggctggggctgaaaggttccctgagtcgaggtgactggtacaagacaaaggagatcctgctgaaggggcccgactggatcctgggcgagatcaagacatcgggtttgaggggccgtggaggcgctggcttccccactggcctcaagtggagcttcatgaataagccctcagatggcaggcccaagtatctggtggtgaacgcagacgagggggagccgggcacctgcaaggaccgggagatcttacgccatgatcctcacaagctgctggaaggctgcctggtggggggccgggccatgggcgcccgcgctgcctatatctacatccgaggggaattctacaatgaggcctccaatctgcaggtggccatccgagaggcctatgaggcaggtctgattggcaagaatgcttgtggctctggctatgattttgacgtgtttgtggtgcgcggggctggggcctacatctgtggagaggagacagcgctcatcgagtccattgagggcaagcagggcaagccccgcctgaagccccccttccccgcagacgtgggagtgtttggctgccccacaactgtggccaacgtggagacagtggcagtgtcccccacaatctgccgccgtggaggtacctggtttgctggctttggcagagaacgcaactcaggcaccaaactattcaacatctctggccatgtcaaccacccttgcactgtggaggaggagatgtctgtgcccttgaaagaactgattgagaagcatgctgggggtgtcacgggcggctgggacaacctccttgctgtgatccctggcggctcgtctaccccactgatccccaagtctgtgtgtgagacggtgctgatggacttcgatgcgctggtgcaggcacagacaggcctgggcacagctgcggtgatcgtcatggaccgctcgacggacatcgtgaaagccatcgcccgcctcattgagttctataagcacgagagctgtggccagtgtaccccatgccgtgagggtgtggactggatgaacaaggtgatggcacgtttcgtgaggggggatgcccggccggccgagatcgactccctgtgggagatcagcaagcagatagaaggccatacgatttgtgctctgggtgacggggccgcctggcctgtgcagggtctgatccgccactttcggccggagctcgaggagcggatgcagcggtttgcccagcagcatcaggcccggcaggctgcctcttagcccaccaccctggcctgctgtcctgcgtctatccatgtggaatgctggacaataaagcgagtgctgcccaccctcca

SEQ ID NO: 55264 - DNA, 1040 bp, Homo sapiens
  misc_feature (18)..(18): n is a, c, g, or t
ataggctagtacgaggcnggtgtaaattcggccgaggctaatccggggggaatctacaatgaggcctccaatctgcaggtggccatccgagaggcctatgaggcaggtctgattggcaagaatgcttgtggctctggctatgattttgacgtgtttgtggtgcgcggggctggggcctacatctgtggagaggagacagcgctcatcgagtccattgagggcaagcagggcaagccccgcctgaagccccccttccccgcagacgtgggagtgtttggctgccccacaactgtggccaacgtggagacagtggcagtgtcccccacaatctgccgccgtggaggtacctggtttgctggctttggcagagaacgcaactcaggcaccaaactattcaacatctctggccatgtcaaccacccttgcactgtggaggaggagatgtctgtgcccttgaaagaactgattgagaagcatgctgggggtgtcacgggcggctgggacaacctccttgctgtgatccctggcggctcgtctaccccactgatccccaagtctgtgtgtgagacggtgctgatggacttcgatgcgctggtgcaggcacagacaggcctgggcacagctgcggtgatcgtcatggaccgctcgacggacatcgtgaaagccatcgcccgcctcattgagttctataagcacgagagctgtggccagtgtaccccatgccgtgagggtgtggactggatgaacaaggtgatggcacgtttcgtgaggggggatgcccggccggccgagatcgactccctgtgggagatcagcaagcagatagaaggccatacgatttgtgctctgggtgacggggccgcctggcctgtgcagggtctgatccgccactttcggccggagctcgaggagcggatgcagcggtttgcccagcagcatcaggcccggcaggctgcctcttagcccaccaccctggcctgctgtcctgcgtctatccatgtggaatgctggacaataaagcgagtgctgcccaccctcca

SEQ ID NO: 55265 - DNA, 1102 bp, Homo sapiens
aaggggcttcccccctcccaataaataattaaattcttcttacacttcacctgggagaaagattgtgagttttagaagtttcaatagcagaaaagagaacaaaagcttattcctgggaaactcacacctttgtcctgcaggtggccatccgagaggcctatgaggcaggtctgattggcaagaatgcttgtggctctggctatgattttgacgtgtttgtggtgcgcggggctggggcctacatctgtggagaggagacagcgctcatcgagtccattgagggcaagcagggcaagccccgcctgaagccccccttccccgcagacgtgggagtgtttggctgccccacaactgtggccaacgtggagacagtggcagtgtcccccacaatctgccgccgtggaggtacctggtttgctggctttggcagagaacgcaactcaggcaccaaactattcaacatctctggccatgtcaaccacccttgcactgtggaggaggagatgtctgtgcccttgaaagaactgattgagaagcatgctgggggtgtcacgggcggctgggacaacctccttgctgtgatccctggcggctcgtctaccccactgatccccaagtctgtgtgtgagacggtgctgatggacttcgatgcgctggtgcaggcacagacaggcctgggcacagctgcggtgatcgtcatggaccgctcgacggacatcgtgaaagccatcgcccgcctcattgagttctataagcacgagagctgtggccagtgtaccccatgccgtgagggtgtggactggatgaacaaggtgatggcacgtttcgtgaggggggatgcccggccggccgagatcgactccctgtgggagatcagcaagcagatagaaggccatacgatttgtgctctgggtgacggggccgcctggcctgtgcagggtctgatccgccactttcggccggagctcgaggagcggatgcagcggtttgcccagcagcatcaggcccggcaggctgcctcttagcccaccaccctggcctgctgtcctgcgtctatccatgtggaatgctggacaataaagcgagtgctgcccaccctcca

SEQ ID NO: 55266 - DNA, 1129 bp, Homo sapiens
  misc_feature (888)..(888): n is a, c, g, or t
  misc_feature (891)..(891): n is a, c, g, or t
  misc_feature (1128)..(1128): n is a, c, g, or t
gaagttgaaggggcgcagcgataccggtgcgcggcgctggcgtcgggcgcgtgacgtctttcctgcgcgccacctagcgtctctatcgcgccagttcctcagcctcagtgctatgaaggtgacagcgtgaggtgacccatctggcccgccgcgatgctggcaacacggcggctgctcggctggtcgcttcccgcgcgggtatctgtgcgtttcagcggcgacacgacagcacccaagaaaacctcatttggctcgctgaaggatgaagaccggattttcaccaacctgtacggccgccatgactggaggctgaaaggttccctgagtcgaggtgactggtacaagacaaaggagatcctgctgaaggggcccgactggatcctgggcgagatcaagacatcgggtttgaggggccgtggaggcgctggcttccccactggcctcaagtggagcttcatgaataagccctcagatggcaggcccaagtatctggtggtgaacgcagacgagggggagccgggcacctgcaaggaccgggagatcttacgccatgatcctcacaagctgctggaaggctgcctggtggggggccgggccatgggcgcccgcgctgcctatatctacatccgaggggaattctacaatgaggcctccaatctgcaggtggccatccgagaggcctatgaggcaggtctgattggcaagaatgcttgtggctctggctatgattttgacgtgtttgtggtgcgcggggctggggcctacatctgtggagaggagacagcgctcatcgagtccattgagggcaagcagggcaagccccgcctgaagccccccttccccgcagacgtggagtgttggtgcccacaatgtggcacgtggagacgnggngtgtcccaaatctgcggcgggaggtccgggttgtggcttggagggacgcatcaggccatatccatttctgggctgtacacctgctgtgggggttttggccttcaatgttggcagtgcgggttcgggggcaccctgtgatccgggcttaccttccactgttacggtgtctgcgggacagcgctggttggcgttgacgtttagcgtctcggtggtggctcctgtggttgtgtgctctcng

SEQ ID NO: 55267 - DNA, 346 bp, Homo sapiens
caccaactggagacccaggaaagccagtgatgtaaatcagtttgagttcaaagacctaagaatgagagaagccaaggtagtaaatcccagtccatgggcaggagaagatgaaatgagatgagatatccaagctcaagcaataaggcagaaaaaaggagcaaattcttccctccttggccttttgtttcattcaagccctcagtggattggatggtgctcatccacattgggaaggcaatccatttactgagtccaacaattcaaatgctaatgtcatccagaaatatcctcacagatacacccagaagtaatgtttaatttgggcatcctgtggcccagtcaagtt

SEQ ID NO: 55268 - DNA, 341 bp, Homo sapiens
gagaccagcctgggcaacacagtgaaaccctcctctctaaaaagaagaaaaaaataagagttttgagtttttccaaagaagaatgctcagtacgtttgttatcagaaagaagaatctggaggtcctgacgtgtaaacagagttgtgggtaccatctcaccagaattgctgccctgaagccaaaggactgagctgctcagatctggaagtaatctgagcccccatttccaagaagagaattgcagaattttataggaagaagggacctgatccctgtcaatggaagcattttaaaatttttaactgaagttccaggagcatacaaaagccaggcaatttacc

SEQ ID NO: 55269 - DNA, 540 bp, Homo sapiens
caactttgacgtaagtttaactgaaatgcgagttagacacatggtcctttagtagaaaatcacagagatgaagcaatgttggaagcaaatgcttttgaccagcataaatgttttgaagaaggtagaaaagatagatgtttatgacagtgactaatgtgagaaacccataggtctaactaaggaaaacatgaaaaaggtcggtaatttggatccttgaaataaaatggccaaccgtgaaaagatagctactgatgaggatactgatggaaaatttgaagcaagttatgtatctgctagagctctgtatgttttgaatgattgttggaatcagcaaagaactagtattttttggtttaatcttcaaggaaaataatagctggaaataaaacaataaaaaaaacactacaaaggagaacatacattaatgtgggaagtagggggaaaaaaaggaaaaagaaggagaacagacttgaagacctcactctctggtgtttgtttcttggtcaggctctgtaaactccccaaaattaagttcttgtg

SEQ ID NO: 55270 - DNA, 382 bp, Homo sapiens
agtacttatgcttttccagcaggcacacagattgctcacagatcttatggaaaggctgccagtgttacttcctcagtgttggggaggtagagcccactaagcctgagccccctgttccctgtctgcacactgtcatacaaagtcacagaataagttaaacacatacacacatgcacacaaacacacacagaaaacatgactcatatgtgacatccctcaacacacttttgaaggactttgccctctgaacctatatggtaaaatagatcttttttattttccaggataaataaagaatgattttgctctgacctattcttctgcagcttgggaagtagatcatacaaatctttgagagttcaacatccatttgcagaatggc

SEQ ID NO: 55271 - DNA, 234 bp, Homo sapiens
tttaaagtctgtgtttgatacttgttctttctgaattattttatgtcaacgtcaacattcgtttggtcttatctgaacacatacagcaaaatgtcacctcttgcaatattttggtttgtattcttctctttatagctttatttttaaaaagtgacttgaattatttacataattttgatgatgatgaattaacttctctgctggggccagggcccttctttctgctgacatccc

SEQ ID NO: 55272 - DNA, 279 bp, Homo sapiens
gtatgatttatcccaaggaaataatctgtaatgcaaactttttaaagcataattttaaaaagattaggtccaatacttgtataatgtatataaaccaaaaagaatattgtggcattctttttaataacaaaaagttgtaaaaaaaaaaaacattatagtaggagaatactttaataaattattttaactctattcagtttaatcatttaccataacaaacagtaatgaataattttgataacatgcattggaaaatgcttataacaagataatagtagg

SEQ ID NO: 55273 - DNA, 407 bp, Homo sapiens
ccagagctgcccgagtgggtcatctcacactgagcatgacttggacctggtgggcgctgggtggtaatgaatgcattcctggttagtccccgtggcaggcacaccctctgcctggagggcatggaaaggagggtcctggcacacgaagtgcactgatgtcacccttctctgggccaaccaagcccagagtccagagatcacattcaggtcctccctttgcctatagcctgcataccctagacctgcatgtgacttttccagtctagaaggaggctgcaagggcgcctggcccttgagagagccagtcttgtgtgtcccagcctctgcagctgtgcggtgagttaggtgctgtaaggcataatttgtaacctcctccctccgatcgcattcactccacatttcactgc

SEQ ID NO: 55274 - DNA, 536 bp, Homo sapiens
gtttcgaactcctgaactcaggtgatccacctgccttggcctcccaaagtgctgggattataggcgtgagccaccatgcccggcctgcaacttttatatttatttcttagaggcagggtcttgctcctttgcccaggctggagtgcagtgatgcaatcatagctcactgcgaccttgaactcctgggctcgttaccctcccacctcagcctcccaaagtgctgggatcacaggcatgagccatcgtccccagctgggaagggcagtttatgtttgtttattttgtgaggcagagtctcactctgttgcccaggctggagtgcagtggcgtgatctcagctcactgcagccttgacctccctgggctcaagtgatcctcccacttcagcctcctgaatagctaggactatgggcgtgtgccactgtggccagctaatttttgtagagatggggtttcaccatacagcctaggctgggagaagcaatttaaataatgtagtattttgtacaccgtacagatggttcccaacttatgat

SEQ ID NO: 55275 - DNA, 398 bp, Homo sapiens
acagaagagagaaatattgtttaaggctagcacatggaaaaacaacttagaggatttagcagctaaaagaagaatgagtcagctggtgatgtgcttggtcaaaacacacagtcatacatgcatatacatataccccaaaatgctaagtggaaactgcatgaattaaaagaggggtatgatagggacattgtcctttgggctaggtaggcacatatcagttggaccacatctgcaatactggattttactgaaatcttgtattttcctttttattatgagaaatttcagctcagtgatcaaagtcttcaaatagttaaaccaaaagaagaatagggctgctttgtgtggccatagagagcaaaactatgatcaaatagtgggtattatggaggaggttg

SEQ ID NO: 55276 - DNA, 877 bp, Homo sapiens
gaaagaataatataattagaaataatacccaggaggtaaaagatgcctgctcgctgaaaagtataacactgatcaaataaattaaagatgcaaataaatggaaaaatattccatgttcgtagattggaagattattgttaaaatttccatacttcccaaagcaatctatagatccagtacaattcctgtcaaaattccattggcatttttcacagaaataggaaaaaacaatcctaaaattcacgtggaaccacagaaagcacctaatcgccaaaacagtcttgagaaagaacaaagctgaagacattgcagttcctgatttcaaattatattaaaacaatttgcttctggcataaaaacagacacatagaccaatgaaacagaacagaatctcagaaataaacctatgaatatagagtcaactaatctttgacaagggtaccaggactacacaatggagaaagaatcgtctcttcaacagttggtgctgggaaaactggatattgacattccaaagatgaaagtggacccttacttacaccgtacataaaaatttagtcaaaatggattaaagacctaaatgaattccctgaaactataaaacatgtaggaaaaaacactgaattataaaggtatttgatactggtcttggtaatgatttttctagatattacacccaaaaaacacaagcaacaaaagcaaaaataaacaggactacatcaagctgacatgcttctgcacagcaaagaaacaatcaacaaaatgaaaaggcaacctacagaatgggaggaaatatctgcaaaccttatgtctgctaagggtttaatatccaaaagataccagaatattaactcagcccaaaacaacaaaacagcaa

SEQ ID NO: 55277 - DNA, 255 bp, Homo sapiens
cagaaaggttgagacacttgccccaggacacacagctgacaaatggcagaagtaagactcccacatcaggcagtctgattccggaggccaaggctcttagctgccacagcatccaccactctccccacatcattctgctccccccacaccccaactgaggccgggccctgtgggttgcaggaaattcactggtggaaaggagtcatcagctttcatgaatgcaaaggctccaatctacacaagaaaagagctgaa

SEQ ID NO: 55278 - DNA, 291 bp, Homo sapiens
ttgctgtctttcttcatattttgcgggaatccctccagccctttgctgcagctttacagcagctggttcccagtgaactgggagttttaaatgtgtccctctggtcaatctgttcattaaataggtggactttagaaaggagttcccgattgctcttactggaatgcaagggatggagcagagaaccctgagtctgcactggggatctgtctaatctcactgtgctcagtcttcctgtgtagtaaatggggagcctgcctgcctcccccagggtggtttcccagccaagtg

SEQ ID NO: 55279 - DNA, 1168 bp, Homo sapiens
agcggagtcttctctgcagacaccagcctggtgtcctccttcatcccaggctgccaggctaggcaggggacagcggctgccctggtcctcacagccctggctacggggctggtgacagccagatcctcatgcttctgcgacctgagcgctgccttcagacacctctctgctggcgtgttcctgggtccatgatggaagaaggaaaagtatttttaaaagacaatctgaagctcatactgtgactgcaacataaaatgtgttcacctgaggagactgctttcatcgccagtgtgtcacagaggtctctgatggttctggtttcctgggcacctagaataagtgtgtcaccatttgtcctgaagctgacttctctgagctggatggcaccctggacatcaaccagcccttcaccttcacgtcacacaggagggacactggtccatagagaggatgcctgctctggtcaccagctggagagtggcagaccttgggtacctgacctttggactctgccacacagagcacttcctcagtccctcctgctgcccctggcagggtggagctggcagggcagctgatccaggaccgtccacttccaagccagcaggaggatggaaaagcagaatggaggggaaacaacctcctttgcagggcgtgactcggaagttggacacatcatttccagccacattccatggaccagaattagccctgtgaccaactctggctgccagaaaatctgggaaatacagtctctgcttgggcgatcaggcaggcagttatatctttgggaacatctctcaccccctgggaacacctgagcagaaactgaaggacatttaacagattctcctttgtgtctaataagaattgcccccatcagtcggggctgtcctaggtgctgggtacataggtcatctatacacaacccagcaatggagagcacaccattcccaggctgcagatgcagaaactgtggctcggagagttaagcgtcttgttcagattcagtcagctggtagatggcaggtctgggattgagacccaggcctggctggtcctgccaggatacagtatcacagctttgactgggagcttctttttgtttacatatattttttatgctcaatgtgcattccttttgaaatacacagaaaagggaaagaag

SEQ ID NO: 55280 - DNA, 932 bp, Homo sapiens
  misc_feature (20)..(20): n is a, c, g, or t
aagagggcagctgtacgccngggattagggatggagactgctttcatcgccagtgtgtcacagaggtctctgatggttctggtttcctgggcacctagaataagtgtgtcaccatttgtcctgaagctgacttctctgagctggatggcaccctggacatcaaccagcccttcaccttcacgtcacacaggagggacactggtccatagagaggatgcctgctctggtcaccagctggagagtggcagaccttgggtacctgacctttggactctgccacacagagcacttcctcagtccctcctgctgcccctggcagggtggagctggcagggcagctgatccaggaccgtccacttccaagccagcaggaggatggaaaagcagaatggaggggaaacaacctcctttgcagggcgtgactcggaagttggacacatcatttccagccacattccatggaccagaattagccctgtgaccaactctggctgccagaaaatctgggaaatacagtctctgcttgggcgatcaggcaggcagttatatctttgggaacatctctcaccccctgggaacacctgagcagaaactgaaggacatttaacagattctcctttgtgtctaataagaattgcccccatcagtcggggctgtcctaggtgctgggtacataggtcatctatacacaacccagcaatggagagcacaccattcccaggctgcagatgcagaaactgtggctcggagagttaagcgtcttgttcagattcagtcagctggtagatggcaggtctgggattgagacccaggcctggctggtcctgccaggatacagtatcacagctttgactgggagcttctttttgtttacatatattttttatgctcaatgtgcattccttttgaaatacacagaaaagggaaagaag

SEQ ID NO: 55281 - DNA, 1174 bp, Homo sapiens
agcggagtcttctctgcagacaccagcctggtgtcctccttcatcccaggctgccaggctaggcaggggacagcggctgccctggtcctcacagccctggctacggggctggtgacagccagatcctcatgcttctgcgacctgagcgctgccttcagacacctctctgctggcgtgttcctgggtccatgatggaagaaggaaaagtatttttaaaagacaatctgaagctcatactgtgactgcaacataaaatgtgttcacctgaggagactgctttcatcgccagtgtgtcacagatggtggaaacctcagaaggccacagtccagagtaggggctcaatgcaagctgctggaactgaataaagctgacttctctgagctggatggcaccctggacatcaaccagcccttcaccttcacgtcacacaggagggacactggtccatagagaggatgcctgctctggtcaccagctggagagtggcagaccttgggtacctgacctttggactctgccacacagagcacttcctcagtccctcctgctgcccctggcagggtggagctggcagggcagctgatccaggaccgtccacttccaagccagcaggaggatggaaaagcagaatggaggggaaacaacctcctttgcagggcgtgactcggaagttggacacatcatttccagccacattccatggaccagaattagccctgtgaccaactctggctgccagaaaatctgggaaatacagtctctgcttgggcgatcaggcaggcagttatatctttgggaacatctctcaccccctgggaacacctgagcagaaactgaaggacatttaacagattctcctttgtgtctaataagaattgcccccatcagtcggggctgtcctaggtgctgggtacataggtcatctatacacaacccagcaatggagagcacaccattcccaggctgcagatgcagaaactgtggctcggagagttaagcgtcttgttcagattcagtcagctggtagatggcaggtctgggattgagacccaggcctggctggtcctgccaggatacagtatcacagctttgactgggagcttctttttgtttacatatattttttatgctcaatgtgcattccttttgaaatacacagaaaagggaaagaag

SEQ ID NO: 55282 - DNA, 898 bp, Homo sapiens
agcggagtcttctctgcagacaccagcctggtgtcctccttcatcccaggctgccaggctaggcaggggacagcggctgccctggtcctcacagccctggctacggggctggtgacagccagatcctcatgcttctgcgacctgagcgctgccttcagacacctctctgctggcgtgttcctgggtccatgatggaagaaggaaaagtatttttaaaagacaatctgaagctcatactgtgactgcaacataaaatgtgttcacctgaggagactgctttcatcgccagtgtgtcacagggcagctgatccaggaccgtccacttccaagccagcaggaggatggaaaagcagaatggaggggaaacaacctcctttgcagggcgtgactcggaagttggacacatcatttccagccacattccatggaccagaattagccctgtgaccaactctggctgccagaaaatctgggaaatacagtctctgcttgggcgatcaggcaggcagttatatctttgggaacatctctcaccccctgggaacacctgagcagaaactgaaggacatttaacagattctcctttgtgtctaataagaattgcccccatcagtcggggctgtcctaggtgctgggtacataggtcatctatacacaacccagcaatggagagcacaccattcccaggctgcagatgcagaaactgtggctcggagagttaagcgtcttgttcagattcagtcagctggtagatggcaggtctgggattgagacccaggcctggctggtcctgccaggatacagtatcacagctttgactgggagcttctttttgtttacatatattttttatgctcaatgtgcattccttttgaaatacacagaaaagggaaagaag

SEQ ID NO: 55283 - DNA, 500 bp, Homo sapiens
agcggagtcttctctgcagacaccagcctggtgtcctccttcatcccaggctgccaggctaggcaggggacagcggctgccctggtcctcacagccctggctacggggctggtgacagccagatcctcatgcttctgcgacctgagcgctgccttcagacacctctctgctggcgtgttcctgggtccatgatggaagaaggaaaagtatttttaaaagacaatctgaagctcatactgtgactgcaacataaaatgtgttcacctgaggagactgctttcatcgccagtgtgtcacagggcagctgatccaggaccgtccacttccaagccagcaggaggatggaaaagcagaatggaggggaaacaacctcctttgcagggcgtgactcggaagttggacacatcatttccagccacattccatggaccagaattagccctgtgaccaactctggctgccagaaaatctgggaaatacagtctctgcttgggcgatca

SEQ ID NO: 55284 - DNA, 1237 bp, Homo sapiens
agcggagtcttctctgcagacaccagcctggtgtcctccttcatcccaggctgccaggctaggcaggggacagcggctgccctggtcctcacagccctggctacggggctggtgacagccagatcctcatgcttctgcgacctgagcgctgccttcagacacctctctgctggcgtgttcctgggtccatgatggaagaaggaaaagtatttttaaaagacaatctgaagctcatactgtgactgcaacataaaatgtgttcacctgaggagactgctttcatcgccagtgtgtcacagatggtggaaacctcagaaggccacagtccagagtaggggctcaatgcaagctgctggaactgaataaagaggtctctgatggttctggtttcctgggcacctagaataagtgtgtcaccatttgtcctgaagctgacttctctgagctggatggcaccctggacatcaaccagcccttcaccttcacgtcacacaggagggacactggtccatagagaggatgcctgctctggtcaccagctggagagtggcagaccttgggtacctgacctttggactctgccacacagagcacttcctcagtccctcctgctgcccctggcagggtggagctggcagggcagctgatccaggaccgtccacttccaagccagcaggaggatggaaaagcagaatggaggggaaacaacctcctttgcagggcgtgactcggaagttggacacatcatttccagccacattccatggaccagaattagccctgtgaccaactctggctgccagaaaatctgggaaatacagtctctgcttgggcgatcaggcaggcagttatatctttgggaacatctctcaccccctgggaacacctgagcagaaactgaaggacatttaacagattctcctttgtgtctaataagaattgcccccatcagtcggggctgtcctaggtgctgggtacataggtcatctatacacaacccagcaatggagagcacaccattcccaggctgcagatgcagaaactgtggctcggagagttaagcgtcttgttcagattcagtcagctggtagatggcaggtctgggattgagacccaggcctggctggtcctgccaggatacagtatcacagctttgactgggagcttctttttgtttacatatattttttatgctcaatgtgcattccttttgaaatacacagaaaagggaaagaag

SEQ ID NO: 55285 - DNA, 1018 bp, Homo sapiens
agcggagtcttctctgcagacaccagcctggtgtcctccttcatcccaggctgccaggctaggcaggggacagcggctgccctggtcctcacagccctggctacggggctggtgacagccagatcctcatgcttctgcgacctgagcgctgccttcagacacctctctgctggcgtgttcctgggtccatgtgagctacctgttttgctctaagataccctggatgtgacgctcagctctgtcactggcttccacataccccctactcctacacctcaaaaatccatgttccccacgcattcatcttcaggatggaagaaggaaaagtatttttaaaagacaatctgaagctcatactgtgactgcaacataaaatgtgttcacctgaggagactgctttcatcgccagtgtgtcacagggcagctgatccaggaccgtccacttccaagccagcaggaggatggaaaagcagaatggaggggaaacaacctcctttgcagggcgtgactcggaagttggacacatcatttccagccacattccatggaccagaattagccctgtgaccaactctggctgccagaaaatctgggaaatacagtctctgcttgggcgatcaggcaggcagttatatctttgggaacatctctcaccccctgggaacacctgagcagaaactgaaggacatttaacagattctcctttgtgtctaataagaattgcccccatcagtcggggctgtcctaggtgctgggtacataggtcatctatacacaacccagcaatggagagcacaccattcccaggctgcagatgcagaaactgtggctcggagagttaagcgtcttgttcagattcagtcagctggtagatggcaggtctgggattgagacccaggcctggctggtcctgccaggatacagtatcacagctttgactgggagcttctttttgtttacatatattttttatgctcaatgtgcattccttttgaaatacacagaaaagggaaagaag

SEQ ID NO: 55286 - DNA, 492 bp, Homo sapiens
gctgataaaggtaactgccatctccaatgcagtgtaactacttggtgccagcatgcatcgtggtgctcatctttctggccttccagcagagggcatatgtggcccctgccaacctgcctgctctcctgctgttgctactactgtatgggtgaggcccccagtccctcagggcctattcttactgaccccttactgccttccacattaatgctgctgagatagaactctgcagtgactcccaaggagaggatatggaggtctgaggtgatgccgtgtgtgatccaattcagtggtgtgccaaggtggccttaaaagctcatcttatcctgactcatattagtagagttctaaggcagcccatgcctgtaattccagtactttgggaggccgaggcaggaggactgcttgtggccaggagtttgagaccagcctgggaaacatagagagacccacctctaaaaaagaaagaaagagagagaaagagaaagagag

SEQ ID NO: 55287 - DNA, 6219 bp, Homo sapiens
tcagtttccctatttgtaaagtgggggctatgatagtatggtctgcctgggaactggccagagcgctggacccctagtgagtgttcaaaatcattgtcccccttgtggtctttctccccaggaatccctggggttggcactgggccaagcccaggagcccttgcacagcttgttggaggccgctgaggacctggcccaggagctcctggcgctgcgcagcctggtggagcttcgggcactgctgcagagaccccgagggaccagcggccccctggagttgctgtcagaggccctctgcagtgtcaggggacctagcagcacagtgggcccctccctcaactggtacgaggctagtgacctgatggagctggtggggcaggagccagaatccgccctgccagacagcagcctgagccccgcctgctcggagctgattggagccctggacagccacccgctgtcccgcctgctctggagacgcctgaagcctctgatcctcgggaagctactctttgcaccagatacaccttttacccggaagctcatggcccaggtcaaccggaccttcgaggagctcaccctgctgagggatgtccgggaggtgtgggagatgctgggaccccggatcttcaccttcatgaacgacagttccaatgtggccatgctgcagcggctcctgcagatgcaggatgaaggaagaaggcagcccagacctggaggccgggaccacatggaggccctgcgatcctttctggaccctgggagcggtggctacagctggcaggacgcacacgctgatgtggggcacctggtgggcacgctgggccgagtgacggagtgcctgtccttggacaagctggaggcggcaccctcagaggcagccctggtgtcgcgggccctgcaactgctcgcggaacatcgattctgggccggcgtcgtcttcttgggacctgaggactcttcagaccccacagagcacccaaccccagacctgggccccggccacgtgcgcatcaaaatccgcatggacattgacgtggtcacgaggaccaataagatcagggacaggttttgggaccctggcccagccgcggaccccctgaccgacctgcgctacgtgtggggcggcttcgtgtacctgcaagacctggtggagcgtgcagccgtccgcgtgctcagcggcgccaacccccgggccggcctctacctgcagcagatgccctatccgtgctatgtggacgacgtgttcctgcgtgtgctgagccggtcgctgccgctcttcctgacgctggcctggatctactccgtgacactgacagtgaaggccgtggtgcgggagaaggagacgcggctgcgggacaccatgcgcgccatggggctcagccgcgcggtgctctggctaggctggttcctcagctgcctcgggcccttcctgctcagcgccgcactgctggttctggtgctcaagctgggagacatcctcccctacagccacccgggcgtggtcttcctgttcttggcagccttcgcggtggccacggtgacccagagcttcctgctcagcgccttcttctcccgcgccaacctggctgcggcctgcggcggcctggcctacttctccctctacctgccctacgtgctgtgtgtggcttggcgggaccggctgcccgcgggtggccgcgtggccgcgagcctgctgtcgcccgtggccttcggcttcggctgcgagagcctggctctgctggaggagcagggcgagggcgcgcagtggcacaacgtgggcacccggcctacggcagacgtcttcagcctggcccaggtctctggccttctgctgctggacgcggcgctctacggcctcgccacctggtacctggaagctgtgtgcccaggccagtacgggatccctgaaccatggaattttccttttcggaggagctactggtgcggacctcggccccccaagagtccagccccttgccccaccccgctggacccaaaggtgctggtagaagaggcaccgcccggcctgagtcctggcgtctccgttcgcagcctggagaagcgctttcctggaagcccgcagccagccctgcgggggctcagcctggacttctaccagggccacatcaccgccttcctgggccacaacggggccggcaagaccaccaccctgtccatcttgagtggcctcttcccacccagtggtggctctgccttcatcctgggccacgacgtccgctccagcatggccgccatccggccccacctgggcgtctgtcctcagtacaacgtgctgtttgacatgctgaccgtggacgagcacgtctggttctatgggcggctgaagggtctgagtgccgctgtagtgggccccgagcaggaccgtctgctgcaggatgtggggctggtctccaagcagagtgtgcagactcgccacctctctggtgggatgcaacggaagctgtccgtggccattgcctttgtgggcggctcccaagttgttatcctggacgagcctacggctggcgtggatcctgcttcccgccgcggtatttgggagctgctgctcaaataccgagaaggtcgcacgctgatcctctccacccaccacctggatgaggcagagctgctgggagaccgtgtggctgtggtggcaggtggccgcttgtgctgctgtggctccccactcttcctgcgccgtcacctgggctccggctactacctgacgctggtgaaggcccgcctgcccctgaccaccaatgagaaggctgacactgacatggagggcagtgtggacaccaggcaggaaaagaagaatggcagccagggcagcagagtcggcactcctcagctgctggccctggtacagcactgggtgcccggggcacggctggtggaggagctgccacacgagctggtgctggtgctgccctacacgggtgcccatgacggcagcttcgccacactcttccgagagctagacacgcggctggcggagctgaggctcactggctacgggatctccgacaccagcctcgaggagatcttcctgaaggtggtggaggagtgtgctgcggacacagatatggaggatggcagctgcgggcagcacctatgcacaggcattgctggcctagacgtaaccctgcggctcaagatgccgccacaggagacagcgctggagaacggggaaccagctgggtcagccccagagactgaccagggctctgggccagacgccgtgggccgggtacagggctgggcactgacccgccagcagctccaggccctgcttctcaagcgctttctgcttgcccgccgcagccgccgcggcctgttcgcccagatcgtgctgcctgccctctttgtgggcctggccctcgtgttcagcctcatcgtgcctcctttcgggcactacccggctctgcggctcagtcccaccatgtacggtgctcaggtgtccttcttcagtgaggacgccccaggggaccctggacgtgcccggctgctcgaggcgctgctgcaggaggcaggactggaggagcccccagtgcagcatagctcccacaggttctcggcaccagaagttcctgctgaagtggccaaggtcttggccagtggcaactggaccccagagtctccatccccagcctgccagtgtagccagcccggtgcccggcgcctgctgcccgactgcccggctgcagctggtggtccccctccgccccaggcagtgaccggctctggggaagtggttcagaacctgacaggccggaacctgtctgacttcctggtcaagacctacccgcgcctggtgcgccagggcctgaagactaagaagtgggtgaatgaggtcaggtacggaggcttctcgctggggggccgagacccaggcctgccctcgggccaagagttgggccgctcagtggaggagttgtgggcgctgctgagtcccctgcctggcggggccctcgaccgtgtcctgaaaaacctcacagcctgggctcacagcctggacgctcaggacagtctcaagatctggttcaacaacaaaggctggcactccatggtggcctttgtcaaccgagccagcaacgcaatcctccgtgctcacctgcccccaggccgggcccgccacgcccacagcatcaccacactcaaccaccccttgaacctcaccaaggagcagctgtctgaggctgcactgatggcctcctcggtggacgtcctcgtctccatctgtgtggtctttgccatgtcctttgtcccggccagcttcactcttgtcctcattgaggagcgagtcacccgagccaagcacctgcagctcatggggggcctgtcccccaccctctactggcttggcaactttctctgggacatgtgtaactacttggtgccagcatgcatcgtggtgctcatctttctggccttccagcagagggcatatgtggcccctgccaacctgcctgctctcctgctgttgctactactgtatggctggtcgatcacaccgctcatgtacccagcctccttcttcttctccgtgcccagcacagcctatgtggtgctcacctgcataaacctctttattggcatcaatggaagcatggccacctttgtgcttgagctcttctctgatcagaagctgcaggaggtgagccggatcttgaaacaggtcttccttatcttcccccacttctgcttgggccgggggctcattgacatggtgcggaaccaggccatggctgatgcctttgagcgcttgggagacaggcagttccagtcacccctgcgctgggaggtggtcggcaagaacctcttggccatggtgatacaggggcccctcttccttctcttcacactactgctgcagcaccgaagccaactcctgccacagcccagggtgaggtctctgccactcctgggagaggaggacgaggatgtagcccgtgaacgggagcgggtggtccaaggagccacccagggggatgtgttggtgctgaggaacttgaccaaggtataccgtgggcagaggatgccagctgttgaccgcttgtgcctggggattccccctggtgagtgttttgggctgctgggtgtgaatggagcagggaagacgtccacgtttcgcatggtgacgggggacacattggccagcaggggcgaggctgtgctggcaggccacagcgtggcccgggaacccagtgctgcgcacctcagcatgggatactgccctcaatccgatgccatctttgagctgctgacgggccgcgagcacctggagctgcttgcgcgcctgcgcggtgtcccggaggcccaggttgcccagaccgctggctcgggcctggcgcgtctgggactctcatggtacgcagaccggcctgcaggcacctacagcggagggaacaaacgcaagctggcgacggccctggcgctggttggggacccagccgtggtgtttctggacgagccgaccacaggcatggaccccagcgcgcggcgcttcctttggaacagccttttggccgtggtgcgggagggccgttcagtgatgctcacctcccatagcatggaggagtgtgaagcgctctgctcgcgcctagccatcatggtgaatgggcggttccgctgcctgggcagcccgcaacatctcaagggcagattcgcggcgggtcacacactgaccctgcgggtgcccgccgcaaggtcccagccggcagcggccttcgtggcggccgagttccctgggtcggagctgcgcgaggcacatggaggccgcctgcgcttccagctgccgccgggagggcgctgcgccctggcgcgcgtctttggagagctggcggtgcacggcgcagagcacggcgtggaggacttttccgtgagccagacgatgctggaggaggtattcttgtacttctccaaggaccaggggaaggacgaggacaccgaagagcagaaggaggcaggagtgggagtggaccccgcgccaggcctgcagcaccccaaacgcgtcagccagttcctcgatgaccctagcactgccgagactgtgctctgagcctccctcccctgcggggccgcggggaggccctgggaatggcaagggcaaggtagagtgcctaggagccctggactcaggctggcagaggggctggtgccctggagaaaataaagagaaggctggagagaagccgtgctggtgaaaaaaaagca

SEQ ID NO: 55288 - DNA, 6759 bp, Homo sapiens
ggcaagagctgcggagcccctggaagagcttccaggaaccctgcgctgtgggataaaggaatgaggttcagaaaggggcagggagttgcccgcagccgcaccgcacgtcttcagcccgaccgttgtcctgacctctctgtcccgtcccctgcccagtctcaccatggccttctggacacagctgatgctgctgctctggaagaatttcatgtatcgccggagacagccggtccagctcctggtcgaattgctgtggcctctcttcctcttcttcatcctggtggctgttcgccactcccacccgcccctggagcaccatgaatgccacttcccaaacaagccactgccatcggcgggcaccgtgccctggctccagggtctcatctgtaatgtgaacaacacctgctttccgcagctgacaccgggcgaggagcccgggcgcctgagcaacttcaacgactccctggtctcccggctgctagccgatgcccgcactgtgctgggaggggccagtgcccacaggacgctggctggcctagggaagctgatcgccacgctgagggctgcacgcagcacggcccagcctcaaccaaccaagcagtctccactggaaccacccatgctggatgtcgcggagctgctgacgtcactgctgcgcacggaatccctggggttggcactgggccaagcccaggagcccttgcacagcttgttggaggccgctgaggacctggcccaggagctcctggcgctgcgcagcctggtggagcttcgggcactgctgcagagaccccgagggaccagcggccccctggagttgctgtcagaggccctctgcagtgtcaggggacctagcagcacagtgggcccctccctcaactggtacgaggctagtgacctgatggagctggtggggcaggagccagaatccgccctgccagacagcagcctgagccccgcctgctcggagctgattggagccctggacagccacccgctgtcccgcctgctctggagacgcctgaagcctctgatcctcgggaagctactctttgcaccagatacaccttttacccggaagctcatggcccaggtcaaccggaccttcgaggagctcaccctgctgagggatgtccgggaggtgtgggagatgctgggaccccggatcttcaccttcatgaacgacagttccaatgtggccatgctgcagcggctcctgcagatgcaggatgaaggaagaaggcagcccagacctggaggccgggaccacatggaggccctgcgatcctttctggaccctgggagcggtggctacagctggcaggacgcacacgctgatgtggggcacctggtgggcacgctgggccgagtgacggagtgcctgtccttggacaagctggaggcggcaccctcagaggcagccctggtgtcgcgggccctgcaactgctcgcggaacatcgattctgggccggcgtcgtcttcttgggacctgaggactcttcagaccccacagagcacccaaccccagacctgggccccggccacgtgcgcatcaaaatccgcatggacattgacgtggtcacgaggaccaataagatcagggacaggttttgggaccctggcccagccgcggaccccctgaccgacctgcgctacgtgtggggcggcttcgtgtacctgcaagacctggtggagcgtgcagccgtccgcgtgctcagcggcgccaacccccgggccggcctctacctgcagcagatgccctatccgtgctatgtggacgacgtgttcctgcgtgtgctgagccggtcgctgccgctcttcctgacgctggcctggatctactccgtgacactgacagtgaaggccgtggtgcgggagaaggagacgcggctgcgggacaccatgcgcgccatggggctcagccgcgcggtgctctggctaggctggttcctcagctgcctcgggcccttcctgctcagcgccgcactgctggttctggtgctcaagctgggagacatcctcccctacagccacccgggcgtggtcttcctgttcttggcagccttcgcggtggccacggtgacccagagcttcctgctcagcgccttcttctcccgcgccaacctggctgcggcctgcggcggcctggcctacttctccctctacctgccctacgtgctgtgtgtggcttggcgggaccggctgcccgcgggtggccgcgtggccgcgagcctgctgtcgcccgtggccttcggcttcggctgcgagagcctggctctgctggaggagcagggcgagggcgcgcagtggcacaacgtgggcacccggcctacggcagacgtcttcagcctggcccaggtctctggccttctgctgctggacgcggcgctctacggcctcgccacctggtacctggaagctgtgtgcccaggccagtacgggatccctgaaccatggaattttccttttcggaggagctactggtgcggacctcggccccccaagagtccagccccttgccccaccccgctggacccaaaggtgctggtagaagaggcaccgcccggcctgagtcctggcgtctccgttcgcagcctggagaagcgctttcctggaagcccgcagccagccctgcgggggctcagcctggacttctaccagggccacatcaccgccttcctgggccacaacggggccggcaagaccaccaccctgtccatcttgagtggcctcttcccacccagtggtggctctgccttcatcctgggccacgacgtccgctccagcatggccgccatccggccccacctgggcgtctgtcctcagtacaacgtgctgtttgacatgctgaccgtggacgagcacgtctggttctatgggcggctgaagggtctgagtgccgctgtagtgggccccgagcaggaccgtctgctgcaggatgtggggctggtctccaagcagagtgtgcagactcgccacctctctggtgggatgcaacggaagctgtccgtggccattgcctttgtgggcggctcccaagttgttatcctggacgagcctacggctggcgtggatcctgcttcccgccgcggtatttgggagctgctgctcaaataccgagaaggtcgcacgctgatcctctccacccaccacctggatgaggcagagctgctgggagaccgtgtggctgtggtggcaggtggccgcttgtgctgctgtggctccccactcttcctgcgccgtcacctgggctccggctactacctgacgctggtgaaggcccgcctgcccctgaccaccaatgagaaggctgacactgacatggagggcagtgtggacaccaggcaggaaaagaagaatggcagccagggcagcagagtcggcactcctcagctgctggccctggtacagcactgggtgcccggggcacggctggtggaggagctgccacacgagctggtgctggtgctgccctacacgggtgcccatgacggcagcttcgccacactcttccgagagctagacacgcggctggcggagctgaggctcactggctacgggatctccgacaccagcctcgaggagatcttcctgaaggtggtggaggagtgtgctgcggacacagatatggaggatggcagctgcgggcagcacctatgcacaggcattgctggcctagacgtaaccctgcggctcaagatgccgccacaggagacagcgctggagaacggggaaccagctgggtcagccccagagactgaccagggctctgggccagacgccgtgggccgggtacagggctgggcactgacccgccagcagctccaggccctgcttctcaagcgctttctgcttgcccgccgcagccgccgcggcctgttcgcccagatcgtgctgcctgccctctttgtgggcctggccctcgtgttcagcctcatcgtgcctcctttcgggcactacccggctctgcggctcagtcccaccatgtacggtgctcaggtgtccttcttcagtgaggacgccccaggggaccctggacgtgcccggctgctcgaggcgctgctgcaggaggcaggactggaggagcccccagtgcagcatagctcccacaggttctcggcaccagaagttcctgctgaagtggccaaggtcttggccagtggcaactggaccccagagtctccatccccagcctgccagtgtagccagcccggtgcccggcgcctgctgcccgactgcccggctgcagctggtggtccccctccgccccaggcagtgaccggctctggggaagtggttcagaacctgacaggccggaacctgtctgacttcctggtcaagacctacccgcgcctggtgcgccagggcctgaagactaagaagtgggtgaatgaggtcaggtacggaggcttctcgctggggggccgagacccaggcctgccctcgggccaagagttgggccgctcagtggaggagttgtgggcgctgctgagtcccctgcctggcggggccctcgaccgtgtcctgaaaaacctcacagcctgggctcacagcctggacgctcaggacagtctcaagatctggttcaacaacaaaggctggcactccatggtggcctttgtcaaccgagccagcaacgcaatcctccgtgctcacctgcccccaggccgggcccgccacgcccacagcatcaccacactcaaccaccccttgaacctcaccaaggagcagctgtctgaggctgcactgatggcctcctcggtggacgtcctcgtctccatctgtgtggtctttgccatgtcctttgtcccggccagcttcactcttgtcctcattgaggagcgagtcacccgagccaagcacctgcagctcatggggggcctgtcccccaccctctactggcttggcaactttctctgggacatgtgtaactacttggtgccagcatgcatcgtggtgctcatctttctggccttccagcagagggcatatgtggcccctgccaacctgcctgctctcctgctgttgctactactgtatggctggtcgatcacaccgctcatgtacccagcctccttcttcttctccgtgcccagcacagcctatgtggtgctcacctgcataaacctctttattggcatcaatggaagcatggccacctttgtgcttgagctcttctctgatcagaagctgcaggaggtgagccggatcttgaaacaggtcttccttatcttcccccacttctgcttgggccgggggctcattgacatggtgcggaaccaggccatggctgatgcctttgagcgcttgggagacaggcagttccagtcacccctgcgctgggaggtggtcggcaagaacctcttggccatggtgatacaggggcccctcttccttctcttcacactactgctgcagcaccgaagccaactcctgccacagcccagggtgaggtctctgccactcctgggagaggaggacgaggatgtagcccgtgaacgggagcgggtggtccaaggagccacccagggggatgtgttggtgctgaggaacttgaccaaggtataccgtgggcagaggatgccagctgttgaccgcttgtgcctggggattccccctggtgagtgttttgggctgctgggtgtgaatggagcagggaagacgtccacgtttcgcatggtgacgggggacacattggccagcaggggcgaggctgtgctggcaggccacagcgtggcccgggaacccagtgctgcgcacctcagcatgggatactgccctcaatccgatgccatctttgagctgctgacgggccgcgagcacctggagctgcttgcgcgcctgcgcggtgtcccggaggcccaggttgcccagaccgctggctcgggcctggcgcgtctgggactctcatggtacgcagaccggcctgcaggcacctacagcggagggaacaaacgcaagctggcgacggccctggcgctggttggggacccagccgtggtgtttctggacgagccgaccacaggcatggaccccagcgcgcggcgcttcctttggaacagccttttggccgtggtgcgggagggccgttcagtgatgctcacctcccatagcatggaggagtgtgaagcgctctgctcgcgcctagccatcatggtgaatgggcggttccgctgcctgggcagcccgcaacatctcaagggcagattcgcggcgggtcacacactgaccctgcgggtgcccgccgcaaggtcccagccggcagcggccttcgtggcggccgagttccctgggtcggagctgcgcgaggcacatggaggccgcctgcgcttccagctgccgccgggagggcgctgcgccctggcgcgcgtctttggagagctggcggtgcacggcgcagagcacggcgtggaggacttttccgtgagccagacgatgctggaggaggtattcttgtacttctccaaggaccaggggaaggacgaggacaccgaagagcagaaggaggcaggagtgggagtggaccccgcgccaggcctgcagcaccccaaacgcgtcagccagttcctcgatgaccctagcactgccgagactgtgctctgagcctccctcccctgcggggccgcggggaggccctgggaatggcaagggcaaggtagagtgcctaggagccctggactcaggctggcagaggggctggtgccctggagaaaataaagagaaggctggagagaagccgtgctggtgaaaaaaaagca

SEQ ID NO: 55289 - DNA, 6255 bp, Homo sapiens
tcagtttccctatttgtaaagtgggggctatgatagtatggtctgcctgggaactggccagagcgctggacccctagtgagtgttcaaaatcattgtcccccttgtggtctttctccccaggaatccctggggttggcactgggccaagcccaggagcccttgcacagcttgttggaggccgctgaggacctggcccaggagctcctggcgctgcgcagcctggtggagcttcgggcactgctgcagagaccccgagggaccagcggccccctggagttgctgtcagaggccctctgcagtgtcaggggacctagcagcacagtgggcccctccctcaactggtacgaggctagtgacctgatggagctggtggggcaggagccagaatccgccctgccagacagcagcctgagccccgcctgctcggagctgattggagccctggacagccacccgctgtcccgcctgctctggagacgcctgaagcctctgatcctcgggaagctactctttgcaccagatacaccttttacccggaagctcatggcccaggtcaaccggaccttcgaggagctcaccctgctgagggatgtccgggaggtgtgggagatgctgggaccccggatcttcaccttcatgaacgacagttccaatgtggccatgctgcagcggctcctgcagatgcaggatgaaggaagaaggcagcccagacctggaggccgggaccacatggaggccctgcgatcctttctggaccctgggagcggtggctacagctggcaggacgcacacgctgatgtggggcacctggtgggcacgctgggccgagtgacggagtgcctgtccttggacaagctggaggcggcaccctcagaggcagccctggtgtcgcgggccctgcaactgctcgcggaacatcgattctgggccggcgtcgtcttcttgggacctgaggactcttcagaccccacagagcacccaaccccagacctgggccccggccacgtgcgcatcaaaatccgcatggacattgacgtggtcacgaggaccaataagatcagggacaggttttgggaccctggcccagccgcggaccccctgaccgacctgcgctacgtgtggggcggcttcgtgtacctgcaagacctggtggagcgtgcagccgtccgcgtgctcagcggcgccaacccccgggccggcctctacctgcagcagatgccctatccgtgctatgtggacgacgtgttcctgcgtgtgctgagccggtcgctgccgctcttcctgacgctggcctggatctactccgtgacactgacagtgaaggccgtggtgcgggagaaggagacgcggctgcgggacaccatgcgcgccatggggctcagccgcgcggtgctctggctaggctggttcctcagctgcctcgggcccttcctgctcagcgccgcactgctggttctggtgctcaagctgggagacatcctcccctacagccacccgggcgtggtcttcctgttcttggcagccttcgcggtggccacggtgacccagagcttcctgctcagcgccttcttctcccgcgccaacctggctgcggcctgcggcggcctggcctacttctccctctacctgccctacgtgctgtgtgtggcttggcgggaccggctgcccgcgggtggccgcgtggccgcgagcctgctgtcgcccgtggccttcggcttcggctgcgagagcctggctctgctggaggagcagggcgagggcgcgcagtggcacaacgtgggcacccggcctacggcagacgtcttcagcctggcccaggtctctggccttctgctgctggacgcggcgctctacggcctcgccacctggtacctggaagctgtgtgcccaggccagtacgggatccctgaaccatggaattttccttttcggaggagctactggtgcggacctcggccccccaagagtccagccccttgccccaccccgctggacccaaaggtgctggtagaagaggcaccgcccggcctgagtcctggcgtctccgttcgcagcctggagaagcgctttcctggaagcccgcagccagccctgcgggggctcagcctggacttctaccagggccacatcaccgccttcctgggccacaacggggccggcaagaccaccaccctgtccatcttgagtggcctcttcccacccagtggtggctctgccttcatcctgggccacgacgtccgctccagcatggccgccatccggccccacctgggcgtctgtcctcagtacaacgtgctgtttgacatgctgaccgtggacgagcacgtctggttctatgggcggctgaagggtctgagtgccgctgtagtgggccccgagcaggaccgtctgctgcaggatgtggggctggtctccaagcagagtgtgcagactcgccacctctctggtgggatgcaacggaagctgtccgtggccattgcctttgtgggcggctcccaagttgttatcctggacgagcctacggctggcgtggatcctgcttcccgccgcggtatttgggagctgctgctcaaataccgagaaggtcgcacgctgatcctctccacccaccacctggatgaggcagagctgctgggagaccgtgtggctgtggtggcaggtggccgcttgtgctgctgtggctccccactcttcctgcgccgtcacctgggctccggctactacctgacgctggtgaaggcccgcctgcccctgaccaccaatgagaaggctgacactgacatggagggcagtgtggacaccaggcaggaaaagaagaatggcagccagggcagcagagtcggcactcctcagctgctggccctggtacagcactgggtgcccggggcacggctggtggaggagctgccacacgagctggtgctggtgctgccctacacgggtgcccatgacggcagcttcgccacactcttccgagagctagacacgcggctggcggagctgaggctcactggctacgggatctccgacaccagcctcgaggagatcttcctgaaggtggtggaggagtgtgctgcggacacagatatggaggatggcagctgcgggcagcacctatgcacaggcattgctggcctagacgtaaccctgcggctcaagatgccgccacaggagacagcgctggagaacggggaaccagctgggtcagccccagagactgaccagggctctgggccagacgccgtgggccgggtacagggctgggcactgacccgccagcagctccaggccctgcttctcaagcgctttctgcttgcccgccgcagccgccgcggcctgttcgcccagatcgtgctgcctgccctctttgtgggcctggccctcgtgttcagcctcatcgtgcctcctttcgggcactacccggctctgcggctcagtcccaccatgtacggtgctcaggtgtccttcttcagtgaggacgccccaggggaccctggacgtgcccggctgctcgaggcgctgctgcaggaggcaggactggaggagcccccagtgcagcatagctcccacaggttctcggcaccagaagttcctgctgaagtggccaaggtcttggccagtggcaactggaccccagagtctccatccccagcctgccagtgtagccagcccggtgcccggcgcctgctgcccgactgcccggctgcagctggtggtccccctccgccccaggcagtgaccggctctggggaagtggttcagaacctgacaggccggaacctgtctgacttcctggtcaagacctacccgcgcctggtgcgccagggcctgaagactaagaagtgggtgaatgaggtcaggtacggaggcttctcgctggggggccgagacccaggcctgccctcgggccaagagttgggccgctcagtggaggagttgtgggcgctgctgagtcccctgcctggcggggccctcgaccgtgtcctgaaaaacctcacagcctgggctcacagcctggacgctcaggacagtctcaagatctggttcaacaacaaaggctggcactccatggtggcctttgtcaaccgagccagcaacgcaatcctccgtgctcacctgcccccaggccgggcccgccacgcccacagcatcaccacactcaaccaccccttgaacctcaccaaggagcagctgtctgaggctgcactgatggcctcctcggtggacgtcctcgtctccatctgtgtggtctttgccatgtcctttgtcccggccagcttcactcttgtcctcattgaggagcgagtcacccgagccaagcacctgcagctcatggggggcctgtcccccaccctctactggcttggcaactttctctgggacatgtgtaactacttggtgccagcatgcatcgtggtgctcatctttctggccttccagcagagggcatatgtggcccctgccaacctgcctgctctcctgctgttgctactactgtatggctggtcgatcacaccgctcatgtacccagcctccttcttcttctccgtgcccagcacagcctatgtggtgctcacctgcataaacctctttattggcatcaatggaagcatggccacctttgtgcttgagctcttctctgatcagaagctgcaggaggtgagccggatcttgaaacaggtcttccttatcttcccccacttctgcttgggccgggggctcattgacatggtgcggaaccaggccatggctgatgcctttgagcgcttgggagacaggcagttccagtcacccctgcgctgggaggtggtcggcaagaacctcttggccatggtgatacaggggcccctcttccttctcttcacactactgctgcagcaccgaagccaactcctgccacagcccagggtgaggtctctgccactcctgggagaggaggacgaggatgtagcccgtgaacgggagcgggtggtccaaggagccacccagggggatgtgttggtgctgaggaacttgaccaaggtataccgtgggcagaggatgccagctgttgaccgcttgtgcctggggattccccctggtgagtgttttgggctgctgggtgtgaatggagcagggaagacgtccacgtttcgcatggtgacgggggacacattggccagcaggggcgaggctgtgctggcaggccacagcgtggcccgggaacccagtgctgcgcacctcagcatgggatactgccctcaatccgatgccatctttgagctgctgacgggccgcgagcacctggagctgcttgcgcgcctgcgcggtgtcccggaggcccaggttgcccagaccgctggctcgggcctggcgcgtctgggactctcatggtacgcagaccggcctgcaggcacctacagcggagggaacaaacgcaagctggcgacggccctggcgctggttggggacccagccgtggtgtttctggacgagccgaccacaggcatggaccccagcgcgcggcgcttcctttggaacagccttttggccgtggtgcgggagggccgttcagtgatgctcacctcccataggtgggccgggctctgatgccctgggctgtggttaagcatggaggagtgtgaagcgctctgctcgcgcctagccatcatggtgaatgggcggttccgctgcctgggcagcccgcaacatctcaagggcagattcgcggcgggtcacacactgaccctgcgggtgcccgccgcaaggtcccagccggcagcggccttcgtggcggccgagttccctgggtcggagctgcgcgaggcacatggaggccgcctgcgcttccagctgccgccgggagggcgctgcgccctggcgcgcgtctttggagagctggcggtgcacggcgcagagcacggcgtggaggacttttccgtgagccagacgatgctggaggaggtattcttgtacttctccaaggaccaggggaaggacgaggacaccgaagagcagaaggaggcaggagtgggagtggaccccgcgccaggcctgcagcaccccaaacgcgtcagccagttcctcgatgaccctagcactgccgagactgtgctctgagcctccctcccctgcggggccgcggggaggccctgggaatggcaagggcaaggtagagtgcctaggagccctggactcaggctggcagaggggctggtgccctggagaaaataaagagaaggctggagagaagccgtgctggtgaaaaaaaagca

SEQ ID NO: 55290 - DNA, 5823 bp, Homo sapiens
cgcgcggccccctccagccctctggacactttgtccttcatggaggttggtggtggatgttggccccagggtgttgggctaagccatagggctgtgtcctagtacctggattactgtttaagtcaaccggaccttcgaggagctcaccctgctgagggatgtccgggaggtgtgggagatgctgggaccccggatcttcaccttcatgaacgacagttccaatgtggccatgctgcagcggctcctgcagatgcaggatgaaggaagaaggcagcccagacctggaggccgggaccacatggaggccctgcgatcctttctggaccctgggagcggtggctacagctggcaggacgcacacgctgatgtggggcacctggtgggcacgctgggccgagtgacggagtgcctgtccttggacaagctggaggcggcaccctcagaggcagccctggtgtcgcgggccctgcaactgctcgcggaacatcgattctgggccggcgtcgtcttcttgggacctgaggactcttcagaccccacagagcacccaaccccagacctgggccccggccacgtgcgcatcaaaatccgcatggacattgacgtggtcacgaggaccaataagatcagggacaggttttgggaccctggcccagccgcggaccccctgaccgacctgcgctacgtgtggggcggcttcgtgtacctgcaagacctggtggagcgtgcagccgtccgcgtgctcagcggcgccaacccccgggccggcctctacctgcagcagatgccctatccgtgctatgtggacgacgtgttcctgcgtgtgctgagccggtcgctgccgctcttcctgacgctggcctggatctactccgtgacactgacagtgaaggccgtggtgcgggagaaggagacgcggctgcgggacaccatgcgcgccatggggctcagccgcgcggtgctctggctaggctggttcctcagctgcctcgggcccttcctgctcagcgccgcactgctggttctggtgctcaagctgggagacatcctcccctacagccacccgggcgtggtcttcctgttcttggcagccttcgcggtggccacggtgacccagagcttcctgctcagcgccttcttctcccgcgccaacctggctgcggcctgcggcggcctggcctacttctccctctacctgccctacgtgctgtgtgtggcttggcgggaccggctgcccgcgggtggccgcgtggccgcgagcctgctgtcgcccgtggccttcggcttcggctgcgagagcctggctctgctggaggagcagggcgagggcgcgcagtggcacaacgtgggcacccggcctacggcagacgtcttcagcctggcccaggtctctggccttctgctgctggacgcggcgctctacggcctcgccacctggtacctggaagctgtgtgcccaggccagtacgggatccctgaaccatggaattttccttttcggaggagctactggtgcggacctcggccccccaagagtccagccccttgccccaccccgctggacccaaaggtgctggtagaagaggcaccgcccggcctgagtcctggcgtctccgttcgcagcctggagaagcgctttcctggaagcccgcagccagccctgcgggggctcagcctggacttctaccagggccacatcaccgccttcctgggccacaacggggccggcaagaccaccaccctgtccatcttgagtggcctcttcccacccagtggtggctctgccttcatcctgggccacgacgtccgctccagcatggccgccatccggccccacctgggcgtctgtcctcagtacaacgtgctgtttgacatgctgaccgtggacgagcacgtctggttctatgggcggctgaagggtctgagtgccgctgtagtgggccccgagcaggaccgtctgctgcaggatgtggggctggtctccaagcagagtgtgcagactcgccacctctctggtgggatgcaacggaagctgtccgtggccattgcctttgtgggcggctcccaagttgttatcctggacgagcctacggctggcgtggatcctgcttcccgccgcggtatttgggagctgctgctcaaataccgagaaggtcgcacgctgatcctctccacccaccacctggatgaggcagagctgctgggagaccgtgtggctgtggtggcaggtggccgcttgtgctgctgtggctccccactcttcctgcgccgtcacctgggctccggctactacctgacgctggtgaaggcccgcctgcccctgaccaccaatgagaaggctgacactgacatggagggcagtgtggacaccaggcaggaaaagaagaatggcagccagggcagcagagtcggcactcctcagctgctggccctggtacagcactgggtgcccggggcacggctggtggaggagctgccacacgagctggtgctggtgctgccctacacgggtgcccatgacggcagcttcgccacactcttccgagagctagacacgcggctggcggagctgaggctcactggctacgggatctccgacaccagcctcgaggagatcttcctgaaggtggtggaggagtgtgctgcggacacagatatggaggatggcagctgcgggcagcacctatgcacaggcattgctggcctagacgtaaccctgcggctcaagatgccgccacaggagacagcgctggagaacggggaaccagctgggtcagccccagagactgaccagggctctgggccagacgccgtgggccgggtacagggctgggcactgacccgccagcagctccaggccctgcttctcaagcgctttctgcttgcccgccgcagccgccgcggcctgttcgcccagatcgtgctgcctgccctctttgtgggcctggccctcgtgttcagcctcatcgtgcctcctttcgggcactacccggctctgcggctcagtcccaccatgtacggtgctcaggtgtccttcttcagtgaggacgccccaggggaccctggacgtgcccggctgctcgaggcgctgctgcaggaggcaggactggaggagcccccagtgcagcatagctcccacaggttctcggcaccagaagttcctgctgaagtggccaaggtcttggccagtggcaactggaccccagagtctccatccccagcctgccagtgtagccagcccggtgcccggcgcctgctgcccgactgcccggctgcagctggtggtccccctccgccccaggcagtgaccggctctggggaagtggttcagaacctgacaggccggaacctgtctgacttcctggtcaagacctacccgcgcctggtgcgccagggcctgaagactaagaagtgggtgaatgaggtcaggtacggaggcttctcgctggggggccgagacccaggcctgccctcgggccaagagttgggccgctcagtggaggagttgtgggcgctgctgagtcccctgcctggcggggccctcgaccgtgtcctgaaaaacctcacagcctgggctcacagcctggacgctcaggacagtctcaagatctggttcaacaacaaaggctggcactccatggtggcctttgtcaaccgagccagcaacgcaatcctccgtgctcacctgcccccaggccgggcccgccacgcccacagcatcaccacactcaaccaccccttgaacctcaccaaggagcagctgtctgaggctgcactgatggcctcctcggtggacgtcctcgtctccatctgtgtggtctttgccatgtcctttgtcccggccagcttcactcttgtcctcattgaggagcgagtcacccgagccaagcacctgcagctcatggggggcctgtcccccaccctctactggcttggcaactttctctgggacatgtgtaactacttggtgccagcatgcatcgtggtgctcatctttctggccttccagcagagggcatatgtggcccctgccaacctgcctgctctcctgctgttgctactactgtatggctggtcgatcacaccgctcatgtacccagcctccttcttcttctccgtgcccagcacagcctatgtggtgctcacctgcataaacctctttattggcatcaatggaagcatggccacctttgtgcttgagctcttctctgatcagaagctgcaggaggtgagccggatcttgaaacaggtcttccttatcttcccccacttctgcttgggccgggggctcattgacatggtgcggaaccaggccatggctgatgcctttgagcgcttgggagacaggcagttccagtcacccctgcgctgggaggtggtcggcaagaacctcttggccatggtgatacaggggcccctcttccttctcttcacactactgctgcagcaccgaagccaactcctgccacagcccagggtgaggtctctgccactcctgggagaggaggacgaggatgtagcccgtgaacgggagcgggtggtccaaggagccacccagggggatgtgttggtgctgaggaacttgaccaaggtataccgtgggcagaggatgccagctgttgaccgcttgtgcctggggattccccctggtgagtgttttgggctgctgggtgtgaatggagcagggaagacgtccacgtttcgcatggtgacgggggacacattggccagcaggggcgaggctgtgctggcaggccacagcgtggcccgggaacccagtgctgcgcacctcagcatgggatactgccctcaatccgatgccatctttgagctgctgacgggccgcgagcacctggagctgcttgcgcgcctgcgcggtgtcccggaggcccaggttgcccagaccgctggctcgggcctggcgcgtctgggactctcatggtacgcagaccggcctgcaggcacctacagcggagggaacaaacgcaagctggcgacggccctggcgctggttggggacccagccgtggtgtttctggacgagccgaccacaggcatggaccccagcgcgcggcgcttcctttggaacagccttttggccgtggtgcgggagggccgttcagtgatgctcacctcccataggtgggccgggctctgatgccctgggctgtggttaagcatggaggagtgtgaagcgctctgctcgcgcctagccatcatggtgaatgggcggttccgctgcctgggcagcccgcaacatctcaagggcagattcgcggcgggtcacacactgaccctgcgggtgcccgccgcaaggtcccagccggcagcggccttcgtggcggccgagttccctgggtcggagctgcgcgaggcacatggaggccgcctgcgcttccagctgccgccgggagggcgctgcgccctggcgcgcgtctttggagagctggcggtgcacggcgcagagcacggcgtggaggacttttccgtgagccagacgatgctggaggaggtattcttgtacttctccaaggaccaggggaaggacgaggacaccgaagagcagaaggaggcaggagtgggagtggaccccgcgccaggcctgcagcaccccaaacgcgtcagccagttcctcgatgaccctagcactgccgagactgtgctctgagcctccctcccctgcggggccgcggggaggccctgggaatggcaagggcaaggtagagtgcctaggagccctggactcaggctggcagaggggctggtgccctggagaaaataaagagaaggctggagagaagccgtgctggtgaaaaaaaagca

SEQ ID NO: 55291 - DNA, 2445 bp, Homo sapiens
ggtgtatgtgccagaccttaatcctgttatatctggatacattaaaagcgtgtacggaggcttctcgctggggggccgagacccaggcctgccctcgggccaagagttgggccgctcagtggaggagttgtgggcgctgctgagtcccctgcctggcggggccctcgaccgtgtcctgaaaaacctcacagcctgggctcacagcctggacgctcaggacagtctcaagatctggttcaacaacaaaggctggcactccatggtggcctttgtcaaccgagccagcaacgcaatcctccgtgctcacctgcccccaggccgggcccgccacgcccacagcatcaccacactcaaccaccccttgaacctcaccaaggagcagctgtctgaggctgcactgatggcctcctcggtggacgtcctcgtctccatctgtgtggtctttgccatgtcctttgtcccggccagcttcactcttgtcctcattgaggagcgagtcacccgagccaagcacctgcagctcatggggggcctgtcccccaccctctactggcttggcaactttctctgggacatgtgtaactacttggtgccagcatgcatcgtggtgctcatctttctggccttccagcagagggcatatgtggcccctgccaacctgcctgctctcctgctgttgctactactgtatggctggtcgatcacaccgctcatgtacccagcctccttcttcttctccgtgcccagcacagcctatgtggtgctcacctgcataaacctctttattggcatcaatggaagcatggccacctttgtgcttgagctcttctctgatcagaagctgcaggaggtgagccggatcttgaaacaggtcttccttatcttcccccacttctgcttgggccgggggctcattgacatggtgcggaaccaggccatggctgatgcctttgagcgcttgggagacaggcagttccagtcacccctgcgctgggaggtggtcggcaagaacctcttggccatggtgatacaggggcccctcttccttctcttcacactactgctgcagcaccgaagccaactcctgccacagcccagggtgaggtctctgccactcctgggagaggaggacgaggatgtagcccgtgaacgggagcgggtggtccaaggagccacccagggggatgtgttggtgctgaggaacttgaccaaggtataccgtgggcagaggatgccagctgttgaccgcttgtgcctggggattccccctggtgagtgttttgggctgctgggtgtgaatggagcagggaagacgtccacgtttcgcatggtgacgggggacacattggccagcaggggcgaggctgtgctggcaggccacagcgtggcccgggaacccagtgctgcgcacctcagcatgggatactgccctcaatccgatgccatctttgagctgctgacgggccgcgagcacctggagctgcttgcgcgcctgcgcggtgtcccggaggcccaggttgcccagaccgctggctcgggcctggcgcgtctgggactctcatggtacgcagaccggcctgcaggcacctacagcggagggaacaaacgcaagctggcgacggccctggcgctggttggggacccagccgtggtgtttctggacgagccgaccacaggcatggaccccagcgcgcggcgcttcctttggaacagccttttggccgtggtgcgggagggccgttcagtgatgctcacctcccataggtgggccgggctctgatgccctgggctgtggttaagcatggaggagtgtgaagcgctctgctcgcgcctagccatcatggtgaatgggcggttccgctgcctgggcagcccgcaacatctcaagggcagattcgcggcgggtcacacactgaccctgcgggtgcccgccgcaaggtcccagccggcagcggccttcgtggcggccgagttccctgggtcggagctgcgcgaggcacatggaggccgcctgcgcttccagctgccgccgggagggcgctgcgccctggcgcgcgtctttggagagctggcggtgcacggcgcagagcacggcgtggaggacttttccgtgagccagacgatgctggaggaggtattcttgtacttctccaaggaccaggggaaggacgaggacaccgaagagcagaaggaggcaggagtgggagtggaccccgcgccaggcctgcagcaccccaaacgcgtcagccagttcctcgatgaccctagcactgccgagactgtgctctgagcctccctcccctgcggggccgcggggaggccctgggaatggcaagggcaaggtagagtgcctaggagccctggactcaggctggcagaggggctggtgccctggagaaaataaagagaaggctggagagaagccgtgctggtgaaaaaaaagca

SEQ ID NO: 55292 - DNA, 5271 bp, Homo sapiens
tcagtttccctatttgtaaagtgggggctatgatagtatggtctgcctgggaactggccagagcgctggacccctagtgagtgttcaaaatcattgtcccccttgtggtctttctccccaggaatccctggggttggcactgggccaagcccaggagcccttgcacagcttgttggaggccgctgaggacctggcccaggagctcctggcgctgcgcagcctggtggagcttcgggcactgctgcagagaccccgagggaccagcggccccctggagttgctgtcagaggccctctgcagtgtcaggggacctagcagcacagtgggcccctccctcaactggtacgaggctagtgacctgatggagctggtggggcaggagccagaatccgccctgccagacagcagcctgagccccgcctgctcggagctgattggagccctggacagccacccgctgtcccgcctgctctggagacgcctgaagcctctgatcctcgggaagctactctttgcaccagatacaccttttacccggaagctcatggcccaggtcaaccggaccttcgaggagctcaccctgctgagggatgtccgggaggtgtgggagatgctgggaccccggatcttcaccttcatgaacgacagttccaatgtggccatgctgcagcggctcctgcagatgcaggatgaaggaagaaggcagcccagacctggaggccgggaccacatggaggccctgcgatcctttctggaccctgggagcggtggctacagctggcaggacgcacacgctgatgtggggcacctggtgggcacgctgggccgagtgacggagtgcctgtccttggacaagctggaggcggcaccctcagaggcagccctggtgtcgcgggccctgcaactgctcgcggaacatcgattctgggccggcgtcgtcttcttgggacctgaggactcttcagaccccacagagcacccaaccccagacctgggccccggccacgtgcgcatcaaaatccgcatggacattgacgtggtcacgaggaccaataagatcagggacaggttttgggaccctggcccagccgcggaccccctgaccgacctgcgctacgtgtggggcggcttcgtgtacctgcaagacctggtggagcgtgcagccgtccgcgtgctcagcggcgccaacccccgggccggcctctacctgcagcagatgccctatccgtgctatgtggacgacgtgttcctgcgtgtgctgagccggtcgctgccgctcttcctgacgctggcctggatctactccgtgacactgacagtgaaggccgtggtgcgggagaaggagacgcggctgcgggacaccatgcgcgccatggggctcagccgcgcggtgctctggctaggctggttcctcagctgcctcgggcccttcctgctcagcgccgcactgctggttctggtgctcaagctgggagacatcctcccctacagccacccgggcgtggtcttcctgttcttggcagccttcgcggtggccacggtgacccagagcttcctgctcagcgccttcttctcccgcgccaacctggctgcggcctgcggcggcctggcctacttctccctctacctgccctacgtgctgtgtgtggcttggcgggaccggctgcccgcgggtggccgcgtggccgcgagcctgctgtcgcccgtggccttcggcttcggctgcgagagcctggctctgctggaggagcagggcgagggcgcgcagtggcacaacgtgggcacccggcctacggcagacgtcttcagcctggcccaggtctctggccttctgctgctggacgcggcgctctacggcctcgccacctggtacctggaagctgtgtgcccaggccagtacgggatccctgaaccatggaattttccttttcggaggagctactggtgcggacctcggccccccaagagtccagccccttgccccaccccgctggacccaaaggtgctggtagaagaggcaccgcccggcctgagtcctggcgtctccgttcgcagcctggagaagcgctttcctggaagcccgcagccagccctgcgggggctcagcctggacttctaccagggccacatcaccgccttcctgggccacaacggggccggcaagaccaccaccctgtccatcttgagtggcctcttcccacccagtggtggctctgccttcatcctgggccacgacgtccgctccagcatggccgccatccggccccacctgggcgtctgtcctcagtacaacgtgctgtttgacatgctgaccgtggacgagcacgtctggttctatgggcggctgaagggtctgagtgccgctgtagtgggccccgagcaggaccgtctgctgcaggatgtggggctggtctccaagcagagtgtgcagactcgccacctctctggtgggatgcaacggaagctgtccgtggccattgcctttgtgggcggctcccaagttgttatcctggacgagcctacggctggcgtggatcctgcttcccgccgcggtatttgggagctgctgctcaaataccgagaaggtcgcacgctgatcctctccacccaccacctggatgaggcagagctgctgggagaccgtgtggctgtggtggcaggtggccgcttgtgctgctgtggctccccactcttcctgcgccgtcacctgggctccggctactacctgacgctggtgaaggcccgcctgcccctgaccaccaatgagaaggctgacactgacatggagggcagtgtggacaccaggcaggaaaagaagaatggcagccagggcagcagagtcggcactcctcagctgctggccctggtacagcactgggtgcccggggcacggctggtggaggagctgccacacgagctggtgctggtgctgccctacacgggtgcccatgacggcagcttcgccacactcttccgagagctagacacgcggctggcggagctgaggctcactggctacgggatctccgacaccagcctcgaggagatcttcctgaaggtggtggaggagtgtgctgcggacacagatatggaggatggcagctgcgggcagcacctatgcacaggcattgctggcctagacgtaaccctgcggctcaagatgccgccacaggagacagcgctggagaacggggaaccagctgggtcagccccagagactgaccagggctctgggccagacgccgtgggccgggtacagggctgggcactgacccgccagcagctccaggccctgcttctcaagcgctttctgcttgcccgccgcagccgccgcggcctgttcgcccagatcgtgctgcctgccctctttgtgggcctggccctcgtgttcagcctcatcgtgcctcctttcgggcactacccggctctgcggctcagtcccaccatgtacggtgctcaggtgtccttcttcagtgaggacgccccaggggaccctggacgtgcccggctgctcgaggcgctgctgcaggaggcaggactggaggagcccccagtgcagcatagctcccacaggttctcggcaccagaagttcctgctgaagtggccaaggtcttggccagtggcaactggaccccagagtctccatccccagcctgccagtgtagccagcccggtgcccggcgcctgctgcccgactgcccggctgcagctggtggtccccctccgccccaggcagtgaccggctctggggaagtggttcagaacctgacaggccggaacctgtctgacttcctggtcaagacctacccgcgcctggtgcgccagggcctgaagactaagaagtgggtgaatgaggtcaggtacggaggcttctcgctggggggccgagacccaggcctgccctcgggccaagagttgggccgctcagtggaggagttgtgggcgctgctgagtcccctgcctggcggggccctcgaccgtgtcctgaaaaacctcacagcctgggctcacagcctggacgctcaggacagtctcaagatctggttcaacaacaaaggctggcactccatggtggcctttgtcaaccgagccagcaacgcaatcctccgtgctcacctgcccccaggccgggcccgccacgcccacagcatcaccacactcaaccaccccttgaacctcaccaaggagcagctgtctgaggctgcactgatggcctcctcggtggacgtcctcgtctccatctgtgtggtctttgccatgtcctttgtcccggccagcttcactcttgtcctcattgaggagcgagtcacccgagccaagcacctgcagctcatggggggcctgtcccccaccctctactggcttggcaactttctctgggacatgtgtaactacttggtgccagcatgcatcgtggtgctcatctttctggccttccagcagagggcatatgtggcccctgccaacctgcctgctctcctgctgttgctactactgtatggctggtcgatcacaccgctcatgtacccagcctccttcttcttctccgtgcccagcacagcctatgtggtgctcacctgcataaacctctttattggcatcaatggaagcatggccacctttgtgcttgagctcttctctgatcagaagctgcaggaggtgagccggatcttgaaacaggtcttccttatcttcccccacttctgcttgggccgggggctcattgacatggtgcggaaccaggccatggctgatgcctttgagcgcttgggagacaggcagttccagtcacccctgcgctgggaggtggtcggcaagaacctcttggccatggtgatacaggggcccctcttccttctcttcacactactgctgcagcaccgaagccaactcctgccacagcccagggtgaggtctctgccactcctgggagaggaggacgaggatgtagcccgtgaacgggagcgggtggtccaaggagccacccagggggatgtgttggtgctgaggaacttgaccaaggtataccgtgggcagaggatgccagctgttgaccgcttgtgcctggggattccccctggtgaggtgagtccaggggtggaggccaggtgcagggacagtgagtggctgccctactgcatgccctgcccatcatcctttactgaacacctactgtgtatccaccaccttttattgggcacctactgtatgccaatatttgtgctcctatttttattttattatattattatttatttaaaaaaaaaaaa

SEQ ID NO: 55293 - DNA, 6198 bp, Homo sapiens
tcagtttccctatttgtaaagtgggggctatgatagtatggtctgcctgggaactggccagagcgctggacccctagtgagtgttcaaaatcattgtcccccttgtggtctttctccccaggaatccctggggttggcactgggccaagcccaggagcccttgcacagcttgttggaggccgctgaggacctggcccaggagctcctggcgctgcgcagcctggtggagcttcgggcactgctgcagagaccccgagggaccagcggccccctggagttgctgtcagaggccctctgcagtgtcaggggacctagcagcacagtgggcccctccctcaactggtacgaggctagtgacctgatggagctggtggggcaggagccagaatccgccctgccagacagcagcctgagccccgcctgctcggagctgattggagccctggacagccacccgctgtcccgcctgctctggagacgcctgaagcctctgatcctcgggaagctactctttgcaccagatacaccttttacccggaagctcatggcccaggtcaaccggaccttcgaggagctcaccctgctgagggatgtccgggaggtgtgggagatgctgggaccccggatcttcaccttcatgaacgacagttccaatgtggccatgctgcagcggctcctgcagatgcaggatgaaggaagaaggcagcccagacctggaggccgggaccacatggaggccctgcgatcctttctggaccctgggagcggtggctacagctggcaggacgcacacgctgatgtggggcacctggtgggcacgctgggccgagtgacggagtgcctgtccttggacaagctggaggcggcaccctcagaggcagccctggtgtcgcgggccctgcaactgctcgcggaacatcgattctgggccggcgtcgtcttcttgggacctgaggactcttcagaccccacagagcacccaaccccagacctgggccccggccacgtgcgcatcaaaatccgcatggacattgacgtggtcacgaggaccaataagatcagggacaggttttgggaccctggcccagccgcggaccccctgaccgacctgcgctacgtgtggggcggcttcgtgtacctgcaagacctggtggagcgtgcagccgtccgcgtgctcagcggcgccaacccccgggccggcctctacctgcagcagatgccctatccgtgctatgtggacgacgtgttcctgcgtgtgctgagccggtcgctgccgctcttcctgacgctggcctggatctactccgtgacactgacagtgaaggccgtggtgcgggagaaggagacgcggctgcgggacaccatgcgcgccatggggctcagccgcgcggtgctctggctaggctggttcctcagctgcctcgggcccttcctgctcagcgccgcactgctggttctggtgctcaagctgggagacatcctcccctacagccacccgggcgtggtcttcctgttcttggcagccttcgcggtggccacggtgacccagagcttcctgctcagcgccttcttctcccgcgccaacctggctgcggcctgcggcggcctggcctacttctccctctacctgccctacgtgctgtgtgtggcttggcgggaccggctgcccgcgggtggccgcgtggccgcgagcctgctgtcgcccgtggccttcggcttcggctgcgagagcctggctctgctggaggagcagggcgagggcgcgcagtggcacaacgtgggcacccggcctacggcagacgtcttcagcctggcccaggtctctggccttctgctgctggacgcggcgctctacggcctcgccacctggtacctggaagctgtgtgcccaggccagtacgggatccctgaaccatggaattttccttttcggaggagctactggtgcggacctcggccccccaagagtccagccccttgccccaccccgctggacccaaaggtgctggtagaagaggcaccgcccggcctgagtcctggcgtctccgttcgcagcctggagaagcgctttcctggaagcccgcagccagccctgcgggggctcagcctggacttctaccagggccacatcaccgccttcctgggccacaacggggccggcaagaccaccaccctgtccatcttgagtggcctcttcccacccagtggtggctctgccttcatcctgggccacgacgtccgctccagcatggccgccatccggccccacctgggcgtctgtcctcagtacaacgtgctgtttgacatgctgaccgtggacgagcacgtctggttctatgggcggctgaagggtctgagtgccgctgtagtgggccccgagcaggaccgtctgctgcaggatgtggggctggtctccaagcagagtgtgcagactcgccacctctctggtgggatgcaacggaagctgtccgtggccattgcctttgtgggcggctcccaagttgttatcctggacgagcctacggctggcgtggatcctgcttcccgccgcggtatttgggagctgctgctcaaataccgagaaggtcgcacgctgatcctctccacccaccacctggatgaggcagagctgctgggagaccgtgtggctgtggtggcaggtggccgcttgtgctgctgtggctccccactcttcctgcgccgtcacctgggctccggctactacctgacgctggtgaaggcccgcctgcccctgaccaccaatgagaaggctgacactgacatggagggcagtgtggacaccaggcaggaaaagaagaatggcagccagggcagcagagtcggcactcctcagctgctggccctggtacagcactgggtgcccggggcacggctggtggaggagctgccacacgagctggtgctggtgctgccctacacgggtgcccatgacggcagcttcgccacactcttccgagagctagacacgcggctggcggagctgaggctcactggctacgggatctccgacaccagcctcgaggagatcttcctgaaggtggtggaggagtgtgctgcggacacagatatggaggatggcagctgcgggcagcacctatgcacaggcattgctggcctagacgtaaccctgcggctcaagatgccgccacaggagacagcgctggagaacggggaaccagctgggtcagccccagagactgaccagggctctgggccagacgccgtgggccgggtacagggctgggcactgacccgccagcagctccaggccctgcttctcaagcgctttctgcttgcccgccgcagccgccgcggcctgttcgcccagatcgtgctgcctgccctctttgtgggcctggccctcgtgttcagcctcatcgtgcctcctttcgggcactacccggctctgcggctcagtcccaccatgtacggtgctcaggtgtccttcttcagtgaggacgccccaggggaccctggacgtgcccggctgctcgaggcgctgctgcaggaggcaggactggaggagcccccagtgcagcatagctcccacaggttctcggcaccagaagttcctgctgaagtggccaaggtcttggccagtggcaactggaccccagagtctccatccccagcctgccagtgtagccagcccggtgcccggcgcctgctgcccgactgcccggctgcagctggtggtccccctccgccccaggcagtgaccggctctggggaagtggttcagaacctgacaggccggaacctgtctgacttcctggtcaagacctacccgcgcctggtgcgccagggcctgaagactaagaagtgggtgaatgaggtcaggtacggaggcttctcgctggggggccgagacccaggcctgccctcgggccaagagttgggccgctcagtggaggagttgtgggcgctgctgagtcccctgcctggcggggccctcgaccgtgtcctgaaaaacctcacagcctgggctcacagcctggacgctcaggacagtctcaagatctggttcaacaacaaaggctggcactccatggtggcctttgtcaaccgagccagcaacgcaatcctccgtgctcacctgcccccaggccgggcccgccacgcccacagcatcaccacactcaaccaccccttgaacctcaccaaggagcagctgtctgaggctgcactgatggcctcctcggtggacgtcctcgtctccatctgtgtggtctttgccatgtcctttgtcccggccagcttcactcttgtcctcattgaggagcgagtcacccgagccaagcacctgcagctcatggggggcctgtcccccaccctctactggcttggcaactttctctgggacatgtgtaactacttggtgccagcatgcatcgtggtgctcatctttctggccttccagcagagggcatatgtggcccctgccaacctgcctgctctcctgctgttgctactactgtatggctggtcgatcacaccgctcatgtacccagcctccttcttcttctccgtgcccagcacagcctatgtggtgctcacctgcataaacctctttattggcatcaatggaagcatggccacctttgtgcttgagctcttctctgatcagaagctgcaggaggtgagccggatcttgaaacaggtcttccttatcttcccccacttctgcttgggccgggggctcattgacatggtgcggaaccaggccatggctgatgcctttgagcgcttgggagacaggcagttccagtcacccctgcgctgggaggtggtcggcaagaacctcttggccatggtgatacaggggcccctcttccttctcttcacactactgctgcagcaccgaagccaactcctgccacagcccagggtgaggtctctgccactcctgggagaggaggacgaggatgtagcccgtgaacgggagcgggtggtccaaggagccacccagggggatgtgttggtgctgaggaacttgaccaaggtataccgtgggcagaggatgccagctgttgaccgcttgtgcctggggattccccctggtgagtgttttgggctgctgggtgtgaatggagcagggaagacgtccacgtttcgcatggtgacgggggacacattggccagcaggggcgaggctgtgctggcaggccacagcgtggcccgggaacccagtgctgcgcacctcagcatgggatactgccctcaatccgatgccatctttgagctgctgacgggccgcgagcacctggagctgcttgcgcgcctgcgcggtgtcccggaggcccaggttgcccagaccgctggctcgggcctggcgcgtctgggactctcatggtacgcagaccggcctgcaggcacctacagcggagggaacaaacgcaagctggcgacggccctggcgctggttggggacccagccgtggtgtttctggacgagccgaccacaggcatggaccccagcgcgcggcgcttcctttggaacagccttttggccgtggtgcgggagggccgttcagtgatgctcacctcccatagcatggaggagtgtgaagcgctctgctcgcgcctagccatcatggtgaatgggcggttccgctgcctgggcagcccgcaacatctcaagggcagattcgcggcgggtcacacactgaccctgcgggtgcccgccgcaaggtcccagccggcagcggccttcgtggcggccgagttccctgggtcggagctgcgcgaggcacatggaggccgcctgcgcttccagctgccgccgggagggcgctgcgccctggcgcgcgtctttggagagctggcggtgcacggcgcagagcacggcgtggaggacttttccgtgagccagacgatgctggaggaggaccaggggaaggacgaggacaccgaagagcagaaggaggcaggagtgggagtggaccccgcgccaggcctgcagcaccccaaacgcgtcagccagttcctcgatgaccctagcactgccgagactgtgctctgagcctccctcccctgcggggccgcggggaggccctgggaatggcaagggcaaggtagagtgcctaggagccctggactcaggctggcagaggggctggtgccctggagaaaataaagagaaggctggagagaagccgtgctggtgaaaaaaaagca

SEQ ID NO: 55294 - DNA, 4954 bp, Homo sapiens
tcagtttccctatttgtaaagtgggggctatgatagtatggtctgcctgggaactggccagagcgctggacccctagtgagtgttcaaaatcattgtcccccttgtggtctttctccccaggaatccctggggttggcactgggccaagcccaggagcccttgcacagcttgttggaggccgctgaggacctggcccaggagctcctggcgctgcgcagcctggtggagcttcgggcactgctgcagagaccccgagggaccagcggccccctggagttgctgtcagaggccctctgcagtgtcaggggacctagcagcacagtgggcccctccctcaactggtacgaggctagtgacctgatggagctggtggggcaggagccagaatccgccctgccagacagcagcctgagccccgcctgctcggagctgattggagccctggacagccacccgctgtcccgcctgctctggagacgcctgaagcctctgatcctcgggaagctactctttgcaccagatacaccttttacccggaagctcatggcccaggtcaaccggaccttcgaggagctcaccctgctgagggatgtccgggaggtgtgggagatgctgggaccccggatcttcaccttcatgaacgacagttccaatgtggccatgctgcagcggctcctgcagatgcaggatgaaggaagaaggcagcccagacctggaggccgggaccacatggaggccctgcgatcctttctggaccctgggagcggtggctacagctggcaggacgcacacgctgatgtggggcacctggtgggcacgctgggccgagtgacggagtgcctgtccttggacaagctggaggcggcaccctcagaggcagccctggtgtcgcgggccctgcaactgctcgcggaacatcgattctgggccggcgtcgtcttcttgggacctgaggactcttcagaccccacagagcacccaaccccagacctgggccccggccacgtgcgcatcaaaatccgcatggacattgacgtggtcacgaggaccaataagatcagggacaggttttgggaccctggcccagccgcggaccccctgaccgacctgcgctacgtgtggggcggcttcgtgtacctgcaagacctggtggagcgtgcagccgtccgcgtgctcagcggcgccaacccccgggccggcctctacctgcagcagatgccctatccgtgctatgtggacgacgtgttcctgcgtgtgctgagccggtcgctgccgctcttcctgacgctggcctggatctactccgtgacactgacagtgaaggccgtggtgcgggagaaggagacgcggctgcgggacaccatgcgcgccatggggctcagccgcgcggtgctctggctaggctggttcctcagctgcctcgggcccttcctgctcagcgccgcactgctggttctggtgctcaagctgggagacatcctcccctacagccacccgggcgtggtcttcctgttcttggcagccttcgcggtggccacggtgacccagagcttcctgctcagcgccttcttctcccgcgccaacctggctgcggcctgcggcggcctggcctacttctccctctacctgccctacgtgctgtgtgtggcttggcgggaccggctgcccgcgggtggccgcgtggccgcgagcctgctgtcgcccgtggccttcggcttcggctgcgagagcctggctctgctggaggagcagggcgagggcgcgcagtggcacaacgtgggcacccggcctacggcagacgtcttcagcctggcccaggtctctggccttctgctgctggacgcggcgctctacggcctcgccacctggtacctggaagctgtgtgcccaggccagtacgggatccctgaaccatggaattttccttttcggaggagctactggtgcggacctcggccccccaagagtccagccccttgccccaccccgctggacccaaaggtgctggtagaagaggcaccgcccggcctgagtcctggcgtctccgttcgcagcctggagaagcgctttcctggaagcccgcagccagccctgcgggggctcagcctggacttctaccagggccacatcaccgccttcctgggccacaacggggccggcaagaccaccaccctgtccatcttgagtggcctcttcccacccagtggtggctctgccttcatcctgggccacgacgtccgctccagcatggccgccatccggccccacctgggcgtctgtcctcagtacaacgtgctgtttgacatgctgaccgtggacgagcacgtctggttctatgggcggctgaagggtctgagtgccgctgtagtgggccccgagcaggaccgtctgctgcaggatgtggggctggtctccaagcagagtgtgcagactcgccacctctctggtgggatgcaacggaagctgtccgtggccattgcctttgtgggcggctcccaagttgttatcctggacgagcctacggctggcgtggatcctgcttcccgccgcggtatttgggagctgctgctcaaataccgagaaggtcgcacgctgatcctctccacccaccacctggatgaggcagagctgctgggagaccgtgtggctgtggtggcaggtggccgcttgtgctgctgtggctccccactcttcctgcgccgtcacctgggctccggctactacctgacgctggtgaaggcccgcctgcccctgaccaccaatgagaaggctgacactgacatggagggcagtgtggacaccaggcaggaaaagaagaatggcagccagggcagcagagtcggcactcctcagctgctggccctggtacagcactgggtgcccggggcacggctggtggaggagctgccacacgagctggtgctggtgctgccctacacgggtgcccatgacggcagcttcgccacactcttccgagagctagacacgcggctggcggagctgaggctcactggctacgggatctccgacaccagcctcgaggagatcttcctgaaggtggtggaggagtgtgctgcggacacagatatggaggatggcagctgcgggcagcacctatgcacaggcattgctggcctagacgtaaccctgcggctcaagatgccgccacaggagacagcgctggagaacggggaaccagctgggtcagccccagagactgaccagggctctgggccagacgccgtgggccgggtacagggctgggcactgacccgccagcagctccaggccctgcttctcaagcgctttctgcttgcccgccgcagccgccgcggcctgttcgcccagatcgtgctgcctgccctctttgtgggcctggccctcgtgttcagcctcatcgtgcctcctttcgggcactacccggctctgcggctcagtcccaccatgtacggtgctcaggtgtccttcttcagtgaggacgccccaggggaccctggacgtgcccggctgctcgaggcgctgctgcaggaggcaggactggaggagcccccagtgcagcatagctcccacaggttctcggcaccagaagttcctgctgaagtggccaaggtcttggccagtggcaactggaccccagagtctccatccccagcctgccagtgtagccagcccggtgcccggcgcctgctgcccgactgcccggctgcagctggtggtccccctccgccccaggcagtgaccggctctggggaagtggttcagaacctgacaggccggaacctgtctgacttcctggtcaagacctacccgcgcctggtgcgccagggcctgaagactaagaagtgggtgaatgaggtcaggtacggaggcttctcgctggggggccgagacccaggcctgccctcgggccaagagttgggccgctcagtggaggagttgtgggcgctgctgagtcccctgcctggcggggccctcgaccgtgtcctgaaaaacctcacagcctgggctcacagcctggacgctcaggacagtctcaagatctggttcaacaacaaaggctggcactccatggtggcctttgtcaaccgagccagcaacgcaatcctccgtgctcacctgcccccaggccgggcccgccacgcccacagcatcaccacactcaaccaccccttgaacctcaccaaggagcagctgtctgaggctgcactgatggcctcctcggtggacgtcctcgtctccatctgtgtggtctttgccatgtcctttgtcccggccagcttcactcttgtcctcattgaggagcgagtcacccgagccaagcacctgcagctcatggggggcctgtcccccaccctctactggcttggcaactttctctgggacatgtgtaactacttggtgccagcatgcatcgtggtgctcatctttctggccttccagcagagggcatatgtggcccctgccaacctgcctgctctcctgctgttgctactactgtatggctggtcgatcacaccgctcatgtacccagcctccttcttcttctccgtgcccagcacagcctatgtggtgctcacctgcataaacctctttattggcatcaatggaagcatggccacctttgtgcttgagctcttctctgatcagaagctgcaggaggtgagccggatcttgaaacaggtcttccttatcttcccccacttctgcttgggccgggggctcattgacatggtgcggaaccaggccatggctgatgcctttgagcgcttgggagacaggcagttccagtcacccctgcgctgggaggtggtcggcaagaacctcttggccatggtgatacaggggcccctcttccttctcttcacactactgctgcagcaccgaagccaactcctgccacagccccctgggtggctccttggaccacccgctcccgttcacgggctacatcct

SEQ ID NO: 55295 - DNA, 641 bp, Homo sapiens
tcaagtggggtgatagcttcgagagcaacctgggcaacctagggagaccccatctctataaaaaatttaaaaattagctggacatggtgattcgcggcgggtcacacactgaccctgcgggtgcccgccgcaaggtcccagccggcagcggccttcgtggcggccgagttccctgggtcggagctgcgcgaggcacatggaggccgcctgcgcttccagctgccgccgggagggcgctgcgccctggcgcgcgtctttggagagctggcggtgcacggcgcagagcacggcgtggaggacttttccgtgagccagacgatgctggaggaggtattcttgtacttctccaaggaccaggggaaggacgaggacaccgaagagcagaaggaggcaggagtgggagtggaccccgcgccaggcctgcagcaccccaaacgcgtcagccagttcctcgatgaccctagcactgccgagactgtgctctgagcctccctcccctgcggggccgcggggaggccctgggaatggcaagggcaaggtagagtgcctaggagccctggactcaggctggcagaggggctggtgccctggagaaaataaagagaaggctggagagaagccgtgctggtgaaaaaaaagca

SEQ ID NO: 55296 - DNA, 4847 bp, Homo sapiens
tcagtttccctatttgtaaagtgggggctatgatagtatggtctgcctgggaactggccagagcgctggacccctagtgagtgttcaaaatcattgtcccccttgtggtctttctccccaggaatccctggggttggcactgggccaagcccaggagcccttgcacagcttgttggaggccgctgaggacctggcccaggagctcctggcgctgcgcagcctggtggagcttcgggcactgctgcagagaccccgagggaccagcggccccctggagttgctgtcagaggccctctgcagtgtcaggggacctagcagcacagtgggcccctccctcaactggtacgaggctagtgacctgatggagctggtggggcaggagccagaatccgccctgccagacagcagcctgagccccgcctgctcggagctgattggagccctggacagccacccgctgtcccgcctgctctggagacgcctgaagcctctgatcctcgggaagctactctttgcaccagatacaccttttacccggaagctcatggcccaggtcaaccggaccttcgaggagctcaccctgctgagggatgtccgggaggtgtgggagatgctgggaccccggatcttcaccttcatgaacgacagttccaatgtggccatgctgcagcggctcctgcagatgcaggatgaaggaagaaggcagcccagacctggaggccgggaccacatggaggccctgcgatcctttctggaccctgggagcggtggctacagctggcaggacgcacacgctgatgtggggcacctggtgggcacgctgggccgagtgacggagtgcctgtccttggacaagctggaggcggcaccctcagaggcagccctggtgtcgcgggccctgcaactgctcgcggaacatcgattctgggccggcgtcgtcttcttgggacctgaggactcttcagaccccacagagcacccaaccccagacctgggccccggccacgtgcgcatcaaaatccgcatggacattgacgtggtcacgaggaccaataagatcagggacaggttttgggaccctggcccagccgcggaccccctgaccgacctgcgctacgtgtggggcggcttcgtgtacctgcaagacctggtggagcgtgcagccgtccgcgtgctcagcggcgccaacccccgggccggcctctacctgcagcagatgccctatccgtgctatgtggacgacgtgttcctgcgtgtgctgagccggtcgctgccgctcttcctgacgctggcctggatctactccgtgacactgacagtgaaggccgtggtgcgggagaaggagacgcggctgcgggacaccatgcgcgccatggggctcagccgcgcggtgctctggctaggctggttcctcagctgcctcgggcccttcctgctcagcgccgcactgctggttctggtgctcaagctgggagacatcctcccctacagccacccgggcgtggtcttcctgttcttggcagccttcgcggtggccacggtgacccagagcttcctgctcagcgccttcttctcccgcgccaacctggctgcggcctgcggcggcctggcctacttctccctctacctgccctacgtgctgtgtgtggcttggcgggaccggctgcccgcgggtggccgcgtggccgcgagcctgctgtcgcccgtggccttcggcttcggctgcgagagcctggctctgctggaggagcagggcgagggcgcgcagtggcacaacgtgggcacccggcctacggcagacgtcttcagcctggcccaggtctctggccttctgctgctggacgcggcgctctacggcctcgccacctggtacctggaagctgtgtgcccaggccagtacgggatccctgaaccatggaattttccttttcggaggagctactggtgcggacctcggccccccaagagtccagccccttgccccaccccgctggacccaaaggtgctggtagaagaggcaccgcccggcctgagtcctggcgtctccgttcgcagcctggagaagcgctttcctggaagcccgcagccagccctgcgggggctcagcctggacttctaccagggccacatcaccgccttcctgggccacaacggggccggcaagaccaccaccctgtccatcttgagtggcctcttcccacccagtggtggctctgccttcatcctgggccacgacgtccgctccagcatggccgccatccggccccacctgggcgtctgtcctcagtacaacgtgctgtttgacatgctgaccgtggacgagcacgtctggttctatgggcggctgaagggtctgagtgccgctgtagtgggccccgagcaggaccgtctgctgcaggatgtggggctggtctccaagcagagtgtgcagactcgccacctctctggtgggatgcaacggaagctgtccgtggccattgcctttgtgggcggctcccaagttgttatcctggacgagcctacggctggcgtggatcctgcttcccgccgcggtatttgggagctgctgctcaaataccgagaaggtcgcacgctgatcctctccacccaccacctggatgaggcagagctgctgggagaccgtgtggctgtggtggcaggtggccgcttgtgctgctgtggctccccactcttcctgcgccgtcacctgggctccggctactacctgacgctggtgaaggcccgcctgcccctgaccaccaatgagaaggctgacactgacatggagggcagtgtggacaccaggcaggaaaagaagaatggcagccagggcagcagagtcggcactcctcagctgctggccctggtacagcactgggtgcccggggcacggctggtggaggagctgccacacgagctggtgctggtgctgccctacacgggtgcccatgacggcagcttcgccacactcttccgagagctagacacgcggctggcggagctgaggctcactggctacgggatctccgacaccagcctcgaggagatcttcctgaaggtggtggaggagtgtgctgcggacacagatatggaggatggcagctgcgggcagcacctatgcacaggcattgctggcctagacgtaaccctgcggctcaagatgccgccacaggagacagcgctggagaacggggaaccagctgggtcagccccagagactgaccagggctctgggccagacgccgtgggccgggtacagggctgggcactgacccgccagcagctccaggccctgcttctcaagcgctttctgcttgcccgccgcagccgccgcggcctgttcgcccagatcgtgctgcctgccctctttgtgggcctggccctcgtgttcagcctcatcgtgcctcctttcgggcactacccggctctgcggctcagtcccaccatgtacggtgctcaggtgtccttcttcagtgaggacgccccaggggaccctggacgtgcccggctgctcgaggcgctgctgcaggaggcaggactggaggagcccccagtgcagcatagctcccacaggttctcggcaccagaagttcctgctgaagtggccaaggtcttggccagtggcaactggaccccagagtctccatccccagcctgccagtgtagccagcccggtgcccggcgcctgctgcccgactgcccggctgcagctggtggtccccctccgccccaggcagtgaccggctctggggaagtggttcagaacctgacaggccggaacctgtctgacttcctggtcaagacctacccgcgcctggtgcgccagggcctgaagactaagaagtgggtgaatgaggtcaggtacggaggcttctcgctggggggccgagacccaggcctgccctcgggccaagagttgggccgctcagtggaggagttgtgggcgctgctgagtcccctgcctggcggggccctcgaccgtgtcctgaaaaacctcacagcctgggctcacagcctggacgctcaggacagtctcaagatctggttcaacaacaaaggctggcactccatggtggcctttgtcaaccgagccagcaacgcaatcctccgtgctcacctgcccccaggccgggcccgccacgcccacagcatcaccacactcaaccaccccttgaacctcaccaaggagcagctgtctgaggctgcactgatggcctcctcggtggacgtcctcgtctccatctgtgtggtctttgccatgtcctttgtcccggccagcttcactcttgtcctcattgaggagcgagtcacccgagccaagcacctgcagctcatggggggcctgtcccccaccctctactggcttggcaactttctctgggacatgtgtaactacttggtgccagcatgcatcgtggtgctcatctttctggccttccagcagagggcatatgtggcccctgccaacctgcctgctctcctgctgttgctactactgtatgggtgaggcccccagtccctcagggcctattcttactgaccccttactgccttccacattaatgctgctgagatagaactctgcagtgactcccaaggagaggatatggaggtctgaggtgatgccgtgtgtgatccaattcagtggtgtgccaaggtggccttaaaagctcatcttatcctgactcatattagtagagttctaaggcagcccatgcctgtaattccagtactttgggaggccgaggcaggaggactgcttgtggccaggagtttgagaccagcctgggaaacatagagagacccacctctaaaaaagaaagaaagagagagaaagagaaagagag

SEQ ID NO: 55297 - DNA, 294 bp, Homo sapiens
ccaccccttgaacctcaccaaggagcagctgtctgaggctgcactgtgagtccctccaccctgcatgtcctaccctgcacgtcctaccctgcctccatttctctgtcgtttggggtggtgggagctggatttgaaccctgacacactcttgctttataaatgggggatagaaactgttcctctgctccctaagccagggaaatgggacctcctcagactcagcgggccccagcctcccccacacatcctcatcccaccaacctttatcctgcctgagacctgtacaacctctgc

SEQ ID NO: 55298 - DNA, 363 bp, Homo sapiens
gtgtgaggcctgggtggtggtgaggtggggccaggaggagggcttcctggaggaggtggtgttttgaaggatgaatagcgtgtttatgagcagcaaggacattcagggaggaggcatggcacatgaggagctctggtggctcagatgtcccttgggaaggcctgggggacccatggtgtaggaggggtggggggctcacaagcccccagttctccctgtcggtgtccagtctctgagcccctgcttgtctccccagatcttcctgaaggtggtggaggagtgtgctgcggacacagatatggagggtgcggccacagctccctgacccctgaccccagtccagagtgggaccagaggccaggt

SEQ ID NO: 55299 - DNA, 2773 bp, Homo sapiens
cgggggtttcacatgttgtgaagtcacatcttgaatgactgtcaccctcatccttccccaaaaagctaaataagggcctttggcatcaatgcgtgcattctccacctttccgcggcttgcgcttggatttctgagtggctttcttcagggagcccttgtggtcatgtgtctttaatgctgctccccatgcccccaggccaggccagcacgctcaggtgatagcgagtggggccaggagacccccctgccctgcccagtggacagatctgccccagccctgctgtggggacgggccctctatcatttaaccacatacattaggttgcttttcagcaaaatgtcagctttcctcccattatgcaggagagagaaggggcgcaggtgtatctccttagagtacaccttggagctggatcactaagaaacagtcctcagactggtccttccgacacaggcagagagtgaactggatcgctggcccctgggatgctgcgctgtctgtgattagagagaagtggccagtgtcccgtctgtgattagacagaaacccctgtggcagactcctcccctctccatgaagaaagaaatatttacttagatattactgtttcaaaacacaaactttattccccttagagaagaaatactgcccttaaatagactgttgaaatattaatggcccccccatttaatcagtgtgtctgcggctttcttcgcgtcacatgtccgcattggcaggtgattctggaaagggattctgggaaaccaacaagtcttttttaaatctttgagttgtatgagaaagtatttaagttcaccagtgtagtaaacacccaccccagagcagcggtaagcaaacctaaatctgaaaacccattcttactgtctttcaccatgagatgctggttttggtgtaaaatgacagcacttggtttggggttttgcacctgttgggtagaactgttcttgtctgaggtcctcaccctctacagatgggcctcagggcctggaggtgggcagatggggccagagtggccagcagagacttgcatgggctctgaaagccccagagctcaggcctaaggctgctaggtgagaccagcaggcagctgtggcatccgaccttgggacgcccaagctgggcagccgctccatgtgccccaaacaggatatcctcatgaatgtgaggagaggctggctcagggcttggttttcattttggcctggcacagggtacctgtagggagcactcccccaacctgaggatggtgaaaccatatgatagagactccttgtcgaagtccacatcggactgatctagaatgccccgtggggggattgcatggcctttgccttgagatgcaggtgaaagaaaggaaccaaacaaggcatgagtgtgttggggaatcttcccagtggagcaaacccccttaacacaccagctgttgggaacagctgcccctaaatccaattaaaccctcatctccctggtgctgaacagtctacactggcccaggaagctaacgtctgagccgcttggagagctttggtaaacagaagacactggaagcccactcggtcagcagctgggcatgaggatgtcaggggcctttggacttgaggaaggacagtccaggtgcatggaatcctaatgggcctcatgcagacactggaagcagcccagccccctgcccaataccacagccctggggtgtcccctgacattcctggaggtccctgggcaaatgcatttcctgcctgggttctcagggtaggagaacagagaaggctccaagggtgttgggagtgagccaggggctggtctggggagtgggtctcacgcactgctcaggttggcacgagggacctcccccatcccaacccagccccaagggtcccagcagggctctcagcatggctgttttgagggtacacaggtggctggagaggggtggggcagttgcatggtgggtggcaaagtgtgcatttagaagctgcttcgtggcgttaagaacggggggagagggaccagcactgtaacgttagaaataattccttcttgcagacttgaaaagcatcagtttccctcccacggctgggtttttgtgtctgaaatacatctaattctccagactgcagcccctctcagccccgagcacctgagcgctggggaggcccttattgagctcagcctggagaggggagggtcgcacgggtcccgggggcaggtctcctgcactggctcttcccttctgccagcttggaatttggttctcatcttgccacaggggtgcgtttcctaaagggcagccggagcagctcaaaggtgacaactgagatgcatttctaggcaggggcagggaaggccaacccaccttgcagccagttttctgtttctgtaaatagcagtgtatagagatggaagggcagcgtgggtgtatccacagatgggtttaggttttttttttggatgttttctattacctcattcagcaactttatgtttcacaatgactcaatgatgctttatttatattgtttgtactgtaattaaaaccattgacagacatttcactttgcttgttatttcatatgatcttgttttgattaaatatgccagtttgtattttcctgccttgggatttttttgtgtccgctgtacagtattctaagggaaaaagaaaaagaaagatgtgtaaagtaacagagagaggtggctatggtgtagagacctctttctaataaagaaatgaaaatatgtctacaccgcttc

SEQ ID NO: 55300 - DNA, 3046 bp, Homo sapiens
cgggggtttcacatgttgtgaagtcacatcttgaatgactgtcaccctcatccttccccaaaaagctaaataagggcctttggcatcaatgcgtgcattctccacctttccgcggcttgcgcttggatttctgagtggctttcttcagggagcccttgtggtcatgtgtctttaatgctgctccccatgcccccaggccaggccagcacgctcaggtgatagcgagtggggccaggagacccccctgccctgcccagtggacagatctgccccagccctgctgtggggacgggccctctatcatttaaccacatacattaggttgcttttcagcaaaatgtcagctttcctcccattatgcaggagagagaaggggcgcaggtgtatctccttagagtacaccttggagctggatcactaagaaacagtcctcagactggtccttccgacacaggcagagagtgaactggatcgctggcccctgggatgctgcgctgtctgtgattagagagaagtggccagtgtcccgtctgtgattagacagaaacccctgtggcagactcctcccctctccatgaagaaagaaatatttacttagatattactgtttcaaaacacaaactttattccccttagagaagaaatactgcccttaaatagactgttgaaatattaatggcccccccatttaatcagtgtgtctgcggctttcttcgcgtcacatgtccgcattggcaggtgattctggaaagggattctgggaaaccaacaagtcttttttaaatctttgagttgtatgagaaagtatttaagttcaccagtgtagtaaacacccaccccagagcagcggtaagcaaacctaaatctgaaaacccattcttactgtctttcaccatgagatgctggttttggtgtaaaatgacagcacttggtttggggttttgcacctgttgggtagaactgttcttgtctgaggtcctcaccctctacagatgggcctcagggcctggaggtgggcagatggggccagagtggccagcagagacttgcatgggctctgaaagccccagagctcaggcctaaggctgctaggtgagaccagcaggcagctgtggcatccgaccttgggacgcccaagctgggcagccgctccatgtgccccaaacaggatatcctcatgaatgtgaggagaggctggctcagggcttggttttcattttggcctggcacagggtacctgtagggagcactcccccaacctgaggatggtgaaaccatatgatagagactccttgtcgaagtccacatcggactgatctagaatgccccgtggggggattgcatggcctttgccttgagatgcaggtgaaagaaaggaaccaaacaaggcatgagtgtgttggggaatcttcccagtggagcaaacccccttaacacaccagctgttgggaacagctgcccctaaatccaattaaaccctcatctccctggtgctgaacagtctacactggcccaggaagctaacgtctgagccgcttggagagctttggtaaacagaagacactggaagcccactcggtcagcagctgggcatgaggatgtcaggggcctttggacttgaggaaggacagtccaggtgcatggaatcctaatgggcctcatgcagacactggaagcagcccagccccctgcccaataccacagccctggggtgtcccctgacattcctggaggtccctgggcaaatgcatttcctgcctgggttctcagggtaggagaacagagaaggctccaagggtgttgggagtgagccaggggctggtctggggagtgggtctcacgcactgctcaggttggcacgagggacctcccccatcccaacccagccccaagggtcccagcagggctctcagcatggctgttttgagggtacacaggtggctggagaggggtggggcagttgcatggtgggtggcaaagtgtgcatttagaagctgcttcgtggcgttaagaacggggggagagggaccagcactgtaacgttagaaataattccttcttgcagacttgaaaagcatcagtttccctcccacggctgggtttttgtgtctgaaatacatctaattctccagactgcagcccctctcagccccgagcacctgagcgctggggaggcccttattgagctcagcctggagaggggagggtcgcacgggtcccgggggcaggtctcctgcactggctcttcccttctgccagcttggaatttggttctcatcttgccacaggggtgcgtttcctaaagggcagccggagcagctcaaaggtgacaactgagatgcatttctaggcaggggcagggaaggccaacccaccttgcagccagttttctgtttctgtaaatagcagtgtatagagatggaagggcagcgtgggtgtatccacagatgggtttaggttttttttttggatgttttctattacctcattcagcaactttatgtttcacaatgactcaatgatgctttatttatattgtttgtactgtaattaaaaccattgacagacatttcactttgcttgttatttcatatgatcttgttttgattaaatatgccagtttgtattttcctgccttgggatttttttgtgtccgctgtacagtattctaagggaaaaagaaaaagaaagatgtgtaaagtaacagagagaggtggggtttcaccgtgtgggccaggctggtctcgaactcctgacctcgtgatctacccacctcggcctccccaagtgctgggattacaggcgtgagctagcatgcctggccagggattaaaatattcaaacatgttgtgtgtacccagatatgctgttacttcaggaacaaacagtacaatttctatgaagtggtcgtgactatttcctgtagtcacatacagtgcgggatatctgatctatttctcgtgttctacttgggcaaatgcatggactactcaactaaccatttagctggataattaacaagggacatcacacagcacacacacag

SEQ ID NO: 55301 - DNA, 1023 bp, Homo sapiens
aaatggcgtgaacccaggaggcggagcttacagtgagtggagatcgcgccactgcactccagcctgggtgacagagcaagactccgtctcaaaaaaaaaaaaaaaaaagtcagacatctgcactctgcttaaatccctgcattaaatgatcctcatttcatttagagtaaaaatctacatccttacaatagtctaaagggttctataagatcagcatcaccactccaccctgagcattacttctctaatctcatttcctatcagtcattctccaatatgtcctaaccttcccgacctcttttcttgtccctagaagatgccagccatgctcccaagttagggcctctgcactggctgtgccctctgccttgtacatgtttcccccagatatctgcattgccaactctctcacctcctttggtcaaaagttacctcattgaagcctatcttgaccttttaaaaatcacagcccattcttaactctcacagtacacccaaagcccctttaccctgctttctgttttactatagcacttctgacatactatatgatttacttatgtgttgtgtttattgtttattgcctattaccccccgctagaatgtaagctccatgagggcaaggatttatctgtagtgtttaccagtgtatcccaagtgcctagagtagctattgacacgtaggaggtgctcaataaatatttgttgaatgaatgaacaaggtgtttgtgcttctatccatagaagtgaaaactaggattaggtttgacccaattctatttcattcagcaaaaatatcctttaattttaatagataccaaaatatgtaatattttatgttgtttagatcaattagatattaaaattatacaatcaaaatgagctttttaagcttatcagactcagtcaagaatttttttaaaaaaatttttttgtagggaaatatgataggttgatcaataaaagactctccagcttaaaatattatattaaaatattgaggggtaagtggaatggaaatac

SEQ ID NO: 55302 - DNA, 290 bp, Homo sapiens
ttaaataaaaggtactttattagtattttgtaaaatctgatttttaataactaaaaaagtttgtcaattagttgtttgcactggttagaataataattccttaacagaaaaacaacaatgccaatcacactatatcaaacacaagcttacaatagctaagaaataaatagattttatttttaaaattgtgaattttaatagataagtgaaatttgatattgatattagaagaggttattccatgttttctcaaagtcaggatgcaggaggtagagagaatatttcctaaa

SEQ ID NO: 55303 - DNA, 2342 bp, Homo sapiens
  misc_feature (1679)..(1679): n is a, c, g, or t
gaattcaggggctttctggtgcccaagacagtgacctgcagcaagggagtcagaagacagatgtagaaatcaagagtgaccatccacgggattgacttggattgccactcaagcggtcctctcatggaatgttggtgaggccctctgccagggaagcaatctggctgtgcaaagtgctgcctggtggggaggactcctggaaatctgactgacccctattccctgcttaggaacttgaggggtgtcagagcccctgatgtgctttctcttaggaagatgaggactctgaacacctctgccatggacgggactgggctggtggtggagagggacttctctgttcgtatcctcactgcctgtttcctgtcgctgctcatcctgtccacgctcctggggaacacgctggtctgtgctgccgttatcaggttccgacacctgcggtccaaggtgaccaacttctttgtcatctccttggctgtgtcagatctcttggtggccgtcctggtcatgccctggaaggcagtggctgagattgctggcttctggccctttgggtccttctgtaacatctgggtggcctttgacatcatgtgctccactgcatccatcctcaacctctgtgtgatcagcgtggacaggtattgggctatctccagccctttccggtatgagagaaagatgacccccaaggcagccttcatcctgatcagtgtggcatggaccttgtctgtactcatctccttcatcccagtgcagctcagctggcacaaggcaaaacccacaagcccctctgatggaaatgccacttccctggctgagaccatagacaactgtgactccagcctcagcaggacatatgccatctcatcctctgtaataagcttttacatccctgtggccatcatgattgtcacctacaccaggatctacaggattgctcagaaacaaatacggcgcattgcggccttggagagggcagcagtccacgccaagaattgccagaccaccacaggtaatggaaagcctgtcgaatgttctcaaccggaaagttcttttaagatgtccttcaaaagagaaactaaagtcctgaagactctgtcggtgatcatgggtgtgtttgtgtgctgttggctacctttcttcatcttgaactgcattttgcccttctgtgggtctggggagacgcagcccttctgcattgattccaacacctttgacgtgtttgtgtggtttgggtgggctaattcatccttgaaccccatcatttatgcctttaatgctgattttcggaaggcattttcaaccctcttaggatgctacagactttgccctgcgacgaataatgccatagagacggtgagtatcaataacaatggggccgcgatgttttccagccatcatgagccacgaggctccatctccaaggagtgcaatctggtttacctgatcccacatgctgtgggctcctctgaggacctgaaaaaggaggaggcagctggcatcgccagacccttggagaagctgtccccagccctatcggtcatattggactatgacactgacgtctctctggagaagatccaacccatcacacaaaacggtcagcacccaacctgaactcgcagatgaatcctgccacacatgctcatcccaaaagctagaggagattgctctggggnttgctattaagaaactaaggtacggtgagactctgaggtgtcaggagagccctctgctgctttccaacacacaattaactccgtttccaaatacattccagtgtattttctgtgttgttcatagtcaatcaaacagggacactacaaacatggggagccataagggacatgtctttggcttcagaattgtttttagaaatttattcttatcttaggatttaccaaatagggcaaagaatcaacagtgaacagcttcacttaaaatcaaatttttctgggaagaaaatgagatgggttgagtttgctgtatacaaacaggtgctaacactgttcccagcaaagttttcagattgtaaaggtaggtgcatgccttcataaattatttctaaaacattaattgaggcttacagtaggagtgagaaatttttttccagaattgagagatgttttgttgatattggttctatttatttattgtatatatggatatttttaatttatgatataataaatatatatttatcatatttaataggataaattaatgagttttatccaagaccttacaaccacatttctggccatttaactagcactttataagccaatgaagcaaacacacagactctgtgagattctaaatgttcatgtgtaacttctaga

SEQ ID NO: 55304 - DNA, 430 bp, Homo sapiens
tgattgagtcatgtgcccacctgtggatttattgctttgacctagaaagtagtgcatttcaattggccagtctcctgggttacagccacacttccaccgtgccgtccattgttggggtggagcactggaactgacagtcctgctgttactgtgagaagtgggaacatggtggtctcctaagtgaggggagactagagagatgagcaagagggaatttccacatgtgtgatagagaatgagatagtgaaaagacctttttattgtaattgggtttcagaaactctgagatacctttaatttaagcttcattgaaataacttcagtagggaggtctgaattaagtcttttctcaactaacaggagttacattatgttttatagggttcagggaaaaggatccaataaaaggtgagaaaagtatggagaaaag

SEQ ID NO: 55305 - DNA, 374 bp, Homo sapiens
agcagaggtgaaaataagaatattataagcaacttgatgccaataaattttaaaacttgaatacaatggatgcattctaagaatactttaaattacttcagtattagaaaacttaattgccctttaactattaaggaaatggagttagttctttaaaaattgcccacaaagaaaataccaaatcaccatagttttgtaagtgaaatctacccaagattctaggaacaaataattctaatcttatacaaactcagaacttaggaaggaattctctgtggtagttaaaaaatatgtttacaatctcttgatattttggagccctgttccccttgccttgagtgtgggctggacctaatcatgcaattctaacagaa

SEQ ID NO: 55306 - DNA, 402 bp, Homo sapiens
  misc_feature (330)..(330): n is a, c, g, or t
  misc_feature (387)..(387): n is a, c, g, or t
  misc_feature (400)..(400): n is a, c, g, or t
taggaagttaggaaatgcgccttgagagcgtggcttgcaccaacgatgcttgaattcaggctgggccacctcccctatgtccactgcccgcctctgttcttctacaccgactaccttgtgcaaaggaggggcacacagagcttgaaaccaccgcccccagtactccccctctcccccaaggtgcgtcctaggcaggtccagtgacaaacatacacaatttctagagttaccgcggctggcaagagtagaactcgctttgctaattcaggaacggaagttggagatttttgttgattgttttaaagtggctcgaatcctttcaacctgggnccaatacaaaactaccacccagccagggatgagggggagggaccattcttgttttcnatcggcccctggntt

SEQ ID NO: 55307 - DNA, 374 bp, Homo sapiens
gaacttcaaaaaaaaaaaaaaagaggaatcataataaatattttactgtctagtcaacccaatttatgaagcctgattatctagctcagcctccggagattgctaccggaaatctccccagatgttcccccttctaacccaactctccactgtctggcaggaaggcagccgggcatctgcattccggaagcccagctgcttgggaagagagagggagcggcctgcacgtcactcaacagccctgcctgctaaccagttaaccagttctcagttgggttcacggacccatgagcgacccagctttcttcccctcaggttgatattgtgctccaagctggggatgcccggggactatgtggagggagagtgcctga

SEQ ID NO: 55308 - DNA, 790 bp, Homo sapiens
ggaagacttgggtgaagggtagtcgacagaatcggaagcgggagtccctgtgggtcctgctggtgagcagctttccgtgattatgggttttttttttttaaagtttctattgctaaccatttacaaaaagaaggaccattcttcgctcctgctggttgtagtctggagtgattccagaaggctagatttcggtagtttctattttatctcctcctgtactactggtacgtgctcacagcccaagcctgcacgcacaccttcattcaccaaagcgcaaatgcatctttaaatcgtcgctgtttttgaagtctctagagagttgtcattccactgtggtttagctgtttctgagaagtgtgtgtgctgaagcttgtggttaatatcacttcacagttatcaagtagaggaacttttcctattcaggttccatccttaaatcaatgcagtggtttaaggttacttagatagcagcagttgggtctgtgttagtgtgttgacactcattccaagtggcttcagaggagtcacctgctgggattttcctagactctttgcacttaagcaaagctactgtctccctcccaggtcaactttttaatgtccaacaacagaaactttacattatcccttattaaaggtctagagaatagcatgtaaggtgatttctagataatctcacaactaatttattattttcagagatggtttgccctcctatcctaccaaatcgaattaaactcgtttgagtttctttttttctcccgtgtgttgattcatggtggagcttcta

SEQ ID NO: 55309 - DNA, 254 bp, Homo sapiens
aagggataattcttaggtgaaataattatagagaatttatattttatctaaagcaaggaaaaatgtgggggtaaaagttcagtcaggatggccaggaaaagcagacactcttacatgtggagattttcttaaagttgttaagtttttaaatgggattattgcctttggggtggaaccttttaaggaacagaaccaggaaagcatgcagtttctaggtcctagtaatcaggcagaggtggaagtcaaaacagatt

SEQ ID NO: 55310 - DNA, 219 bp, Homo sapiens
tgcataagatgtgacactagttgtaccttcagaaatgaaaacaattctgtgatcagagaatagagagaatgcaaaaatgggataggagaaaaggctgggcaagatagaagagactatcctgtttgcaatgtccagcttagccttaagagaaacgagaagacacagagaaattgaaagcaggagaatatcataatgtgggataaatgagccttccaaaat

SEQ ID NO: 55311 - DNA, 590 bp, Homo sapiens
caatcacagattctgctagttctcttggctcaccctctcctacaatattagctgcctttatacggaatctgtactcatttccttcaattagtccaggtaccctaaaggcacattgcctaatgagttcatctttattaatcctgttccattgtgctgtgccaggtttctgacattccactacatatcctagaatggggctaccaccatcactgagaggctttgtccacaccaaatcagctgtttctctgctcttgtctttcagtttaggattaataggtggtccaggtggtttgatgggccggcaagcttttattggatcagaacttggggatggtttgcttagtcctgcaagattttcagcaaaaactctaaactcatatgtatttccttcatagagtccagtcactctgaacttcaggtcagcgataggtgttttgttgaccctcacccatttgccagttacttctcgacgttccatatagtagccagttattggactgccaccatcagattttggcagggtccaagacactgttgctgcattttcagtaatgtcagtaaccactggtttaccaggaggagacggagga

SEQ ID NO: 55312 - DNA, 287 bp, Homo sapiens
tttttttttttctgtcacccaggctggagtgcggtggcgttattgtttctgatgctatttcatactaaacaagttacaggttgtcctatacttctgatttaaaatttaaatcagtgttaaaacttaaaagtattgtgcaacagcaagaaccataggttcagcttactgtatatgtccaattagtgttgctattactattaacaggactaatacaaatatggtatgatcatttgacacattaagctaaataaacaggtaatgactaattttgcacaatgctaattatg

SEQ ID NO: 55313 - DNA, 459 bp, Homo sapiens
actgaaatatctgaataaataaattaatgacctgtaacatcacttctatccttaaatacatattctggtggggggaaaaaaaagagcaaatctgcatctcattcaacttcctgatttctctctgttgtccggatgtgttagattaaatacgaccacagattctttgcagctcctcctataaagaggtggagtctattttcccactctttgaaactgatctgtccttgtgacttgctttgatagaatgcaacagaagtgatataatgtggcttctgaacttctattttaagacgctttgcagtttttacttttgccttcttggaatacttccagaatcatataaaaagtccaggtgaaagtttgcacagagagagagcttcgcagttttcagggccatgccagtcatcctactgaggccctaggcatgtgaatgaagccatcttagagtcccaagcccca

SEQ ID NO: 55314 - DNA, 1161 bp, Homo sapiens
gttgctaggtaaccacatctcccataactgccccagcacatcgtcctgagccgcccaacctgtctccagccaccttctgtggagtctcaaactccatcatctgtgggaccctgtaggccgaagggagaaacaagagtgcagccaccacccctgagccacctgtggctctgctacccacaatttcactgtgaagagtcagctgcctgggccgtgaggtcactgccaccatgagtctgggcatcatggaagaggaagacctggccgagtacttccggctgcagtatggggagcggctgctgcagatgctccagaaactccccaatgttgagggggcgtcggagtccccatccatctggctactggagaagaaaaaggagacagaaatcatgcatcaaactatggtgcagaagaagaagatgtttcagcgcagaatggaaaccctgaacctgcgctgggaggaactgggcgttaaggaagcccaactgaaggctcacatccagaagtctgagcagttcatccaggagaacgaccagaaacggatccgcgccatgaagaaagccaacaaggagcgagaactcaagtgccagcacatgcaggagctgaccaagcgcaagcaggagatggtggcgctgcggctggagcaccagcggctgagcgccaagctgaaggactactacatcttcaacaagtacctagagaaggtggtggagaactccgaggaatctcgctgggcgcacatccagaacaccgcagccaagaagaccctcctgcttggcaccattaagatggccacgctgaacctcttccagatcgtgagcaagcacctgaaggaggtgactgaggtggcactggaggacacccacaagcagctggacatgatccagcaatttatccaagaccggtcggacatctgggcagaggtgaaaaagaaggaacaacagcgagtccggatttaaggaggcagccttgttccagaatgtcctgagacagagatcgtgaaagaagaagtcgtgagcctgcggtccagtcagtccagctcgggaccgatgcctgctgtgccttcctgctgagggacacctgcttattttcccccgtgggcctcactctatccctgaaaacagtgaatgttatatgaagtttgttctcaagttctctctagcc

SEQ ID NO: 55315 - DNA, 422 bp, Homo sapiens
agagaagtacagacctgagtataatggagacctctagcctctaatcatgggcactaaaggggattgcagacttgaagggattgaaccaactactgcaagtcatgggcattcaatgttttgtaagagacaaccagtcaattcaaagatgcaggcaggcggagaaggatggccatgttcgccaaagcataatggaagatgttgatgaaaccgcactgttgaaacaaatggagcgggagaaaatgcctcctcctccaaagccaaaggaaacgtttgtgagtgaaaggtgttgctattaatccttactcaggaacaaccaccataaaccaagaatatcccaggccaacaaggacatagtcgttgtattcaaagctgcaataaatagagattgactcataaaaaaaaaatgataaaatttaaagaaa

SEQ ID NO: 55316 - DNA, 704 bp, Homo sapiens
agagaagtacagacctgagtataatggagacctctagcctctaatcatgggcactaaaggggattgcagacttgaagggattgaaccaactactgcaagtcatgggcattcaatgttttgtaagagacaaccagtcaattcaaagatgcaggcaggcggagaaggatggccatgttcgccaaagcataatggaagatgttgatgaaaccgcactgttgaaacaaatggagcgggagaaaatgcctcctcctccaaagccaaagccccccactgacaaggtactggcagcaaaaaagatccagtcctgatggtggggcacgctggtgcaatgcacactactgcacgtgaccctcagagctttgatcattcagtgctggtggaggcaggtgctggcaaggctgcaggcgaagaggcagcgggcagcactggagctctgtgcacggcagctatgggcagcagtcaggctgcagtcctgggtccgcatgtggcgtgtccgctggcgttactgtcgtttgctcaacgctgtccgcatcatccaggtctattggcgctggagaagttgccatacccgtggctttttccatggcagctacgagctcacaacaagccagctgagccttgagcttgacatcttcctgggatcacatatttgccgaattacagactgcatccccttcccaataaagaagtgacaaggtgctcca

SEQ ID NO: 55317 - DNA, 487 bp, Homo sapiens
accctgaaaagtggaaagcagacatgcaacattggagcatggcatgccccccactgacaaggtactggcagcaaaaaagatccagtcctgatggtggggcacgctggtgcaatgcacactactgcacgtgaccctcagagctttgatcattcagtgctggtggaggcaggtgctggcaaggctgcaggcgaagaggcagcgggcagcactggagctctgtgcacggcagctatgggcagcagtcaggctgcagtcctgggtccgcatgtggcgtgtccgctggcgttactgtcgtttgctcaacgctgtccgcatcatccaggtctattggcgctggagaagttgccatacccgtggctttttccatggcagctacgagctcacaacaagccagctgagccttgagcttgacatcttcctgggatcacatatttgccgaattacagactgcatccccttcccaataaagaagtgacaaggtgctcca

SEQ ID NO: 55318 - DNA, 292 bp, Homo sapiens
tgaattcctgaggtcttttatttacatccataaatttgaaaagcacaatcccctttttttttttaaaaaaaaaaaaaggaagttacttttgggaatcagagacatgtacctctttgttctcttggagagctgtgggttatgggagggaactcctcatcctgtttcctgatatgcagtgacttctctcttacacagatgagtcctaaaacctttgtgagctcagacaagttggctggttttatttttatttttttatttttgagattgtctcactctgtcactcaggatggag

SEQ ID NO: 55319 - DNA, 415 bp, Homo sapiens
gagatgtttaaaaatgaagtggaagttttttgtttttgttttgtttttgcagaaaaaagatttttaatggcttgaatgtgctgccatagttgcgtcagattgtcagaaaattatgttgtacatctgagagagaaaagaagagccttttgaggagctgcgctaaaattattttttgtttagtctcttaactctttggcttgaatgagtcattgactttccttgccaagatagggttagcatttgttttgtgttttaaaagcaggccaagggattgccacgaggggagacaacctgagcaactgaaggaagaattgctagaaattgtgttacagttgtttagtctgaatgtgattagaaacaacaacaaaaatgacctaacattattgacttcaaaatttgttttctgctttcttcc

SEQ ID NO: 55320 - DNA, 354 bp, Homo sapiens
ccactaccacaggaaatctctatacccttcttggcttttccttttaatgtaattttcttaaaagcttcaagataatttttaatcaggcatgctgaaatctatctaacctattagtcactaattatattcttcaagcctatatattaatgtttctactgttgtaaattcatgatcataaagttttggacctggccatcaatactaaagcactgatatttagttttaggtgatacttgggcataaatacaaacacgaatatattttgtcatagaaaaaaatgtgttactgcattattttgcacttctgaaagaactgcaaacatttttcaagcacaataagcaaattcttctttca

SEQ ID NO: 55321 - DNA, 160 bp, Homo sapiens
attcaggttgtagaatatctggaatgtcatattaagactcttagacacttgtttctgtgcaaatgaaggggttttcttgggtttaactaaacttcaaattcagaaagcttgtttactcagaaggctatcagacaggaatcatagtttgccagcagggcag

SEQ ID NO: 55322 - DNA, 1882 bp, Homo sapiens
ccaaagtgctggaattacaggcgtgagccaccacacccagctagaagtattctttaaacagatgggtgcagtagcatttacttcatatcttgcaccttgggagggagaatataacttgcctaatggcataataattgatttccccccttgtcactttagaataagactttataacgcccccagaaagagtcgaagatgaaacatgacaaaccagaaaaatttattggccaaggtgtccactccacttggtaactttttgagggcctgatctggggttatctgtcctgtaagaagattaagatcaacccagttaaaacacggtgggccccatccctgctaagaccaggttacaggataaaactctcatccctcttggttgttaagacgaaattttcattcacttaaagcataaatcctttgcataatatttttatgcttgttcttctcctgtgtgtaaacctttatttggcgccttctctcttctgtgggattgactttttagggcaaatgagaattttgaagataattactctcctcctccattcctgtatctttaacaactgccaggtcccagtgacactttgataaaatgtttttagagccagtcacttgtgttgctgtggtctgccttgtcgtagaggcacatcatttttgcacatcagtattaacagttcaaacaccctgaaatgctaatagcactagtaagcttttaattccatggaatttattgcttgctgtgtttccatgaatttataacgctttgattcttaagagccccatttaatcagttttgcctggcaccgaacataataaacaacttgctggtgaaaaagtgccactcggggaggctgctaacaaggaagttaaatgcttctgccacgagcagtttcttcgctgtatttttcatgagctgtaatgtactttgctggcttcagagcggtggttaaacacagtgacaaaccgaacccactccagcactcggaaactcagactttgctaggtgctttggcaaaaagtatagaagaaatcaacactttcagccttttcccccctgcctctaacttattggtttctaatactttttcattatctttaccttaatctcttagcatatgatttatggactggaatggtgagtgatatcagtgggcaaaaacaatcattagaggctgttaaggaacatttattgtttatttggctacctgtctataaaagtacacatgaaggccctaatagcaaaatatcaaattatcaagtgctttaaagcagaaaatgtcatttgtttctcaaaactgcaccaactttatataattgcccttttaattatccctagtggcccgtgaaatttgcaaaatagagcatcaaagctttgatttacttacatgttgcactttggcgggattcttaatgaatattgtttagtactaatgctgagatggaattcgtaaatgtttatagtgagggacttacttagaagagtggggaggccagtaatgaaactgaatcaactgggttcttcaagatggaacaatatggccatattcttgggcctaacattttgaaaaattctttttatagtggaattttatttttaattcaggtctagatgaatacacattaagtttagttttgcagaatctttttttttctgcctagctatcttattactttccaagggcttttgaggagtaatttgtttcctggcaatttcggattaaaatcacctgtttcttcataaattgtcatcttcaaggtaacactgagaactggatctctgaaatctcatgttttcgagatgatttttatagctgcagacctgtgggctgattccagactgagagttgaagttttgtgtgcatcatcatgtgccattaaatgaaaa

SEQ ID NO: 55323 - DNA, 329 bp, Homo sapiens
taagcctaacttgcgatctcaccagaaaggattagtttggtataagttaaattaatttcttttccagcaattgtatatgttagctattggctgatcctgaaaagcagtatatttatgttaaatttccagatttcctttggtagctaatcaaggaggaacagctgctagagttcattttcatagattctttctgttctcatatctggcctcctcagtgatttgaagaattgaatatcctccaaaaaatggatattattacctcctgttctctgatggtgatggagacttcattctcagattgtttttaaattcctttcataattccatat

SEQ ID NO: 55324 - DNA, 490 bp, Homo sapiens
acaaagagatcaaaggtggggattctttctgtctgccttacaattttcagagggttttcagcccatttccaaaagtgctttctacatcagtgctacatgatcagtacagttgcgtacttgctacttccttaaagaaaacttgggatacagagctaagactatttccttagtccagaggatctttcaggtgattttcaaagggatccgtgactccaaacaggaaacggtgaacactgttggctcatcactgtctctttttcctctggttttgattctgaagcagggaagcttggaaagatgggccgctgagagtctggaatgcctttgtctgctttattgtggttgtttgtttgtttgtttattttttgtgatggagtctcactctgtcgcccaggctgcaatgcagtggcatgatctcagctcactgcaccctttgcctcccaggttcaagggactttactgtttcagcctccagagcatctgggattac

SEQ ID NO: 55325 - DNA, 381 bp, Homo sapiens
tacctctttgatttcaggcctccttatctaacttctgctcagtcacctctgcattctacctgtagaaaagtgactcaacatcattccagaagtccggaattctacaagaatcatttctctaaacagcatcatagtctatcaagctgtgagaccaaaaacctgagtcatccttgagtccttttccgtttgctcccaacagttaaatggaatctatcagcaagtcctgttggttttgcctccaaaatagatccgtaaattcacttaggctcttatcacttgattgctactacttcagtcaaaaccaccctacatacaaatccacactctaccctctagccacaacgatctattacaattacaaatgagagcatgtcttttccc

SEQ ID NO: 55326 - DNA, 184 bp, Homo sapiens
  misc_feature (104)..(104): n is a, c, g, or t
  misc_feature (109)..(109): n is a, c, g, or t
  misc_feature (183)..(184): n is a, c, g, or t
gcacaatctctctgtcagacaagccagctgactgatgctacctggttaagacagtgggtcctggagctgctttgttttcacatttaggatatggtggatttggnaggtntggcccatccaggtggatggagaagagggtgactgtgaggatgttggttgggactccctctctgcccaacccann

SEQ ID NO: 55327 - DNA, 515 bp, Homo sapiens
tttactgagcctcagattcccgcttgcactactccagctgttgctgccgcagctgcctttcccagacagaagcgctgcgttgcaattcttcagttacaatctgggtaataaaggaaatcatattaaaactacagatttttgtattttaaagcgcgatttccttcccccgagtagcgcgtggcggagatggttggtgacccctgcggtgcaatcatccaacgaaaacttcactgctctgcaccagtttttctttttctgggtttagaaggggagttgtgactacaatactttaaaaaacaaaactacctttattgtggcaagagaaaacattacaatggaaacaaattacatataaatagttgttttctcggtagcttgttgttctttttgtcttttgtaaatttctttggtggtcttaagtcctgatttggccttgactacagtacaggagcccatggacctagaccagagaccacggaccctgaaaatacccactgatctacaccgagattgaa

SEQ ID NO: 55328 - DNA, 344 bp, Homo sapiens
tttactgagcctcagattcccgcttgcactactccagctgttgctgccgcagctgcctttcccagacagaagcgctgcgttgcaattcttcagttacaatctgggtaataaaggaaatcatattaaaactacagatttttgtattttaaagcgcgatttccttcccccgagtagcgcgtggcggagatggttggtgacccctgcggtgcaatcatccaacgaaaacttcactgctctgcaccagtttttctttttctgggtttagaaggggagtaaaggcctctccaacttccttgaacttcttctcctcctccttctgaacctcagcactggctccactatgc

SEQ ID NO: 55329 - DNA, 718 bp, Homo sapiens
gtggtcccctctctgctcagcctgcctgagctggtctgagggtcctgatttttcaccagtgccttcccttctactgttccctgaggacaggcacccccagatggaaactctgacttgccctctacctcatctccacaggaaccttcctcctcaaaaatcaaagaacacagtggatgcgaaaatattccataaatggaaaaacgtagatgtagagaagaactaagccacatctgtcgagggccctgcacttgccaggtcatgagctatgaagttgatttactgacccatgaatgggtcacaacccgcagtttggaaacagctggatggacccccacctgtgctttccagcttctcctagagcctcagggccccaggaaggcagtgtggtctctgcaaccaggtccttctcctgggagaaacacttcaacttttgcaaaagattcattaattcatcaccatggcacccagaaaaaaaaaatgcagaagagaagactcaagttgtggccgacccaaggtggctgcaaactgtttgagattttcctcgttgagaagtgggggtctaagttccctcccttgaacctaggcaggccctctgactgcctaaccaacagaaatagcatggaagcgacactgtaccggtttttgaggctaagcctgaagagactggcagttcccacttcctgtcatctgggaataattgttcttgaaacctaagtgc

SEQ ID NO: 55330 - DNA, 787 bp, Homo sapiens
gtggtcccctctctgctcagcctgcctgagctggtctgagggtcctgatttttcaccagtgccttcccttctactgttccctgaggacaggcacccccagatggaaactctgacttgccctctacctcatctccacaggaaccttcctcctcaaaaatcaaagaacacagtggatgcgaaaatattccataaatggaaaaacgtagatgtagagaagaactaagccacatctgtcgagggccctgcacttgccagatcgcctcactccagcaacaacgtggaccatagcatctcacttctagaacccttgtcactgtttcaaaggtcatgagctatgaagttgatttactgacccatgaatgggtcacaacccgcagtttggaaacagctggatggacccccacctgtgctttccagcttctcctagagcctcagggccccaggaaggcagtgtggtctctgcaaccaggtccttctcctgggagaaacacttcaacttttgcaaaagattcattaattcatcaccatggcacccagaaaaaaaaaatgcagaagagaagactcaagttgtggccgacccaaggtggctgcaaactgtttgagattttcctcgttgagaagtgggggtctaagttccctcccttgaacctaggcaggccctctgactgcctaaccaacagaaatagcatggaagcgacactgtaccggtttttgaggctaagcctgaagagactggcagttcccacttcctgtcatctgggaataattgttcttgaaacctaagtgc

SEQ ID NO: 55331 - DNA, 485 bp, Homo sapiens
ttccttgtgtgcggtatagagtatatttggatttcctacctaaacttgagaatgtacaagttatttcttgcttccccagtttaatgttcagtgtcaatttgaggtcccttattatgtttgaatacatccattacctgctgtgagtatagatttgtcttcttatcaataagcaaaccgttagggttatagtcctgaggatagaggaaagacttttgcactcttgagaaactaggaaaagaactttctgaagcttccctcctggtaggaaatccaacctagaagtcgactggatggggacagccctggcaataagttttctcttctgtcaagatagtgctaatggaagggaagtcttggttgttttgctttgctttgtttttgataaaaacaaatattttgggcttcatggatagcgggaaggtgtttgagggagctgagtcacagtagctgggttggctgaaaagggcagtaggaacagagactct

SEQ ID NO: 55332 - DNA, 434 bp, Homo sapiens
cagatacaagaatccagccagacattaaagatttgcaaaactgtaaaacaatgccactcttgccactaaattttctttttaagaatataaagggatcctgaggtcaaagagtttttgagaacctctaaaccagattttagaattactctgttcaggccgggcaagtggctcaagcctgtaatcctagcactttgggaggccgaggtgggtggattgcttgaggccaggagttcgaggccagcctggccaacatggtgaaaccccgtctctactaaaaatacaaaaattggtcagacgtggtggcatgcgcctgtgatcccagctacttgagaggctgcggtaggaggatctcttgaacccaggaggtggaggttgcagtgagctgagatcttgccatacactccaggctgggcaacagagtgagactctgcttc

SEQ ID NO: 55333 - DNA, 323 bp, Homo sapiens
tacttgactaggtcaataaagataaggcactaaagataggcaatctaaatgccattttacacatatggtggatggataactctgtgtcctaatatttctgaaccttagttaccttatatgtaaagtaaaaaaaagtaccaatccatacatccatttcctttttgccatctcttgtcgactaggcacttttcaggattttccaaggagatcattgaaactttgttttgcttttctgcaaagatgtgtatatgaagttgtgtttgctgtctggccttatgagagactcagtgcttttctgacactaacattctggggctctttgt

SEQ ID NO: 55334 - DNA, 226 bp, Homo sapiens
caatttagcagcaatctgcttggattgatagccactgataaccagatgcttgaagaatgtctctgtgggcactcaggtgaacaggtggcctgagacccacaggcttttgtcctctgtgaacacccagacttagcctctgcctttggaaggtgatgggttcttgaaagtattgagcttaagtacatcagaatagcatcttaaactataaagttagttattaacgctt

SEQ ID NO: 55335 - DNA, 289 bp, Homo sapiens
cggtggtggcgccgcgctgggaatccgctgcggagtgagttcgcctcgccccgttcgcttcggtccctgatcccagtcggggtggggctaagctgaccaccctgctgtggctccgcctctttctcctgtatttccctcacttgtgtcccatccccgggaggctctcgcttgcactgcagcctttatggtgagcagcgccctgggccaacttgcccttttcggatggagtcagggagggaggagagactcgaatagggtattactgtaaggaaacgaggtcctcctagcg

SEQ ID NO: 55336 - DNA, 1039 bp, Homo sapiens
ttagccaggatatcaatagccatttggccagcctctcaatggctagaaacacgagccccactccagaccccactgttagagaggctttgtgtgccccggataacttaaatgcgagtattgaaagtcagggccagattaagatgtacatcaatgaagtgtgtcgggagactgtgtcacgttgctgcaactcatttctgcagcaggccggattaaatttgttaataagcatgacagttattaataacatgcttgccaagtccgcttcagacttgaagtttcctttgatatcagagggaagtggatgtgctaaggttcaggttttgaaaccgctgatgggtttgtctgaaaagccagtcttggcgggggagttagtcggtgcccagatgctcttctcattcatgtccctctttatcagaaatggaaacagagagattctcctggaaacccctgccccataaacggccctctcgaacacaatgggacggaatccacccacaacgcgcttggtttgcagatgtcaaagaatctgcagagggtgctactgaagatccagccttagccaatcaccacctcattgggtgaaagttccagggctcaatccaggaccacactcttattggccaggcaggggctcccacagagctttgagtaacttcttggttgtgcagtctgcaggcaatgttggcattgtaaattcctcccttgcagcctccttcatgtggtgaggggatcacttcagctgcctgctgtggacaaagaacatcaaattacagcatcacgagtgctattgttgcctgtggtggtctccctgtccaagcgggaccgctttgcagagaccagaggcatatcgcggcttgagctgaaaatgcatttgttgcagcttaggttgaattatttttcgtttgctctttcttctacacgcgcctgatggatagtgaacctattcatcaaaaaagtgcactgctcttctgtctattgtaccgacttaacctcttccacccaagtccgcatctgtgtgtatcatcaataaagttgtgtg

SEQ ID NO: 55337 - DNA, 490 bp, Homo sapiens
gaggggcacacgggcattgacggcacttctgtgctttgaggaatttgacagcacagacatctagagtaacgtctgttccacttcctctcttgtcgttcaattgttgtcctgctgttctggtccatgtcctaaccctgccggggatccttggtctggcagctgggtacttgcttccccgtcctgtccctttgccgatgtcccctaagtccccacaattctgccggacaatggttgacaatggatcaagacatacaactcacccactttaacgtcttttccccattgccttgggggaatctgtgtgggtttagcttttgcaaaaaatgttcctcctagatcaaaagaggaaattctcttaagattttaggacttcactcactgtgatacttgacccagcaaataaaagatgtatgtattcctcctctggcatatttttctcttaatttaaagaacttgttttgaagcaagcgccatttccaaggaagcttca

SEQ ID NO: 55338 - DNA, 388 bp, Homo sapiens
gctgaaaatgtttcatgttaattgggaagaccaaaagcggtatttaacatttttgccctgacgttcctccactgccttgtgggaagactcttaggattaaattagctaggaaaataatgttttagaatcagtttctttttataataggtagggtactttaaaaaaaaatctcggcttcccaaagccgtttctgtggtgatgaagggaattcagagaagcacatgttttgtaaatccacaaaagagtagctgctttggaaattcataagatgcctgtgggaatgcatttctcgtgtgcatggtggtaaaatggcagttaaactggaaacaatgaaggacagtgaaatccaatatgttatattggattcagcagtgggctatggtggcag

SEQ ID NO: 55339 - DNA, 437 bp, Homo sapiens
ttgtggtggggaacaatgttcaacaaaacagaagagttatgggtgctctagcttggcaacggagaatacttccttgtgctactaaatgccaatatttgacaattacggatgacacaattgagcaacagcattcactgtttaacaagcagtgtctctggaacactgggttagtgctgtcagatgttgactgaaaagtcagtggtttgagcccatccagtcatattaatgtttctagctgacgtgaccttccatctgaagagtctcttccttggaccaaatatctcttaaagcttctcttcttcttgtctcttgtctattttctaaggtgcctctttgttgcttggggcaaaaaaagtccatttttaatccacacccaacaaacatctacccttacgtatccggtttttagggttttgagtttgttgtttgttttctca

SEQ ID NO: 55340 - DNA, 661 bp, Homo sapiens
cgacctgctgtagaaaaggcggcccacagccacctcagcatgcagaggaggcccagctgctgagaggagttgcctgagagtgacctttgcatctgcctgtccagccagcatggaaccaaagcggatcagagagggctaccttgtgaagaaggggagcgtgttcaatacgtggaaacccatgtgggttgtattgttagaagatggaattgaattctataagaagaaaagtgacaacagccccaaaggaatgatcccgctgaaagggagcactctgactagcccttgtcaagactttggcaaaaggatgtttgtgtttaagatcactacgaccaaacagcaggaccacttcttccaggcagccttcctggaggagagagatgcctgggttcgggatatcaataaggccattaaatgcattgaaggaggccagaaatttgccaggaaatctaccaggaggtccattcgactgccagaaaccattgacttaggtgccttatatttgtccatgaaagacactgaaaaaggaataaaagaactgaatctagagaaggacaagaagatttttaatcactgcttcacaggtaaaagcacttgcaggcctgaaatagggcgactgggaaggcgatatggagtcctccttcggcctcgtctgtgaggtggg

SEQ ID NO: 55341 - DNA, 640 bp, Homo sapiens
  misc_feature (559)..(559): n is a, c, g, or t
cgacctgctgtagaaaaggcggcccacagccacctcagcatgcagaggaggcccagctgctgagaggagttgcctgagagtgacctttgcatctgcctgtccagccagcatggaaccaaagcggatcagagagggctaccttgtgaagaaggggagcgtgttcaatacgtggaaacccatgtgggttgtattgttagaagatggaattgaattctataagaagaaaagtgacaacagccccaaaggaatgatcccgctgaaagggagcactctgactagcccttgtcaagactttggcaaaaggatgtttgtgtttaagatcactacgaccaaacagcaggaccacttcttccaggcagccttcctggaggagagagatgcctgggttcgggatatcaataaggccattaaatgcattgaaggaggccagaaatttgccaggaaatctaccaggaggtccattcgactgccagaaaccattgacttaggtcccttatattcgcccatgaacgacactgcttcacagtaactgcggattgaatggttgcatccaaccagncgggtaggaactcgcaggacggcctcatgaaccctttatcgttgctcatgaggggctttttacacatcagcgaaatgtacg

SEQ ID NO: 55342 - DNA, 370 bp, Homo sapiens
gagctgggattacagatgtgcaccaccatgcctcttttatcaatatcataggaaaaaaaaaggtgtttcaagaaaaatatggccggaggagataaattgtctaagagatgccatccaaaagacaaagctgtctcatggtaaaagtacttccattttacctgtccctcctcccttcaaagcaaccaggaaaacaggaacaggctacacccagaagaggaacagagtacaccactgagagcaaagaagagtcattccagtctgtgcttagggcatgacaagaccaaaacctgggcatgcagaggccagttcacaggaacagcaggcaaaagtcaaatgcagattgagggcatggacagagtcctggggggat

SEQ ID NO: 55343 - DNA, 2745 bp, Homo sapiens
cgacctgctgtagaaaaggcggcccacagccacctcagcatgcagaggaggcccagctgctgagaggagttgcctgagagtgacctttgcatctgcctgtccagccagcatggaaccaaagcggatcagagagggctaccttgtgaagaaggggagcgtgttcaatacgtggaaacccatgtgggttgtattgttagaagatggaattgaattctataagaagaaaagtgacaacagccccaaaggaatgatcccgctgaaagggagcactctgactagcccttgtcaagactttggcaaaaggatgtttgtgtttaagatcactacgaccaaacagcaggaccacttcttccaggcagccttcctggaggagagagatgcctgggttcgggatatcaataaggccattaaatgcattgaaggaggccagaaatttgccaggaaatctaccaggaggtccattcgactgccagaaaccattgacttaggtgccttatatttgtccatgaaagacactgaaaaaggaataaaagaactgaatctagagaaggacaagaagatttttaatcactgcttcacaggtaactgcgtcattgattggctggtatccaaccagtctgttaggaatcgccaggaaggcctcatgattgcttcatcgctgctcaatgaggggtatctgcagcctgctggagacatgtccaagagtgcagtggatggaactgctgaaaaccctttcctggacaaccctgatgccttctactactttccagacagtgggttcttctgtgaagagaattccagtgatgatgatgtgattctgaaagaagaattcagaggggtcattatcaagcagggatgtttactgaagcaggggcatagaaggaaaaactggaaagtgaggaagttcatcttgagagaagaccctgcctacctgcactactatgaccctgctggggcagaagatcccctgggagcaattcacttgagaggctgtgtggtgacttcagtggagagcaactcaaatggcaggaagagtgaggaagagaacctttttgagatcatcacagcagatgaagtgcactatttcttgcaagcagccacccccaaggagcgcacagagtggatcaaagccatccagatggcctcccgaactgggaagtaaagagactcctgcattcctcctcccctcctgagggaagcccatggacaagctcagtccaggacctgtccacttctgtgacaaatcaacgggaaacagcccaggggtgggaagttttcatttgcaggggggtctgaatgtaactcaccatgtggtgtgcaaggttcccctgcattgtattgctcactgcagcccctctgcccctatccatgacccccaagcagatataacaagctgtgcagcctcagtaggctgcttgccctctccaggcctcagggcctcttctggaaaatgaagaaattcaactagtagattcctgaggtccccctagcttaaaaaaaaaaaaatctgccccatgattctaacactcgcagtagtgatagtgtatctagttgttctgctggtgtccttccttggctaagtcttggccttcagttatcttcaaatgtaccagaacctgagccaacgcctccctgtgaaactgttgctgatctgtagtacagtaccaggaagaaacctcttttgttctctttagacatcttctacttgctcttggccttgagatcgtgtaacaaaatgaaggagggctctcttctttcttcctcatcctactcaaaaacttcccgagagcagtggtggttttgagggttttgacttctattacttttggcagcctggaaagttgtgtcttctgggaaagagacccggggaggccaggagtagctgagggtcctttctgtgcccttaaaccgcccagaggagccctattccactctggttttaggctgatctgagagggtctccctttgttcctttctgggagcatttctctaacgtttattacaattaggagggggaccccacatctgtgagattctgtttcatttgaggtttacagaaaaaaaaaagtggccagatgtgttccccccatgggtgagaggcctgggcaactgcctggtgaatgtgtcttgcggcagctgcagcaagtggaggggctgaactactggccagctcactggatgatgggttaatacaacaactgcactgtaaggactcagagccacacagaacttctgagaggggctgttagcattgcgcagcatcttcagttctccagtaaatgatattgcgttcgtgcctcagctttaagcacaagtagcagcagctcctgcttgagttctgagggcatcatggccctattgaccctgaccactaactagtgattcttctccaaaattgagaaagacagcacccattgaagcagatatgtgtgtgaaagtatatttttcaattccagatttttaattttaaggctccaggaaagaaaggagagtagaacatttttcctcattttatcaaatcctctcttgccctccctcaattcccctgtaacattcctgaagctgttcccactcccagatggttttatcaatagcctagaggtaaagaactgtctttttctctgattctttaataaattatctttatagaatatgcacaagtttttctacactcagtgttaaagtatttattaatgggaagtcaacttaatgttttgaaataaatatatgactctgtttaatgca

SEQ ID NO: 55344 - DNA, 2799 bp, Homo sapiens
cgacctgctgtagaaaaggcggcccacagccacctcagcatgcagaggaggcccagctgctgagaggagttgcctgagagtgacctttgcatctgcctgtccagccagcatggaaccaaagcggatcagagagggctaccttgtgaagaaggggagcgtgttcaatacgtggaaacccatgtgggttgtattgttagaagatggaattgaattctataagaagaaaagtgacaacagccccaaaggaatgatcccgctgaaagggagcactctgactagcccttgtcaagactttggcaaaaggatgtttgtgtttaagatcactacgaccaaacagcaggaccacttcttccaggcagccttcctggaggagagagatgcctgggttcgggatatcaataaggccattaaatgcattgaaggaggccagaaatttgccaggaaatctaccaggaggtccattcgactgccagaaaccattgacttaggtgccttatatttgtccatgaaagacactgaaaaaggaataaaagaactgaatctagagaaggacaagaagatttttaatcactgcttcacaggtaactgcgtcattgattggctggtatccaaccagtctgttaggaatcgccaggaaggcctcatgattgcttcatcgctgctcaatgaggggtatctgcagcctgctggagacatgtccaagagtgcagtggatggaactgctgaaaaccctttcctggacaaccctgatgccttctactactttccagacagtgggttcttctgtgaagagaattccagtgatgatgatgtgattctgaaagaagaattcagaggggtcattatcaagcagggatgtttactgaagcaggggcatagaaggaaaaactggaaagtgaggaagttcatcttgagagaagaccctgcctacctgcactactatgaccctgctggggcagaagatcccctgggagcaattcacttgagaggctgtgtggtgacttcagtggagagcaactcaaatggcaggaagagtgaggaagagaacctttttgagatcatcacagcagatgaagtgcactatttcttgcaagcagccacccccaaggagcgcacagagtggatcaaagccatccagatggcctcccgaactgggaagtaaagagactcctgcattcctcctcccctcctgagggaagcccatggacaagctcagtccaggacctgtccacttctgtgacaaatcaacgggaaacagcccaggggtgggaagttttcatttgcaggggggtctgaatgtaactcaccatgtggtgtgcaaggttcccctgcattgtattgctcactgcagcccctctgcccctatccatgacccccaagcagatataacaagctgtgcagcctcagtaggctgcttgccctctccaggcctcagggcctcttctggaaaatgaagaaattcaactagtagattcctgaggtccccctagcttaaaaaaaaaaaaatctgccccatgattctaacactcgcagtagtgatagtgtatctagttgttctgctggtgtccttccttggctaagtcttggccttcagttatcttcaaatgtaccagaacctgagccaacgcctccctgtgaaactgttgctgatctgtagtacagtaccaggaagaaacctcttttgttctctttagacatcttctacttgctcttggccttgagatcgtgtaacaaaatgaaggagggctctcttctttcttcctcatcctactcaaaaacttcccgagagcagtggtggttttgagggttttgacttctattacttttggcagcctggaaagttgtgtcttctgggaaagagacccggggaggccaggagtagctgagggtcctttctgtgcccttaaaccgcccagaggagccctattccactctggttttaggctgatctgagagggtctccctttgttcctttctgggagcatttctctaacgtttattacaattaggagggggaccccacatctgtgagattctgtttcatttgaggtttacagaaaaaaaaaagtggccagatgtgttccccccatgggtgagaggcctgggcaactgcctggtgaatgtgtcttgcggcagctgcagcaagtggaggggctgaactactggccagctcactggatgatgggttaatacaacaactgcactgtaaggactcagagccacacagaacttctgagaggggctgttagcattgcgcagcatcttcagttctccagtaaatgatattgcgttcgtgcctcagctttaagcacaagtagcagcagctcctgcttgagttctgagggcatcatggccctatgattaaccagagtgatctaacctagactaaaattgggaacttatttgcaatttttgaccctgaccactaactagtgattcttctccaaaattgagaaagacagcacccattgaagcagatatgtgtgtgaaagtatatttttcaattccagatttttaattttaaggctccaggaaagaaaggagagtagaacatttttcctcattttatcaaatcctctcttgccctccctcaattcccctgtaacattcctgaagctgttcccactcccagatggttttatcaatagcctagaggtaaagaactgtctttttctctgattctttaataaattatctttatagaatatgcacaagtttttctacactcagtgttaaagtatttattaatgggaagtcaacttaatgttttgaaataaatatatgactctgtttaatgca

SEQ ID NO: 55345 - DNA, 2528 bp, Homo sapiens
tgctgagcaagtcccacttccctcataacctcaggggaagaggctggacacatgctgtcacttttctccaagagggggctcagtggcaaatgttgagctggtgatagtattgccaatgagaaattagcctgccctgctttcaaggatgtgaccatgatatcccaagagaaggaaggctttgaaggcagacatgtgcctggttaggaagatggagctaaagttaggatacagcttgggagaccctccagaataaaaggatattgacaagatcacacctgagtggagacaagaaaggaacagccccggaagcaagtaaaaggaggaggagaaactcgctcatcaaggacctttgaagttcagattgggatgtacacaggaatggaggaaaaaggaggaggctgccctcatggctggaggggagggggaatggagatggcacaagttgcaatgtgcctaagactggtgatgttagcttgctgtttgattttccaacagccagacagtgggttcttctgtgaagagaattccagtgatgatgatgtgattctgaaagaagaattcagaggggtcattatcaagcagggatgtttactgaagcaggggcatagaaggaaaaactggaaagtgaggaagttcatcttgagagaagaccctgcctacctgcactactatgaccctgctggggcagaagatcccctgggagcaattcacttgagaggctgtgtggtgacttcagtggagagcaactcaaatggcaggaagagtgaggaagagaacctttttgagatcatcacagcagatgaagtgcactatttcttgcaagcagccacccccaaggagcgcacagagtggatcaaagccatccagatggcctcccgaactgggaagtaaagagactcctgcattcctcctcccctcctgagggaagcccatggacaagctcagtccaggacctgtccacttctgtgacaaatcaacgggaaacagcccaggggtgggaagttttcatttgcaggggggtctgaatgtaactcaccatgtggtgtgcaaggttcccctgcattgtattgctcactgcagcccctctgcccctatccatgacccccaagcagatataacaagctgtgcagcctcagtaggctgcttgccctctccaggcctcagggcctcttctggaaaatgaagaaattcaactagtagattcctgaggtccccctagcttaaaaaaaaaaaaatctgccccatgattctaacactcgcagtagtgatagtgtatctagttgttctgctggtgtccttccttggctaagtcttggccttcagttatcttcaaatgtaccagaacctgagccaacgcctccctgtgaaactgttgctgatctgtagtacagtaccaggaagaaacctcttttgttctctttagacatcttctacttgctcttggccttgagatcgtgtaacaaaatgaaggagggctctcttctttcttcctcatcctactcaaaaacttcccgagagcagtggtggttttgagggttttgacttctattacttttggcagcctggaaagttgtgtcttctgggaaagagacccggggaggccaggagtagctgagggtcctttctgtgcccttaaaccgcccagaggagccctattccactctggttttaggctgatctgagagggtctccctttgttcctttctgggagcatttctctaacgtttattacaattaggagggggaccccacatctgtgagattctgtttcatttgaggtttacagaaaaaaaaaagtggccagatgtgttccccccatgggtgagaggcctgggcaactgcctggtgaatgtgtcttgcggcagctgcagcaagtggaggggctgaactactggccagctcactggatgatgggttaatacaacaactgcactgtaaggactcagagccacacagaacttctgagaggggctgttagcattgcgcagcatcttcagttctccagtaaatgatattgcgttcgtgcctcagctttaagcacaagtagcagcagctcctgcttgagttctgagggcatcatggccctatgattaaccagagtgatctaacctagactaaaattgggaacttatttgcaatttttgaccctgaccactaactagtgattcttctccaaaattgagaaagacagcacccattgaagcagatatgtgtgtgaaagtatatttttcaattccagatttttaattttaaggctccaggaaagaaaggagagtagaacatttttcctcattttatcaaatcctctcttgccctccctcaattcccctgtaacattcctgaagctgttcccactcccagatggttttatcaatagcctagaggtaaagaactgtctttttctctgattctttaataaattatctttatagaatatgcacaagtttttctacactcagtgttaaagtatttattaatgggaagtcaacttaatgttttgaaataaatatatgactctgtttaatgca

SEQ ID NO: 55346 - DNA, 1432 bp, Homo sapiens
cgacctgctgtagaaaaggcggcccacagccacctcagcatgcagaggaggcccagctgctgagaggagttgcctgagagtgacctttgcatctgcctgtccagccagcatggaaccaaagcggatcagagagggctaccttgtgaagaaggggagcgtgttcaatacgtggaaacccatgtgggttgtattgttagaagatggaattgaattctataagaagaaaagtgacaacagccccaaaggaatgatcccgctgaaagggagcactctgactagcccttgtcaagactttggcaaaaggatgtttgtgtttaagatcactacgaccaaacagcaggaccacttcttccaggcagccttcctggaggagagagatgcctgggttcgggatatcaataaggccattaaatgcattgaaggaggccagaaatttgccaggaaatctaccaggaggtccattcgactgccagaaaccattgacttaggtgccttatatttgtccatgaaagacactgaaaaaggaataaaagaactgaatctagagaaggacaagaagatttttaatcactgcttcacaggtaactgcgtcattgattggctggtatccaaccagtctgttaggaatcgccaggaaggcctcatgattgcttcatcgctgctcaatgaggggtatctgcagcctgctggagacatgtccaagagtgcagtggatggaactgctgaaaaccctttcctggacaaccctgatgccttctactactttccagacagtgggttcttctgtgaagagaattccagtgatgatgatgtgattctgaaagaagaattcagaggggtcattatcaagcagggatgtttactgaagcaggtgagtggccacaactgctcccatctagccttttccctttacaaggtcctttttgtttctaagttacccagtgacttttggtttgtttggttaatagtcaagcagaaaatgaaacccacaaagtgaaagatagatgagtagctctttagatatcaaagtggctttagatcaggaagattgagtttgacagggcagaagatgtccctaaaagtaggaaaatgcctcttttatcaatatcataggaaaaaaaaaggtgtttcaagaaaaatatggccggaggagataaattgtctaagagatgccatccaaaagacaaagctgtctcatggtaaaagtacttccattttacctgtccctcctcccttcaaagcaaccaggaaaacaggaacaggctacacccagaagaggaacagagtacaccactgagagcaaagaagagtcattccagtctgtgcttagggcatgacaagaccaaaacctgggcatgcagaggccagttcacaggaacagcaggcaaaagtcaaatgcagattgagggcatggacagagtcctggggggat

SEQ ID NO: 55347 - DNA, 115 bp, Homo sapiens
cactttaacttaaaaagtggtgacaactgaatatgtacaaagcgtaactgctatattaatagtaacaagtcaacgtcggttttcaggttttgcagtgggagaagctggtggaggt

SEQ ID NO: 55348 - DNA, 397 bp, Homo sapiens
tgttataattggtctgttttataagttattgctgttaacctcttactgtgcctattttataaatgaaattttgttataaatatgtatggatagggaataacatagtacacaggttttagtactatctgcaatttcaagcatccactggggggccttggaacatattcccctcatgtaaggggagtaatcgctatacataatactagctacttactcactaacgtgatgggcttaaaacaaatacactttaaaagtaagatttagctgggtgtggtggctcatgcctgtaatcccaacactttgggaggccaaggtgggcaaactgcttgagccccagagttcaaaaccagcctggccaatgtggcaaaaccctgtctatactaaaaatacaaaaatt

SEQ ID NO: 55349 - DNA, 921 bp, Homo sapiens
caggggctcatgcctataatcccagcactttgggagggcaggagttcactcacgaggtcaggagtgggggaccagtctggccaacatggtgaaaccccgtctctactaaaaatacaaaaattacctgggcatggtggtgggtgtctgtaatcccagttactcgggaggctgaggcaggagatgaagaattcaacttttgttttttagacagttgtggcaagagtgttaaggaactaaaaaggctgacagaccaacaaagaggttattacataatccagtggtaatgccatcttcaattacagcaatacaagacagagtggtaaaaagatactgggtataatcaacaggttaaatgtgttgcggagagaagacagagaattttggaaaacagattccagagacctgacaaaatttgttctttagccctagcagaaagagaatggacttgggggttcaaagatctggggtcccaaatttcatcttaatctctcaagaaactaggtatatcacttaacagatataaaatcattcatttatatactttgatgggttgctgtaattgttcatatattatgtataaatctatgtaaacacacataaatatatattaaatgcctgtaacatataaacatatgtaaaatgcctgtcacgtagaggcggaggttgcagtgagccaagatggcgccactgccctccagcctgggcaacaagaacaaaactccatcttggaaaacaaacaaacaaaaaaaactgttaagctcttcctctacactcatcctctcccctctcaacatatcagtcaagccaggcgccatggcttgtgtctgtaatcccagctacttgggaagctgaggcaggagaatcacctgaggcaaggatttaagaccaacctgggcaacaaagcaagagccccgtctttaa

SEQ ID NO: 55350 - DNA, 792 bp, Homo sapiens
tgggagttgggactatatccagttatcaaagagccagtttttaagcaggagatgaagaattcaacttttgttttttagacagttgtggcaagagtgttaaggaactaaaaaggctgacagaccaacaaagaggttattacataatccagtggtaatgccatcttcaattacagcaatacaagacagagtggtaaaaagatactgggtataatcaacaggttaaatgtgttgcggagagaagacagagaattttggaaaacagattccagagacctgacaaaatttgttctttagccctagcagaaagagaatggacttgggggttcaaagatctggggtcccaaatttcatcttaatctctcaagaaactaggtatatcacttaacagatataaaatcattcatttatatactttgatgggttgctgtaattgttcatatattatgtataaatctatgtaaacacacataaatatatattaaatgcctgtaacatataaacatatgtaaaatgcctgtcacgtagaggcggaggttgcagtgagccaagatggcgccactgccctccagcctgggcaacaagaacaaaactccatcttggaaaacaaacaaacaaaaaaaactgttaagctcttcctctacactcatcctctcccctctcaacatatcagtcaagccaggcgccatggcttgtgtctgtaatcccagctacttgggaagctgaggcaggagaatcacctgaggcaaggatttaagaccaacctgggcaacaaagcaagagccccgtctttaa

SEQ ID NO: 55351 - DNA, 3079 bp, Homo sapiens
taaatttagatttttcccatggcttagctcaggcaaatgtccttcccatgcaaaatagatggtggcaggacctacaactcttcccagtcatcagtgaccctgcacctatcctcagagtcctggttacggtagcccaccccctagtcactcaccctcttttttccccgacaagaggatcacccacatgcccccatggagggttccactgtctaaaccatcaaagactgggatagaagcagtcaccaagtcccaaatacagaattagaactcaggacctatttccaatctaaacaatgaaaaaatcagagtacaagaggtcagctcagcaccagattaaatgctttttttttttttttgtctgagacagagtcttgctctaccacccagtctggagtgcagtggtgcaatctcggctcactgtagcctccgcctcccaggttcaaggattctcctgcctcagcctcccaagtagctgagattacagacgcccaccactaggtccagctaatttttgtatttttgtagaaaaggggcctcaccatgttggccaggctggtctcaaacgcctgacctcaagtaatccacctgcctcagcctcccagagtgctgtaattagagtcatgagccaccacacctggcctaaatgcactcctataagacaatgtggaaggtaggggccaaattccacacaaccagcttagaagacaaacttttacagcaaagagccatcatttggagaaggacatatgtataatggcaaagaggtattaatacgtgaagtacctgtgacattgaggatcgttacctagaattgacattcagtatttacttcacatagctctgtaactgggtctcttgtaaacaggcattttgtcctcccccttccaatactgtgaacccattattatgtcacctttcctcatgacagtcctataaactaggtaaagaacaaacgtctctattcacagacagaacaggggaaacaagataaaaaatacaactttccagtatttaacaaattctgtcaagtctagacaaaaggtatgatgtctaaatgaagctgttagtgggctatgttgaatctcaaaattatctttctccttttttttttaagagatgatctcattctgttgcccaggctggagtgcagtggctcaatcatagctcactgcagcctcgaactcctgggctcaagtgatcctcccgcctcagcttcccaaggagctgggatgtgccagcatacttggctttttttttttttttttttttgtagagatgaggtctcacaaagttgcccaggatcgtctcgagcttctggactcaattgatccttctgactcagcctcccaaagtgctaggattacaggcatgagccaccatgcctggcctcaaaattgtctttttaaatatgtctgtgcttttcatagtgtaactactatacaactgaaatgtcgattatggcacaattgatcataactgactcacatactttgtgttttgtttttcatggtgtctctcctagcccagaagcttcctaaaccacttttccagaggcttttttaggaacacacattaaaacatgcttcctgaagcagagccactcattcccgggtccccttcctcatccttcaaagagctctgactctcaactttgttttttgagctagcatggcatgcacacaaaatccaagcttatgactctacaatgagagtgctttgatttaaataatctttccttcctaatttaggccctcccaacgaaaacttaaacctttatgcttctttacagagaaaaacaagcataaggaaagcccctccatttcctacaagagacagatctccaggactgaattttaagccatggggaaattgcaaaggagacacctgagctcttttgagcacttgtgccaaaacacaacagatggaatggtttggcatttcagaatccagttccacagaataaagaagaatctccactctggcagtggggaggaggaaggaagtggaggtttgttggctttactttgccatccatccctttctctatgtggtagagaaggactgagaggagtgatcccacaggacacaggttcccccgtgtctgtcaccttcaagggggctcaggctcccagggggaaggcacaggggaatcacggagttcagttccaggctccaggactttccagaagggacccctgagcaggactcgctttcaccgtcaagtattgctttcttttttagacacaagattttgctctgttgccctggctggactgcagtgatgcaatcatagctcatcgcatctgcaaccaccagggcttaagcaatcctcccaccttagcctctggagtagtggggaccacaagcacataccaccacagccaggtaattttgttgttgtttttgtaaagacagggtctcactatgttgcctaggctggttttgcactcctggccgcaagcaatcctcctgtctcagcctcccaaagcactgaagttacaggtatatgaaccacatctggccagcaccaagtattttgacaaagcacctattagggtaattccaagtaatctctggcaaacatggtttcagttaggcaagactacaagaaaccgcccacatctattttgtaaaaatctgtgctcccctttcctacttgagtagacacgctcacaaacagacacaaaggcagacccctccctctagtttttctaacataccagagccccctgcaaacacctgaggccctcaatgctgattttcactggaatctcatcacagttgaacagggtagaagcagcttaacctctctccttgtgcctcgctggaaccagtggctcgtcttccacgggctgcccctgatccctgggctttgagggacaaagagcttgctggaaatagtgatcaccctcgtgatgacaccaggtcaacaggcagctgtgggctcattaagatgtaagccggccgggcgcggtggctcacgcctgtaatcccagcactttgggaggcctaggcgggcggatcacgaggtcaggagatcgagaccatcctgggcaactttgtgagacctcatctctac

SEQ ID NO: 55352 - DNA, 640 bp, Homo sapiens
aaaaaaaaaaatcaaagtttattctaattggaaggaaacacgtatagggaaagtataggtcaaggcaaggagctgttttgttccccttcttatgtatgaaatgtagatgtgcttttatttacacaaaaggtgtattcttgtgtatttgtgggcaaccaaattctaaatagcaaccttcaaatacattaggaaaacttactttaaaggagtctgtattaaaacttttttttaaaaaaaattatttaaagagatggggtctcattatgttacccaggctggccttaaaatttcttggggttcaagtgatcctctgccttagcctcctgaatagttggtactgcaggcacatgctatggtgccccagataaaaccttatctttggccaggtgtggtggctcatgtctgtaatccctgtagtttgcaagaccagggagggtagagtttgataccagtctgggcaacatagtgaaatccttgtttctataaaaaattacctgggcttggtggcatgtgcctgtagtcccagctacttgggacaccaaggtgggcggatcgcttgagcctgagggtttgatggtgcagtgagtgatgatcatgcccctgccctctagcctgggtgacagagtgagacactgtctca

SEQ ID NO: 55353 - DNA, 162 bp, Homo sapiens
caggggtcagtgagttaatctgggctcattcagagaatggaagttgtgtgccaagaaaactggttggatagggataggtcagggattccctcttgcattctcacacttgggggcatgcgtcattttcttttcttttcttttctttttttttttttttttgag

SEQ ID NO: 55354 - DNA, 262 bp, Homo sapiens
tagtggcctgataattatgatttctctcatttctcgctatcgagcttaatgggttccagcatgagtgtgcagtttcagaaatgaagttccacttgaattcacaagttattatctactttcattaatggaattggaaaagagggagtggaaaagagataaagaacgaggaagtaggaagagatgagtgagcaggaggaggaaggaataaaagaaaacaaaaggccaggaatagaaaataaaaatcaaccaaagagtaggaagg

SEQ ID NO: 55355 - DNA, 310 bp, Homo sapiens
gctcaagtggtcctcctgccttggtctcccaaagtgctgggactacagatgtgagccaccgtgcctgacctaacttggttcttgctaccccaaacacagttaatctagttcagtttgctttactataacctgtgtcctgcacttagcatgctcacacttgtttcttttacattggctttggaaatgctctctttctcttcacctgcttagctacagcctcctcagctccagtcccacctccttcatgaagccatctgtgattactccagccttcactaatctctccaatgcacctagcgccagtgctaga

SEQ ID NO: 55356 - DNA, 498 bp, Homo sapiens
tagagagggacatgattggacttctctttcagaaagattacattatgtggatgattgattaaaatgacaactagagtttgagagactaatcagtttcaattaatgagtgtttttaaatgaattcattaaaaattagtccagtgaaagagctggaattagtctagcattttgaaaagatttgtggtcaaatacattgaaaatggatgaaggatataaataatcctgcagttttgttttttatttcaataagggcttgcttaattttatgtacttttctccaaatgcattcaacagtcacctctcacaatgtaaaaggatgaccccgattatttctcttttctgagttgttagaaagttgtttctaattacttcgaaaactggttttctattttacaagattccaaatagtgttttaaaagttttttggacttaaaggactatattatagggatgttttcaatccagagactcattcagggtcactcattctccccacat

SEQ ID NO: 55357 - DNA, 1621 bp, Homo sapiens
agcttcaccaacaggaactatgacctcgactacgactcggtgcagccgtatttctactgcgacgaggaggagaacttctaccagcagcagcagcagagcgagctgcagcccccggcgcccagcgaggatatctggaagaaattcgagctgctgcccaccccgcccctgtcccctagccgccgctccgggctctgctcgccctcctacgttgcggtcacacccttctcccttcggggagacaacgacggcggtggcgggagcttctccacggccgaccagctggagatggtgaccgagctgctgggaggagacatggtgaaccagagtttcatctgcgacccggacgacgagaccttcatcaaaaacatcatcatccaggactgtatgtggagcggcttctcggccgccgccaagctcgtctcagagaagctggcctcctaccaggctgcgcgcaaagacagcggcagcccgaaccccgcccgcggccacagcgtctgctccacctccagcttgtacctgcaggatctgagcgccgccgcctcagagtgcatcgacccctcggtggtcttcccctaccctctcaacgacagcagctcgcccaagtcctgcgcctcgcaagactccagcgccttctctccgtcctcggattctctgctctcctcgacggagtcctccccgcagggcagccccgagcccctggtgctccatgaggagacaccgcccaccaccagcagcgactctgaggaggaacaagaagatgaggaagaaatcgatgttgtttctgtggaaaagaggcaggctcctggcaaaaggtcagagtctggatcaccttctgctggaggccacagcaaacctcctcacagcccactggtcctcaagaggtgccacgtctccacacatcagcacaactacgcagcgcctccctccactcggaaggactatcctgctgccaagagggtcaagttggacagtgtcagagtcctgagacagatcagcaacaaccgaaaatgcaccagccccaggtcctcggacaccgaggagaatgtcaagaggcgaacacacaacgtcttggagcgccagaggaggaacgagctaaaacggagcttttttgccctgcgtgaccagatcccggagttggaaaacaatgaaaaggcccccaaggtagttatccttaaaaaagccacagcatacatcctgtccgtccaagcagaggagcaaaagctcatttctgaagaggacttgttgcggaaacgacgagaacagttgaaacacaaacttgaacagctacggaactcttgtgcgtaaggaaaagtaaggaaaacgattccttctaacagaaatgtcctgagcaatcacctatgaacttgtttcaaatgcatgatcaaatgcaacctcacaaccttggctgagtcttgagactgaaagatttagccataatgtaaactgcctcaaattggactttgggcataaaagaacttttttatgcttaccatcttttttttttctttaacagatttgtatttaagaattgtttttaaaaaattttaagatttacacaatgtttctctgtaaatattgccattaaatgtaaataactttaataaaacgtttatagcagtta

SEQ ID NO: 55358 - DNA, 268 bp, Homo sapiens
ccacgaggaaacattgtgtaaatcttaaaattttttaaaaacaattcttaaatacaaatctgtaaatattgccattaaatgtaaataactttaataaaacgtttatagcagttacacagaatttcaatcctagtatatagtacctagtattataggtactataaaccctaattttttttatttaagtacattttgctttttaaagttgatttttttctattgtttttagaaaaaataaaataactggcaaatatatcattgagccaaa

SEQ ID NO: 55359 - DNA, 1775 bp, Homo sapiens
agcttcaccaacaggaactatgacctcgactacgactcggtgcagccgtatttctactgcgacgaggaggagaacttctaccagcagcagcagcagagcgagctgcagcccccggcgcccagcgaggatatctggaagaaattcgagctgctgcccaccccgcccctgtcccctagccgccgctccgggctctgctcgccctcctacgttgcggtcacacccttctcccttcggggagacaacgacggcggtggcgggagcttctccacggccgaccagctggagatggtgaccgagctgctgggaggagacatggtgaaccagagtttcatctgcgacccggacgacgagaccttcatcaaaaacatcatcatccaggactgtatgtggagcggcttctcggccgccgccaagctcgtctcagagaagctggcctcctaccaggctgcgcgcaaagacagcggcagcccgaaccccgcccgcggccacagcgtctgctccacctccagcttgtacctgcaggatctgagcgccgccgcctcagagtgcatcgacccctcggtggtcttcccctaccctctcaacgacagcagctcgcccaagtcctgcgcctcgcaagactccagcgccttctctccgtcctcggattctctgctctcctcgacggagtcctccccgcagggcagccccgagcccctggtgctccatgaggagacaccgcccaccaccagcagcgactctgaggaggaacaagaagatgaggaagaaatcgatgttgtttctgtggaaaagaggcaggctcctggcaaaaggtcagagtctggatcaccttctgctggaggccacagcaaacctcctcacagcccactggtcctcaagaggtgccacgtctccacacatcagcacaactacgcagcgcctccctccactcggaaggactatcctgctgccaagagggtcaagttggacagtgtcagagtcctgagacagatcagcaacaaccgaaaatgcaccagccccaggtcctcggacaccgaggagaatgtcaagaggcgaacacacaacgtcttggagcgccagaggaggaacgagctaaaacggagcttttttgccctgcgtgaccagatcccggagttggaaaacaatgaaaaggcccccaaggtagttatccttaaaaaagccacagcatacatcctgtccgtccaagcagaggagcaaaagctcatttctgaagaggacttgttgcggaaacgacgagaacagttgaaacacaaacttgaacagctacggaactcttgtgcgtaaggaaaagtaaggaaaacgattccttctaacagaaatgtcctgagcaatcacctatgaacttgtttcaaatgcatgatcaaatgcaacctcacaaccttggctgagtcttgagactgaaagatttagccataatgtaaactgcctcaaattggactttgggcataaaagaacttttttatgcttaccatcttttttttttctttaacagatttgtatttaagaattgtttttaaaaaattttaagatttacacaatgtttctctgtaaatattgccattaaatgtaaataactttaataaaacgtttatagcagttacacagaatttcaatcctagtatatagtacctagtattataggtactataaaccctaattttttttatttaagtacattttgctttttaaagttgatttttttctattgtttttagaaaaaataaaataactggcaaatatatcattgagccaaa

SEQ ID NO: 55360 - DNA, 1918 bp, Homo sapiens
agcttcaccaacaggaactatgacctcgactacgactcggtgcagccgtatttctactgcgacgaggaggagaacttctaccagcagcagcagcagagcgagctgcagcccccggcgcccagcgaggatatctggaagaaattcgagctgctgcccaccccgcccctgtcccctagccgccgctccgggctctgctcgccctcctacgttgcggtcacacccttctcccttcggggagacaacgacggcggtggcgggagcttctccacggccgaccagctggagatggtgaccgagctgctgggaggagacatggtgaaccagagtttcatctgcgacccggacgacgagaccttcatcaaaaacatcatcatccaggactgtatgtggagcggcttctcggccgccgccaagctcgtctcagagaagctggcctcctaccaggctgcgcgcaaagacagcggcagcccgaaccccgcccgcggccacagcgtctgctccacctccagcttgtacctgcaggatctgagcgccgccgcctcagagtgcatcgacccctcggtggtcttcccctaccctctcaacgacagcagctcgcccaagtcctgcgcctcgcaagactccagcgccttctctccgtcctcggattctctgctctcctcgacggagtcctccccgcagggcagccccgagcccctggtgctccatgaggagacaccgcccaccaccagcagcgactctgaggaggaacaagaagatgaggaagaaatcgatgttgtttctgtggaaaagaggcaggctcctggcaaaaggtcagagtctggatcaccttctgctggaggccacagcaaacctcctcacagcccactggtcctcaagaggtgccacgtctccacacatcagcacaactacgcagcgcctccctccactcggaaggactatcctgctgccaagagggtcaagttggacagtgtcagagtcctgagacagatcagcaacaaccgaaaatgcaccagccccaggtcctcggacaccgaggagaatgtcaagaggcgaacacacaacgtcttggagcgccagaggaggaacgagctaaaacggagcttttttgccctgcgtgaccagatcccggagttggaaaacaatgaaaaggcccccaaggtagttatccttaaaaaagccacagcatacatcctgtccgtccaagcagaggagcaaaagctcatttctgaagaggacttgttgcggaaacgacgagaacagttgaaacacaaacttgaacagctacggaactcttgtgcgtaaggaaaagtaaggaaaacgattccttctaacagaaatgtcctgagcaatcacctatgaacttgtttcaaatgcatgatcaaatgcaacctcacaaccttggctgagtcttgagactgaaagatttagccataatgtaaactgcctcaaattggactttgggcataaaagaacttttttatgcttaccatcttttttttttctttaacagatttgtatttaagaattgtttttaaaaaattttaagatttacacaatgtttctctgtaaatattgccattaaatgtaaataactttaataaaacgtttatagcagttacacagaatttcaatcctagtatatagtacctagtattataggtactataaaccctaattttttttatttaagtacattttgctttttaaagttgatttttttctattgtttttagaaaaaataaaataactggcaaatatatcattgagccaaaaaaaaaaaaaaaaaagagggaagaaaaaaaaaaaaaaagccctgcaaaatattctaaaacatggtcttcttaattttctatatggattgaccacagtcttatcttccaccattaagctgtataacaataaaatgttaatagtc

SEQ ID NO: 55361 - DNA, 1571 bp, Homo sapiens
cctgggaagttgcacttttcttgtccatgccataacccagctgtctttccctttatgagactcttaccttcatggtgagaggagtaagggtggctggctagattggttctttttttttttttttccttttttaagacggagtctcactctgtcactaggctggagtgcagtggcgcaatcaacctccaaccccctggttcaagagattctcctgcctcagcctcccaagtagctgggactacaggtgcacaccaccatgccaggctaatttttgtaattttagtagagatggggtttcatcgtgttggccaggatggtctctcctgacctcacgatccgcccacctcggcctcccaaagtgctgggattacaggtgtgagccagggcaccaggcttagatgtggctctttggggagataattttgtccagagacctttctaacgtattcatgccttgtatttgtacagcattaatctggtaattgattattttaatgtaaccttgctaaaggagtgatttctatttcctttcttaaagaggaggaacaagaagatgaggaagaaatcgatgttgtttctgtggaaaagaggcaggctcctggcaaaaggtcagagtctggatcaccttctgctggaggccacagcaaacctcctcacagcccactggtcctcaagaggtgccacgtctccacacatcagcacaactacgcagcgcctccctccactcggaaggactatcctgctgccaagagggtcaagttggacagtgtcagagtcctgagacagatcagcaacaaccgaaaatgcaccagccccaggtcctcggacaccgaggagaatgtcaagaggcgaacacacaacgtcttggagcgccagaggaggaacgagctaaaacggagcttttttgccctgcgtgaccagatcccggagttggaaaacaatgaaaaggcccccaaggtagttatccttaaaaaagccacagcatacatcctgtccgtccaagcagaggagcaaaagctcatttctgaagaggacttgttgcggaaacgacgagaacagttgaaacacaaacttgaacagctacggaactcttgtgcgtaaggaaaagtaaggaaaacgattccttctaacagaaatgtcctgagcaatcacctatgaacttgtttcaaatgcatgatcaaatgcaacctcacaaccttggctgagtcttgagactgaaagatttagccataatgtaaactgcctcaaattggactttgggcataaaagaacttttttatgcttaccatcttttttttttctttaacagatttgtatttaagaattgtttttaaaaaattttaagatttacacaatgtttctctgtaaatattgccattaaatgtaaataactttaataaaacgtttatagcagttacacagaatttcaatcctagtatatagtacctagtattataggtactataaaccctaattttttttatttaagtacattttgctttttaaagttgatttttttctattgtttttagaaaaaataaaataactggcaaatatatcattgagccaaa

SEQ ID NO: 55362 - DNA, 657 bp, Homo sapiens
agcttcaccaacaggaactatgacctcgactacgactcggtgcagccgtatttctactgcgacgaggaggagaacttctaccagcagcagcagcagagcgagctgcagcccccggcgcccagcgaggatatctggaagaaattcgagctgctgcccaccccgcccctgtcccctagccgccgctccgggctctgctcgccctcctacgttgcggtcacacccttctcccttcggggagacaacgacggcggtggcgggagcttctccacggccgaccagctggagatggtgaccgagctgctgggaggagacatggtgaaccagagtttcatctgcgacccggacgacgagaccttcatcaaaaacatcatcatccaggactgtatgtggagcggcttctcggccgccgccaagctcgtctcagagaagctggcctcctaccaggctgcgcgcaaagacagcggcagcccgaaccccgcccgcggccacagcgtctgctccacctccagcttgtacctgcaggatctgagcgccgccgcctcagagtgcatcgacccctcggtggtcttcccctaccctctcaacgacagcagctcgcccaagtcctgcgcctcgcaagactccagcagtagccacagggacctcaagagcaccaca

SEQ ID NO: 55363 - DNA, 1837 bp, Homo sapiens
agcttcaccaacaggaactatgacctcgactacgactcggtgcagccgtatttctactgcgacgaggaggagaacttctaccagcagcagcagcagagcgagctgcagcccccggcgcccagcgaggatatctggaagaaattcgagctgctgcccaccccgcccctgtcccctagccgccgctccgggctctgctcgccctcctacgttgcggtcacacccttctcccttcggggagacaacgacggcggtggcgggagcttctccacggccgaccagctggagatggtgaccgagctgctgggaggagacatggtgaaccagagtttcatctgcgacccggacgacgagaccttcatcaaaaacatcatcatccaggactgtatgtggagcggcttctcggccgccgccaagctcgtctcagagaagctggcctcctaccaggctgcgcgcaaagacagcggcagcccgaaccccgcccgcggccacagcgtctgctccacctccagcttgtacctgcaggatctgagcgccgccgcctcagagtgcatcgacccctcggtggtcttcccctaccctctcaacgacagcagctcgcccaagtcctgcgcctcgcaagactccagcgccttctctccgtcctcggattctctgctctcctcgacggagtcctccccgcagggcagccccgagcccctggtgctccatgaggagacaccgcccaccaccagcagcgactctgaggaggaacaagaagatgaggaagaaatcgatgttgtttctgtggaaaagaggcaggctcctggcaaaaggtcagagtctggatcaccttctgctggaggccacagcaaacctcctcacagcccactggtcctcaagaggtgccacgtctccacacatcagcacaactacgcagcgcctccctccactcggaaggactatcctgctgccaagagggtcaagttggacagtgtcagagtcctgagacagatcagcaacaaccgaaaatgcaccagccccaggtcctcggacaccgaggagaatgtcaagaggcgaacacacaacgtcttggagcgccagaggaggaacgagctaaaacggagcttttttgccctgcgtgaccagatcccggagttggaaaacaatgaaaaggcccccaaggtagttatccttaaaaaagccacagcatacatcctgtccgtccaagcagaggagcaaaagctcatttctgaagaggacttgttgcggaaacgacgagaacagttgaaacacaaacttgaacagctacggaactcttgtgcgtaaggaaaagtaaggaaaacgattccttctaacagaaatgtcctgagcaatcacctatgaacttgtttcaaatgcatgatcaaatgcaacctcacaaccttggctgagtcttgagactgaaagatttagccataatgtaaactgcctcaaattggactttgggcataaaagaacttttttatgcttaccatcttttttttttctttaacagatttgtatttaagaattgttaaaaaaaaaaaaagaaaaaaaaaaaaaaaaaaaaaaaaaaaagagggaagaaaaaaaaaaaaaaagagaaaaaaaaagaaaaacaaggaaaaacaaaagaaaaacaaacaataaaaaagaaaagaagagaaggggcgggggcgcgaacaaaaatacaaccgcgagggggcgcgccagaaaagtcgttggcagagcacccaagcgctctgtgataaaaaggaggggcgccccgaataggagaagacacgagattattacaaaccagacaagcggggggggccgccaaaaaaaaaagcgcggcgga

SEQ ID NO: 55364 - DNA, 496 bp, Homo sapiens
gtgttacacctcactctcaccttaactaaagcttgcacagttaataaatctttttatcttttccttggtattttaactgtaagactgcatttaaaaggttcctaggagctcatttaccaacctcagggaaatccttttttaaaagcctttttaaagtggattttacacaggactgaacttctcctcaagttttgttctaaataattctctgacaccgcccccacccgttatgagagtgaagcacataggactgacttcaaggttaagtaagatgcattcagctgaggtgtcgataaatatcatgctcatggttttatataacctagttttggttttattctagtgaggtacagctttcagagcattacctaaaaagtaacaaatgtcaaaaaaggaagaatgacaaaatctttccatggaactctctgaaagaaaagtcaaggaaagtgataatatgatattttacgcacacacttttctattccgccttaactat

SEQ ID NO: 55365 - DNA, 346 bp, Homo sapiens
ctcactttagtttgagtcaatatctgagaaaaaaagaatggagtaaaagcacagaaagcaaaacttagcttagaaaatatttcctaattcaaaaaatgaacaagtcagattctgtaaagatatccagtgaaatcttgaagaaatattgtattgattattaattaatctgattggaaagtgatcttgggttcacaatgaggttgttgaacaagtagcattttcatacaattgcaaaccaattcaatgtttttgcatacactgtttacatttcttttcaaaatttgatttcttcttcgtgatcctagtcaaattctgccttctcagtaaatctttatcaagtttgcag

SEQ ID NO: 55366 - DNA, 374 bp, Homo sapiens
gttaaaagtacatattgaattattattgctgaatttataaaattaactgaataagttattttgttgtcttaatgacaatgtaataactaggcaaacactgacaatcctagaattggtctgtgtatatttttctgattggaggggggcatttctgaataacattaaaatgcaaaattaataagcattacaaatactctcctgtggaattagcaatattttacaaaaaataaatgtgtgtctatataaaattttgtattctttattaggaaaaacagtagggtaatcatgaatttgaaagtgccatagcacttttttctgtgaatggccaaaattatttaggaaaattattaagtgtaatttcattgtgatcaaaa

SEQ ID NO: 55367 - DNA, 526 bp, Homo sapiens
ccaccacctcttatcacaacccagacattcccttctgtgatctcaggtcttcagataaactcaaccagctgtcaaccagaaaatgtttaaattcacccacagcctggaaccccctttcctccaccccctcgcccccacccaccacttctacttgtctcttttctggaccaaaccaatgtatttctcaaatgtatttgattgctgtctcatgccttcctaaaatgtataaaaccaaactgcaccccaaccaccttgggcacatgttctcaggacctcctgagggctgtgtaatgggccatggtcagtcgtatttggctcagaataaatttcttcaaatattttacagagtttgactctttttgttgacaccttttcttagacagctactacaagatgttcttcagaaaatggatggcgcaaactgagaacaagtaagaggtggattcagaaagttaggagatccggtgtgaggagagaagtgtagttggtggccagggtgacagccatttaggttccatagacaaac

SEQ ID NO: 55368 - DNA, 459 bp, Homo sapiens
agcaaaccaaattcaacagcacgttaaaaggatcattcaccttgatcaagtgagatttatcccggcaatgcaaggatggttcaacatcaacacacttattgcaaatcaataaatgtgatataccacattaacagaatgaagggggaacaaccccacacaatcatctcaatagatgcagaaaaaaggctaagtatagtggctcatgcctgtcatcccagcattttgggaggctggggtgggaggatggcttgaattcaagagctcaagactagcctgggcaacacagcaagataccgtctctacaaaaacagctgggcatgatgcacatgcctatattcccaagtactcagggatgctaaggtagaaaggtcccttgagcccaagagtttaggtctgcagtgagccatgattgcaccactgcactccaatcaggctgacaagaatgcaacagtgtcttaa

SEQ ID NO: 55369 - DNA, 518 bp, Homo sapiens
tgcgtggatatgtgtctagcacagtgaaagatgctaagacaggcctgggaaacatatgatttatctgtttaaacatatattccgccccccccttttttttttctgagactaggtcttgctctgttgcccagtacagtggcgtgatcactgttcactgcagcctcaacttcctgggctccagcagtcctcccatccactaacacatttcttgttctccagtcctcttacacagtaactgccttggtttatcctcattcagcacaactaaaggctggatttcttattcatgatgtttcttcctcctcctatccccaagtaggcacttagttgactgattacagaatcacaaagttggttataattccatttcttcatctgactttgaacttaagtgttccaattactttgcctgatcctaataagtcagtagcgtgctaatgcttgccttgatatttctgaaatatacagggttgtgattagcatgggattgcatcattagaaagctaagttgaaagtgg

SEQ ID NO: 55370 - DNA, 281 bp, Homo sapiens
ctgacacctaatggagaaaagcatggagttcatgtagattattaaggaaagcagatagacagatgcaaagcttagagaagaatattaaatgatttatgtgataggcatatgcaattgtgcagtaggttagcagaattatctgagcttccatactcatagccttcatgatctgtctcaattttacctccaaaatgagtattttaaccatttttttcttctccaatttctccaatcactactcttctattggcctaaatggtcccatcttaaatcaacccacc

SEQ ID NO: 55371 - DNA, 295 bp, Homo sapiens
gaaaaaagagaaagttttcaaatgcctgggggagatcctcttattcttaggcaagtggttcttccaccagagagaaaagtttaattactgcctgatggagctgaaccccttgggtggggaagggaaaggctgcagtggcttctggatgggaaccagccacccggctgtgtgagactcttgagccatgtgtcccagccccagcatggaggggagggggagcaaggagcccctgctcccctgtcctgaaaaaggaaggaaagggcctttcccccaaccccagggagccacagggttt

SEQ ID NO: 55372 - DNA, 296 bp, Homo sapiens
atactgcgtgatcctatacttaaaatatataaccaagtcaaactaatcagtgctgttagaagtcatgataatagttattcttggactactgattggaagcaggaaatttctgaggtgctggaatgctttatctttttatcttgttgctggtttaaatttgagtttgcaaaaattgattaagccatgcacttattacatatggtatttattggagtatattatacctttattaacagttaaggttgaaaaaattatttagaagattcctatcccacaaaatcactatctacattatt

SEQ ID NO: 55373 - DNA, 3777 bp, Homo sapiens
  misc_feature (1)..(2): n is a, c, g, or t
  misc_feature (5)..(5): n is a, c, g, or t
  misc_feature (7)..(8): n is a, c, g, or t
nncangnncttcagcatgactactcagttgccagcttacgtggcaattttgcttttctatgtctcaagagccagctgccaggacactttcattgcagctgtttatgagcatgcagcgatattgcccaatgccaccctaacaccagtgtctcgtgaggaggctttggcattaatgaatcggaatctggacattttggaaggagcgatcacatcagcagcagatcagggtgcgcatattattgtgactccagaagatgctatttatggctggaacttcaacagggactctctctacccatatttggaggacatcccagaccctgaagtaaactggatcccctgtaataatcgtaacagatttggccagaccccagtacaagaaagactcagctgcctggccaagaacaactctatctatgttgtggcaaatattggggacaagaagccatgcgataccagtgatcctcagtgtccccctgatggccgttaccaatacaacactgatgtggtatttgattctcaaggaaaactggtggcacgctaccataagaaaacacctttggaagttttggcattttcacatgctttgatatactcttccatgatcctgctgttaccttggtgaaagatttccacgtggacaccatagtattcccaacagcttggatgaatgttttgccacatttgtcagctgttgaattccactcagcttgggctatgggcatgagggtcaatttccttgcatccaacatacattacccctcaaagaaaatgacaggaagtggcatctatgcacccaattcttcaagagcatttcattatgatatgaagacagaagagggaaaactcctcctctcgcaactggattcccacccatcccattctgcagtggtgaactggacttcctatgccagcagtatagaagcgctctcatcaggaaacaaggaatttaaaggcactgtctttttcgatgaattcacttttgtgaagctcacaggagttgcaggaaattatacagtttgtcagaaagatctctgctgtcatttaagctacaaaatgtctgagaacataccaaatgaagtgtacgctctaggggcatttgacggactgcacactgtggaagggcgctattatctacagatttgtaccctgttgaaatgtaaaacgactaatttaaacacttgcggtgactcagctgaaacagcttctaccaggtttgaaatgttctccctcagtggcactttcggaacccagtatgtctttcctgaggtgttgctgagtgaaaatcagcttgcacctggagaatttcaggtgtcaactgacggacgcttgtttagtctgaagccaacatccggacctgtcttaacagtaactctgtttgggaggttgtatgagaaggactgggcatcaaatgcttcatcaggcctcacagcacaagcaagaataataatgctaatagttatagcacctattgtatgctcattaagttggtagaatattgactttttctcttttttatttgggataatttaaaaaatgatggatgagaaaagaaagattggtccgggttaatattatcctctagtataagtgaattactagtttctctttatttagacaaacacacacacaccagataatataaacttaataaattatctgttaatgtagattttatttaaaaaactatatttgaacattggtctttcttggacgtgagctaattatatcaaataagtatcacaaatcttttacgcagaagaaataaaaactacgggtagaaaacataagaactatcataaaatttacttacaaggaggctgctcttgttaccacttttattatattacgtatcacttattcagctctgctgaaaatttccaatgactttgtttgtttgctcttttagttttttacctaaacaatacattttgattctcttgtgggttgataatgtctccccaaaatttacatgttgaagcacctcagaatgtgactgtatttggagacagggtctttaaagaggtaaaataaggtcattaggatagaccctaattcaatatgactgatgatcataaaagaagaggcgagtagggcacaacaggcacaaagggagaccataaggagacacagaggaaggacaactctttacaagctaagaagagagggcctcagaagaaaccaaccctgccaacaccttgatcttggacttccagcctccaaaactatgagaaataaatttctattgtttaagtcacccagtccatggtactttgttaggcagccctggcaaatgaatcaaagacccattcctgttcctctccccaccactactgttttctactgtaatctgaagcttcaacaaaaggcttacctggtaagaatattcagctggtctgggtcctcaagactccaatagacactcttaaagaaggattgctgatggattgatagtgaaaccattagatcattgaattcctctggaattagaaaaccagagagtcccattttaagaaattagatatttaatatagcattgtgtgttctattttagtaacagcagaatctcttgacattacacaactcagtgaaacaacatcatttaagccaaaatatctcccaactgactgatagactctgagcactaatatcatagtgctgtgatgatggacaattacatagtaccgataacagccatgcactgtgcaaagcatgcccttctgcacaggagagcaaggcacttgcagtagtgatctatgccagcaaaacatcattttgagacaaacatttttgtggcagatgtttttcctaaaaagtactatatcatccaagaaatatttgagtaaaatcccttgttcttttgggtgacattaactgacatttgctttttttcaagacctaatagaaaataagaaagcccataatgtatttagaaacaggaatcctcagagcaattctctgtattctcatataatttcaatgtaaaacagaaaacatattgatgtgttggtgataggcttgaattattaaaaacttcaaaaacatcctaagtgtttcttttttgctcaacgttgtcaactatagtaggtctcccttgtggtgtaatgaattgcccccaaactattatcttaaaacaacaaacatttattatcttatagcatttctgagggtcaggatctgggactggcttagtggagttgttctggatcagggcctttggaaagttgtagttaacttgtccccagggctgccatcatctcaaggctcgggtggggctggagaaaatctgcttctcagctcactcacggcggttgccaggcctccattctttaggatgctagaaaaactttcataaaatgtcatctggcttctcctagagcaatgatactgagagagaaagcacatgagagaaagagcgagggaacttggatgtaagccacagtctttgaaaacctaatcacagaagtgacatctcttcttccacatgatgttggtcacatggaccaacaatggcacaacgtggacagaatcaaacagagttgagaatatcaggaggtggggcttcatgggggccattttggatgctatcatagtgaatatatgtatttatatttatatctgtatatattgcaatgtaatttaaaaaataggattgttttccttttctttttgctatatgtgatatgtatttcaaaatacactcccaatagttacgtctgaaaagcactacactaaaaaactttctatacattgaataattaaattaaataatctaata

SEQ ID NO: 55374 - DNA, 3723 bp, Homo sapiens
  misc_feature (1)..(2): n is a, c, g, or t
  misc_feature (5)..(5): n is a, c, g, or t
  misc_feature (7)..(8): n is a, c, g, or t
nncangnncttcagcatgactactcagttgccagcttacgtggcaattttgcttttctatgtctcaagagccagctgccaggacactttcattgcagctgtttatgagcatgcagcgatattgcccaatgccaccctaacaccagtgtctcgtgaggaggctttggcattaatgaatcggaatctggacattttggaaggagcgatcacatcagcagcagatcagggtgcgcatattattgtgactccagaagatgctatttatggctggaacttcaacagggactctctctacccatatttggaggacatcccagaccctgaagtaaactggatcccctgtaataatcgtaacagatttggccagaccccagtacaagaaagactcagctgcctggccaagaacaactctatctatgttgtggcaaatattggggacaagaagccatgcgataccagtgatcctcagtgtccccctgatggccgttaccaatacaacactgatgtggtatttgattctcaaggaaaactggtggcacgctaccataagaaaacacctttggaagttttggcattttcacatgctttgatatactcttccatgatcctgctgttaccttggtgaaagatttccacgtggacaccatagtattcccaacagcttggatgaatgttttgccacatttgtcagctgttgaattccactcagcttgggctatgggcatgagggtcaatttccttgcatccaacatacattacccctcaaagaaaatgacaggaagtggcatctatgcacccaattcttcaagagcatttcattatgatatgaagacagaagagggaaaactcctcctctcgcaactggattcccacccatcccattctgcagtggtgaactggacttcctatgccagcagtatagaagcgctctcatcaggaaacaaggaatttaaaggcactgtctttttcgatgaattcacttttgtgaagctcacaggagttgcaggaaattatacagtttgtcagaaagatctctgctgtcatttaagctacaaaatgtctgagaacataccaaatgaagtgtacgctctaggggcatttgacggactgcacactgtggaagggcgctattatctacagatttgtaccctgttgaaatgtaaaacgactaatttaaacacttgcggtgactcagctgaaacagcttctaccaggtttgaaatgttctccctcagtggcactttcggaacccagtatgtctttcctgaggtgttgctgagtgaaaatcagcttgcacctggagaatttcaggtgtcaactgacggacgcttgtttagtctgaagccaacatccggacctgtcttaacagtaactctgtttgggaggttgtatgagaaggactgggcatcaaatgcttcatcaggcctcacagcacaagcaagaataataatgctaatagttatagcacctattgtatgctcattaagttggtagaatattgactttttctcttttttatttgggataatttaaaaaatgatggatgagaaaagaaagattggtccgggttaatattatcctctagtataagtgaattactagtttctctttatttagacaaacacacacacaccagataatataaacttaataaattatctgttaatgtagattttatttaaaaaactatatttgaacattggtctttcttggacgtgagctaattatatcaaataagtatcacaaatcttttacgcagaagaaataaaaactacgggtagaaaacataagaactatcataaaatttacttacaaggaggctgctcttgttaccacttttattatattacgtatcacttattcagctctgctgaaaatttccaatgactttgtttgtttgctcttttagttttttacctaaacaatacattttgattctcttgtgggttgataatgtctccccaaaatttacatgttgaagcacctcagaatgtgactgtatttggagacagggtctttaaagaggtaaaataaggtcattaggatagaccctaattcaatatgactgatgatcataaaagaagaggcgagtagggcacaacaggcacaaagggagaccataaggagacacagaggaaggacaactctttacaagctaagaagagagggcctcagaagaaaccaaccctgccaacaccttgatcttggacttccagcctccgttaggcagccctggcaaatgaatcaaagacccattcctgttcctctccccaccactactgttttctactgtaatctgaagcttcaacaaaaggcttacctggtaagaatattcagctggtctgggtcctcaagactccaatagacactcttaaagaaggattgctgatggattgatagtgaaaccattagatcattgaattcctctggaattagaaaaccagagagtcccattttaagaaattagatatttaatatagcattgtgtgttctattttagtaacagcagaatctcttgacattacacaactcagtgaaacaacatcatttaagccaaaatatctcccaactgactgatagactctgagcactaatatcatagtgctgtgatgatggacaattacatagtaccgataacagccatgcactgtgcaaagcatgcccttctgcacaggagagcaaggcacttgcagtagtgatctatgccagcaaaacatcattttgagacaaacatttttgtggcagatgtttttcctaaaaagtactatatcatccaagaaatatttgagtaaaatcccttgttcttttgggtgacattaactgacatttgctttttttcaagacctaatagaaaataagaaagcccataatgtatttagaaacaggaatcctcagagcaattctctgtattctcatataatttcaatgtaaaacagaaaacatattgatgtgttggtgataggcttgaattattaaaaacttcaaaaacatcctaagtgtttcttttttgctcaacgttgtcaactatagtaggtctcccttgtggtgtaatgaattgcccccaaactattatcttaaaacaacaaacatttattatcttatagcatttctgagggtcaggatctgggactggcttagtggagttgttctggatcagggcctttggaaagttgtagttaacttgtccccagggctgccatcatctcaaggctcgggtggggctggagaaaatctgcttctcagctcactcacggcggttgccaggcctccattctttaggatgctagaaaaactttcataaaatgtcatctggcttctcctagagcaatgatactgagagagaaagcacatgagagaaagagcgagggaacttggatgtaagccacagtctttgaaaacctaatcacagaagtgacatctcttcttccacatgatgttggtcacatggaccaacaatggcacaacgtggacagaatcaaacagagttgagaatatcaggaggtggggcttcatgggggccattttggatgctatcatagtgaatatatgtatttatatttatatctgtatatattgcaatgtaatttaaaaaataggattgttttccttttctttttgctatatgtgatatgtatttcaaaatacactcccaatagttacgtctgaaaagcactacactaaaaaactttctatacattgaataattaaattaaataatctaata

SEQ ID NO: 55375 - DNA, 595 bp, Homo sapiens
gtaaattagaagacattgattacgggcatctcactaataaatgaatcagtgccagtttcatagctccaatttttcttgtacttggcaacatttcaaatttttctgatagaatggaatttggccagtatttttgtttcttcattctgttatagtaaattttaaaagtgatttatgggattgtaaaacttgaaggtagcctttgcctacttttttgttttaatcaggtgtcaactgacggacgcttgtttagtctgaagccaacatccggacctgtcttaacagtaactctgtttgggaggttgtatgagaaggactgggcatcaaatgcttcatcaggcctcacagcacaagcaagaataataatgctaatagttatagcacctattgtatgctcattaagttggtagaatattgactttttctcttttttatttgggataatttaaaaaatgatggatgagaaaagaaagattggtccgggttaatattatcctctagtataagtgaattactagtttctctttatttagacaaacacacacacaccagataatataaacttaataaattatctgttaatgtagattttatttaa

SEQ ID NO: 55376 - DNA, 3845 bp, Homo sapiens
  misc_feature (1)..(2): n is a, c, g, or t
  misc_feature (5)..(5): n is a, c, g, or t
  misc_feature (7)..(8): n is a, c, g, or t
nncangnncttcagcatgactactcagttgccagcttacgtggcaattttgcttttctatgtctcaagagccagctgccaggacactttcattgcagctgtttatgagcatgcagcgatattgcccaatgccaccctaacaccagtgtctcgtgaggaggctttggcattaatgaatcggaatctggacattttggaaggagcgatcacatcagcagcagatcagggtgcgcatattattgtgactccagaagatgctatttatggctggaacttcaacagggactctctctacccatatttggaggacatcccagaccctgaagtaaactggatcccctgtaataatcgtaacagatttggccagaccccagtacaagaaagactcagctgcctggccaagaacaactctatctatgttgtggcaaatattggggacaagaagccatgcgataccagtgatcctcagtgtccccctgatggccgttaccaatacaacactgatgtggtatttgattctcaaggaaaactggtggcacgctaccataagaaaacaaaaccttttcatgggtgaaaatcaattcaatgtacccaaggagcctgagattgtgactttcaataccacctttggaagttttggcattttcacatgctttgatatactcttccatgatcctgctgttaccttggtgaaagatttccacgtggacaccatagtattcccaacagcttggatgaatgttttgccacatttgtcagctgttgaattccactcagcttgggctatgggcatgagggtcaatttccttgcatccaacatacattacccctcaaagaaaatgacaggaagtggcatctatgcacccaattcttcaagagcatttcattatgatatgaagacagaagagggaaaactcctcctctcgcaactggattcccacccatcccattctgcagtggtgaactggacttcctatgccagcagtatagaagcgctctcatcaggaaacaaggaatttaaaggcactgtctttttcgatgaattcacttttgtgaagctcacaggagttgcaggaaattatacagtttgtcagaaagatctctgctgtcatttaagctacaaaatgtctgagaacataccaaatgaagtgtacgctctaggggcatttgacggactgcacactgtggaagggcgctattatctacagatttgtaccctgttgaaatgtaaaacgactaatttaaacacttgcggtgactcagctgaaacagcttctaccaggtttgaaatgttctccctcagtggcactttcggaacccagtatgtctttcctgaggtgttgctgagtgaaaatcagcttgcacctggagaatttcaggtgtcaactgacggacgcttgtttagtctgaagccaacatccggacctgtcttaacagtaactctgtttgggaggttgtatgagaaggactgggcatcaaatgcttcatcaggcctcacagcacaagcaagaataataatgctaatagttatagcacctattgtatgctcattaagttggtagaatattgactttttctcttttttatttgggataatttaaaaaatgatggatgagaaaagaaagattggtccgggttaatattatcctctagtataagtgaattactagtttctctttatttagacaaacacacacacaccagataatataaacttaataaattatctgttaatgtagattttatttaaaaaactatatttgaacattggtctttcttggacgtgagctaattatatcaaataagtatcacaaatcttttacgcagaagaaataaaaactacgggtagaaaacataagaactatcataaaatttacttacaaggaggctgctcttgttaccacttttattatattacgtatcacttattcagctctgctgaaaatttccaatgactttgtttgtttgctcttttagttttttacctaaacaatacattttgattctcttgtgggttgataatgtctccccaaaatttacatgttgaagcacctcagaatgtgactgtatttggagacagggtctttaaagaggtaaaataaggtcattaggatagaccctaattcaatatgactgatgatcataaaagaagaggcgagtagggcacaacaggcacaaagggagaccataaggagacacagaggaaggacaactctttacaagctaagaagagagggcctcagaagaaaccaaccctgccaacaccttgatcttggacttccagcctccaaaactatgagaaataaatttctattgtttaagtcacccagtccatggtactttgttaggcagccctggcaaatgaatcaaagacccattcctgttcctctccccaccactactgttttctactgtaatctgaagcttcaacaaaaggcttacctggtaagaatattcagctggtctgggtcctcaagactccaatagacactcttaaagaaggattgctgatggattgatagtgaaaccattagatcattgaattcctctggaattagaaaaccagagagtcccattttaagaaattagatatttaatatagcattgtgtgttctattttagtaacagcagaatctcttgacattacacaactcagtgaaacaacatcatttaagccaaaatatctcccaactgactgatagactctgagcactaatatcatagtgctgtgatgatggacaattacatagtaccgataacagccatgcactgtgcaaagcatgcccttctgcacaggagagcaaggcacttgcagtagtgatctatgccagcaaaacatcattttgagacaaacatttttgtggcagatgtttttcctaaaaagtactatatcatccaagaaatatttgagtaaaatcccttgttcttttgggtgacattaactgacatttgctttttttcaagacctaatagaaaataagaaagcccataatgtatttagaaacaggaatcctcagagcaattctctgtattctcatataatttcaatgtaaaacagaaaacatattgatgtgttggtgataggcttgaattattaaaaacttcaaaaacatcctaagtgtttcttttttgctcaacgttgtcaactatagtaggtctcccttgtggtgtaatgaattgcccccaaactattatcttaaaacaacaaacatttattatcttatagcatttctgagggtcaggatctgggactggcttagtggagttgttctggatcagggcctttggaaagttgtagttaacttgtccccagggctgccatcatctcaaggctcgggtggggctggagaaaatctgcttctcagctcactcacggcggttgccaggcctccattctttaggatgctagaaaaactttcataaaatgtcatctggcttctcctagagcaatgatactgagagagaaagcacatgagagaaagagcgagggaacttggatgtaagccacagtctttgaaaacctaatcacagaagtgacatctcttcttccacatgatgttggtcacatggaccaacaatggcacaacgtggacagaatcaaacagagttgagaatatcaggaggtggggcttcatgggggccattttggatgctatcatagtgaatatatgtatttatatttatatctgtatatattgcaatgtaatttaaaaaataggattgttttccttttctttttgctatatgtgatatgtatttcaaaatacactcccaatagttacgtctgaaaagcactacactaaaaaactttctatacattgaataattaaattaaataatctaata

SEQ ID NO: 55377 - DNA, 2777 bp, Homo sapiens
ccacctgcaaagtggaaacaataagaccagttagcggctgctgctttagtcaagcaagagatgaaggtgacttggaatatgctgtacagatggcattaaatgaatatggatctccttttggaaacttttcatctgcatgatttgtaccctgttgaaatgtaaaacgactaatttaaacacttgcggtgactcagctgaaacagcttctaccaggtttgaaatgttctccctcagtggcactttcggaacccagtatgtctttcctgaggtgttgctgagtgaaaatcagcttgcacctggagaatttcaggtgtcaactgacggacgcttgtttagtctgaagccaacatccggacctgtcttaacagtaactctgtttgggaggttgtatgagaaggactgggcatcaaatgcttcatcaggcctcacagcacaagcaagaataataatgctaatagttatagcacctattgtatgctcattaagttggtagaatattgactttttctcttttttatttgggataatttaaaaaatgatggatgagaaaagaaagattggtccgggttaatattatcctctagtataagtgaattactagtttctctttatttagacaaacacacacacaccagataatataaacttaataaattatctgttaatgtagattttatttaaaaaactatatttgaacattggtctttcttggacgtgagctaattatatcaaataagtatcacaaatcttttacgcagaagaaataaaaactacgggtagaaaacataagaactatcataaaatttacttacaaggaggctgctcttgttaccacttttattatattacgtatcacttattcagctctgctgaaaatttccaatgactttgtttgtttgctcttttagttttttacctaaacaatacattttgattctcttgtgggttgataatgtctccccaaaatttacatgttgaagcacctcagaatgtgactgtatttggagacagggtctttaaagaggtaaaataaggtcattaggatagaccctaattcaatatgactgatgatcataaaagaagaggcgagtagggcacaacaggcacaaagggagaccataaggagacacagaggaaggacaactctttacaagctaagaagagagggcctcagaagaaaccaaccctgccaacaccttgatcttggacttccagcctccaaaactatgagaaataaatttctattgtttaagtcacccagtccatggtactttgttaggcagccctggcaaatgaatcaaagacccattcctgttcctctccccaccactactgttttctactgtaatctgaagcttcaacaaaaggcttacctggtaagaatattcagctggtctgggtcctcaagactccaatagacactcttaaagaaggattgctgatggattgatagtgaaaccattagatcattgaattcctctggaattagaaaaccagagagtcccattttaagaaattagatatttaatatagcattgtgtgttctattttagtaacagcagaatctcttgacattacacaactcagtgaaacaacatcatttaagccaaaatatctcccaactgactgatagactctgagcactaatatcatagtgctgtgatgatggacaattacatagtaccgataacagccatgcactgtgcaaagcatgcccttctgcacaggagagcaaggcacttgcagtagtgatctatgccagcaaaacatcattttgagacaaacatttttgtggcagatgtttttcctaaaaagtactatatcatccaagaaatatttgagtaaaatcccttgttcttttgggtgacattaactgacatttgctttttttcaagacctaatagaaaataagaaagcccataatgtatttagaaacaggaatcctcagagcaattctctgtattctcatataatttcaatgtaaaacagaaaacatattgatgtgttggtgataggcttgaattattaaaaacttcaaaaacatcctaagtgtttcttttttgctcaacgttgtcaactatagtaggtctcccttgtggtgtaatgaattgcccccaaactattatcttaaaacaacaaacatttattatcttatagcatttctgagggtcaggatctgggactggcttagtggagttgttctggatcagggcctttggaaagttgtagttaacttgtccccagggctgccatcatctcaaggctcgggtggggctggagaaaatctgcttctcagctcactcacggcggttgccaggcctccattctttaggatgctagaaaaactttcataaaatgtcatctggcttctcctagagcaatgatactgagagagaaagcacatgagagaaagagcgagggaacttggatgtaagccacagtctttgaaaacctaatcacagaagtgacatctcttcttccacatgatgttggtcacatggaccaacaatggcacaacgtggacagaatcaaacagagttgagaatatcaggaggtggggcttcatgggggccattttggatgctatcatagtgaatatatgtatttatatttatatctgtatatattgcaatgtaatttaaaaaataggattgttttccttttctttttgctatatgtgatatgtatttcaaaatacactcccaatagttacgtctgaaaagcactacactaaaaaactttctatacattgaataattaaattaaataatctaata

SEQ ID NO: 55378 - DNA, 782 bp, Homo sapiens
aaggcgcgcagcgctgggcgcaaagcgccagtctccgccttgcgagctcagagtgtgcccgctgcgccgccgctgtccgtacctgccgccgccgccaccgccaccatgcccaacttcgccggcacctggaagatgcgcagcagcgagaatttcgacgagctgctgaaggcactgggtgtgaacgccatgctgaggaaagtggccgtagcggctgcgtccaagccgcacgtggagatccgccaggacggggatcagttctacatcaagacatccaccacggtgcgcaccactgagatcaacttcaaggtcggagaaggctttgaggaggagaccgtggacggacgcaagtgcaggagtttagccacttgggagaatgagaacaagatccactgcacgcaaactcttcttgaaggggacggccccaaaacctactggacccgtgagctggccaacgatgaacttatcctgacgtttggcgccgatgacgtggtctgcaccagaatttatgtccgagagtgaaggcagctggcttgctcctactttcaggaagggatgcaggctcccctgaggaatatgtcatagttctgagctgccagtggaccgcccttttcccctaccaatattaggtgatcccgttttccccatgacaatgttgtagtgtcccccacccccaccccccaggccttggtgcctcttgtatccctagtgctccatagtttggcatttgcacggtttcgaagtcattaaactggttagacgtgtctcaacctttaacctttttt

SEQ ID NO: 55379 - DNA, 402 bp, Homo sapiens
caaagagtttttaacagggcaataagtggccttattagtgatatgctttaaacatttttgcacaggcatctgcactgattggttttccttttcttcttctctgcagacgtttggcgccgatgacgtggtctgcaccagaatttatgtccgagagtgaaggcagctggcttgctcctactttcaggaagggatgcaggctcccctgaggaatatgtcatagttctgagctgccagtggaccgcccttttcccctaccaatattaggtgatcccgttttccccatgacaatgttgtagtgtcccccacccccaccccccaggccttggtgcctcttgtatccctagtgctccatagtttggcatttgcacggtttcgaagtcattaaactggttagacgtgtct

SEQ ID NO: 55380 - DNA, 787 bp, Homo sapiens
gaaagatattttcagacaagtaaacagatattctaaaggatatactttaggaagaaatataatcccagatggaaggtctgacataaaagaaaacatagacgagcgcagatattgataaatacatgggaaatctgaacacttccagtgtaaaacaagaatattattttaagtgggtataaataaataagatagaaaataccggccaacatataacatacgttaggaggagtgattcatagttcaggtatgctaagattcttacatgatttggaagaagggtgtgggtgcgcaccactgagatcaacttcaaggtcggagaaggctttgaggaggagaccgtggacggacgcaagtgcaggagtttagccacttgggagaatgagaacaagatccactgcacgcaaactcttcttgaaggggacggccccaaaacctactggacccgtgagctggccaacgatgaacttatcctgacgtttggcgccgatgacgtggtctgcaccagaatttatgtccgagagtgaaggcagctggcttgctcctactttcaggaagggatgcaggctcccctgaggaatatgtcatagttctgagctgccagtggaccgcccttttcccctaccaatattaggtgatcccgttttccccatgacaatgttgtagtgtcccccacccccaccccccaggccttggtgcctcttgtatccctagtgctccatagtttggcatttgcacggtttcgaagtcattaaactggttagacgtgtctcaacctttaacctttttt

SEQ ID NO: 55381 - DNA, 200 bp, Homo sapiens
cttctgtctcacatctgtttacatctaacacattagtagaatcccaaagcattagtatccatataccagatcagaaatccaaacccagcactcattaccactagctgcatataacattttcataattattaagttgccattctagaagagaagaaatataatttgtatacatacaaatgtgtgtgcgtgtgtgtgtgagt

SEQ ID NO: 55382 - DNA, 692 bp, Homo sapiens
tgggaggtcgagcgtgcagtgagctgagattacaccactgcactccagcctggataacagagtgagaccctgtctagaaaaaaaaaaaaaagttatagaaaaatgtttcttgaaatggagaaatatttgccatgtgtattgctacttgaaaaaacatcatcagtatatacatggttttatatttaaactttttctaggtatgtgtataagtatcaaaaatagactaaaaagatcatagacattattggttactgcctgaatattcctctcccatctccaatcccacacccatattatgtcctctcttgctggcagaatgcttatccttggctcagccatgtgctcatagaagttgactctatgcctaactcagaaggtaaatttgattagtctaatccaaatgttgtaggtcaatttccccttagtagtgattggtttagatgtagacacatgatatatgggagaatcttctggtaaagaaatgaacagtcctctttctgtgaatactgcatcttgatataatgtctggaactgcaacagccgtcttaaaccttgagggtggcagagaagggagatggaaagacggatccttgatgactttggtgaactactgaattaaccaatcctggaatggcccatcactgactctttgtaatatgatataataaaatgttccattgtttgaaccaatt

SEQ ID NO: 55383 - DNA, 265 bp, Homo sapiens
ttggtttaatacatatgtatttcaggttgatggttgatttcattagcaaatctcattgttatgcaatgtctgttcttctgcagaaaaatgaatattgtattctcacagcctctgtgtgtatctattatgttgcaataaatgaaaatatacacatctgtatctgtctttggcttactctttccattttgtttttaaggaaaagaaagaaaattgaataatattcttttgttgttaaatttgttcaaaagccatttcaatttatatt

SEQ ID NO: 55384 - DNA, 320 bp, Homo sapiens
ctgtgcaatatttgaagtagcatatgcttatactaaaaattattcatcatctgaaattaaatttaactgggtgtcctgtatttatctggtgaccctaccacagggaaagttttacctttacccttttgaaggtggggcaggatttgagaaggggacttggggtgaaagaccccttcatattaccttctcagcgccagactgatgccaggaaggccagactcatgcctgcggtgcagtgattatttgatgggtcagaagacccctcagtgcaggacatagagagcccccgttcaccagttgttaagctgcaccccacagcc

SEQ ID NO: 55385 - DNA, 655 bp, Homo sapiens
agttaaaaagaaaattgtactacaagggttatacaggttgagcatcccaaatctgaaaatctgaaatccaaaatgctccaaaatattaaactttttgagtgccagcatgactctcaaagaaaatgttcattggagcagtttgagttttaaatatttggatttgggatgcccaactggcaatgcaagtcttccaaaatctgacaaaatctgaaattcaacaaaatttgaaatctgaatttttctggccccaagccaggtactcagataacctgtaattaaaactccggtcctctgcctcatgtctttatgactttccctcctgtgtcctgctttcagagcaaccataggtgtttcttctatttatttacatatttaaaaattatatacttttactgtttgtttttcagttttattatttatttatttattttttgagacagagtattgctctatcgcccaggctgaagtgcagtggtgcgatcttggctcattgcagcctccacctcttgggttcaactgattctcctgcctcagcttcccaggtagctgggactaaaggtgcatgccagccaaatgatttttgataaagatgcataggcaattcaatggagaaaagagaatgaatggtttttaaacaactggacatttataagaa

SEQ ID NO: 55386 - DNA, 285 bp, Homo sapiens
gaaatatcaaacatctgaggagcttataattagttaagcatttacgtgtattaatatatcgtcatgtggacagttgagaggggagaaggcactagacaaatttaaaattgttagaaaccattggcaactgatattcagagcctaagttaaaagcaggatatgtctcaggagcaaatcttttgtgtaaatcctggtatttttactgcagacctttaaaatgacagacgcgggtgagtaaaaattacttctggaaatggatatgattaattaattcaattaattaat

SEQ ID NO: 55387 - DNA, 230 bp, Homo sapiens
cccaccttcctgaactgtctcttgctcctgtttgatactgtcatgctgcacgaagcttacacttgctatctctcacttccctcttagtcatctgtgatgctggctaagggagctaggccagtcagcagtgacctgttgcccttggtttattataagcaaactgttcacaagaaatgaacttctgttgttttataaatgatatgcatcacagaacacagaataatatcaaa

SEQ ID NO: 55388 - DNA, 458 bp, Homo sapiens
cagccaccgtgccataaggaaactcaagccatgttgtccatgttgaaattgacagccatgtgattgagtcatcttggaggtggttctttcaacatttgatgagccatcccagctaaccccaagtgcagaaaaataagctatccccactgaaccctacccaaattgcagatctgtgatagaaataaatgacttgtttcttaagccattaagtgtcagggtggcttgtaacatagcaatagataactggaacacttagcaaatcatagagctcacatttaaacacaggcattctgactccagagttcatatttatagttgatacagaatgcttcactgtccagatccctattcgagactgaaattcctgatcatcacctcaaatgctgcaagtgtcgccattcaacggctctcagttctcaggcttctacaccaattgctcttgggtgaagagagaactt

SEQ ID NO: 55389 - DNA, 637 bp, Homo sapiens
gtgtgagaacattgttctctgcagtggtctttatagggtctttagacaattcgtggtcacttttctggatcccttgcattttctagctgcattttcctcaactgggtttgggaaaaattaggtctggagtttgggatggggagctgtttttactttacaggtgaggtaactccatacgtgttgaagttttataggagtatgagtggaaccaacctctgatttttggctcagtactgacccttggactggagagtcctgttgtcagcaacaagaacacagtttaatgagaagcaattaagagtgcggtctccaaaccatagtcttaatttcagattcttgcttctccacttactgcctactaaaccttaagcaagtaactggaatatctctcataacataccataggattaattaatgctgtagttaaaagaaaaacaacaccagctatgtaattgtataaaagacttaataaaatgtggatgatttaggctgggaagccgttaactaaccattcatcataaaagggaggaagcaagaggacccacttgagtaggctgggacaaattgctgtggttcagttttactttttgcttttgtttctaattggagctgttttgagacatcctgattgtcagag

SEQ ID NO: 55390 - DNA, 318 bp, Homo sapiens
tagttactctgggcttcgatttgtagggactaaggctgttttctgctcaaagattctatggtatatgaattaaccatcatagcttattaaagacatgcttaaaagggggttaaaaaattatctcagcagtgacaagtaatatttgaaatttgttcatttagaaactgaatgaacagattccttccagaagcactaagattcatcatacacggtaaatatttgtttggacaaattttaaattgaggatcatttgattgatagataattgtttccaacgtcagctgaatatgctcaactgtcgctgccaattctcgagta

SEQ ID NO: 55391 - DNA, 506 bp, Homo sapiens
taacagctcactcagcatgaataagaaatgctacatggattcttttaacactgacttctaaagagcctgagaaataaacaagatgttagtttgaaagagttcatttctaattgttatttcttttttattgtttggccccatgagctgctctaaacaaaatatggtgatgttagaaccaaaaggaaagtgtccttagaataatatctacaaagaggcattcaagttttcactgcctttccttctttttctgcccttctctcagtttgggcaaattatatgagttgaatgtatctgatagaaacaactctttaaagaggggtcgggcacggtggctcacgcctataatcccagcactgtgggagaccaaggcaggtggatcacttgaggtcaggagttcaagaccagcctggccaacatggtgaaaccctgtctctactaaaaatacaaaaattagctgggtgtggtggcacacacctgtagtcccagctactggggagcctgtggca

SEQ ID NO: 55392 - DNA, 341 bp, Homo sapiens
atagattaatgtccagctgaagcatggacataaaaaggaattagaaaactacgccaaacaaatcatgagagacacatgggacatggtaaaaagatctgtggtaagtgtatttagagttccagaaaatgagtgggggatggaggctgggaggagagagagaagtaatgtttgaagagataatgtctgaaaacatgtaccataaaaacattaacccaaaaaaagctagggtaactatactgttaccatctaagttagactttgaggcaaggatcattactggacataaagagggaatgatagctatactaaatatgtaggtaactaatagattactacaaagc

SEQ ID NO: 55393 - DNA, 351 bp, Homo sapiens
gtattttgagtagagaggagagttcgccatgttgcccaggctggtctcgaactcctgagctcaagcgatctgcccacctcgacctcccaaagtgttgcgattacaggcgtgagccactgtgccaggttttaaatcatactttaaataaattatactttaaaatgctttacttctcaagattgaagataacccagatcaaacttcaggaaatgggacaatttttataaaatttcatgtgatacaaatttagaggatggattttgttactgctttttctgaaaacaaaaacttctttttttatgcttcttttttttttaatgggagattctaaattcagagaacaaaattttt

SEQ ID NO: 55394 - DNA, 3707 bp, Homo sapiens
  misc_feature (3703)..(3704): n is a, c, g, or t
tatatgtagatagttttatttttatataaatgggatcatgttatatctgttctacagcttcctttatttacttactatctcctagtttttcatgtcagtacatttagctttgttaacaaacacgtaatactccatagtttgagtgtgtcataatttaaatattccctattgaggggatttgaactgcttcccgtttggggtttttattattacagcaatgctataccaaacatctttgcatatgcctttgtgtactgctcaagaatgtctctaggctagatgtctagagatacagtcaatggatcaaaaaataggtgtggaagctgggccagtgacaagtgcctataatcccagctaatcccagctacctgtgaggctgagacaagaagattgctttgaggccaagagttagagaccagcctgagcaacatagcgagacctcatctctaaaaaaaagttttttaaaaaattagtcagtcgtggtggtgagtgcttgtagtcccagctactcaggaggctgaggcaggaagattgctagagcccaggcatttggaggctgcagtgagcaatgattgtgcatgtgaatagccactgtactttagcctgggtgacataatgagacccccgtctcaaaaaagaaaagatggatgtgttcaaaattttatattactcaaaatttacaatctaagtgaacactttatttccctttcttttgcagagagttctattctgggaactgacattgaccttcagactatagacaatgatatcgtcagcatggagattttcttcaaagcctggctacataacagtggaacagaccaagaacaaatccatcttcttctttcttcacagtgtttcagcaacatttccagacccagagataatccaagtacataatccccaaaagatatttaggctatgattattcttatctgggatcaggactctagattggtggtgagtcagtggaatatagcatcgttgaggtttagggactggaagagggttggatgaggctgtccaatataagcgtgaggaataagaagagaagttctaagaagcaatcatagttagaaagctgaacctaattaagcccaaccagcaagggccagttagtttaggggcaaagtctgagacacctcaatgacagagaattggctagactacataagaacacagtggatcacatttctcaatattctcatttttaatgtggtaaatataattgacattatagtttggagcatgctgctacctcaacaatatcaatacagcctgtggcgagaggaagagaaccaaggttaaataaagatcttctcgctagggaggcagcaaatgggggaaaactaaagaacctacagagatacgccccagggaggacaacctgtgcccaagaccatgttcacaaagcagttcaggcaattactgaaaccgagagatcaatccagtgttctggtcatgccaaaaatatcctggataatggatactgttctgcctggcaattatacttcattccaggtcccactagatgacaggaataaggccatttccattctcccatctcctcggaaggctggctcaggcgggacctggggtggctgggcctgcagatagatgggcccatctatcagtctaatcagccacactgaggttgggaaagctgggtcctcaaagaccagctccaaagagaaatgaccaaagtatatcttctttaggggtgggaatttgtacccatctttctcattgaacagaatactggtagtggtagtggctacagagatcattgagggttgaagaatggattgaacatgacgtttaccaaagcccttctcataagttttgacacgactcactggggttaccgcctcctttgagagctctttcttggccattggcagtatatttgagtttttatatatgttccttttcttcagctgtaatagaactctttatgaccattgtttctttaggacaggggagggctttttggaggtgttactacacaggattaaggcttcccaagaccctttctgtctagggatggccgtcaagtctcttcctctctcccccatttcaacctagtgcccagaatgtctttgccaacttaacttgattttaatctgtcttttctttgtgtaaaatattcttcccagaacctcctttccacctcttttgtccaaggctgatagtaccaatttctccctgtcctatcctctggacttcacttatctgttttccctacttaaggcagctagcaactttatatagaagctagtgtatagctaacattattaagccctgcctctgtgccaagcactaacttcatttcttgcattatcccattttatcttcacataacactatgaggcagatactgttaccatatgtcattgaatctaagatgctatcaattgtaaggtacaccactattttatgtaccagtaagaaagaaaacaggctaggtgcagtggcttactcctgtaatgccagcattctgggaggcaaaggtgggaggatccgttgaagccaggaattaatgacagcctgtgtacatagacctgtctctacaaaaaataaaaataaaaaattagccaggcacagtggtatgcacctgtagtctcagctactcaggaggccgaggcaagaggatcacttgcacccaggagttcaaggttgcagtgagctgtgatggagccactgcacttcagcctgggcaacagagtgagaccctatctctaaaaaaatgtttttaataataaagatttttttttaaaaaaaagaaagaagacattgcccgttaaacattacacagctctttcttgtcacttagaagtagtattttacctgtatcgagagagctcttttaggttagagtagtaagtaaggacttagagtgcctgcctggccaatggcaattgtaagacacatacagagatgaaaaaaaatgtgtcttagaatcaattaaatacaatattacccccattttccatatgagaaaactgagacttagagaaattaagcacactttcccagggctgcacagaaaattagtagcagagctaggatttgaagccaggcaacagggcccactcttaacccttaggatcagaaatctatattttgtacacttgacactctcagcccagacaatgtcaataaacccaggtctatcttcctccagaacctgggcctttatctactatattaacctgcctcatgctaagcaattctgaacaaaggggctagagattcacttctttcattaggagggctggtgccctcagaggccaggaactcctgtaaccagcctttcttccactatcacatggcatttgcccatggtgctaatcagaatttctctagcttcccctctgtctttccaaagctttcagcaccaggatcagagccagaatatttaactccatctataatcattttttcagaaatctgtaggtcttcgggatgcacagtggaacttatatccagactgcagtcagcttttctgctggggaggtcttcactggaatccagatgtttaggcacagctggaatgaggtctggggaaattaggcctcttctagggtggatgtgacccacctgagattttaaacacaataaagattatgctggcattattattttaaaaattgatgtattgccacacatgtagatttctggagtatggctcactacaaaaaannaaa

SEQ ID NO: 55395 - DNA, 1352 bp, Homo sapiens
agcgggccgggaggaccaggtgagggggcctccgtcttccgaagacaggtgtaaagaatatccagctggtggctacagttccccctctggttttgctgccatgcatcctgggcgaactactggtaaagggccctctactcacactcagattgaccagcaacctccacggcttctcattgtgcacattgctctaccgtcctgggctgacatctgcaccaacctctgtgaggctctgcagaacttcttctctctagcctgcagcttgatgggccccagccgcatgtccctgttcagtttatacatggtacaagatcagcatgagtgcatcctcccttttgtgcaagtgaaagggaactttgctaggttgcagacctgcatctcagaactccgcatgttacagagagaagggtgtttcagatcacaaggtgcttctctgcggctggcagtagaggatgggctccagcaattcaaacaatacagcagacatgtgaccacaagggcagctctgacctatacctccctggagattactattctgacttctcagcctggaaaagaggtggtcaaacagttggaggaagggttgaaagatacagacctagccagagtcaggaggtttcaggtcgttgaggtcacaaagggaatcctagagcacgtggactcagcgtctcctgttgaggataccagcaatgatgagagttctattctgggaactgacattgaccttcagactatagacaatgatatcgtcagcatggagattttcttcaaagcctggctacataacagtggaacagaccaagaacaaatccatcttcttctttcttcacagtgtttcagcaacatttccagacccagagataatccaatgtgtctgaaatgtgatctccaagagcgactgctctgcccatccctactcgctggcacagctgacggctccttgagaatggatgaccctaaaggagacttcatcacactctaccagatggcttcccagtcatcggcctctcattacaagctccaagtgatcaaggctttaaaatctagcgggctctgcgagtcattgacatatggactcccgttcatcctcagacctacaagctgttggcagctggactgggatgagctggagacaaatcagcaacatttccatgctttgtgtcacagcctgctggtgagtacccatgtccccaggtgaaaaagaagaatcgtttttaaagtaccaaccacagaaaagcagctaactaactctgcccaatcctaaatctgcctcaaccctcaagaagacagaaaaaactggaaatactctgaaatttggagtaaatatgacttgccttttgttggtttcatgc

SEQ ID NO: 55396 - DNA, 1431 bp, Homo sapiens
agtctgggcccggagcttcctccgcggggcccccaggcccgagggccgggctgctgatccgccaggcacggtgtaaagaatatccagctggtggctacagttccccctctggttttgctgccatgcatcctgggcgaactactggtaaagggccctctactcacactcagattgaccagcaacctccacggcttctcattgtgcacattgctctaccgtcctgggctgacatctgcaccaacctctgtgaggctctgcagaacttcttctctctagcctgcagcttgatgggccccagccgcatgtccctgttcagtttatacatggtacaagatcagcatgagtgcatcctcccttttgtgcaagtgaaagggaactttgctaggttgcagacctgcatctcagaactccgcatgttacagagagaagggtgtttcagatcacaaggtgcttctctgcggctggcagtagaggatgggctccagcaattcaaacaatacagcagacatgtgaccacaagggcagctctgacctatacctccctggagattactattctgacttctcagcctggaaaagaggtggtcaaacagttggaggaagggttgaaagatacagacctagccagagtcaggaggtttcaggtcgttgaggtcacaaagggaatcctagagcacgtggactcagcgtctcctgttgaggataccagcaatgatgagagttctattctgggaactgacattgaccttcagactatagacaatgatatcgtcagcatggagattttcttcaaagcctggctacataacagtggaacagaccaagaacaaatccatcttcttctttcttcacagtgtttcagcaacatttccagacccagagataatccaatgtgtctgaaatgtgatctccaagagcgactgctctgcccatccctactcgctggcacagctgacggctccttgagaatggatgaccctaaaggagacttcatcacactctaccagatggcttcccagtcatcggcctctcattacaagctccaagtgatcaaggctttaaaatctagcgggctctgcgagtcattgacatatggactcccgttcatcctcagacctacaagctgttggcagctggactgggatgagctggagacaaatcagcaacatttccatgctttgtgtcacagcctgctgactgggcagttgcagaccaaccgagctcgagctactgtggcccccctgcctatgactcctgtcccaggcagagcctccaagatgccagcagccagcaaatcttcctcagatgccttcttcctgccttcagagtgggagaaggatccctcaaggccctaagtcaccagcaccagagcccagctgcccagcttaaccatatccatgctcaggttcacataatggctatctgtggtca

SEQ ID NO: 55397 - DNA, 1406 bp, Homo sapiens
agtctgggcccggagcttcctccgcggggcccccaggcccgagggccgggctgctgatccgccaggcacggtgtaaagaatatccagctggtggctacagttccccctctggttttgctgccatgcatcctgggcgaactactggtaaagggccctctactcacactcagattgaccagcaacctccacggcttctcattgtgcacattgctctaccgtcctgggctgacatctgcaccaacctctgtgaggctctgcagaacttcttctctctagcctgcagcttgatgggccccagccgcatgtccctgttcagtttatacatggtacaagatcagcatgagtgcatcctcccttttgtgcaagtgaaagggaactttgctaggttgcagacctgcatctcagaactccgcatgttacagagagaagggtgtttcagatcacaaggtgcttctctgcggctggcagtagaggatgggctccagcaattcaaacaatacagcagacatgtgaccacaagggcagctctgacctatacctccctggagattactattctgacttctcagcctggaaaagaggtggtcaaacagttggaggaagggttgaaagatacagacctagccagagtcaggaggtttcaggtcgttgaggtcacaaagggaatcctagagcacgtggactcagcgtctcctgttgaggataccagcaatgatgagagttctattctgggaactgacattgaccttcagactatagacaatgatatcgtcagcatggagattttcttcaaagcctggctacataacagtggaacagaccaagaacaaatccatcttcttctttcttcacagtgtttcagcaacatttccagacccagagataatccaatgtgtctgaaatgtgatctccaagagcgactgctctgcccatccctactcgctggcacagctgacggctccttgagaatggatgaccctaaaggagacttcatcacactctaccagatggcttcccagtcatcggcctctcattacaagctccaagtgatcaaggctttaaaatctagcgggctctgcgagtcattgacatatggactcccgttcatcctcagacctacaagctgttggcagctggactgggatgagctggagacaaatcagcaacatttccatgctttgtgtcacagcctgctgaaaagggaatggctgctgttagccaagggggaaccaccgggcccaggacacagccagagaattcctgccagcaccttctatgtgatcatgccgtcacactccctcacactgctggtaaaggcggtggccacgcgggaactgatgctgcccagcaccttccccctgctacctgaggacccacatgatgatagccttaagaatgtggaggca

SEQ ID NO: 55398 - DNA, 321 bp, Homo sapiens
agagaaattagattaccttggtgctcattctttcgtatatccccgttgatgatttggaatctgagctaaagatactggggggaaaactaaaccaaattttgataccaaatacaggaaggaggtgaaataagcttttttattgtagctctccttttattgctcacaataaatacttcctactttgtgattttcccgaactgtattagttggcagaaagctgagcagtcctgtgtttctaattaagaattggatggttagctggagttttgaggaggtcatctctgggcgtgtctgcttttggctttcttgggcagctatgct

SEQ ID NO: 55399 - DNA, 379 bp, Homo sapiens
aaaggtctagcattaagccatgctactctgctttgattactatagctttgtagtaaattgaaatcagaaagtgtgagccttccaactttattcttccttttcaagattattttggcaatcctggccaaaataatccaaaatttaacttttcatgctattttatctgaaattactttcttcaaggtcacttataatctttggcccaattcagttataccccacccctaattttttagtcctttttcagttttctagaaaactatctcgtttcccactttctggtcctctttttgatattttgccctcataatatttctttttattttccagcaggtagtgagcacttctcatcttctaagcaccctgttaatctctggaa

SEQ ID NO: 55400 - DNA, 351 bp, Homo sapiens
tcttgttttattatgttttcctagttcattttttttttttacacaaggacaattttaatcttgcattttcctgtagtaacatccactgctggctatctatggattgaaactgcatttgctaagaactgtgaacatgaagaaactttacatgaagtcacatgttgatgcaggcacacagacatcttccagcaccaacagaatacatgcgtaacacataccagatagtctcgatggataagtttgcttcaccagtaattctagttagtaagattcacagttaatgcagaatcggagcttgcagtgagccgagatcacaccactgcactctaccctgggcgacagagcgagact

SEQ ID NO: 55401 - DNA, 504 bp, Homo sapiens
aaattgtgttaaaaaataaaactccttttaatttcataaggaagtgattccaaatcacacttctagaatgaataggaattagagggaatgttatggaatcaactcatatgagaaagattcagcctcaaagattctgagaatatctgccttaaccagttgagaaagaaggtagactgtttccttttttagtctttgctctttcacaaccatggcagtaggggaattgtttaacttgtgaaatgccttttatacaatctgcttgggaaggcattttgtttataatgtgataactgtgccagctttcagaattcctttcttttgtttttaaggtctaacatgaaacactgaatgttccctgtcttcacagcctgttctccctcctcccgctgcccctgcctgctttttccctgcctccaatcccatagtcagctatcagaacaacagattacaagtaaacatctatttattgagcactcatggaataaagggttttttttctaagtt

SEQ ID NO: 55402 - DNA, 257 bp, Homo sapiens
actgcaataccagctcttcattggctcttcagcccaccagcccaccctgcagattttgaacttgtcaagactccacaatcatgtctaacatgaaacactgaatgttccctgtcttcacagcctgttctccctcctcccgctgcccctgcctgctttttccctgcctccaatcccatagtcagctatcagaacaacagattacaagtaaacatctatttattgagcactcatggaataaagggttttttttctaagtt

SEQ ID NO: 55403 - DNA, 335 bp, Homo sapiens
  misc_feature (31)..(31): n is a, c, g, or t
acattttgcaaactcagttgactcacctcanatttgccattccaattacagggcctcgaaagagtcagcactcagccttgctcaaggatcagatttaggggttgccccccgcccccgcaacctcccacctattgtttcaaatgtcctcaagacaatcaccactgtattaagagaaagaggcatgggggcagagcaacaaggaaataaatgaggcttgagaactgtgtctaggtggggttactttgaaccttaaaccacccttgggccccaaatctgcatgagcaggggtgggctatcatgctacagcacccccaaggaggacattgttcccaaca

SEQ ID NO: 55404 - DNA, 550 bp, Homo sapiens
gcccctcaccccaatacccagcctagtagcagtactttggttcccccagggagctcctcttttaaagaaaagggacaggacccaattgttactgagcccctattgtcatagtagccaccatttattgatggttgactatgcacctgccagatactgtacccttaacagcatttatcatccaaccctcctttagcctgctgagggggttatacataataaggaatattgtacatactgaggaacctgagactccatgaggttaaaacttgcctaaaataacacagctagggaaaaggcaagctggattttgaactagggctctaagtgctgagcctgtgggcttcataattggaccaaatccctgtgtgctgggcacgtgtccagcacttccctcatatgatctttatgtgaaccatcctctggaatcctcagaacaaacccaggaagtaggtatactcatccccattttacagatgaggaaacaggcacagagagatgactggcttggccaagttaagaataatggctaacaaacaaaaacaaaaacaaa

SEQ ID NO: 55405 - DNA, 395 bp, Homo sapiens
ggatcttggaagatgagtagacatctgccaggtagagaagagatggtgggagccttctagacagaacaagaatccaaatgaattctagtgactcttgccgtaacactatggtcattacgtgggttcggatacacggaggctcaagtcatatgacttaggatgtgactaaggcattccaccatccaatccaactcaaccagtctgcagaggcagggcttaccctgggccccagcacgagctttgtgctaagcagaaagaggaatcgtttttggtttctgagtgctgctgtacttcagtttacaaatcccagcctccccatggctactttatctatagccatggcctgaccaagccaagtggaggagggggatacaaggatgcaaggggcacccagg

SEQ ID NO: 55406 - DNA, 427 bp, Homo sapiens
taatttaataggtctcccttttcggcaatattttcattttaaaaagaaaacttctgttagagggcaagtaattccaaagaaattagattctgctggttgaaacgttaagaatccaggcaggcggtgagggaaattcgtttcccggcttctccaatctaatctgatagtgcccgtcttgcctcagtcgttaatacttcttgggaaaaagcatatgtgatcactcttttaaaaactgttagaatcactttcctatccaaggtctgaaagaagatttgggcttaggctccatttgaagaaatccaggttgtatttcccccagcatttagggtttgatggtttctgcttatctaaagtgctcacattgcaaatatgagcagcagggctggggatttaaattctgtcttgatgggaatttgaactgaaatgc

SEQ ID NO: 55407 - DNA, 346 bp, Homo sapiens
atcaacgtcacaatgaaagattcagtgtgcatgcctggttcacacacgagcatgtgcagtgatgaaagccacagccctcaggatggaagacggttctaaggctggagaactgccggcaccacgtctactggaagccactggacatgcatgaagtaactctgacccagatcccacctccaggagccgccctgcccgccacacttgggcacaagcagtcccagggtccacactgcaggctgcaggccagggtcctgagggccctaaaggcacaccaatggggctgggtaaaccacttcagacagtggggtgtcctgtagccataaccttcaagaagtcctgccctact

SEQ ID NO: 55408 - DNA, 434 bp, Homo sapiens
gcaaagtgctaaaatctgaagaaaggaagagcagttcataaatgcttatcttcacattgttcattgggctgccctaacctcccctgctcccagagaatgccagatggctttacaattgaggtggttcaaacacagaaggccctttttccttttattaattgctcagctatgtgtacattggcccccacacctgccacctgaccagcgcggcttctgcctccctcagcactgccagccgggggttttcttagactcatcccctgggccaccttccgctcctctccctccctctgcattaacatccaggccaccctcattactccttggcaacctagcttgggttggcctccccagccagccttccagactattctttctctcccttgcagcctgtcttgcacaccactgtggccaggtcagtctttctgagaata

SEQ ID NO: 55409 - DNA, 289 bp, Homo sapiens
cccgcccccgtcagccagagacccttttcctttaacttcttaggtcaatgtgaagtcaacgtctaatggacccgagttcagccaagaacacacaccagttgttccagggaagaatctcatggtgaagcactagtgagcgtccaagcaactcccagcctaacctcaccggtctgactgtggggctgcttctgccacggctcctggctggcgatggggctgtcagcgtgtcagccaaccatgcattgcagatgcactttgaagaaaattaatgtacctgggtacttatggg

SEQ ID NO: 55410 - DNA, 1523 bp, Homo sapiens
  misc_feature (638)..(638): n is a, c, g, or t
ccccttgaagagcacacacagatctcttcctgtcagaatggagacttagattgtccttctcagtagacaaatttctcagcagaaatctgaccccaagattgggcgtgtgcttggcctccggggcctgtgtcccctccaggctgactagggctctggtggcgtgacgtaccgctgtgctcccgcggtttctcagccacattctgaatcttgaggaacagagctgcaaaggaagtctctaacctatctcaccattttatcaatgagggagctgaggacccctgagggaaagggccttccctcgggctacacagggaaaggtgcacaaagccaggcttgacccggggtgctccatgggtcagacaaactccagccaccgaaactctgctccagcctgatgtgtgcgctgggcctggcgaggtcgcttggcaaagccctttgctgtggagcttcctcttctccagccaggccttttcttttctgatgatcagttcgtctcccatcttttttcttgatccttaaatttgggtggcatttctggtgtgaaaaggggaacgtgtgaaatgacggtcacatcctttgggtctagttcatgagaaagatcaggaaaatgaaaaatctgccatttcctgctctgagcncaggctcctgggagtcacccactaagtccttctaaactgcccaggtctcgggatcctgcagcatttccaagggccaaatccacactcaggtccctcacacccacttccttgcttctgagagatgtgggagcacaggcacactcaacaaggacccgtgcccaactcctgaggagttcaggggcaaggtgcccaaacacaggaggcccccagatcccaagggaaggcaattctggagccctgttgggcagcatgttggagtgtgggcctgatccccgggcctcggggatcacagcgtgtgctgtgtgttagtaaatgcttctgcttccttctagactaaagctttgattgataagctccaaaagcttgtgtcatctgagggcagatttaagaatctcagagaagctctgaaaaagtaagtgtgtgtcgttttgtcgctgttatttttaaaatcatagacctgcattgcagaggcattcacgtgccgcccccagccagagcaggaggtctttctgtctgtctgttcgtctgtctacccacaagacccctagatttcctggaccccaatggtggagtcctccatggtctgccagagaaactccagagtttgctagcatttcctgagagaagcacaggaatactgctgggatccctgaaagcatagtagctgtgatgataatagtagtggtgccagatttctcgattctaaaatgcacgttttcttttcacattttaataattctgacatcaggagacgtcttaacgtcagttttgtttatttaacacaattgtgtttcctttttcactccagaattcatcatcaaaatgtttgcattttataaacaatggcatccgggaattaaaaaaatacagttttacaataatcat

SEQ ID NO: 55411 - DNA, 4257 bp, Homo sapiens
  misc_feature (1385)..(1385): n is a, c, g, or t
  misc_feature (1447)..(1448): n is a, c, g, or t
  misc_feature (1909)..(1909): n is a, c, g, or t
cggcaccggaggagggtcgggcggcatcttccgggtactggggctctgcggagcggagaagaggttccagcggggaatggtatatctggattcaagaagccgcggctcggcgccagatcctggagtgtagatatttggggggaggggagagctagagggagcgagcgagcgagcgccagagagaggcagcgcgcagcgcgcacggacggggggctgctgcgcggagaagatgtaagcgcgtggggtctcgctggcctctgagcaccatgcagaaggggatccggctgaatgatggccacgtcgcgtccctgggactgctggcgcgcaaggacggcacgcgcaaaggctacctgagcaagcggagttcggacaacacaaaatggcaaaccaagtggttcgcgctgctgcagaacctgctcttctacttcgagagcgactcgagctcgcggccctcggggctttacctgctggagggctgcgtctgcgaccgcgcgccctcccccaagccggcgctgtcggccaaggagccgctggagaaacagcattacttcacggtgaacttcagccatgagaaccagaaagccttggagctgaggacagaggacgcaaaagattgtgacgaatgggtggcagccattgcacatgccagctacaggaccctcgccacagagcatgaggcattaatgcagaaatacctgcacctgctgcagatcgtggagacagagaagaccgtggccaagcagcttcggcagcagatcgaggatggggagatcgagatcgagcggctgaaggcagagatcacatccctgctcaaggacaatgagcgcatccagtccacccagactgtcgcccccaacgatgaagacagcgacatcaagaaaattaagaaggtgcagagcttcctgcggggctggctgtgccggcggaagtggaagaccatcatccaggactacatccggtcaccccatgctgacagcatgcgcaagaggaaccaggtggtgttcagcatgctggaggctgaggctgagtacgtgcagcagctgcacatccttgtcaacaatttcctgcgcccgctgcggatggccgccagctccaagaagcctcccatcacacacgacgacgtcagcagcatcttcctgaacagcgaaaccatcatgtttttacatcagatcttttaccaaggcctgaaggcccgcatctccagctggcccacgctggtcctggctgacctatttgacatcctgctgcccatgctcaacatctaccaagagttcgtccgcaaccaccagtacagcctgcagatcctggcccactgcaagcagaaccgtgacttcgacaagctgctgaagactacgaggccaagcctgactgcgaggagaggacgntggagaccttcctcacctaccccatgttccagatccccaggtacatcctgaccctccatganntcctggcccacacgcctcatgagcacgttgagcgcaacagcctggactacgccaagtccaaactggaggagctgtccagaataatgcacgatgaagtaagtgagacggagaacatccggaaaaacctggccatcgagcgcatgatcatcgaaggctgtgagatcctcctggacaccagccagacctttgtgagacaaggttccctcattcaggtgcccatgtctgaaaagggcaagatcaccagggggcgcctggggtctctctccctaaagaaagagggcgagcgacagtgcttcctgttttctaagcatctgattatctgtaccagaggctctggagggaagcttcacttgaccaagaatggagtcatatccctcattgactgcactttattggaggagccagaaagcacggaggaggaagccaaaggatccggccaagacatagatcacttggatttnaaaatcggggtggagccaaaggattccccgccctttacagtcatcctagtggcctcgtccagacaggagaaggcagcgtggaccagtgacatcagccagtgtgtggataacatccgatgcaatgggctcatgatgaacgcatttgaagaaaattccaaggtcactgtgccgcagatgatcaagtccgacgcctccttatattgtgatgatgttgacattcgcttcagcaaaaccatgaactcctgcaaagtgctgcagatccgctacgccagtgtggagcggctgctggagaggctgacggacctgcgcttcctgagcatcgacttcctcaacaccttcctgcactcctaccgcgtcttcaccaccgccatcgtggtcctggacaagctcattaccatctacaagaagcctatcagtgccattcctgccaggtggctgaggtcgctggagctcctgtttgccagtggccagaacaataagctcctgtacggtgaaccccccaagtccccgcgcgccacccgcaagttctcctcgccgccacctctgtccatcaccaagacatcgtcaccgagccgccggcggaagctctccctgaacatccccatcatcactggcggcaaggccctggacctggccgccctcagctgcaactccaatggctacaccagcatgtactcggccatgtcacccttcagcaaggccacgctggacaccagcaagctctatgtgtccagcagcttcaccaacaagattccagatgagggcgatacgacccctgagaagcccgaagacccttcagcgctcagcaagcagagctcagaagtctccatgagagaggagtcagatattgatcaaaaccagagtgatgatggtgatactgaaacatcaccaactaaatctccaacaacacccaaatcagtcaaaaacaaaaattcttcagagttcccactcttttcctataacaatggagtcgtcatgacctcctgtcgtgaactggacaataaccgcagtgccttgtcggccgcctctgcctttgccatagcaaccgccggggccaacgagggcaccccaaacaaggagaagtaccggaggatgtccttagccagtgcagggtttcccccagaccagaggaatggagacaaggagtttgtgatccgcagagcagccaccaatcgtgtcttgaacgtgctccgccactgggtgtccaagcactctcaggactttgagaccaacgatgagctcaaatgcaaggtgatcggcttcctggaagaagtcatgcacgacccggagctcctgacccaggagcggaaggctgcagccaacatcatcaggactctgacccaggaggacccaggtgacaaccagatcacgctggaggagatcacgcagatggctgaaggcgtgaaggctgagccctttgaaaaccactcagccctggagatcgcggagcagctgaccctgctagatcacctcgtcttcaagaagattccttatgaggagttcttcggacaaggatggatgaaactggaaaagaatgaaaggaccccttatatcatgaaaaccactaagcacttcaatgacatcagtaacttgattgcttcagaaatcatccgcaatgaggacatcaacgccagggtgagcgccatcgagaagtgggtggccgtagctgacatatgccgctgcctccacaactacaatgccgtactggagatcacctcgtccatgaaccgcagtgcaatcttccggctcaaaaagacgtggctcaaagtctctaagcagactaaagctttgattgataagctccaaaagcttgtgtcatctgagggcagatttaagaatctcagagaagctctgaaaaattgtgacccaccctgtgtcccttacctggggatgtacctcaccgacctggccttcatcgaggaggggacgcccaattacacggaagacggcctggtcaacttctccaagatgaggatgatatcccatattatccgagagattcgccagtttcaacaaactgcctacaaaatagagcaccaagcaaaggtaacgcaatatttactggaccaatcttttgtaatggatgaagaaagcctctacgagtcttctctccgaatagaaccaaaactccccacctgaagctgtgcccagcccagacccagctgctcccggggacatgtgctagatgatactgtacatattcgtttggtttcactggattttcttcttcagtatgtgcttctccaagaatacaaatcgtccttgttcttagattcctgtagaaccggaatatgaatttctgcaccgtttcagacttcgcccacccatccctcccctcgcccgaattc

SEQ ID NO: 55412 - DNA, 3361 bp, Homo sapiens
  misc_feature (489)..(489): n is a, c, g, or t
  misc_feature (551)..(552): n is a, c, g, or t
  misc_feature (1013)..(1013): n is a, c, g, or t
gtgtcagaactcctctatgaaaaggaatggtcaactctgtgagttgaatgccgacatcacaaagatgtttctgagaatgcttctgcctagtttttatgtgaaaatattccgtttccaacgaaagcctcaaagctgtccaagtattcccttgtagatcctacaaagagagtgtttcataactgatctatgaataagaaacgttaaactctgtgagtagaggacacacatcacaaagaagtttcttagcacgaaaccatcatgtttttacatcagatcttttaccaaggcctgaaggcccgcatctccagctggcccacgctggtcctggctgacctatttgacatcctgctgcccatgctcaacatctaccaagagttcgtccgcaaccaccagtacagcctgcagatcctggcccactgcaagcagaaccgtgacttcgacaagctgctgaagactacgaggccaagcctgactgcgaggagaggacgntggagaccttcctcacctaccccatgttccagatccccaggtacatcctgaccctccatganntcctggcccacacgcctcatgagcacgttgagcgcaacagcctggactacgccaagtccaaactggaggagctgtccagaataatgcacgatgaagtaagtgagacggagaacatccggaaaaacctggccatcgagcgcatgatcatcgaaggctgtgagatcctcctggacaccagccagacctttgtgagacaaggttccctcattcaggtgcccatgtctgaaaagggcaagatcaccagggggcgcctggggtctctctccctaaagaaagagggcgagcgacagtgcttcctgttttctaagcatctgattatctgtaccagaggctctggagggaagcttcacttgaccaagaatggagtcatatccctcattgactgcactttattggaggagccagaaagcacggaggaggaagccaaaggatccggccaagacatagatcacttggatttnaaaatcggggtggagccaaaggattccccgccctttacagtcatcctagtggcctcgtccagacaggagaaggcagcgtggaccagtgacatcagccagtgtgtggataacatccgatgcaatgggctcatgatgaacgcatttgaagaaaattccaaggtcactgtgccgcagatgatcaagtccgacgcctccttatattgtgatgatgttgacattcgcttcagcaaaaccatgaactcctgcaaagtgctgcagatccgctacgccagtgtggagcggctgctggagaggctgacggacctgcgcttcctgagcatcgacttcctcaacaccttcctgcactcctaccgcgtcttcaccaccgccatcgtggtcctggacaagctcattaccatctacaagaagcctatcagtgccattcctgccaggtggctgaggtcgctggagctcctgtttgccagtggccagaacaataagctcctgtacggtgaaccccccaagtccccgcgcgccacccgcaagttctcctcgccgccacctctgtccatcaccaagacatcgtcaccgagccgccggcggaagctctccctgaacatccccatcatcactggcggcaaggccctggacctggccgccctcagctgcaactccaatggctacaccagcatgtactcggccatgtcacccttcagcaaggccacgctggacaccagcaagctctatgtgtccagcagcttcaccaacaagattccagatgagggcgatacgacccctgagaagcccgaagacccttcagcgctcagcaagcagagctcagaagtctccatgagagaggagtcagatattgatcaaaaccagagtgatgatggtgatactgaaacatcaccaactaaatctccaacaacacccaaatcagtcaaaaacaaaaattcttcagagttcccactcttttcctataacaatggagtcgtcatgacctcctgtcgtgaactggacaataaccgcagtgccttgtcggccgcctctgcctttgccatagcaaccgccggggccaacgagggcaccccaaacaaggagaagtaccggaggatgtccttagccagtgcagggtttcccccagaccagaggaatggagacaaggagtttgtgatccgcagagcagccaccaatcgtgtcttgaacgtgctccgccactgggtgtccaagcactctcaggactttgagaccaacgatgagctcaaatgcaaggtgatcggcttcctggaagaagtcatgcacgacccggagctcctgacccaggagcggaaggctgcagccaacatcatcaggactctgacccaggaggacccaggtgacaaccagatcacgctggaggagatcacgcagatggctgaaggcgtgaaggctgagccctttgaaaaccactcagccctggagatcgcggagcagctgaccctgctagatcacctcgtcttcaagaagattccttatgaggagttcttcggacaaggatggatgaaactggaaaagaatgaaaggaccccttatatcatgaaaaccactaagcacttcaatgacatcagtaacttgattgcttcagaaatcatccgcaatgaggacatcaacgccagggtgagcgccatcgagaagtgggtggccgtagctgacatatgccgctgcctccacaactacaatgccgtactggagatcacctcgtccatgaaccgcagtgcaatcttccggctcaaaaagacgtggctcaaagtctctaagcagactaaagctttgattgataagctccaaaagcttgtgtcatctgagggcagatttaagaatctcagagaagctctgaaaaattgtgacccaccctgtgtcccttacctggggatgtacctcaccgacctggccttcatcgaggaggggacgcccaattacacggaagacggcctggtcaacttctccaagatgaggatgatatcccatattatccgagagattcgccagtttcaacaaactgcctacaaaatagagcaccaagcaaaggtaacgcaatatttactggaccaatcttttgtaatggatgaagaaagcctctacgagtcttctctccgaatagaaccaaaactccccacctgaagctgtgcccagcccagacccagctgctcccggggacatgtgctagatgatactgtacatattcgtttggtttcactggattttcttcttcagtatgtgcttctccaagaatacaaatcgtccttgttcttagattcctgtagaaccggaatatgaatttctgcaccgtttcagacttcgcccacccatccctcccctcgcccgaattc

SEQ ID NO: 55413 - DNA, 690 bp, Homo sapiens
gtggggagctgccccctccgtgcattcaccaacttgtccgtccgtccgcccccggggcaccactccatccacctcctcacatggctggcttcctcgtctgccgccgccaccaccgctgcctccactgcctctggggccccccattctgtctgagtccccaccctgaccgtcttccctctttcaggtggcctgtgggcccgtttgtgacccaccctgtgtcccttacctggggatgtacctcaccgacctggccttcatcgaggaggggacgcccaattacacggaagacggcctggtcaacttctccaagatgaggatgatatcccatattatccgagagattcgccagtttcaacaaactgcctacaaaatagagcaccaagcaaaggtaacgcaatatttactggaccaatcttttgtaatggatgaagaaagcctctacgagtcttctctccgaatagaaccaaaactccccacctgaagctgtgcccagcccagacccagctgctcccggggacatgtgctagatgatactgtacatattcgtttggtttcactggattttcttcttcagtatgtgcttctccaagaatacaaatcgtccttgttcttagattcctgtagaaccggaatatgaatttctgcaccgtttcagacttcgcccacccatccctcccctcgcccgaattc

SEQ ID NO: 55414 - DNA, 2861 bp, Homo sapiens
attcggggtcctttttggcctacttggggtgagtcaacataaggagtgcaggccaccttagcctttgcttctcaaaagtcatgggtcaatgaagtccttggccaaggctgtccagcagtaggccaagttcagggattggctcaggcccctaatggacttcactgcatccaggaatggtaggtgattatcttttccgagaggccacctacccagatcccagttgtggacagcccatcccagccctcagaggctcagaggctctctgagtgccctgccccaaaacaccctaggcaagacattatgccagagcctcagctctagggctgcctggagcagagctcctgaatcacactggctccccagggctccccaggaacctcaccattcctcccccaatccacacctctgctgccagagcaacgcaacgacccagaatacacccgttccctcttctgttccctcctcctgcccccacctcaggcctcactggggcagggtacatcttgcctctctgccctgaacttctgaaacctcaatgatcagattcccagggctctgagaaaacagaaacaaacatcccatccaggatggatttaccccctaaaagtcactgagatcattcccaggggcccagcagacagtgtccttcctttcccagcagcagtgccctgcagaacaaagaggctggttcagagccagctctcagccctatggccttggctgagtcccttaacctttctgagactcagtttcctacctgtgacattcctgcagttatcctgtaggaataagagtgcctacgtcctggggcaacagtgagggttaaaagatcaatcctatcctgtgtgcaacgtggagcagacagcctcgatgagacaagctatggtttgcaatgttctggatgtataacctgtttccagcctggcctgaggtggaaccctgtcatgaggatggtcgctggagctcctgtttgccagtggccagaacaataagctcctgtacggtgaaccccccaagtccccgcgcgccacccgcaagttctcctcgccgccacctctgtccatcaccaagacatcgtcaccgagccgccggcggaagctctccctgaacatccccatcatcactggcggcaaggccctggacctggccgccctcagctgcaactccaatggctacaccagcatgtactcggccatgtcacccttcagcaaggccacgctggacaccagcaagctctatgtgtccagcagcttcaccaacaagattccagatgagggcgatacgacccctgagaagcccgaagacccttcagcgctcagcaagcagagctcagaagtctccatgagagaggagtcagatattgatcaaaaccagagtgatgatggtgatactgaaacatcaccaactaaatctccaacaacacccaaatcagtcaaaaacaaaaattcttcagagttcccactcttttcctataacaatggagtcgtcatgacctcctgtcgtgaactggacaataaccgcagtgccttgtcggccgcctctgcctttgccatagcaaccgccggggccaacgagggcaccccaaacaaggagaagtaccggaggatgtccttagccagtgcagggtttcccccagaccagaggaatggagacaaggagtttgtgatccgcagagcagccaccaatcgtgtcttgaacgtgctccgccactgggtgtccaagcactctcaggactttgagaccaacgatgagctcaaatgcaaggtgatcggcttcctggaagaagtcatgcacgacccggagctcctgacccaggagcggaaggctgcagccaacatcatcaggactctgacccaggaggacccaggtgacaaccagatcacgctggaggagatcacgcagatggctgaaggcgtgaaggctgagccctttgaaaaccactcagccctggagatcgcggagcagctgaccctgctagatcacctcgtcttcaagaagattccttatgaggagttcttcggacaaggatggatgaaactggaaaagaatgaaaggaccccttatatcatgaaaaccactaagcacttcaatgacatcagtaacttgattgcttcagaaatcatccgcaatgaggacatcaacgccagggtgagcgccatcgagaagtgggtggccgtagctgacatatgccgctgcctccacaactacaatgccgtactggagatcacctcgtccatgaaccgcagtgcaatcttccggctcaaaaagacgtggctcaaagtctctaagcagactaaagctttgattgataagctccaaaagcttgtgtcatctgagggcagatttaagaatctcagagaagctctgaaaaattgtgacccaccctgtgtcccttacctggggatgtacctcaccgacctggccttcatcgaggaggggacgcccaattacacggaagacggcctggtcaacttctccaagatgaggatgatatcccatattatccgagagattcgccagtttcaacaaactgcctacaaaatagagcaccaagcaaaggtaacgcaatatttactggaccaatcttttgtaatggatgaagaaagcctctacgagtcttctctccgaatagaaccaaaactccccacctgaagctgtgcccagcccagacccagctgctcccggggacatgtgctagatgatactgtacatattcgtttggtttcactggattttcttcttcagtatgtgcttctccaagaatacaaatcgtccttgttcttagattcctgtagaaccggaatatgaatttctgcaccgtttcagacttcgcccacccatccctcccctcgcccgaattc

SEQ ID NO: 55415 - DNA, 4296 bp, Homo sapiens
  misc_feature (1385)..(1385): n is a, c, g, or t
  misc_feature (1447)..(1448): n is a, c, g, or t
  misc_feature (1909)..(1909): n is a, c, g, or t
cggcaccggaggagggtcgggcggcatcttccgggtactggggctctgcggagcggagaagaggttccagcggggaatggtatatctggattcaagaagccgcggctcggcgccagatcctggagtgtagatatttggggggaggggagagctagagggagcgagcgagcgagcgccagagagaggcagcgcgcagcgcgcacggacggggggctgctgcgcggagaagatgtaagcgcgtggggtctcgctggcctctgagcaccatgcagaaggggatccggctgaatgatggccacgtcgcgtccctgggactgctggcgcgcaaggacggcacgcgcaaaggctacctgagcaagcggagttcggacaacacaaaatggcaaaccaagtggttcgcgctgctgcagaacctgctcttctacttcgagagcgactcgagctcgcggccctcggggctttacctgctggagggctgcgtctgcgaccgcgcgccctcccccaagccggcgctgtcggccaaggagccgctggagaaacagcattacttcacggtgaacttcagccatgagaaccagaaagccttggagctgaggacagaggacgcaaaagattgtgacgaatgggtggcagccattgcacatgccagctacaggaccctcgccacagagcatgaggcattaatgcagaaatacctgcacctgctgcagatcgtggagacagagaagaccgtggccaagcagcttcggcagcagatcgaggatggggagatcgagatcgagcggctgaaggcagagatcacatccctgctcaaggacaatgagcgcatccagtccacccagactgtcgcccccaacgatgaagacagcgacatcaagaaaattaagaaggtgcagagcttcctgcggggctggctgtgccggcggaagtggaagaccatcatccaggactacatccggtcaccccatgctgacagcatgcgcaagaggaaccaggtggtgttcagcatgctggaggctgaggctgagtacgtgcagcagctgcacatccttgtcaacaatttcctgcgcccgctgcggatggccgccagctccaagaagcctcccatcacacacgacgacgtcagcagcatcttcctgaacagcgaaaccatcatgtttttacatcagatcttttaccaaggcctgaaggcccgcatctccagctggcccacgctggtcctggctgacctatttgacatcctgctgcccatgctcaacatctaccaagagttcgtccgcaaccaccagtacagcctgcagatcctggcccactgcaagcagaaccgtgacttcgacaagctgctgaagactacgaggccaagcctgactgcgaggagaggacgntggagaccttcctcacctaccccatgttccagatccccaggtacatcctgaccctccatganntcctggcccacacgcctcatgagcacgttgagcgcaacagcctggactacgccaagtccaaactggaggagctgtccagaataatgcacgatgaagtaagtgagacggagaacatccggaaaaacctggccatcgagcgcatgatcatcgaaggctgtgagatcctcctggacaccagccagacctttgtgagacaaggttccctcattcaggtgcccatgtctgaaaagggcaagatcaccagggggcgcctggggtctctctccctaaagaaagagggcgagcgacagtgcttcctgttttctaagcatctgattatctgtaccagaggctctggagggaagcttcacttgaccaagaatggagtcatatccctcattgactgcactttattggaggagccagaaagcacggaggaggaagccaaaggatccggccaagacatagatcacttggatttnaaaatcggggtggagccaaaggattccccgccctttacagtcatcctagtggcctcgtccagacaggagaaggcagcgtggaccagtgacatcagccagtgtgtggataacatccgatgcaatgggctcatgatgaacgcatttgaagaaaattccaaggtcactgtgccgcagatgatcaagaggaccagggaggggaccagggaagcagaaatgagcaggtccgacgcctccttatattgtgatgatgttgacattcgcttcagcaaaaccatgaactcctgcaaagtgctgcagatccgctacgccagtgtggagcggctgctggagaggctgacggacctgcgcttcctgagcatcgacttcctcaacaccttcctgcactcctaccgcgtcttcaccaccgccatcgtggtcctggacaagctcattaccatctacaagaagcctatcagtgccattcctgccaggtggctgaggtcgctggagctcctgtttgccagtggccagaacaataagctcctgtacggtgaaccccccaagtccccgcgcgccacccgcaagttctcctcgccgccacctctgtccatcaccaagacatcgtcaccgagccgccggcggaagctctccctgaacatccccatcatcactggcggcaaggccctggacctggccgccctcagctgcaactccaatggctacaccagcatgtactcggccatgtcacccttcagcaaggccacgctggacaccagcaagctctatgtgtccagcagcttcaccaacaagattccagatgagggcgatacgacccctgagaagcccgaagacccttcagcgctcagcaagcagagctcagaagtctccatgagagaggagtcagatattgatcaaaaccagagtgatgatggtgatactgaaacatcaccaactaaatctccaacaacacccaaatcagtcaaaaacaaaaattcttcagagttcccactcttttcctataacaatggagtcgtcatgacctcctgtcgtgaactggacaataaccgcagtgccttgtcggccgcctctgcctttgccatagcaaccgccggggccaacgagggcaccccaaacaaggagaagtaccggaggatgtccttagccagtgcagggtttcccccagaccagaggaatggagacaaggagtttgtgatccgcagagcagccaccaatcgtgtcttgaacgtgctccgccactgggtgtccaagcactctcaggactttgagaccaacgatgagctcaaatgcaaggtgatcggcttcctggaagaagtcatgcacgacccggagctcctgacccaggagcggaaggctgcagccaacatcatcaggactctgacccaggaggacccaggtgacaaccagatcacgctggaggagatcacgcagatggctgaaggcgtgaaggctgagccctttgaaaaccactcagccctggagatcgcggagcagctgaccctgctagatcacctcgtcttcaagaagattccttatgaggagttcttcggacaaggatggatgaaactggaaaagaatgaaaggaccccttatatcatgaaaaccactaagcacttcaatgacatcagtaacttgattgcttcagaaatcatccgcaatgaggacatcaacgccagggtgagcgccatcgagaagtgggtggccgtagctgacatatgccgctgcctccacaactacaatgccgtactggagatcacctcgtccatgaaccgcagtgcaatcttccggctcaaaaagacgtggctcaaagtctctaagcagactaaagctttgattgataagctccaaaagcttgtgtcatctgagggcagatttaagaatctcagagaagctctgaaaaattgtgacccaccctgtgtcccttacctggggatgtacctcaccgacctggccttcatcgaggaggggacgcccaattacacggaagacggcctggtcaacttctccaagatgaggatgatatcccatattatccgagagattcgccagtttcaacaaactgcctacaaaatagagcaccaagcaaaggtaacgcaatatttactggaccaatcttttgtaatggatgaagaaagcctctacgagtcttctctccgaatagaaccaaaactccccacctgaagctgtgcccagcccagacccagctgctcccggggacatgtgctagatgatactgtacatattcgtttggtttcactggattttcttcttcagtatgtgcttctccaagaatacaaatcgtccttgttcttagattcctgtagaaccggaatatgaatttctgcaccgtttcagacttcgcccacccatccctcccctcgcccgaattc

SEQ ID NO: 55416 - DNA, 1624 bp, Homo sapiens
ccaggcctggctctccagtgtccgcagcctccgttggtactcaccagctgtggctctgagcccatcactgtgagcgtgcgcactttggcctgactttgaggctctaccctcattccccaccgtgtgtaccactctcctctgctctcccaattccatccttgcagtccctcctctgggcctgtggctgccatgctgctgcctccccactccctgtgcttccttcctgtcatgcatcctgtcatccatgtgctcgcaggagcgcctgctaaatgtccagtcctgtgctggcaccagagctatggggctgaatcagacaccgtccctccctcgagggctccctgcctgaggtggcagaaaggccattcccacccagccagatgcaggaagcccaggggctgagagggccccagaaggggacctcccacagccaggagcgccaggaccatcaggaagaagagtgaaggaggaaggggaaagggtgctcctggcaatggggatgacgaggacagaggggcgtaagagcagaggccgtgtggggctgtccgagctggggaggggctgctgcaacgtgaagtggggctcaccgtgccttctcgctcctgcctaggactctgacccaggaggacccaggtgacaaccagatcacgctggaggagatcacgcagatggctgaaggcgtgaaggctgagccctttgaaaaccactcagccctggagatcgcggagcagctgaccctgctagatcacctcgtcttcaagaagattccttatgaggagttcttcggacaaggatggatgaaactggaaaagaatgaaaggaccccttatatcatgaaaaccactaagcacttcaatgacatcagtaacttgattgcttcagaaatcatccgcaatgaggacatcaacgccagggtgagcgccatcgagaagtgggtggccgtagctgacatatgccgctgcctccacaactacaatgccgtactggagatcacctcgtccatgaaccgcagtgcaatcttccggctcaaaaagacgtggctcaaagtctctaagcagactaaagctttgattgataagctccaaaagcttgtgtcatctgagggcagatttaagaatctcagagaagctctgaaaaattgtgacccaccctgtgtcccttacctggggatgtacctcaccgacctggccttcatcgaggaggggacgcccaattacacggaagacggcctggtcaacttctccaagatgaggatgatatcccatattatccgagagattcgccagtttcaacaaactgcctacaaaatagagcaccaagcaaaggtaacgcaatatttactggaccaatcttttgtaatggatgaagaaagcctctacgagtcttctctccgaatagaaccaaaactccccacctgaagctgtgcccagcccagacccagctgctcccggggacatgtgctagatgatactgtacatattcgtttggtttcactggattttcttcttcagtatgtgcttctccaagaatacaaatcgtccttgttcttagattcctgtagaaccggaatatgaatttctgcaccgtttcagacttcgcccacccatccctcccctcgcccgaattc

SEQ ID NO: 55417 - DNA, 1138 bp, Homo sapiens
ctcagaactgcctgctgggacaggagccctgccttctgcctccatgtgggctggtcagaggcccgggaggtgaagagcgcccttgtcaaggacagccccaagtaggagtgctggggtagaggactctgacccaggaggacccaggtgacaaccagatcacgctggaggagatcacgcagatggctgaaggcgtgaaggctgagccctttgaaaaccactcagccctggagatcgcggagcagctgaccctgctagatcacctcgtcttcaagaagattccttatgaggagttcttcggacaaggatggatgaaactggaaaagaatgaaaggaccccttatatcatgaaaaccactaagcacttcaatgacatcagtaacttgattgcttcagaaatcatccgcaatgaggacatcaacgccagggtgagcgccatcgagaagtgggtggccgtagctgacatatgccgctgcctccacaactacaatgccgtactggagatcacctcgtccatgaaccgcagtgcaatcttccggctcaaaaagacgtggctcaaagtctctaagcagactaaagctttgattgataagctccaaaagcttgtgtcatctgagggcagatttaagaatctcagagaagctctgaaaaattgtgacccaccctgtgtcccttacctggggatgtacctcaccgacctggccttcatcgaggaggggacgcccaattacacggaagacggcctggtcaacttctccaagatgaggatgatatcccatattatccgagagattcgccagtttcaacaaactgcctacaaaatagagcaccaagcaaaggtaacgcaatatttactggaccaatcttttgtaatggatgaagaaagcctctacgagtcttctctccgaatagaaccaaaactccccacctgaagctgtgcccagcccagacccagctgctcccggggacatgtgctagatgatactgtacatattcgtttggtttcactggattttcttcttcagtatgtgcttctccaagaatacaaatcgtccttgttcttagattcctgtagaaccggaatatgaatttctgcaccgtttcagacttcgcccacccatccctcccctcgcccgaattc

SEQ ID NO: 55418 - DNA, 374 bp, Homo sapiens
ggtcatatgttacatgcatgtttgttcaatatgtgtatgtcaggaccatcttcacaaattttcatagccccttctgtgatctgttaaataggtatatttagccaaccctctcagcataaagctcctaccccagctgctcccccttccaagtgcctgcatctgctcttggctgggagctcgcttcccagcctgtaggatggccaccttgaaggctgtaaccctttagaagaaataaagtctccttttctaaatttatagattgtatgattgttttaagctaacaatagcaatggcattatcacctcactttctgtgtgtgtgcttagcatagtacctgacacatggcacttgagttggtagctattttttaatat

SEQ ID NO: 55419 - DNA, 216 bp, Homo sapiens
  misc_feature (211)..(211): n is a, c, g, or t
  misc_feature (214)..(216): n is a, c, g, or t
ggcaaataacataagaggactaaggacagccaagcatacaatgatgcatggcagtgacagctgacctcaacgtggggaagacacaggggttgttgagggctcaagtaagctggagagcatgtgtcctatcaaaaggaggaaactactattcagctacagtgctgctgactgaatgggaatgcaagccacttcgtgaattttcctgaaaaanaannn

SEQ ID NO: 55420 - DNA, 2308 bp, Homo sapiens
aagaggatgcgaccagaggcagctgtcccgagcagcgcacggtgatcgcctcccccggaggaggaggcgcctagacggttgcctcctttcttgtttccccaccaccacccccgtaattacattggctgctggaggggaccgggagagacagaggaggcgcctggcttcccccgcacgcccgccacctctgctctttcccgtctcgggccaggatgactggagtctttgacagtctagtggctgatatgcactcgacccagatcgccgcctccagcacgtaccaccagcaccagcagcccccgagcggcggcggcgccggcccgggtggcaacagcagcagcagcagcagcctccacaagccccaggagtcgcccacccttccggtgtccaccgccaccgacagcagctactacaccaaccagcagcacccggcgggcggcggcggcggcgggggctcgccctacgcgcacatgggttcctaccagtaccaagccagcggcctcaacaacgtcccttactccgccaagagcagctatgacctgggctacaccgccgcctacacctcctacgctccctatggaaccagttcgtccccagccaacaacgagcctgagaaggaggaccttgagcctgaaattcggatagtgaacgggaagccaaagaaagtccggaaaccccgcaccatctactccagtttccagctggcggctcttcagcggcgtttccaaaagactcaatacttggccttgccggagcgagccgagctggcggcctctctgggcctcacccagactcaggtcaaaatctggttccagaaccgccggtccaagttcaagaagatgtggaaaagtggtgagatcccctcggagcagcaccctggggccagcgcttctccaccttgtgcttcgccgccagtctcagcgccggcctcctgggactttggtgtgccgcagcggatggcgggcggcggtggtccgggcagtggcggcagcggcgccggcagctcgggctccagcccgagcagcgcggcctcggcttttctgggcaactacccctggtaccaccagacctcgggatccgcctcacacctgcaggccacggcgccgctgctgcaccccactcagaccccgcagccgcatcaccaccaccaccatcacggcggcgggggcgccccggtgagcgcggggacgattttctaaccccagggagaactcgccagagactgagagcagagaccacttatcctcattgcttaccccgagccggggttccctcctcccggcccgctgccgccacccacctctcctgcaggctgcgacctgcagtggcccgtctcaggccctgctcactcccggggccaccaaacgggcccctctctcgggggaaccggacagcagcttggcaaaggcctccctaaaaggccgcatttctgacctgagccccgggtctcggctgtttcgagccccgcctcggacttgccttccctcccctccgggtgagcctgtctggcgccttcctcgccccgggctgagagctgggtcccgggagatggaagcctcccaggcgcgcgaggcttcccgggcgctctgaggcttctttctcctcgcccgctcccctgggctcagctcggacgctgcagttattgacctcccggtcccgcctgcccgccctcccccacgtggccccttgacccgggcggccccgccgcttctttccttcctgcagttcccagccctcggagcccccatcccttatcttacccccaccgcgctcccccaggagcgctccctcagctctctcctcatccatcaccagtggagtttttttattttttatttttttaaaagtttaggtgcctttgcggatgacctcattttgacgttgaaaaaatgattttttaatatgtgaacactgcaaaaatgtgtttaaattatcttttttaaaacctattcaggattattagcctggacttggacacagagtttgtaaataaaggtgtctgtgcagattttcccactgatttatttgtataaaaatactcatcttttcagacttttttgtaaacccccagttgtgaaaactgcagtttagcagtgacctcagcaacccctcctttttattttttcctttaaaaacatttcagttaaattaagctactgatttggatttgttttatcgtatcctaaagtctttgttgttgaaatgaaaggtattttggggttatttattatgaaaacaacatgctcttaatgttgattttacaatatgaagagattatttaaataaattattgttttcattggatgtg

SEQ ID NO: 55421 - DNA, 690 bp, Homo sapiens
cgctgcccaccgctagccagcggtttttctctgccttcttttttctcctcttcgaacccctactgccccaagactaggttcctccactaatgctcaggtctttttcctcaaaggtcaaaatctggttccagaaccgccggtccaagttcaagaagatgtggaaaagtggtgagatcccctcggagcagcaccctggggccagcgcttctccaccttgtgcttcgccgccagtctcagcgccggcctcctgggactttggtgtgccgcagcggatggcgggcggcggtggtccgggcagtggcggcagcggcgccggcagctcgggctccagcccgagcagcgcggcctcggcttttctgggcaactacccctggtaccaccagacctcgggatccgcctcacacctgcaggccacggcgccgctgctgcaccccactcagaccccgcagccgcatcaccaccaccaccatcacggcggcgggggcgccccggtgagcgcggggacgattttctaaccccagggagaactcgccagagactgagagcagagaccacttatcctcattgcttaccccgagccggggttccctcctcccggcccgctgccgccacccacctctcctgcaggctgcgacctgcagtggcccgtctcaggccctgctcactcccggggccaccaaacgggcccct

SEQ ID NO: 55422 - DNA, 614 bp, Homo sapiens
gggggcagtttgcaaatattatgatactagacttattattgtacaattaaagggaaaaagaaaactaatgaaaagtgtgaaaagttggcaactttctcacagtctaggcattaaccaaacagttattcaaattgcttaagattcaaacttggtaaactttcttatttttttacaagagtttttttttttttttgagacagagtctcactctgtcaccaggctggagtgccctggcatgatcttgactcactgcaacctccgcctcccaggttcaagcaattctcctgcctcagcctcctgagtagctgggactacaggcgtgcacctacatgcccagctaatttttgtatttttagtagagacaggatttcaccatgttagccaggatagtctcgatctcttgaccttgtgatctgcctgccctggcctcccaaagtgctgggattacaggcgtaagccaccacacacttctatgagcgatatttttaagtaaattatatttttaagaaccaaatttaagaaatataatttttggtattttattactattatatttccaaaggttctaaatcttattaaagtgtgattgtgattttacatattttttatttttt

SEQ ID NO: 55423 - DNA, 205 bp, Homo sapiens
atgcaagaggcttccttctgcctttgtgtgtaatagtggtctggcgtacagccacacacttctatgagcgatatttttaagtaaattatatttttaagaaccaaatttaagaaatataatttttggtattttattactattatatttccaaaggttctaaatcttattaaagtgtgattgtgattttacatattttttatttttt

SEQ ID NO: 55424 - DNA, 1741 bp, Homo sapiens
gaattccggacaggtagtaagataggaagtgaggccaggtaccttgtgggcagtgatgtcattcggtgcgactcctaagatgtctccagagatgggagagctcacccaaaccaggttgcagaagatctggattccacacagcagcggcagcagcaggctgcaacggagaaggggctcatccataccccagtttaccaattcccccacaatggtgatcatggtgggtttaccagctcgaggcaagacctatatctccacaaagctcacacgatatctcaactggataggaacaccaactaaagtgtttaatttaggccagtatcgacgagaggcagtgagctacaagaactatgaattctttcttccagacaacatggaagccctgcaaatcaggaagcagtgcgccctggcagccctgaaggatgttcacaactatctcagccatgaggaaggtcatgttgcggtttttgatgccaccaacactaccagagaacgacggtcactgatcctgcagtttgcaaaagaacatggttacaaggtgtttttcattgagtccatttgtaatgaccctggcataattgcagaaaacatcaggcaagtgaaacttggcagccctgattatatagactgtgaccgggaaaaggttctggaagactttctaaagagaattgagtgctatgaggtcaactaccaacccttggatgaggaactggacagccacctgtcctacatcaagatcttcgacgtgggcacacgctacatggtgaaccgagtgcaggatcacatccagagccgcacagtctactacctcatgaatatccatgtcacacctcgctccatctacctttgccgacatggcgagagtgaactcaacatcagaggccgcatcggaggtgactctggcctctcagttcgcggcaagcagtatgcctatgccctggccaacttcattcagtcccagggcatcagctccctgaaggtgtggaccagtcacatgaagaggaccatccagacagctgaggccctgggtgtcccctatgagcagtggaaggccctgaatgagattgatgcgggtgtctgtgaggagatgacctatgaagaaatccaggaacattaccctgaagaatttgcactgcgagaccaagataaatatcgctaccgctatcccaagggagagtcctatgaggatctggttcagcgtctggagccagtgataatggagctagaacgacaggagaatgtactggtgatctgccaccaggctgtcatgcggtgcctcctggcctatttcctggataaaagttcagatgagcttccatatctcaagtgccctctgcacacagtgctcaaactcactcctgtggcttatggctgcaaagtggaatccatctacctgaatgtggaggccgtgaacacacaccgggagaagcctgagaatgtggacatcacccgggaacctgaggaagccctggatactgtcccagcccactactgagccctttccaagaagtcaaactgcctgtgtcctcatcgccttccacctttaggaaatgctatctttgctcttctcctactctgccttggcctcactgaggcaccccacttccagtgaagaagtcctccgcaactcccaaacaagcctcgcttgctggccgcaaccaaggagctatctagctctggaggaaactttctttcttaattcctattctctgacgaataaagacttactgcctacaagagg

SEQ ID NO: 55425 - DNA, 1922 bp, Homo sapiens
gaattccggacaggtagtaagataggaagtgaggccaggtaccttgtgggcagtgatgtcattcggtgcgactcctaagatgtctccagagatgggagagctcacccaaaccaggttgcagaagatctggattccacacagcagcggcagcagcaggctgcaacggagaaggggctcatccataccccagtttaccaattcccccacaatggtgatcatggtgggtttaccagctcgaggcaagacctatatctccacaaagctcacacgatatctcaactggataggaacaccaactaaagtgtttaatttaggccagtatcgacgagaggcagtgagctacaagaactatgaattctttcttccagacaacatggaagccctgcaaatcaggaagcagtgcgccctggcagccctgaaggatgttcacaactatctcagccatgaggaaggtcatgttgcggtttttgatgccaccaacactaccagagaacgacggtcactgatcctgcagtttgcaaaagaacatggttacaaggtgtttttcattgagtccatttgtaatgaccctggcataattgcagaaaacatcaggcaagtgaaacttggcagccctgattatatagactgtgaccgggaaaaggttctggaagactttctaaagagaattgagtgctatgaggtcaactaccaacccttggatgaggaactggacagccacctgtcctacatcaagatcttcgacgtgggcacacgctacatggtgaaccgagtgcaggatcacatccagagccgcacagtctactacctcatgaatatccatgtcacacctcgctccatctacctttgccgacatggcgagagtgaactcaacatcagaggccgcatcggaggtgactctggcctctcagttcgcggcaagcagtatgcctatgccctggccaacttcattcagtcccagggcatcagctccctgaaggtgtggaccagtcacatgaagaggaccatccagacagctgaggccctgggtgtcccctatgagcagtggaaggccctgaatgagattgatgcgggtgtctgtgaggagatgacctatgaagaaatccaggaacattaccctgaagaatttgcactgcgagaccaagataaatatcgctaccgctatcccaagggagagtcctatgaggatctggttcagcgtctggagccagtgataatggagctagaacgacaggagaatgtactggtgatctgccaccaggctgtcatgcggtgcctcctggcctatttcctggataaaagttcaggtactaccctcatctctgctttgggaatgtttgatggtatttgagacactgacaccaacaattagatatctatatcttagtagttaagagaagagtatctagaacaaggatgcctaggttcagattctttctctttcacatactagctgtactgcctttcacaaatttctttaacttctctggcctcagtgtcctcatctgtaaaatggggagaataatgatgaattttaaataacataagtaaaaagtttagaacagttcatgacacattgtgtgggctatatattaactgctattattagtatagtattattcttagctaacattttcaaagccaacgttaacagtctgcctcaatctggaaaagatgagctagtatttctgtgaagcatgctaccatcaggtgatagtagggcctttcatagcttcatgatcctgattacaagtttctgtccttgctataggggtaatttccccaagatagtgatgttttcattttaaattgtttttcaaatgataatttatttttaaaaaaatatgtaggcattgcatttacagagtatttacacactgactgcataggctgaactgcaaactggggcagctggcctggca

SEQ ID NO: 55426 - DNA, 1912 bp, Homo sapiens
ctttcccggaggctggcagatgcgcgtggtgcggctgctgcggctccgggcggctctgacgctgctcggggaggtcccccgccgcccggcctcccggggtgtcccgggctcgcgcaggacgcagaagggcagtggagccaggtgggagaaggagaagcacgaagacggggtgaagtggagacagctggagcacaagggcccgtacttcgcacccccatacgagccccttcccgacggagtgcgtttcttctatgaaggaaggcctgtgagattgagcgtggcagcggaggaggtcgccactttttatgggaggatgttagatcatgaatacacaacaaaggaggttttccggaagaacttcttcaatgactggcgaaaggaaatggcggtggaagagagggaagtcatcaagagcctggacaagtgtgacttcacggagatccacagatactttgtggacaaggccgcagcccggaaagtcctgagcagggaggagaagcagaagctaaaagaagaggcagaaaaacttcagcaagagttcggctactgtattttagatggtcaccaagaaaaaataggcaacttcaagattgagccgcctggcttgttccgtggccgtggcgaccatcccaagatggggatgctgaagagaaggatcacgccagaggatgtggttatcaactgcagcagggactcgaagatccccgagccgccggcggggcaccagtggaaggaggtgcgctccgataacaccgtcacgtggctggcagcttggaccgagagcgttcagaactccatcaagtacatcatgctgaacccttgctcgaagctgaagggggagacagcttggcagaagtttgaaacagctcgacgcctgcggggatttgtggacgagatccgctcccagtaccgggctgactggaagtctcgggaaatgaagacgagacagcgggcggtggccctgtatttcatcgataagctggcactgagagcaggaaatgagaaggaggacggtgaggcggccgacaccgtgggctgctgttccctccgcgtggagcacgtccagctgcacccggaggccgatggctgccaacacgtggtggaatttgacttcctggggaaggactgcatccgctactacaacagagtgccggtggagaagccggtgtacaagaacttacagctctttatggagaacaaggacccccgggacgacctcttcgacaggctgaccacgaccagcctgaacaagcacctccaggagctgatggacgggctgacggccaaggtgttccggacctacaacgcctccatcactctgcaggagcagctgcgggccctgacgcgcgccgaggacagcatagcagctaagatcttatcctacaaccgagccaaccgagtcgtggccattctctgcaaccatcagcgagcaacccccagtacgttcgagaagtcgatgcagaatctccagacgaagatccaggcaaagaaggagcaggtggctgaggccagggcagagctgaggagggcgagggctgagcacaaagcccaaggggatggcaagtccaggagtgtcctggagaagaagaggtggctcctggagaagctgcaggagcagctggcgcagctgagtgtgcaggccacggacaaggaggagaacaagcaggtggccctgggcacgtccaagctcaactacctggaccccaggatcagcattgcctggtgcaagcggttcagggtgccagtggagaagatctacagcaaaacacagcgggagaggttcgcctgggctctcgccatggcaggagaagactttgaattctaacgacgagccgtgttgaaacttcttttgtatgtgtgtgtgtttttttcactattaaagcagtactggggaattttgtacaataaaaaa

SEQ ID NO: 55427 - DNA, 140 bp, Homo sapiens
tcaagcttctaacgatgtacggggacatggcaggagaagactttgaattctaacgacgagccgtgttgaaacttcttttgtatgtgtgtgtgtttttttcactattaaagcagtactggggaattttgtacaataaaaaa

SEQ ID NO: 55428 - DNA, 2317 bp, Homo sapiens
  misc_feature (1913)..(1913): n is a, c, g, or t
  misc_feature (1926)..(1926): n is a, c, g, or t
  misc_feature (1932)..(1932): n is a, c, g, or t
  misc_feature (2317)..(2317): n is a, c, g, or t
ctttcccggaggctggcagatgcgcgtggtgcggctgctgcggctccgggcggctctgacgctgctcggggaggtcccccgccgcccggcctcccggggtgtcccgggctcgcgcaggacgcagaagggcagtggagccaggtgggagaaggagaagcacgaagacggggtgaagtggagacagctggagcacaagggcccgtacttcgcacccccatacgagccccttcccgacggagtgcgtttcttctatgaaggaaggcctgtgagattgagcgtggcagcggaggaggtcgccactttttatgggaggatgttagatcatgaatacacaacaaaggaggttttccggaagaacttcttcaatgactggcgaaaggaaatggcggtggaagagagggaagtcatcaagagcctggacaagtgtgacttcacggagatccacagatactttgtggacaaggccgcagcccggaaagtcctgagcagggaggagaagcagaagctaaaagaagaggcagaaaaacttcagcaagagttcggctactgtattttagatggtcaccaagaaaaaataggcaacttcaagattgagccgcctggcttgttccgtggccgtggcgaccatcccaagatggggatgctgaagagaaggatcacgccagaggatgtggttatcaactgcagcagggactcgaagatccccgagccgccggcggggcaccagtggaaggaggtgcgctccgataacaccgtcacgtggctggcagcttggaccgagagcgttcagaactccatcaagtacatcatgctgaacccttgctcgaagctgaagggggagacagcttggcagaagtttgaaacagctcgacgcctgcggggatttgtggacgagatccgctcccagtaccgggctgactggaagtctcgggaaatgaagacgagacagcgggcggtggccctgtatttcatcgataagctggcactgagagcaggaaatgagaaggaggacggtgaggcggccgacaccgtgggctgctgttccctccgcgtggagcacgtccagctgcacccggaggccgatggctgccaacacgtggtggaatttgacttcctggggaaggactgcatccgctactacaacagagtgccggtggagaagccggtgtacaagaacttacagctctttatggagaacaaggacccccgggacgacctcttcgacaggctgaccacgaccagcctgaacaagcacctccaggagctgatggacgggctgacggccaaggtgttccggacctacaacgcctccatcactctgcaggagcagctgcgggccctgacgcgcgccgaggacagcatagcagctaagatcttatcctacaaccgagccaaccgagtcgtggccattctctgcaaccatcagcgagcaacccccagtacgttcgagaagtcgatgcagaatctccagacgaagatccaggcaaagaaggagcaggtggctgaggccagggcagagctgaggagggcgagggctgagcacaaagcccaaggggatggcaagtccaggagtgtcctggagaagaagaggtggctcctggagaagctgcaggagcagctggcgcagctgagtgtgcaggccacggacaaggaggagaacaagcaggtggccctgggcacgtccaagctcaactacctggaccccaggatcagcattgcctggtgcaagcggttcagggtgccagtggagaagatctacagcaaaacacagcgggagaggttcgcctgggctctcgccatggcaggagaagactttgaattctaacgacgagccgtgttgaaacttcttttgtatgtgtgtgtgtttttttcactattaaagcagtactggggaattttgtacaataaaaaantaaaaaaaaaaanaaaaanaacaaaaaaaaaaaaactctgtttgcggcgcgcgccctcgcggcccctccgaagaaagtctttcttaaaccctttccgttgtggggcgcgcgcgcgggcccacttttgggttagtggtgaaccagtgtgggcccaagaggcgtgtttcccagaggaaatatcgcgggctcccatgaacatcgagcggctcgtggggtttttctccacctaataaaaaaaagcgcccgcggggggcaaaccgcgaaagcgtgtttttgtgaaaaacaatctccccagatagggagagttttccgagagaggtccctagaagcggggactctcttatccagcacgggggagtccccgaaggcgagactccgccaatattccaatattaggcccgcan

SEQ ID NO: 55429 - DNA, 2841 bp, Homo sapiens
  misc_feature (2437)..(2437): n is a, c, g, or t
  misc_feature (2450)..(2450): n is a, c, g, or t
  misc_feature (2456)..(2456): n is a, c, g, or t
  misc_feature (2841)..(2841): n is a, c, g, or t
ctttcccggaggctggcagatgcgcgtggtgcggctgctgcggctccgggcggctctgacgctgctcggggaggtcccccgccgcccggcctcccggggtgtcccgggctcgcgcaggacgcagaagggcagtggagccaggtgggagaaggagaagcacgaagacggggtgaagtggagacagctggagcacaagggcccgtacttcgcacccccatacgagccccttcccgacggagtgcgtttcttctatgaaggaaggcctgtgagattgagcgtggcagcggaggaggtcgccactttttatgggaggatgttagatcatgaatacacaacaaaggaggttttccggaagaacttcttcaatgactggcgaaaggaaatggcggtggaagagagggaagtcatcaagagcctggacaagtgtgacttcacggagatccacagatactttgtggacaaggccgcagcccggaaagtcctgagcagggaggagaagcagaagctaaaagaagaggcagaaaaacttcagcaagagttcggctactgtattttagatggtcaccaagaaaaaataggcaacttcaagattgagccgcctggcttgttccgtggccgtggcgaccatcccaagatggggatgctgaagagaaggatcacgccagaggatgtggttatcaactgcagcagggactcgaagatccccgagccgccggcggggcaccagtggaaggaggtgcgctccgataacaccgtcacgtggctggcagcttggaccgagagcgttcagaactccatcaagtacatcatgctgaacccttgctcgaagctgaagggggagacagcttggcagaagtttgaaacagctcgacgcctgcggggatttgtggacgagatccgctcccagtaccgggctgactggaagtctcgggaaatgaagacgagacagcgggcggtggccctgtatttcatcgataagctggcactgagagcaggaaatgagaaggaggacggtgaggcggccgacaccgtgggctgctgttccctccgcgtggagcacgtccagctgcacccggaggccgatggctgccaacacgtggtggaatttgacttcctggggaaggactgcatccgctactacaacagagtgccggtggagaagccggtgtacaagaacttacagctctttatggagaacaaggacccccgggacgacctcttcgacaggctgaccacgaccagcctgaacaagcacctccaggagctgatggacgggctgacggccaaggtgttccggacctacaacgcctccatcactctgcaggagcagctgcgggccctgacgcgcgccgaggacagcatagcagctaagatcttatcctacaaccgagccaaccgagtcgtggccattctctgcaaccatcagcgagcaacccccagtacgttcgagaagtcgatgcagaatctccagacgaagatccaggcaaagaaggagcaggtggctgaggccagggcagagctgaggagggcgagggctgagcacaaagcccaaggggatggcaagtccaggagtgtcctggagaagaagaggtggctcctggagaagctgcaggagcagctggcgcagctgagtgtgcaggccacggacaaggaggagaacaagcaggtggccctgggcacgtccaagctcaactacctggaccccaggatcagcattgcctggtgcgtgtgcctggggtctcagttcccacctgtggcctatggggggcctgggttttccaggaggcctctgttcagtcccagcattgcccttgtcccgtgtcccctggggtcagcacaggccctccctgtgacagggacccatgatgctgagtcctgtgtcatcagctctccctgccctgaacgttcggatggacagggtgaagtgggggtgctgacagtggcctgggactcggaggcatcaggagggcctgtggagctcagcctgcccacagggagtgggaggtggctgagcgccctgctcggtggacacctaggccacagcaggttgtctttgacacctcgctgatgctccagggtggcggcatgcgtggggtggggttggcctagaggagcaggtcccagctacaccaggcggctctggtgtctctgctgcatggaggacgctcgcccttgccgagcaccctgacctggccttcaaggtgggtgagttgcctgcttgcctgggctgatgctgcctcccgcaggtgcaagcggttcagggtgccagtggagaagatctacagcaaaacacagcgggagaggttcgcctgggctctcgccatggcaggagaagactttgaattctaacgacgagccgtgttgaaacttcttttgtatgtgtgtgtgtttttttcactattaaagcagtactggggaattttgtacaataaaaaantaaaaaaaaaaanaaaaanaacaaaaaaaaaaaaactctgtttgcggcgcgcgccctcgcggcccctccgaagaaagtctttcttaaaccctttccgttgtggggcgcgcgcgcgggcccacttttgggttagtggtgaaccagtgtgggcccaagaggcgtgtttcccagaggaaatatcgcgggctcccatgaacatcgagcggctcgtggggtttttctccacctaataaaaaaaagcgcccgcggggggcaaaccgcgaaagcgtgtttttgtgaaaaacaatctccccagatagggagagttttccgagagaggtccctagaagcggggactctcttatccagcacgggggagtccccgaaggcgagactccgccaatattccaatattaggcccgcan

SEQ ID NO: 55430 - DNA, 2436 bp, Homo sapiens
ctttcccggaggctggcagatgcgcgtggtgcggctgctgcggctccgggcggctctgacgctgctcggggaggtcccccgccgcccggcctcccggggtgtcccgggctcgcgcaggacgcagaagggcagtggagccaggtgggagaaggagaagcacgaagacggggtgaagtggagacagctggagcacaagggcccgtacttcgcacccccatacgagccccttcccgacggagtgcgtttcttctatgaaggaaggcctgtgagattgagcgtggcagcggaggaggtcgccactttttatgggaggatgttagatcatgaatacacaacaaaggaggttttccggaagaacttcttcaatgactggcgaaaggaaatggcggtggaagagagggaagtcatcaagagcctggacaagtgtgacttcacggagatccacagatactttgtggacaaggccgcagcccggaaagtcctgagcagggaggagaagcagaagctaaaagaagaggcagaaaaacttcagcaagagttcggctactgtattttagatggtcaccaagaaaaaataggcaacttcaagattgagccgcctggcttgttccgtggccgtggcgaccatcccaagatggggatgctgaagagaaggatcacgccagaggatgtggttatcaactgcagcagggactcgaagatccccgagccgccggcggggcaccagtggaaggaggtgcgctccgataacaccgtcacgtggctggcagcttggaccgagagcgttcagaactccatcaagtacatcatgctgaacccttgctcgaagctgaagggggagacagcttggcagaagtttgaaacagctcgacgcctgcggggatttgtggacgagatccgctcccagtaccgggctgactggaagtctcgggaaatgaagacgagacagcgggcggtggccctgtatttcatcgataagctggcactgagagcaggaaatgagaaggaggacggtgaggcggccgacaccgtgggctgctgttccctccgcgtggagcacgtccagctgcacccggaggccgatggctgccaacacgtggtggaatttgacttcctggggaaggactgcatccgctactacaacagagtgccggtggagaagccggtgtacaagaacttacagctctttatggagaacaaggacccccgggacgacctcttcgacaggctgaccacgaccagcctgaacaagcacctccaggagctgatggacgggctgacggccaaggtgttccggacctacaacgcctccatcactctgcaggagcagctgcgggccctgacgcgcgccgaggacagcatagcagctaagatcttatcctacaaccgagccaaccgagtcgtggccattctctgcaaccatcagcgagcaacccccagtacgttcgagaagtcgatgcagaatctccagacgaagatccaggcaaagaaggagcaggtggctgaggccagggcagagctgaggagggcgagggctgagcacaaagcccaaggggatggcaagtccaggagtgtcctggagaagaagaggtggctcctggagaagctgcaggagcagctggcgcagctgagtgtgcaggccacggacaaggaggagaacaagcaggtggccctgggcacgtccaagctcaactacctggaccccaggatcagcattgcctggtgcgtgtgcctggggtctcagttcccacctgtggcctatggggggcctgggttttccaggaggcctctgttcagtcccagcattgcccttgtcccgtgtcccctggggtcagcacaggccctccctgtgacagggacccatgatgctgagtcctgtgtcatcagctctccctgccctgaacgttcggatggacagggtgaagtgggggtgctgacagtggcctgggactcggaggcatcaggagggcctgtggagctcagcctgcccacagggagtgggaggtggctgagcgccctgctcggtggacacctaggccacagcaggttgtctttgacacctcgctgatgctccagggtggcggcatgcgtggggtggggttggcctagaggagcaggtcccagctacaccaggcggctctggtgtctctgctgcatggaggacgctcgcccttgccgagcaccctgacctggccttcaaggtgggtgagttgcctgcttgcctgggctgatgctgcctcccgcaggtgcaagcggttcagggtgccagtggagaagatctacagcaaaacacagcgggagaggttcgcctgggctctcgccatggcaggagaagactttgaattctaacgacgagccgtgttgaaacttcttttgtatgtgtgtgtgtttttttcactattaaagcagtactggggaattttgtacaataaaaaa

SEQ ID NO: 55431 - DNA, 2083 bp, Homo sapiens
ctttcccggaggctggcagatgcgcgtggtgcggctgctgcggctccgggcggctctgacgctgctcggggaggtcccccgccgcccggcctcccggggtgtcccgggctcgcgcaggacgcagaagggcagtggagccagaaacagccagaaaggccctttcagaaatgtctgttgcacatgctttcccctctcagacccttcagagacttcctgttgctctgaggacactcatcccagccgaccaggcccaccaggcccccaacagcactacctggctggggtcacgtgcaggtctcctggctctggcaggtgggagaaggagaagcacgaagacggggtgaagtggagacagctggagcacaagggcccgtacttcgcacccccatacgagccccttcccgacggagtgcgtttcttctatgaaggaaggcctgtgagattgagcgtggcagcggaggaggtcgccactttttatgggaggatgttagatcatgaatacacaacaaaggaggttttccggaagaacttcttcaatgactggcgaaaggaaatggcggtggaagagagggaagtcatcaagagcctggacaagtgtgacttcacggagatccacagatactttgtggacaaggccgcagcccggaaagtcctgagcagggaggagaagcagaagctaaaagaagaggcagaaaaacttcagcaagagttcggctactgtattttagatggtcaccaagaaaaaataggcaacttcaagattgagccgcctggcttgttccgtggccgtggcgaccatcccaagatggggatgctgaagagaaggatcacgccagaggatgtggttatcaactgcagcagggactcgaagatccccgagccgccggcggggcaccagtggaaggaggtgcgctccgataacaccgtcacgtggctggcagcttggaccgagagcgttcagaactccatcaagtacatcatgctgaacccttgctcgaagctgaagggggagacagcttggcagaagtttgaaacagctcgacgcctgcggggatttgtggacgagatccgctcccagtaccgggctgactggaagtctcgggaaatgaagacgagacagcgggcggtggccctgtatttcatcgataagctggcactgagagcaggaaatgagaaggaggacggtgaggcggccgacaccgtgggctgctgttccctccgcgtggagcacgtccagctgcacccggaggccgatggctgccaacacgtggtggaatttgacttcctggggaaggactgcatccgctactacaacagagtgccggtggagaagccggtgtacaagaacttacagctctttatggagaacaaggacccccgggacgacctcttcgacaggctgaccacgaccagcctgaacaagcacctccaggagctgatggacgggctgacggccaaggtgttccggacctacaacgcctccatcactctgcaggagcagctgcgggccctgacgcgcgccgaggacagcatagcagctaagatcttatcctacaaccgagccaaccgagtcgtggccattctctgcaaccatcagcgagcaacccccagtacgttcgagaagtcgatgcagaatctccagacgaagatccaggcaaagaaggagcaggtggctgaggccagggcagagctgaggagggcgagggctgagcacaaagcccaaggggatggcaagtccaggagtgtcctggagaagaagaggtggctcctggagaagctgcaggagcagctggcgcagctgagtgtgcaggccacggacaaggaggagaacaagcaggtggccctgggcacgtccaagctcaactacctggaccccaggatcagcattgcctggtgcaagcggttcagggtgccagtggagaagatctacagcaaaacacagcgggagaggttcgcctgggctctcgccatggcaggagaagactttgaattctaacgacgagccgtgttgaaacttcttttgtatgtgtgtgtgtttttttcactattaaagcagtactggggaattttgtacaataaaaaa

SEQ ID NO: 55432 - DNA, 2159 bp, Homo sapiens
ctttcccggaggctggcagatgcgcgtggtgcggctgctgcggctccgggcggctctgacgctgctcggggaggtcccccgccgcccggcctcccggggtgtcccgggctcgcgcaggacgcagaagggcagtggagccaggagcttgggacccaaagagagccccagatggggcagggtgtcttgggaggagggagttctggcctgcgcttggagctggggctggctgtgggccctgcattgaggcacatctctccgagggtgcacaggcagacccttcagagacttcctgttgctctgaggacactcatcccagccgaccaggcccaccaggcccccaacagcactacctggctggggtcacgtgcaggtctcctggctctggcaggtgggagaaggagaagcacgaagacggggtgaagtggagacagctggagcacaagggcccgtacttcgcacccccatacgagccccttcccgacggagtgcgtttcttctatgaaggaaggcctgtgagattgagcgtggcagcggaggaggtcgccactttttatgggaggatgttagatcatgaatacacaacaaaggaggttttccggaagaacttcttcaatgactggcgaaaggaaatggcggtggaagagagggaagtcatcaagagcctggacaagtgtgacttcacggagatccacagatactttgtggacaaggccgcagcccggaaagtcctgagcagggaggagaagcagaagctaaaagaagaggcagaaaaacttcagcaagagttcggctactgtattttagatggtcaccaagaaaaaataggcaacttcaagattgagccgcctggcttgttccgtggccgtggcgaccatcccaagatggggatgctgaagagaaggatcacgccagaggatgtggttatcaactgcagcagggactcgaagatccccgagccgccggcggggcaccagtggaaggaggtgcgctccgataacaccgtcacgtggctggcagcttggaccgagagcgttcagaactccatcaagtacatcatgctgaacccttgctcgaagctgaagggggagacagcttggcagaagtttgaaacagctcgacgcctgcggggatttgtggacgagatccgctcccagtaccgggctgactggaagtctcgggaaatgaagacgagacagcgggcggtggccctgtatttcatcgataagctggcactgagagcaggaaatgagaaggaggacggtgaggcggccgacaccgtgggctgctgttccctccgcgtggagcacgtccagctgcacccggaggccgatggctgccaacacgtggtggaatttgacttcctggggaaggactgcatccgctactacaacagagtgccggtggagaagccggtgtacaagaacttacagctctttatggagaacaaggacccccgggacgacctcttcgacaggctgaccacgaccagcctgaacaagcacctccaggagctgatggacgggctgacggccaaggtgttccggacctacaacgcctccatcactctgcaggagcagctgcgggccctgacgcgcgccgaggacagcatagcagctaagatcttatcctacaaccgagccaaccgagtcgtggccattctctgcaaccatcagcgagcaacccccagtacgttcgagaagtcgatgcagaatctccagacgaagatccaggcaaagaaggagcaggtggctgaggccagggcagagctgaggagggcgagggctgagcacaaagcccaaggggatggcaagtccaggagtgtcctggagaagaagaggtggctcctggagaagctgcaggagcagctggcgcagctgagtgtgcaggccacggacaaggaggagaacaagcaggtggccctgggcacgtccaagctcaactacctggaccccaggatcagcattgcctggtgcaagcggttcagggtgccagtggagaagatctacagcaaaacacagcgggagaggttcgcctgggctctcgccatggcaggagaagactttgaattctaacgacgagccgtgttgaaacttcttttgtatgtgtgtgtgtttttttcactattaaagcagtactggggaattttgtacaataaaaaa

SEQ ID NO: 55433 - DNA, 2375 bp, Homo sapiens
  misc_feature (1913)..(1913): n is a, c, g, or t
  misc_feature (1926)..(1926): n is a, c, g, or t
  misc_feature (1932)..(1932): n is a, c, g, or t
ctttcccggaggctggcagatgcgcgtggtgcggctgctgcggctccgggcggctctgacgctgctcggggaggtcccccgccgcccggcctcccggggtgtcccgggctcgcgcaggacgcagaagggcagtggagccaggtgggagaaggagaagcacgaagacggggtgaagtggagacagctggagcacaagggcccgtacttcgcacccccatacgagccccttcccgacggagtgcgtttcttctatgaaggaaggcctgtgagattgagcgtggcagcggaggaggtcgccactttttatgggaggatgttagatcatgaatacacaacaaaggaggttttccggaagaacttcttcaatgactggcgaaaggaaatggcggtggaagagagggaagtcatcaagagcctggacaagtgtgacttcacggagatccacagatactttgtggacaaggccgcagcccggaaagtcctgagcagggaggagaagcagaagctaaaagaagaggcagaaaaacttcagcaagagttcggctactgtattttagatggtcaccaagaaaaaataggcaacttcaagattgagccgcctggcttgttccgtggccgtggcgaccatcccaagatggggatgctgaagagaaggatcacgccagaggatgtggttatcaactgcagcagggactcgaagatccccgagccgccggcggggcaccagtggaaggaggtgcgctccgataacaccgtcacgtggctggcagcttggaccgagagcgttcagaactccatcaagtacatcatgctgaacccttgctcgaagctgaagggggagacagcttggcagaagtttgaaacagctcgacgcctgcggggatttgtggacgagatccgctcccagtaccgggctgactggaagtctcgggaaatgaagacgagacagcgggcggtggccctgtatttcatcgataagctggcactgagagcaggaaatgagaaggaggacggtgaggcggccgacaccgtgggctgctgttccctccgcgtggagcacgtccagctgcacccggaggccgatggctgccaacacgtggtggaatttgacttcctggggaaggactgcatccgctactacaacagagtgccggtggagaagccggtgtacaagaacttacagctctttatggagaacaaggacccccgggacgacctcttcgacaggctgaccacgaccagcctgaacaagcacctccaggagctgatggacgggctgacggccaaggtgttccggacctacaacgcctccatcactctgcaggagcagctgcgggccctgacgcgcgccgaggacagcatagcagctaagatcttatcctacaaccgagccaaccgagtcgtggccattctctgcaaccatcagcgagcaacccccagtacgttcgagaagtcgatgcagaatctccagacgaagatccaggcaaagaaggagcaggtggctgaggccagggcagagctgaggagggcgagggctgagcacaaagcccaaggggatggcaagtccaggagtgtcctggagaagaagaggtggctcctggagaagctgcaggagcagctggcgcagctgagtgtgcaggccacggacaaggaggagaacaagcaggtggccctgggcacgtccaagctcaactacctggaccccaggatcagcattgcctggtgcaagcggttcagggtgccagtggagaagatctacagcaaaacacagcgggagaggttcgcctgggctctcgccatggcaggagaagactttgaattctaacgacgagccgtgttgaaacttcttttgtatgtgtgtgtgtttttttcactattaaagcagtactggggaattttgtacaataaaaaantaaaaaaaaaaanaaaaanaacaaaaaaaaaaaaaaaaaaaaaaaaaaaaaaaaaaaaaaaaaaaaaaaaaagaaggggggcggcgtcgatagataatctacctcctcctggagcgggcccgacgaagcattcgggcgcgcacgccgtgttttagtgaaaacgagagggggccgccacaaatgtaggggcgtggtattatataagaagtagatcaggagacggggcggcggggggtatgaaaaacacggccgctggtgctgggcgagagatcagcagcggtttcgcctgaggtggactcatgtcttggtgagagagcagagctcgccttccttcattgctgtggggggcggcgtcacatcacttgatgtggtgagataagcaactagccctccgacagacgatgttttttcgaggcgtgctgggaggacaacaatattaacaaatcaatgcgagagaacgta

SEQ ID NO: 55434 - DNA, 1951 bp, Homo sapiens
ctttcccggaggctggcagatgcgcgtggtgcggctgctgcggctccgggcggctctgacgctgctcggggaggtcccccgccgcccggcctcccggggtgtcccgggctcgcgcaggacgcagaagggcagtggagccaggtgggagaaggagaagcacgaagacggggtgaagtggagacagctggagcacaagggcccgtacttcgcacccccatacgagccccttcccgacggagtgcgtttcttctatgaaggaaggcctgtgagattgagcgtggcagcggaggaggtcgccactttttatgggaggatgttagatcatgaatacacaacaaaggaggttttccggaagaacttcttcaatgactggcgaaaggaaatggcggtggaagagagggaagtcatcaagagcctggacaagtgtgacttcacggagatccacagatactttgtggacaaggccgcagcccggaaagtcctgagcagggaggagaagcagaagctaaaagaagaggcagaaaaacttcagcaagagttcggctactgtattttagatggtcaccaagaaaaaataggcaacttcaagattgagccgcctggcttgttccgtggccgtggcgaccatcccaagatggggatgctgaagagaaggatcacgccagaggatgtggttatcaactgcagcagggactcgaagatccccgagccgccggcggggcaccagtggaaggaggtgcgctccgataacaccgtcacgtggctggcagcttggaccgagagcgttcagaactccatcaagtacatcatgctgaacccttgctcgaagctgaagggggagacagcttggcagaagtttgaaacagctcgacgcctgcggggatttgtggacgagatccgctcccagtaccgggctgactggaagtctcgggaaatgaagacgagacagcgggcggtggccctgtatttcatcgataagctggcactgagagcaggaaatgagaaggaggacggtgaggcggccgacaccgtgggctgctgttccctccgcgtggagcacgtccagctgcacccggaggccgatggctgccaacacgtggtggaatttgacttcctggggaaggactgcatccgctactacaacagagtgccggtggagaagccggtgtacaagaacttacagctctttatggagaacaaggacccccgggacgacctcttcgacaggctgaccacgaccagcctgaacaagcacctccaggagctgatggacgggctgacggccaaggtgttccggacctacaacgcctccatcactctgcaggagcagctgcgggccctgacgcgcgccgaggacagcatagcagctaagatcttatcctacaaccgagccaaccgagtcgtggccattctctgcaaccatcagcgagcaacccccagtacgttcgagaagtcgatgcagaatctccagacgaagatccaggcaaagaaggagcaggtggctgaggccagggcagagctgaggagggcgagggctgagcacaaagcccaaggggatggcaagtccaggagtgtcctggagaagaagaggtggctcctggagaagctgcaggagcagctggcgcagctgagtgtgcaggccacggacaaggaggagaacaagcaggtggccctgggcacgtccaagctcaactacctggaccccaggatcagcattgcctggtgcaagcggttcagggtgccagtggagaagatctacagcaaaacacagcgggagaggttcgcctgggctctcgccatggcaggagaagactttgaattctaacgacgagccgtgttgaaacttcttttgtatgtgtgtgtgtttttttcactattaaagcagtactggggaattttgtacaataaaaaaaatgtgtgcaagtgcttgtacatcactagaaaaagtccc

SEQ ID NO: 55435 - DNA, 1951 bp, Homo sapiens
ctttcccggaggctggcagatgcgcgtggtgcggctgctgcggctccgggcggctctgacgctgctcggggaggtcccccgccgcccggcctcccggggtgtcccgggctcgcgcaggacgcagaagggcagtggagccaggtgggagaaggagaagcacgaagacggggtgaagtggagacagctggagcacaagggcccgtacttcgcacccccatacgagccccttcccgacggagtgcgtttcttctatgaaggaaggcctgtgagattgagcgtggcagcggaggaggtcgccactttttatgggaggatgttagatcatgaatacacaacaaaggaggttttccggaagaacttcttcaatgactggcgaaaggaaatggcggtggaagagagggaagtcatcaagagcctggacaagtgtgacttcacggagatccacagatactttgtggacaaggccgcagcccggaaagtcctgagcagggaggagaagcagaagctaaaagaagaggcagaaaaacttcagcaagagttcggctactgtattttagatggtcaccaagaaaaaataggcaacttcaagattgagccgcctggcttgttccgtggccgtggcgaccatcccaagatggggatgctgaagagaaggatcacgccagaggatgtggttatcaactgcagcagggactcgaagatccccgagccgccggcggggcaccagtggaaggaggtgcgctccgataacaccgtcacgtggctggcagcttggaccgagagcgttcagaactccatcaagtacatcatgctgaacccttgctcgaagctgaagggggagacagcttggcagaagtttgaaacagctcgacgcctgcggggatttgtggacgagatccgctcccagtaccgggctgactggaagtctcgggaaatgaagacgagacagcgggcggtggccctgtatttcatcgataagctggcactgagagcaggaaatgagaaggaggacggtgaggcggccgacaccgtgggctgctgttccctccgcgtggagcacgtccagctgcacccggaggccgatggctgccaacacgtggtggaatttgacttcctggggaaggactgcatccgctactacaacagagtgccggtggagaagccggtgtacaagaacttacagctctttatggagaacaaggacccccgggacgacctcttcgacaggctgaccacgaccagcctgaacaagcacctccaggagctgatggacgggctgacggccaaggtgttccggacctacaacgcctccatcactctgcaggagcagctgcgggccctgacgcgcgccgaggacagcatagcagctaagatcttatcctacaaccgagccaaccgagtcgtggccattctctgcaaccatcagcgagcaacccccagtacgttcgagaagtcgatgcagaatctccagacgaagatccaggcaaagaaggagcaggtggctgaggccagggcagagctgaggagggcgagggctgagcacaaagcccaaggggatggcaagtccaggagtccagcgcggggcctcgcggcctcctcttctcttgccagtgtcctggagaagaagaggtggctcctggagaagctgcaggagcagctggcgcagctgagtgtgcaggccacggacaaggaggagaacaagcaggtggccctgggcacgtccaagctcaactacctggaccccaggatcagcattgcctggtgcaagcggttcagggtgccagtggagaagatctacagcaaaacacagcgggagaggttcgcctgggctctcgccatggcaggagaagactttgaattctaacgacgagccgtgttgaaacttcttttgtatgtgtgtgtgtttttttcactattaaagcagtactggggaattttgtacaataaaaaa

SEQ ID NO: 55436 - DNA, 2027 bp, Homo sapiens
ctttcccggaggctggcagatgcgcgtggtgcggctgctgcggctccgggcggctctgacgctgctcggggaggtcccccgccgcccggcctcccggggtgtcccgggctcgcgcaggacgcagaagggcagtggagccagacccttcagagacttcctgttgctctgaggacactcatcccagccgaccaggcccaccaggcccccaacagcactacctggctggggtcacgtgcaggtctcctggctctggcaggtgggagaaggagaagcacgaagacggggtgaagtggagacagctggagcacaagggcccgtacttcgcacccccatacgagccccttcccgacggagtgcgtttcttctatgaaggaaggcctgtgagattgagcgtggcagcggaggaggtcgccactttttatgggaggatgttagatcatgaatacacaacaaaggaggttttccggaagaacttcttcaatgactggcgaaaggaaatggcggtggaagagagggaagtcatcaagagcctggacaagtgtgacttcacggagatccacagatactttgtggacaaggccgcagcccggaaagtcctgagcagggaggagaagcagaagctaaaagaagaggcagaaaaacttcagcaagagttcggctactgtattttagatggtcaccaagaaaaaataggcaacttcaagattgagccgcctggcttgttccgtggccgtggcgaccatcccaagatggggatgctgaagagaaggatcacgccagaggatgtggttatcaactgcagcagggactcgaagatccccgagccgccggcggggcaccagtggaaggaggtgcgctccgataacaccgtcacgtggctggcagcttggaccgagagcgttcagaactccatcaagtacatcatgctgaacccttgctcgaagctgaagggggagacagcttggcagaagtttgaaacagctcgacgcctgcggggatttgtggacgagatccgctcccagtaccgggctgactggaagtctcgggaaatgaagacgagacagcgggcggtggccctgtatttcatcgataagctggcactgagagcaggaaatgagaaggaggacggtgaggcggccgacaccgtgggctgctgttccctccgcgtggagcacgtccagctgcacccggaggccgatggctgccaacacgtggtggaatttgacttcctggggaaggactgcatccgctactacaacagagtgccggtggagaagccggtgtacaagaacttacagctctttatggagaacaaggacccccgggacgacctcttcgacaggctgaccacgaccagcctgaacaagcacctccaggagctgatggacgggctgacggccaaggtgttccggacctacaacgcctccatcactctgcaggagcagctgcgggccctgacgcgcgccgaggacagcatagcagctaagatcttatcctacaaccgagccaaccgagtcgtggccattctctgcaaccatcagcgagcaacccccagtacgttcgagaagtcgatgcagaatctccagacgaagatccaggcaaagaaggagcaggtggctgaggccagggcagagctgaggagggcgagggctgagcacaaagcccaaggggatggcaagtccaggagtgtcctggagaagaagaggtggctcctggagaagctgcaggagcagctggcgcagctgagtgtgcaggccacggacaaggaggagaacaagcaggtggccctgggcacgtccaagctcaactacctggaccccaggatcagcattgcctggtgcaagcggttcagggtgccagtggagaagatctacagcaaaacacagcgggagaggttcgcctgggctctcgccatggcaggagaagactttgaattctaacgacgagccgtgttgaaacttcttttgtatgtgtgtgtgtttttttcactattaaagcagtactggggaattttgtacaataaaaaa

SEQ ID NO: 55437 - DNA, 1433 bp, Homo sapiens
agtgaaggcagggagacggatgtaagctaaaagaagaggcagaaaaacttcagcaagagttcggctactgtattttagatggtcaccaagaaaaaataggcaacttcaagattgagccgcctggcttgttccgtggccgtggcgaccatcccaagatggggatgctgaagagaaggatcacgccagaggatgtggttatcaactgcagcagggactcgaagatccccgagccgccggcggggcaccagtggaaggaggtgcgctccgataacaccgtcacgtggctggcagcttggaccgagagcgttcagaactccatcaagtacatcatgctgaacccttgctcgaagctgaagggggagacagcttggcagaagtttgaaacagctcgacgcctgcggggatttgtggacgagatccgctcccagtaccgggctgactggaagtctcgggaaatgaagacgagacagcgggcggtggccctgtatttcatcgataagctggcactgagagcaggaaatgagaaggaggacggtgaggcggccgacaccgtgggctgctgttccctccgcgtggagcacgtccagctgcacccggaggccgatggctgccaacacgtggtggaatttgacttcctggggaaggactgcatccgctactacaacagagtgccggtggagaagccggtgtacaagaacttacagctctttatggagaacaaggacccccgggacgacctcttcgacaggctgaccacgaccagcctgaacaagcacctccaggagctgatggacgggctgacggccaaggtgttccggacctacaacgcctccatcactctgcaggagcagctgcgggccctgacgcgcgccgaggacagcatagcagctaagatcttatcctacaaccgagccaaccgagtcgtggccattctctgcaaccatcagcgagcaacccccagtacgttcgagaagtcgatgcagaatctccagacgaagatccaggcaaagaaggagcaggtggctgaggccagggcagagctgaggagggcgagggctgagcacaaagcccaaggggatggcaagtccaggagtgtcctggagaagaagaggtggctcctggagaagctgcaggagcagctggcgcagctgagtgtgcaggccacggacaaggaggagaacaagcaggtggccctgggcacgtccaagctcaactacctggaccccaggatcagcattgcctggtgcaagcggttcagggtgccagtggagaagatctacagcaaaacacagcgggagaggttcgcctgggctctcgccatggcaggagaagactttgaattctaacgacgagccgtgttgaaacttcttttgtatgtgtgtgtgtttttttcactattaaagcagtactggggaattttgtacaataaaaaa

SEQ ID NO: 55438 - DNA, 427 bp, Homo sapiens
aatggagtggactgtcaaaaggatgaccacagcgtatggtgggaaagtggacaagacccctccgttttcaggacaggcagctatgtcccagcttgtgcacagcaaatccttgtgcccccaaaatctgcacctagagtagtttaactttttattatttttattattattattattattattattattattattattattattagagatggggggtctcactatactgcccaggcaggtctcgaactcttggcgtaaagcaatcctcccaccttggcctctcaaagtgctaagattacaggtgcaagccaccatgcctggccaggttttggatcctcatgattcaatcttgccaccacagctggaaatgtgctgggtttcactgaagccaacatgtctcagagtctcaaccaaggcctatggtagatac

SEQ ID NO: 55439 - DNA, 466 bp, Homo sapiens
ttctgtcagtttcgtgagcccagggcgttctctacttctcccttgagttctattgaattcagtgtggtattcttattccggaatactttctagctgtatttttatggggggagtgatttcggggggctcttcattccaccaccttgccgactgcaaatggtatttaaaataaaacgataccgaactttattcataagcatcgcataaatcaacctacactgagatacatttcccatgtatcagattggtaaaaattcaaaagatcaacaacacatcctattagcaaggttgtggagaaacagccactctcctacattgctgatgggaaagcacagtggttccaccttgtggagggggatttaccaatatctaataaatatacatattcatttactctttgtcccagcagccccaattttagtaatttaccccaaaaatataccttaacaagtacaaaaaaaaaaaa

SEQ ID NO: 55440 - DNA, 800 bp, Homo sapiens
atcgcaacctggcaggggtgtggggtttgctgggggcctctgtggggccatgatctgaggagggtatgtggggggcgggagctcagcacattccatggcctagaggggccacacagaggccccagtgggacccatggcgtggaggcaggtatggggagttgtggggagatcccagggtggtctggggcctggaaccggccattgggaggccccagcagtttcagtgcccagggcctccctgcagagccatgcatggcagaagaagtgtgtagcatgagctggtacacgcccatgcccatcaagaaaggcagtgtggtcatgcgtgtggacatcagcagcaatggcctggggaccttcattccagataaaaggtaccctttcccaagacgggggctggggtggactccgggggaattcctcaccccagggtccccagaggagccagtgggagatccaagggagagaatggggagaggagaggcagctacgagctgtggaacccctgacactgggacctcacctgcgcctattctgcacctgctgctaggttccagatgaatatcaacggcttcctgaagagagaccgggacaataacatccaattcactgtgggagaggagctcttcaacctgatgccccagtactttgtgggtgtctcatcgaggcccttgtggcacactgtggaccagtcacctgtgcttatcctgggaggcattcccaatgagaagtacgtcctgatgactgacaccagcttcaaggacttctctctcgtggaggtgaacggtgtggggcagatggtg

SEQ ID NO: 55441 - DNA, 524 bp, Homo sapiens
cacaaacaccaccaccagctgcctggctctccctcacccccaagggcaacctgatggtgccagtgttcattggctgccccccaggcaagcgcctggccttcgacatcacctacacgctggaatacagccgcctgaagaacaaacactactttgactgcgttaacgtgaacccggagatgccctgctttctcttccgggacagtgtgtgtccagtcccttcccctgcacagttcactgccctcttgcccccactactttgtgctctccctccccattcctctccccgcagactacccaccctttttcctgcggcatctcactttcccccgtctcggtcctcagcttctcgggccaagctaatttcttcttctggtctcaatcccctccaaccccatagttttctaccccttcttcttgattcaagatttggtgacaggagactccggcagtttccagggcaggtaaaggcgtggccagcttgcagctagggcaggtggagggagtggaaggagatgggtgcagga

SEQ ID NO: 55442 - DNA, 4683 bp, Homo sapiens
  misc_feature (72)..(72): n is a, c, g, or t
  misc_feature (363)..(363): n is a, c, g, or t
  misc_feature (1948)..(1948): n is a, c, g, or t
ggaaggggaggggaaggggaaggcgagaaggggagaggcaggggaaagaggggaagagtcgtgggagctggnagaggagggaaagaggggaagagtcgtgggagctggcagaggagggaaagggggagccgaacgtgaagggcgaagggcggggcggggcaggagagtcggggtatagagcaggcaggtgttaatggcatgggaaggaagagtaagaagtggggcaagaaggtgtcgcggtacgaggggaaggtgagactcaagaaggtgccggctaagaagctggtgccggcgtggaaggagaaggtgtggggcgaggaaacaacgaagggcgaggaaagatcccgaggcgaagagacagtnttcatcgagaaggggcagggcgaggaggaggggcgttaccagagggcgggacggggcgacgggcccgcgcgggaagaaccaatcgccgagaacccggggaaggaacgggtccataaagaccaagtggaggagtaggggcgcggtcaggagcggaagcagagtgaggagcaagccccgggcgagaaacgggggcccggccgggagcaagagcaggggcggggccgggagcaagagcaggggcggggcccggagacgggcgagaccaggtacagtacccagcccctgggcagaccccgagcgaggagaaagcggcgataccaagagaagttctagccacgttatgtgcggcccagccatgttccctgccggtcctccgtggcccagagtccgagtcgtgcaggtgctgtgggccctgctggcagtgctcctggcgtcgtggaggctgtgggcgatcaaggatttccaggaatgcacctggcaggttgtcctgaacgagtttaagagggtaggcgagagtggtgtgagcgacagcttctttgagcaagagcccgtggacacagtgagcagcttgtttcacatgctggtggactcacccatcgacccgagcgagaaatacctgggcttcccttactacctgaagatcaactactcctgcgaggaaaagccctctgaggacctggtgcgcatgggccacctgacggggctaaagcccctggtgctggtcaccttccagtccccagtcaacttctaccgctggaagatagagcagctgcagatccagatggaggctgcccccttccgcagcaaagagccatgcatggcagaagaagtgtgtagcatgagctggtacacgcccatgcccatcaagaaaggcagtgtggtcatgcgtgtggacatcagcagcaatggcctggggaccttcattccagataaaaggttccagatgaatatcaacggcttcctgaagagagaccgggacaataacatccaattcactgtgggagaggagctcttcaacctgatgccccagtactttgtgggtgtctcatcgaggcccttgtggcacactgtggaccagtcacctgtgcttatcctgggaggcattcccaatgagaagtacgtcctgatgactgacaccagcttcaaggacttctctctcgtggagctgagcattgacagttgctgggtgggctccttctactgcccccattctggcttcacagccaccatctatgacactattgccaccgagagcaccctcttcattcggcagaaccagctggtctactattttacaggcacctataccacactctatgagagaaaccgcggcagtggcagttggattcgtgtcctggccagcgagtgcatcaagaagctgtgccctgtgtatttccatagcaatggctctgagtacataatggccctcaccacgggcaagcatgagggttatgtacacttcgggaccatcagagatggccaggtgtcctttgagatgctgcccaggcagtggtctgtgtgcgagcagataggagttaccacctgctccataatttggtctgaatacatcgcgggtgagtatacnctactgctgctggtggagagtggatatggtaatgcaagtaaacgtttccaggtggtcagctacaacacagctagtgatgacctggaacttctctaccacatcccagaattcatccctgaagctcgaggattggagttcctgatgatcctagggacagagtcctacaccagcactgcaatggcccccaagggcatcttctgtaacccgtacaacaatctgatcttcatctggggcaacttcctcctgcagagctctaacaaggaaaacttcatctacctggcagacttccccaaggaactgtccatcaaatacatggccagatcgttccgtggggctgtggctattgtcacagagacggaggagatctggtacctcctggagggcagctaccgggtctaccagctgttcccttccaagggctggcaggtgcacatcagcttaaagctgatgcaacagtcctctctctacgcatccaatgagaccatgctgaccctcttctacgaagacagcaaactgtaccagctggtgtaccttatgaacaaccagaagggccagctggtcaagaggctcgtgcccgtggagcagcttctgatgtatcaacagcacaccagccactatgacttggagcggaaagggggctacttgatgctctccttcatcgacttctgccccttctcggtgatgcgcctgcggagcctgcccagtccgcagagatacacgcgccaggagcgctaccgggcgcggccgccgcgcgtcctggagcgctcgggcttccacaacgagaactcgctcgccatctaccagggcctggtctactacctgctgtggctgcactccgtgtacgacaaggtgggcgtccggcggcgggcgggcaggcctgagacgggactggggcagccgggagctggcttagagggcgaggcctggaggctctcgccccgctgcccaatcccttcacggtgccgggcgatccctgcagccgtacgcggacccggtgcacgaccccacctggcgctggtgggcgaacaacaaacaagaccaggtaggcggagcggattgggagccgggaaaggggcggcgcccggacacccctcaccgtgccccacccccggcgctgactctgccccgcgcatccggtaccccaggattactacttcttcttggcgagcaattggcgaagcgcgggcggcgtgtccatagaaatggacagctacgaaaagatctacaacctcgagtccgcgtacgagctgccggagcgcattttcctggacaagggcactgagtacagcttcgccatcttcctgtcggcgcagggccactcgttccggacgcagtcagaactcggtctgcgcgggaccagagtggagcccgaagggcggggcgagggctaccagaatctgggagcctggggggcggggacaccatcggaggggcggggcctgtctgtggacgtgggcgtggtgctggccgaccccggctgcatcgaggcctcggtgaagcaggaggtcctgattaatcgcaactcggtgctattttcgattacgctcaaggataaaaagctttgctatgaccaaggcattagtggacatcaccttatggagacttccatgacggtcaatgtgaggtccaagcctggaggggagggcaagcgcctggccttcgacatcacctacacgctggaatacagccgcctgaagaacaaacactactttgactgcgttaacgtgaacccggagatgccctgctttctcttccgggacagtgtgtgtccagtcccttcccctgcacagttcactgccctcttgcccccactactttgtgctctccctccccattcctctccccgcagactacccaccctttttcctgcggcatctcactttcccccgtctcggtcctcagcttctcgggccaagctaatttcttcttctggtctcaatcccctccaaccccatagttttctaccccttcttcttgattcaagatttggtgacaggagactccggcagtttccagggcagctatgttctgctggtggtgggtggcgggcccacactggacagcctcaaggactacagtgaggacgaaatctaccgcttcaacagccccctggacaagaccaacagccttatctggaccacgaggaccacaaggaccaccaaagactcagcctttcacatcatgtcccacgagagcccaggcatcgaaggagtggacacgagcacctactgcaactaccagctcaccttcctgctgcacatccacgggctgccactcagtcccaagcgggcccttttcatcatcatggtgtcagctagcgtgtttgtgggcctggtgatcttctacatcgccttctgcctcctgtggcccctcgtggtgaagggctgcacgatgatccggtggaagataaacaacctcattgcctcagaatcctactacacctacgcctccatttccggaatctcgagcatgccatctctgagacattccaggatgggctccatgttcagctccaggatgacagaggacagggctgaacccaaggaagccgtggagagacagttgatgacctgagtgtcccacctgccccagcccccagttactgtcacgcctctcttatgaggcccatcttgaagatgcaacctgtcacccagcccaggcctctctttctgttttgcttgatgtttacttctcgttcagactcaaataaagccttttttcaggaccagcagtgg

SEQ ID NO: 55443 - DNA, 3091 bp, Homo sapiens
  misc_feature (1341)..(1341): n is a, c, g, or t
tgggcggccattttgagaccgggcaagaggggcgggactggtgcggccgagtgacagttgaccggttttaaccaagtgactggttctagccacgttatgtgcggcccagccatgttccctgccggtcctccgtggcccagagtccgagtcgtgcaggtgctgtgggccctgctggcagtgctcctggcgtcgtggaggctgtgggcgatcaaggatttccaggaatgcacctggcaggttgtcctgaacgagtttaagagggtaggcgagagtggtgtgagcgacagcttctttgagcaagagcccgtggacacagtgagcagcttgtttcacatgctggtggactcacccatcgacccgagcgagaaatacctgggcttcccttactacctgaagatcaactactcctgcgaggaaaagccctctgaggacctggtgcgcatgggccacctgacggggctaaagcccctggtgctggtcaccttccagtccccagtcaacttctaccgctggaagatagagcagctgcagatccagatggaggctgcccccttccgcagcaaagagccatgcatggcagaagaagtgtgtagcatgagctggtacacgcccatgcccatcaagaaaggcagtgtggtcatgcgtgtggacatcagcagcaatggcctggggaccttcattccagataaaaggttccagatgaatatcaacggcttcctgaagagagaccgggacaataacatccaattcactgtgggagaggagctcttcaacctgatgccccagtactttgtgggtgtctcatcgaggcccttgtggcacactgtggaccagtcacctgtgcttatcctgggaggcattcccaatgagaagtacgtcctgatgactgacaccagcttcaaggacttctctctcgtggagctgagcattgacagttgctgggtgggctccttctactgcccccattctggcttcacagccaccatctatgacactattgccaccgagagcaccctcttcattcggcagaaccagctggtctactattttacaggcacctataccacactctatgagagaaaccgcggcagtggcagttggattcgtgtcctggccagcgagtgcatcaagaagctgtgccctgtgtatttccatagcaatggctctgagtacataatggccctcaccacgggcaagcatgagggttatgtacacttcgggaccatcagagatggccaggtgtcctttgagatgctgcccaggcagtggtctgtgtgcgagcagataggagttaccacctgctccataatttggtctgaatacatcgcgggtgagtatacnctactgctgctggtggagagtggatatggtaatgcaagtaaacgtttccaggtggtcagctacaacacagctagtgatgacctggaacttctctaccacatcccagaattcatccctgaagctcgaggattggagttcctgatgatcctagggacagagtcctacaccagcactgcaatggcccccaagggcatcttctgtaacccgtacaacaatctgatcttcatctggggcaacttcctcctgcagagctctaacaaggaaaacttcatctacctggcagacttccccaaggaactgtccatcaaatacatggccagatcgttccgtggggctgtggctattgtcacagagacggaggagatctggtacctcctggagggcagctaccgggtctaccagctgttcccttccaagggctggcaggtgcacatcagcttaaagctgatgcaacagtcctctctctacgcatccaatgagaccatgctgaccctcttctacgaagacagcaaactgtaccagctggtgtaccttatgaacaaccagaagggccagctggtcaagaggctcgtgcccgtggagcagcttctgatgtatcaacagcacaccagccactatgacttggagcggaaagggggctacttgatgctctccttcatcgacttctgccccttctcggtgatgcgcctgcggagcctgcccagtccgcagagatacacgcgccaggagcgctaccgggcgcggccgccgcgcgtcctggagcgctcgggcttccacaacgagaactcgctcgccatctaccagggcctggtctactacctgctgtggctgcactccgtgtacgacaaggattactacttcttcttggcgagcaattggcgaagcgcgggcggcgtgtccatagaaatggacagctacgaaaagatctacaacctcgagtccgcgtacgagctgccggagcgcattttcctggacaagggcactgagtacagcttcgccatcttcctgtcggcgcagggccactcgttccggacgcagtcagaactcggtctgcgcgggaccagagtggagcccgaagggcggggcgagggctaccagaatctgggagcctggggggcggggacaccatcggaggggcggggcctgtctgtggacgtgggcgtggtgctggccgaccccggctgcatcgaggcctcggtgaagcaggaggtcctgattaatcgcaactcggtgctattttcgattacgctcaaggataaaaagctttgctatgaccaaggcattagtggacatcaccttatggagacttccatgacggtcaatgtgaggtccaagcctggaggggagggcaagcgcctggccttcgacatcacctacacgctggaatacagccgcctgaagaacaaacactactttgactgcgttaacgtgaacccggagatgccctgctttctcttccgggacagtctatgttctgctggtggtgggtggcgggcccacactggacagcctcaaggactacagtgaggacgaaatctaccgcttcaacagccccctggacaagaccaacagccttatctggaccacgaggaccacaaggaccaccaaagactcagcctttcacatcatgtcccacgagagcccaggcatcgagtggctctgtctggagaatgccccatgctatgacaatgttccccaaggcatctttgcccctgaattcttcttcaaggtgttggtgagcaataggtga

SEQ ID NO: 55444 - DNA, 2895 bp, Homo sapiens
  misc_feature (1145)..(1145): n is a, c, g, or t
tgggcggccattttgagaccgggcaagaggggcgggactggtgcggccgagtgacagttgaccggttttaaccaagtgactggttctagccacgttatgtgcggcccagccatgttccctgccggtcctccgtggcccagagtccgagtcgtgcaggtgctgtgggccctgctggcagtgctcctggcgtcgtggaggctgtgggcgatcaaggatttccaggaatgcacctggcaggttgtcctgaacgagtttaagagggtaggcgagagtggtgtgagcgacagcttctttgagcaagagcccgtggacacagtgagcagcttgtttcacatgctggtggactcacccatcgacccgagcgagaaatacctgggcttcccttactacctgaagatcaactactcctgcgaggaaaagtccccagtcaacttctaccgctggaagatagagcagctgcagatccagatggaggctgcccccttccgcagcaaaggttccagatgaatatcaacggcttcctgaagagagaccgggacaataacatccaattcactgtgggagaggagctcttcaacctgatgccccagtactttgtgggtgtctcatcgaggcccttgtggcacactgtggaccagtcacctgtgcttatcctgggaggcattcccaatgagaagtacgtcctgatgactgacaccagcttcaaggacttctctctcgtggagctgagcattgacagttgctgggtgggctccttctactgcccccattctggcttcacagccaccatctatgacactattgccaccgagagcaccctcttcattcggcagaaccagctggtctactattttacaggcacctataccacactctatgagagaaaccgcggcagtggcagttggattcgtgtcctggccagcgagtgcatcaagaagctgtgccctgtgtatttccatagcaatggctctgagtacataatggccctcaccacgggcaagcatgagggttatgtacacttcgggaccatcagagatggccaggtgtcctttgagatgctgcccaggcagtggtctgtgtgcgagcagataggagttaccacctgctccataatttggtctgaatacatcgcgggtgagtatacnctactgctgctggtggagagtggatatggtaatgcaagtaaacgtttccaggtggtcagctacaacacagctagtgatgacctggaacttctctaccacatcccagaattcatccctgaagctcgaggattggagttcctgatgatcctagggacagagtcctacaccagcactgcaatggcccccaagggcatcttctgtaacccgtacaacaatctgatcttcatctggggcaacttcctcctgcagagctctaacaaggaaaacttcatctacctggcagacttccccaaggaactgtccatcaaatacatggccagatcgttccgtggggctgtggctattgtcacagagacggaggagatctggtacctcctggagggcagctaccgggtctaccagctgttcccttccaagggctggcaggtgcacatcagcttaaagctgatgcaacagtcctctctctacgcatccaatgagaccatgctgaccctcttctacgaagacagcaaactgtaccagctggtgtaccttatgaacaaccagaagggccagctggtcaagaggctcgtgcccgtggagcagcttctgatgtatcaacagcacaccagccactatgacttggagcggaaagggggctacttgatgctctccttcatcgacttctgccccttctcggtgatgcgcctgcggagcctgcccagtccgcagagatacacgcgccaggagcgctaccgggcgcggccgccgcgcgtcctggagcgctcgggcttccacaacgagaactcgctcgccatctaccagggcctggtctactacctgctgtggctgcactccgtgtacgacaaggattactacttcttcttggcgagcaattggcgaagcgcgggcggcgtgtccatagaaatggacagctacgaaaagatctacaacctcgagtccgcgtacgagctgccggagcgcattttcctggacaagggcactgagtacagcttcgccatcttcctgtcggcgcagggccactcgttccggacgcagtcagaactcggtctgcgcgggaccagagtggagcccgaagggcggggcgagggctaccagaatctgggagcctggggggcggggacaccatcggaggggcggggcctgtctgtggacgtgggcgtggtgctggccgaccccggctgcatcgaggcctcggtgaagcaggaggtcctgattaatcgcaactcggtgctattttcgattacgctcaaggataaaaagctttgctatgaccaaggcattagtggacatcaccttatggagacttccatgacggtcaatgtgaggtccaagcctggaggggagggcaagcgcctggccttcgacatcacctacacgctggaatacagccgcctgaagaacaaacactactttgactgcgttaacgtgaacccggagatgccctgctttctcttccgggacagtctatgttctgctggtggtgggtggcgggcccacactggacagcctcaaggactacagtgaggacgaaatctaccgcttcaacagccccctggacaagaccaacagccttatctggaccacgaggaccacaaggaccaccaaagactcagcctttcacatcatgtcccacgagagcccaggcatcgagtggctctgtctggagaatgccccatgctatgacaatgttccccaaggcatctttgcccctgaattcttcttcaaggtgttggtgagcaataggtga

SEQ ID NO: 55445 - DNA, 3389 bp, Homo sapiens
  misc_feature (1639)..(1639): n is a, c, g, or t
tgggcggccattttgagaccgggcaagaggggcgggactggtgcggccgagtgacagttgaccggttttaaccaagtgactggttctagccacgttatgtgcggcccagccatgttccctgccggtcctccgtggcccagagtccgagtcgtgcaggtgctgtgggccctgctggcagtgctcctggcgtcgtggaggctgtgggcgatcaaggatttccaggaatgcacctggcaggttgtcctgaacgagtttaagagggtaggcgagagtggtgtgagcgacagcttctttgagcaagagcccgtggacacagtgagcagcttgtttcacatgctggtggactcacccatcgacccgagcgagaaatacctgggcttcccttactacctgaagatcaactactcctgcgaggaaaagacggagtcttgcgctgttgcccagactggagtgcagtggcgcgatctcggctcactgcaacctccgcctcccgtgttcaagcgatgctcctgcctcggcctcccaagtagctggaactacagccctctgaggacctggtgcgcatgggccacctgacggggctaaagcccctggtgctggtcaccttccagtccccagtcaacttctaccgctggaagatagagcagctgcagatccagatggaggctgcccccttccgcagcaaagagccatgcatggcagaagaagtgtgtagcatgagctggtacacgcccatgcccatcaagaaaggcagtgtggtcatgcgtgtggacatcagcagcaatggcctggggaccttcattccagataaaaggtaccctttcccaagacgggggctggggtggactccgggggaattcctcaccccagggtccccagaggagccagtgggagatccaagggagagaatggggagaggagaggcagctacgagctgtggaacccctgacactgggacctcacctgcgcctattctgcacctgctgctaggttccagatgaatatcaacggcttcctgaagagagaccgggacaataacatccaattcactgtgggagaggagctcttcaacctgatgccccagtactttgtgggtgtctcatcgaggcccttgtggcacactgtggaccagtcacctgtgcttatcctgggaggcattcccaatgagaagtacgtcctgatgactgacaccagcttcaaggacttctctctcgtggagctgagcattgacagttgctgggtgggctccttctactgcccccattctggcttcacagccaccatctatgacactattgccaccgagagcaccctcttcattcggcagaaccagctggtctactattttacaggcacctataccacactctatgagagaaaccgcggcagtggcagttggattcgtgtcctggccagcgagtgcatcaagaagctgtgccctgtgtatttccatagcaatggctctgagtacataatggccctcaccacgggcaagcatgagggttatgtacacttcgggaccatcagagatggccaggtgtcctttgagatgctgcccaggcagtggtctgtgtgcgagcagataggagttaccacctgctccataatttggtctgaatacatcgcgggtgagtatacnctactgctgctggtggagagtggatatggtaatgcaagtaaacgtttccaggtggtcagctacaacacagctagtgatgacctggaacttctctaccacatcccagaattcatccctgaagctcgaggattggagttcctgatgatcctagggacagagtcctacaccagcactgcaatggcccccaagggcatcttctgtaacccgtacaacaatctgatcttcatctggggcaacttcctcctgcagagctctaacaaggaaaacttcatctacctggcagacttccccaaggaactgtccatcaaatacatggccagatcgttccgtggggctgtggctattgtcacagagacggaggagatctggtacctcctggagggcagctaccgggtctaccagctgttcccttccaagggctggcaggtgcacatcagcttaaagctgatgcaacagtcctctctctacgcatccaatgagaccatgctgaccctcttctacgaagacagcaaactgtaccagctggtgtaccttatgaacaaccagaagggccagctggtcaagaggctcgtgcccgtggagcagcttctgatgtatcaacagcacaccagccactatgacttggagcggaaagggggctacttgatgctctccttcatcgacttctgccccttctcggtgatgcgcctgcggagcctgcccagtccgcagagatacacgcgccaggagcgctaccgggcgcggccgccgcgcgtcctggagcgctcgggcttccacaacgagaactcgctcgccatctaccagggcctggtctactacctgctgtggctgcactccgtgtacgacaaggattactacttcttcttggcgagcaattggcgaagcgcgggcggcgtgtccatagaaatggacagctacgaaaagatctacaacctcgagtccgcgtacgagctgccggagcgcattttcctggacaagggcactgagtacagcttcgccatcttcctgtcggcgcagggccactcgttccggacgcagtcagaactcggtctgcgcgggaccagagtggagcccgaagggcggggcgagggctaccagaatctgggagcctggggggcggggacaccatcggaggggcggggcctgtctgtggacgtgggcgtggtgctggccgaccccggctgcatcgaggcctcggtgaagcaggaggtcctgattaatcgcaactcggtgctattttcgattacgctcaaggataaaaagctttgctatgaccaaggcattagtggacatcaccttatggagacttccatgacggtcaatgtgaggtccaagcctggaggggagggcaagcgcctggccttcgacatcacctacacgctggaatacagccgcctgaagaacaaacactactttgactgcgttaacgtgaacccggagatgccctgctttctcttccgggacagtctatgttctgctggtggtgggtggcgggcccacactggacagcctcaaggactacagtgaggacgaaatctaccgcttcaacagccccctggacaagaccaacagccttatctggaccacgaggaccacaaggaccaccaaagactcagcctttcacatcatgtcccacgagagcccaggcatcgagtggctctgtctggagaatgccccatgctatgacaatgttccccaaggcatctttgcccctgaattcttcttcaaggtgttggtgagcaataggtga

SEQ ID NO: 55446 - DNA, 1457 bp, Homo sapiens
tgggcggccattttgagaccgggcaagaggggcgggactggtgcggccgagtgacagttgaccggttttaaccaagtgactggttctagccacgttatgtgcggcccagccatgttccctgccggtcctccgtggcccagagtccgagtcgtgcaggtgctgtgggccctgctggcagtgctcctggcgtcgtggaggctgtgggcgatcaaggatttccaggaatgcacctggcaggttgtcctgaacgagtttaagagggtaggcgagagtggtgtgagcgacagcttctttgagcaagagcccgtggacacagtgagcagcttgtttcacatgctggtggactcacccatcgacccgagcgagaaatacctgggcttcccttactacctgaagatcaactactcctgcgaggaaaagccctctgaggacctggtgcgcatgggccacctgacggggctaaagcccctggtgctggtcaccttccagtccccagtcaacttctaccgctggaagatagagcagctgcagatccagatggaggctgcccccttccgcagcaaagagccatgcatggcagaagaagtgtgtagcatgagctggtacacgcccatgcccatcaagaaaggcagtgtggtcatgcgtgtggacatcagcagcaatggcctggggaccttcattccagataaaaggttccagatgaatatcaacggcttcctgaagagagaccgggacaataacatccaattcactgtgggagaggagctcttcaacctgatgccccagtactttgtgggtgtctcatcgaggcccttgtggcacactgtggaccagtcacctgtgcttatcctgggaggcattcccaatgagaagtacgtcctgatgactgacaccagcttcaaggacttctctctcgtggagacaggtaatgggccgacaccataacaaggcttgagggagacacatctcagatgacggtgaaaacccaatcgccacacgtagaaactacaagaagatcctatgatcctgttttagttctttttcttttttttctttttgtcatggtctcactttcttacccaggctggagttcagtgatgcaatcttggctcactgcagcctccatctcctgggttcaagccatcctcctacctgagcctccctagtagctgggactacaggcgcatatcaccatgcctggctaatttttgtatttttggtaaagatggggttttgccatgttgcccaccttgttcttgttctctaaccaaggagatttctccctgatggcctcatctgtttgtctcctctcttccctgctcctgtctctctccaccactcccttccacactgcccccaggaaacgaatcctcccctggctcatggttggggtccaggtatagatgctgtaacaaagagaccctggaagggaattacttaaacagagactgttgctc

SEQ ID NO: 55447 - DNA, 981 bp, Homo sapiens
ccgggctctgcttccaggaaacacacctggggccccatatgcaaggcaacctgatggtgccagtgttcattggctgccccccaggcaagcgcctggccttcgacatcacctacacgctggaatacagccgcctgaagaacaaacactactttgactgcgttaacgtgaacccggagatgccctgctttctcttccgggacagtttttctaccccttcttcttgattcaagatttggtgacaggagactccggcagtttccagggcagctatgttctgctggtggtgggtggcgggcccacactggacagcctcaaggactacagtgaggacgaaatctaccgcttcaacagccccctggacaagaccaacagccttatctggaccacgaggaccacaaggaccaccaaagactcagcctttcacatcatgtcccacgagagcccaggcatcgaaggagtggacacgagcacctactgcaactaccagctcaccttcctgctgcacatccacgggctgccactcagtcccaagcgggcccttttcatcatcatggtgtcagctagcgtgtttgtgggcctggtgatcttctacatcgccttctgcctcctgtggcccctcgtggtgaagggctgcacgatgatccggtggaagataaacaacctcattgcctcagaatcctactacacctacgcctccatttccggaatctcgagcatgccatctctgagacattccaggatgggctccatgttcagctccaggatgacagaggacagggctgaacccaaggaagccgtggagagacagttgatgacctgagtgtcccacctgccccagcccccagttactgtcacgcctctcttatgaggcccatcttgaagatgcaacctgtcacccagcccaggcctctctttctgttttgcttgatgtttacttctcgttcagactcaaataaagccttttttcaggaccagcagtgg

SEQ ID NO: 55448 - DNA, 690 bp, Homo sapiens
tgttgaagtgaaatccataaatttaaccattttaaagtgaacatcagtggcatctagttcattcacaatattatgcaaccaccaccactatctacttccaaaaaatttccatcactccaaaataaaccctgggtttgtttttatttcatgtcagacaggtaatgggccgacaccataacaaggcttgagggagacacatctcagatgacggtgaaaacccaatcgccacacgtagaaactacaagaagatcctatgatcctgttttagttctttttcttttttttctttttgtcatggtctcactttcttacccaggctggagttcagtgatgcaatcttggctcactgcagcctccatctcctgggttcaagccatcctcctacctgagcctccctagtagctgggactacaggcgcatatcaccatgcctggctaatttttgtatttttggtaaagatggggttttgccatgttgcccaccttgttcttgttctctaaccaaggagatttctccctgatggcctcatctgtttgtctcctctcttccctgctcctgtctctctccaccactcccttccacactgcccccaggaaacgaatcctcccctggctcatggttggggtccaggtatagatgctgtaacaaagagaccctggaagggaattacttaaacagagactgttgctc

SEQ ID NO: 55449 - DNA, 436 bp, Homo sapiens
cggccgccgcgcgtcctggagcgctcgggcttccacaacgagaactcgctcgccatctaccagggcctggtctactacctgctgtggctgcactccgtgtacgacaaggtgggcgtccggcggcgggcgggcaggcctgagacgggactggggcagccgggagctggcttagagggcgaggcctgtggagcggagcgcagcgggattggagaacaggactggtggtgggtgggcgggggacctgggggcggggcctggcttgagcaggacttccaggggaaggcgttgggggtgtggccgggttgaaagcagggtttggggatgggctggggtgtgtatcttctgctctgggttgggggctggctttgaggctaggaggtggtctggggatgccgcttgcctggaggctctcgccccgctgcccaatcccttcacg

SEQ ID NO: 55450 - DNA, 333 bp, Homo sapiens
gaggccttgtggctgggagagagggaccgagggggagaatggtaaggaatgaggtcaaggaagtgagaaggacaaatcgcgtggggccttgtgggtccaggtcaggccttggacctaaatgagatggagtctcaggagagtggggagagtgttggcgtccctcctgtccctccttggcagctcttcaacctgatgccccagtactttgtgggtgtctcatcgaggcccttgtggcacactgtggaccagtcacctgtgcttatcctgggaggcattcccaatgagaagtacgtcctgatgactgacaccagcttcaaggacttctctctcgtg

SEQ ID NO: 55451 - DNA, 3698 bp, Homo sapiens
  misc_feature (72)..(72): n is a, c, g, or t
  misc_feature (363)..(363): n is a, c, g, or t
  misc_feature (1948)..(1948): n is a, c, g, or t
ggaaggggaggggaaggggaaggcgagaaggggagaggcaggggaaagaggggaagagtcgtgggagctggnagaggagggaaagaggggaagagtcgtgggagctggcagaggagggaaagggggagccgaacgtgaagggcgaagggcggggcggggcaggagagtcggggtatagagcaggcaggtgttaatggcatgggaaggaagagtaagaagtggggcaagaaggtgtcgcggtacgaggggaaggtgagactcaagaaggtgccggctaagaagctggtgccggcgtggaaggagaaggtgtggggcgaggaaacaacgaagggcgaggaaagatcccgaggcgaagagacagtnttcatcgagaaggggcagggcgaggaggaggggcgttaccagagggcgggacggggcgacgggcccgcgcgggaagaaccaatcgccgagaacccggggaaggaacgggtccataaagaccaagtggaggagtaggggcgcggtcaggagcggaagcagagtgaggagcaagccccgggcgagaaacgggggcccggccgggagcaagagcaggggcggggccgggagcaagagcaggggcggggcccggagacgggcgagaccaggtacagtacccagcccctgggcagaccccgagcgaggagaaagcggcgataccaagagaagttctagccacgttatgtgcggcccagccatgttccctgccggtcctccgtggcccagagtccgagtcgtgcaggtgctgtgggccctgctggcagtgctcctggcgtcgtggaggctgtgggcgatcaaggatttccaggaatgcacctggcaggttgtcctgaacgagtttaagagggtaggcgagagtggtgtgagcgacagcttctttgagcaagagcccgtggacacagtgagcagcttgtttcacatgctggtggactcacccatcgacccgagcgagaaatacctgggcttcccttactacctgaagatcaactactcctgcgaggaaaagccctctgaggacctggtgcgcatgggccacctgacggggctaaagcccctggtgctggtcaccttccagtccccagtcaacttctaccgctggaagatagagcagctgcagatccagatggaggctgcccccttccgcagcaaagagccatgcatggcagaagaagtgtgtagcatgagctggtacacgcccatgcccatcaagaaaggcagtgtggtcatgcgtgtggacatcagcagcaatggcctggggaccttcattccagataaaaggttccagatgaatatcaacggcttcctgaagagagaccgggacaataacatccaattcactgtgggagaggagctcttcaacctgatgccccagtactttgtgggtgtctcatcgaggcccttgtggcacactgtggaccagtcacctgtgcttatcctgggaggcattcccaatgagaagtacgtcctgatgactgacaccagcttcaaggacttctctctcgtggagctgagcattgacagttgctgggtgggctccttctactgcccccattctggcttcacagccaccatctatgacactattgccaccgagagcaccctcttcattcggcagaaccagctggtctactattttacaggcacctataccacactctatgagagaaaccgcggcagtggcagttggattcgtgtcctggccagcgagtgcatcaagaagctgtgccctgtgtatttccatagcaatggctctgagtacataatggccctcaccacgggcaagcatgagggttatgtacacttcgggaccatcagagatggccaggtgtcctttgagatgctgcccaggcagtggtctgtgtgcgagcagataggagttaccacctgctccataatttggtctgaatacatcgcgggtgagtatacnctactgctgctggtggagagtggatatggtaatgcaagtaaacgtttccaggtggtcagctacaacacagctagtgatgacctggaacttctctaccacatcccagaattcatccctgaagctcgaggattggagttcctgatgatcctagggacagagtcctacaccagcactgcaatggcccccaagggcatcttctgtaacccgtacaacaatctgatcttcatctggggcaacttcctcctgcagagctctaacaaggaaaacttcatctacctggcagacttccccaaggaactgtccatcaaatacatggccagatcgttccgtggggctgtggctattgtcacagagacggaggagatctggtacctcctggagggcagctaccgggtctaccagctgttcccttccaagggctggcaggtgcacatcagcttaaagctgatgcaacagtcctctctctacgcatccaatgagaccatgctgaccctcttctacgaagacagcaaactgtaccagctggtgtaccttatgaacaaccagaagggccagctggtcaagaggctcgtgcccgtggagcagcttctgatgtatcaacagcacaccagccactatgacttggagcggaaagggggctacttgatgctctccttcatcgacttctgccccttctcggtgatgcgcctgcggagcctgcccagtccgcagagatacacgcgccaggagcgctaccgggcgcggccgccgcgcgtcctggagcgctcgggcttccacaacgagaactcgctcgccatctaccagggcctggtctactacctgctgtggctgcactccgtgtacgacaaggattactacttcttcttggcgagcaattggcgaagcgcgggcggcgtgtccatagaaatggacagctacgaaaagatctacaacctcgagtccgcgtacgagctgccggagcgcattttcctggacaagggcactgagtacagcttcgccatcttcctgtcggcgcagggccactcgttccggacgcagtcagaactcggtctgcgcgggaccagagtggagcccgaagggcggggcgagggctaccagaatctgggagcctggggggcggggacaccatcggaggggcggggcctgtctgtggacgtgggcgtggtgctggccgaccccggctgcatcgaggcctcggtgaagcaggaggtcctgattaatcgcaactcggtgctattttcgattacgctcaaggataaaaagctttgctatgaccaaggcattagtggacatcaccttatggagacttccatgacggtcaatgtgaggtccaagcctggaggggagggcaagcgcctggccttcgacatcacctacacgctggaatacagccgcctgaagaacaaacactactttgactgcgttaacgtgaacccggagatgccctgctttctcttccgggacagtctatgttctgctggtggtgggtggcgggcccacactggacagcctcaaggactacagtgaggacgaaatctaccgcttcaacagccccctggacaagaccaacagccttatctggaccacgaggaccacaaggaccaccaaagactcagcctttcacatcatgtcccacgagagcccaggcatcgagtggctctgtctggagaatgccccatgctatgacaatgttccccaaggcatctttgcccctgaattcttcttcaaggtgttggtgagcaataggtga

SEQ ID NO: 55452 - DNA, 4450 bp, Homo sapiens
  misc_feature (72)..(72): n is a, c, g, or t
  misc_feature (363)..(363): n is a, c, g, or t
  misc_feature (1948)..(1948): n is a, c, g, or t
ggaaggggaggggaaggggaaggcgagaaggggagaggcaggggaaagaggggaagagtcgtgggagctggnagaggagggaaagaggggaagagtcgtgggagctggcagaggagggaaagggggagccgaacgtgaagggcgaagggcggggcggggcaggagagtcggggtatagagcaggcaggtgttaatggcatgggaaggaagagtaagaagtggggcaagaaggtgtcgcggtacgaggggaaggtgagactcaagaaggtgccggctaagaagctggtgccggcgtggaaggagaaggtgtggggcgaggaaacaacgaagggcgaggaaagatcccgaggcgaagagacagtnttcatcgagaaggggcagggcgaggaggaggggcgttaccagagggcgggacggggcgacgggcccgcgcgggaagaaccaatcgccgagaacccggggaaggaacgggtccataaagaccaagtggaggagtaggggcgcggtcaggagcggaagcagagtgaggagcaagccccgggcgagaaacgggggcccggccgggagcaagagcaggggcggggccgggagcaagagcaggggcggggcccggagacgggcgagaccaggtacagtacccagcccctgggcagaccccgagcgaggagaaagcggcgataccaagagaagttctagccacgttatgtgcggcccagccatgttccctgccggtcctccgtggcccagagtccgagtcgtgcaggtgctgtgggccctgctggcagtgctcctggcgtcgtggaggctgtgggcgatcaaggatttccaggaatgcacctggcaggttgtcctgaacgagtttaagagggtaggcgagagtggtgtgagcgacagcttctttgagcaagagcccgtggacacagtgagcagcttgtttcacatgctggtggactcacccatcgacccgagcgagaaatacctgggcttcccttactacctgaagatcaactactcctgcgaggaaaagccctctgaggacctggtgcgcatgggccacctgacggggctaaagcccctggtgctggtcaccttccagtccccagtcaacttctaccgctggaagatagagcagctgcagatccagatggaggctgcccccttccgcagcaaagagccatgcatggcagaagaagtgtgtagcatgagctggtacacgcccatgcccatcaagaaaggcagtgtggtcatgcgtgtggacatcagcagcaatggcctggggaccttcattccagataaaaggttccagatgaatatcaacggcttcctgaagagagaccgggacaataacatccaattcactgtgggagaggagctcttcaacctgatgccccagtactttgtgggtgtctcatcgaggcccttgtggcacactgtggaccagtcacctgtgcttatcctgggaggcattcccaatgagaagtacgtcctgatgactgacaccagcttcaaggacttctctctcgtggagctgagcattgacagttgctgggtgggctccttctactgcccccattctggcttcacagccaccatctatgacactattgccaccgagagcaccctcttcattcggcagaaccagctggtctactattttacaggcacctataccacactctatgagagaaaccgcggcagtggcagttggattcgtgtcctggccagcgagtgcatcaagaagctgtgccctgtgtatttccatagcaatggctctgagtacataatggccctcaccacgggcaagcatgagggttatgtacacttcgggaccatcagagatggccaggtgtcctttgagatgctgcccaggcagtggtctgtgtgcgagcagataggagttaccacctgctccataatttggtctgaatacatcgcgggtgagtatacnctactgctgctggtggagagtggatatggtaatgcaagtaaacgtttccaggtggtcagctacaacacagctagtgatgacctggaacttctctaccacatcccagaattcatccctgaagctcgaggattggagttcctgatgatcctagggacagagtcctacaccagcactgcaatggcccccaagggcatcttctgtaacccgtacaacaatctgatcttcatctggggcaacttcctcctgcagagctctaacaaggaaaacttcatctacctggcagacttccccaaggaactgtccatcaaatacatggccagatcgttccgtggggctgtggctattgtcacagagacggaggagatctggtacctcctggagggcagctaccgggtctaccagctgttcccttccaagggctggcaggtgcacatcagcttaaagctgatgcaacagtcctctctctacgcatccaatgagaccatgctgaccctcttctacgaagacagcaaactgtaccagctggtgtaccttatgaacaaccagaagggccagctggtcaagaggctcgtgcccgtggagcagcttctgatgtatcaacagcacaccagccactatgacttggagcggaaagggggctacttgatgctctccttcatcgacttctgccccttctcggtgatgcgcctgcggagcctgcccagtccgcagagatacacgcgccaggagcgctaccgggcgcggccgccgcgcgtcctggagcgctcgggcttccacaacgagaactcgctcgccatctaccagggcctggtctactacctgctgtggctgcactccgtgtacgacaagccgtacgcggacccggtgcacgaccccacctggcgctggtgggcgaacaacaaacaagaccaggattactacttcttcttggcgagcaattggcgaagcgcgggcggcgtgtccatagaaatggacagctacgaaaagatctacaacctcgagtccgcgtacgagctgccggagcgcattttcctggacaagggcactgagtacagcttcgccatcttcctgtcggcgcagggccactcgttccggacgcagtcagaactcggtctgcgcgggaccagagtggagcccgaagggcggggcgagggctaccagaatctgggagcctggggggcggggacaccatcggaggggcggggcctgtctgtggacgtgggcgtggtgctggccgaccccggctgcatcgaggcctcggtgaagcaggaggtcctgattaatcgcaactcggtgctattttcgattacgctcaaggataaaaagctttgctatgaccaaggcattagtggacatcaccttatggagacttccatgacggtcaatgtgaggtccaagcctggaggggagggcaagcgcctggccttcgacatcacctacacgctggaatacagccgcctgaagaacaaacactactttgactgcgttaacgtgaacccggagatgccctgctttctcttccgggacagtgtgtgtccagtcccttcccctgcacagttcactgccctcttgcccccactactttgtgctctccctccccattcctctccccgcagactacccaccctttttcctgcggcatctcactttcccccgtctcggtcctcagcttctcgggccaagctaatttcttcttctggtctcaatcccctccaaccccatagttttctaccccttcttcttgattcaagatttggtgacaggagactccggcagtttccagggcagctatgttctgctggtggtgggtggcgggcccacactggacagcctcaaggactacagtgaggacgaaatctaccgcttcaacagccccctggacaagaccaacagccttatctggaccacgaggaccacaaggaccaccaaagactcagcctttcacatcatgtcccacgagagcccaggcatcgaaggagtggacacgagcacctactgcaactaccagctcaccttcctgctgcacatccacgggctgccactcagtcccaagcgggcccttttcatcatcatggtgtcagctagcgtgtttgtgggcctggtgatcttctacatcgccttctgcctcctgtggcccctcgtggtgaagggctgcacgatgatccggtggaagataaacaacctcattgcctcagaatcctactacacctacgcctccatttccggaatctcgagcatgccatctctgagacattccaggatgggctccatgttcagctccaggatgacagaggacagggctgaacccaaggaagccgtggagagacagttgatgacctgagtgtcccacctgccccagcccccagttactgtcacgcctctcttatgaggcccatcttgaagatgcaacctgtcacccagcccaggcctctctttctgttttgcttgatgtttacttctcgttcagactcaaataaagccttttttcaggaccagcagtgg

SEQ ID NO: 55453 - DNA, 1545 bp, Homo sapiens
tgggcggccattttgagaccgggcaagaggggcgggactggtgcggccgagtgacagttgaccggttttaaccaagtgactggttctagccacgttatgtgcggcccagccatgttccctgccggtcctccgtggcccagagtccgagtcgtgcaggtgctgtgggccctgctggcagtgctcctggcgtcgtggaggctgtgggcgatcaaggatttccaggaatgcacctggcaggttgtcctgaacgagtttaagagggtaggcgagagtggtgtgagcgacagcttctttgagcaagagcccgtggacacagtgagcagcttgtttcacatgctggtggactcacccatcgacccgagcgagaaatacctgggcttcccttactacctgaagatcaactactcctgcgaggaaaagccctctgaggacctggtgcgcatgggccacctgacggggctaaagcccctggtgctggtcaccttccagtccccagtcaacttctaccgctggaagatagagcagctgcagatccagatggaggctgcccccttccgcagcaaagagccatgcatggcagaagaagtgtgtagcatgagctggtacacgcccatgcccatcaagaaaggcagtgtggtcatgcgtgtggacatcagcagcaatggcctggggaccttcattccagataaaaggttccagatgaatatcaacggcttcctgaagagagaccgggacaataacatccaattcactgtgggagaggagctcttcaacctgatgccccagtactttgtgggtgtctcatcgaggcccttgtggcacactgtggaccagtcacctgtgcttatcctgggaggcattcccaatgagaagtacgtcctgatgactgacaccagcttcaaggacttctctctcgtggagacaggtaatgggccgacaccataacaaggcttgagggagacacatctcagatgacggtgaaaacccaatcgccacacgtagaaactacaagaagatcctatgatcctgttttagttctttttcttttttttctttttgtcatggtctcactttcttacccaggctggagttcagtgatgcaatcttggctcactgcagcctccatctcctgggttcaagccatcctcctacctgagcctccctagtagctgggactacaggcgcatatcaccatgcctggctaatttttgtatttttggtaaagatggggttttgccatgttgcccagcttggtcttgaactcctgacctcaagccatcctcctgcgttggcctcccaaagtgctgtgattacaggcatgagccaccgtgcccagccttgttcttgttctctaaccaaggagatttctccctgatggcctcatctgtttgtctcctctcttccctgctcctgtctctctccaccactcccttccacactgcccccaggaaacgaatcctcccctggctcatggttggggtccaggtatagatgctgtaacaaagagaccctggaagggaattacttaaacagagactgttgctc

SEQ ID NO: 55454 - DNA, 2770 bp, Homo sapiens
  misc_feature (1020)..(1020): n is a, c, g, or t
atcgcaacctggcaggggtgtggggtttgctgggggcctctgtggggccatgatctgaggagggtatgtggggggcgggagctcagcacattccatggcctagaggggccacacagaggccccagtgggacccatggcgtggaggcaggtatggggagttgtggggagatcccagggtggtctggggcctggaaccggccattgggaggccccagcagtttcagtgcccagggcctccctgcagagccatgcatggcagaagaagtgtgtagcatgagctggtacacgcccatgcccatcaagaaaggcagtgtggtcatgcgtgtggacatcagcagcaatggcctggggaccttcattccagataaaaggttccagatgaatatcaacggcttcctgaagagagaccgggacaataacatccaattcactgtgggagaggagctcttcaacctgatgccccagtactttgtgggtgtctcatcgaggcccttgtggcacactgtggaccagtcacctgtgcttatcctgggaggcattcccaatgagaagtacgtcctgatgactgacaccagcttcaaggacttctctctcgtggagctgagcattgacagttgctgggtgggctccttctactgcccccattctggcttcacagccaccatctatgacactattgccaccgagagcaccctcttcattcggcagaaccagctggtctactattttacaggcacctataccacactctatgagagaaaccgcggcagtggcagttggattcgtgtcctggccagcgagtgcatcaagaagctgtgccctgtgtatttccatagcaatggctctgagtacataatggccctcaccacgggcaagcatgagggttatgtacacttcgggaccatcagagatggccaggtgtcctttgagatgctgcccaggcagtggtctgtgtgcgagcagataggagttaccacctgctccataatttggtctgaatacatcgcgggtgagtatacnctactgctgctggtggagagtggatatggtaatgcaagtaaacgtttccaggtggtcagctacaacacagctagtgatgacctggaacttctctaccacatcccagaattcatccctgaagctcgaggattggagttcctgatgatcctagggacagagtcctacaccagcactgcaatggcccccaagggcatcttctgtaacccgtacaacaatctgatcttcatctggggcaacttcctcctgcagagctctaacaaggaaaacttcatctacctggcagacttccccaaggaactgtccatcaaatacatggccagatcgttccgtggggctgtggctattgtcacagagacggaggagatctggtacctcctggagggcagctaccgggtctaccagctgttcccttccaagggctggcaggtgcacatcagcttaaagctgatgcaacagtcctctctctacgcatccaatgagaccatgctgaccctcttctacgaagacagcaaactgtaccagctggtgtaccttatgaacaaccagaagggccagctggtcaagaggctcgtgcccgtggagcagcttctgatgtatcaacagcacaccagccactatgacttggagcggaaagggggctacttgatgctctccttcatcgacttctgccccttctcggtgatgcgcctgcggagcctgcccagtccgcagagatacacgcgccaggagcgctaccgggcgcggccgccgcgcgtcctggagcgctcgggcttccacaacgagaactcgctcgccatctaccagggcctggtctactacctgctgtggctgcactccgtgtacgacaaggattactacttcttcttggcgagcaattggcgaagcgcgggcggcgtgtccatagaaatggacagctacgaaaagatctacaacctcgagtccgcgtacgagctgccggagcgcattttcctggacaagggcactgagtacagcttcgccatcttcctgtcggcgcagggccactcgttccggacgcagtcagaactcggtctgcgcgggaccagagtggagcccgaagggcggggcgagggctaccagaatctgggagcctggggggcggggacaccatcggaggggcggggcctgtctgtggacgtgggcgtggtgctggccgaccccggctgcatcgaggcctcggtgaagcaggaggtcctgattaatcgcaactcggtgctattttcgattacgctcaaggataaaaagctttgctatgaccaaggcattagtggacatcaccttatggagacttccatgacggtcaatgtgaggtccaagcctggaggggagggcaagcgcctggccttcgacatcacctacacgctggaatacagccgcctgaagaacaaacactactttgactgcgttaacgtgaacccggagatgccctgctttctcttccgggacagtctatgttctgctggtggtgggtggcgggcccacactggacagcctcaaggactacagtgaggacgaaatctaccgcttcaacagccccctggacaagaccaacagccttatctggaccacgaggaccacaaggaccaccaaagactcagcctttcacatcatgtcccacgagagcccaggcatcgagtggctctgtctggagaatgccccatgctatgacaatgttccccaaggcatctttgcccctgaattcttcttcaaggtgttggtgagcaataggtga

SEQ ID NO: 55455 - DNA, 1982 bp, Homo sapiens
  misc_feature (1341)..(1341): n is a, c, g, or t
tgggcggccattttgagaccgggcaagaggggcgggactggtgcggccgagtgacagttgaccggttttaaccaagtgactggttctagccacgttatgtgcggcccagccatgttccctgccggtcctccgtggcccagagtccgagtcgtgcaggtgctgtgggccctgctggcagtgctcctggcgtcgtggaggctgtgggcgatcaaggatttccaggaatgcacctggcaggttgtcctgaacgagtttaagagggtaggcgagagtggtgtgagcgacagcttctttgagcaagagcccgtggacacagtgagcagcttgtttcacatgctggtggactcacccatcgacccgagcgagaaatacctgggcttcccttactacctgaagatcaactactcctgcgaggaaaagccctctgaggacctggtgcgcatgggccacctgacggggctaaagcccctggtgctggtcaccttccagtccccagtcaacttctaccgctggaagatagagcagctgcagatccagatggaggctgcccccttccgcagcaaagagccatgcatggcagaagaagtgtgtagcatgagctggtacacgcccatgcccatcaagaaaggcagtgtggtcatgcgtgtggacatcagcagcaatggcctggggaccttcattccagataaaaggttccagatgaatatcaacggcttcctgaagagagaccgggacaataacatccaattcactgtgggagaggagctcttcaacctgatgccccagtactttgtgggtgtctcatcgaggcccttgtggcacactgtggaccagtcacctgtgcttatcctgggaggcattcccaatgagaagtacgtcctgatgactgacaccagcttcaaggacttctctctcgtggagctgagcattgacagttgctgggtgggctccttctactgcccccattctggcttcacagccaccatctatgacactattgccaccgagagcaccctcttcattcggcagaaccagctggtctactattttacaggcacctataccacactctatgagagaaaccgcggcagtggcagttggattcgtgtcctggccagcgagtgcatcaagaagctgtgccctgtgtatttccatagcaatggctctgagtacataatggccctcaccacgggcaagcatgagggttatgtacacttcgggaccatcagagatggccaggtgtcctttgagatgctgcccaggcagtggtctgtgtgcgagcagataggagttaccacctgctccataatttggtctgaatacatcgcgggtgagtatacnctactgctgctggtggagagtggatatggtaatgcaagtaaacgtttccaggtggtcagctacaacacagctagtgatgacctggaacttctctaccacatcccagaattcatccctgaagctcgaggattggagttcctgatgatcctagggacagagtcctacaccagcactgcaatggcccccaagggcatcttctgtaacccgtacaacaatctgatcttcatctggggcaacttcctcctgcagagctctaacaaggaaaacttcatctacctggcagacttccccaaggaactgtccatcaaatacatggccagatcgttccgtggggctgtggctattgtcacagagacggaggaggtgggctgccccgcccctctccccgttccctctctgcccacccccaaaccccaggggcccctctttcccccgtcacagtaaaggagccaagggaagggggcaccctcggggaccctgagaaagggcagtgaagctccatttataactgaaactcctggaactcagggtaagtgtcagctccaaagtcacgcagaccggagctatgatccgatgttcagaggcggccctctttcatcccacagtgtggtcgttcacttcataaatattgagcatttaaa

SEQ ID NO: 55456 - DNA, 618 bp, Homo sapiens
tgggcggccattttgagaccgggcaagaggggcgggactggtgcggccgagtgacagttgaccggttttaaccaagtgactggttctagccacgttatgtgcggcccagccatgttccctgccggtcctccgtggcccagagtccgagtcgtgcaggtgctgtgggccctgctggcagtgctcctggcgtcgtggaggctgtgggcgatcaaggatttccaggaatgcacctggcaggttgtcctgaacgagtttaagagggtaggcgagagtggtgtgagcgacagcttctttgagcaagagcccgtggacacagtgagcagcttgtttcacatgctggtggactcacccatcgacccgagcgagaaatacctgggcttcccttactacctgaagatcaactactcctgcgaggaaaagccctctgaggacctggtgcgcatgggccacctgacggggctaaagcccctggtgctggtcaccttccagtccccagtcaacttctaccgctggaagatagagcagctgcagatccagatggaggctgcccccttccgcagcaaagagccatgcatggcagaagaagtataaagcgttgagagtacaacctgccggtgg

SEQ ID NO: 55457 - DNA, 327 bp, Homo sapiens
gtccctttaaaaaagtaaaaataaaataacattcagtaaaacttctaatattccatttatgttggatgagaaaaattaactttagaaatttcttgctatagttttcacttcaacagagctactgcatctttaatacattactaatatggaaaatttttaaatcaattattaattgcaattagagaaacagcttaactgatttatgtattaaaatacaaaaggcaaatacaaagctatcttctcatacataaaaggccagggttttgaaaggcagtgtcaacttgtaaattatcttaaagtactgctacagtagtctattttttaaaa

SEQ ID NO: 55458 - DNA, 346 bp, Homo sapiens
gcataggcagcccctgctcttgcatttacctcccacgtgaactagctgctcagtcattgctctggaatatggagttgtgatctagaaattaaagatgggattaggtaaccagtgaggtcccttctactgccagtgtatgactctcttctttgtaaatgtcatatgtagggttctgtacacaggacattttcttcattgtagttcctcagatgcattgagctctcctgaatgacttagcggggaagctcagttgcagctgaccgtattaagggtcctctcccattgtgctgtgccgctcgttagcgtagcatctgccccacgccctcctgtttctgaggctggcttt

SEQ ID NO: 55459 - DNA, 428 bp, Homo sapiens
acacataggcaacaaatgtcagtctcagaaaacttttctggtaagttttccagacattcaaaatttaaaactgaaaagcataatgttgatattatttagcctcttccaaaaaatagagtaagtaaaaaaccctgcataacttaattcctgagttaataccaaagcttgacagaaacaaaatgagagcaactatagacaatctcattaagacaaatagaaaaaaatgttaaagcaattgctaacaaactaaattttgctctgtaaaaaataaataaaaccataagtaagtttggtacagtataagttgaaattgtaaaatctacatgtctatatataataggcacagaaaaagagtttggtaaaaactttttagcaaactagaaataaaagaaaatttcattttattttctaaatatacaaggtatcta

SEQ ID NO: 55460 - DNA, 307 bp, Homo sapiens
atctttaacatattaaaatagacatgagaaaaatgtgtcatttgataaaatgggggaaatgtaataaatgattaccagaaatataaaattaagccgtatatgctcttaagtaaatcgaatctaggcatccttaaaatgtaaaaaaggatgcaacaagagtaaggagcccagaatgatgtaaattacaggaatggggtgtaatgtaacctctagaggaggtgatgtttagaagaagcaaagagaatgcaatgagaagcaaacttgttttaggcaaattctcctggagtggaccaggcagccccctctt

SEQ ID NO: 55461 - DNA, 795 bp, Homo sapiens
caagttgcccagtgatttagtatgagaatctttattgtcgtaaaagtgcctaacaatgctaggcaggaaggcaggaagcaggaactgagggcaatgtgtccttggaatggcccagagaagaggctgagactcttaccttgactctgagctgacttaaagggtctggtataatggcagttcttttactgaactgcactctcttctagtaagtataaaaaagttctactggcaataataatagcaaacatgtatcaggttcttactgtgctaagcactttaattctgttattggactttcaaaacaacttactgaggatgataccattacttttcctgtattacagcagagggaactgaggtttagagagagaaaataatttgccaaagtcatataattgttgtcttatataattgttcatcccatagagaatggcattttcatttctacagagatcagagtgtgttgttttctatttcctgtctcaaatgtgttactcctcatctctgccaaagcaggctctatttatcctgcaagaactgtggaacctcctcgacttccatcgtaaactcttcctgggacccagtgacttctcttcccacagcatacttggagaatttatgcctgcctcatgtatttggcaattgatcataaatggtcctacgctaattctcatttgtcatatgatattgtttaattttgtttaatctttccatccagattgtaaactccttcttgtttctggctgtgtctaaaggattaaaagtgagtcttttatactattcaccacaatgcac

SEQ ID NO: 55462 - DNA, 359 bp, Homo sapiens
gacaaagctttctccttataatcaagaacaagacaaatctgttcactctcttgccatttctatctaacattatactgtaagtcatactcagggaaattgggtcagaataatacataaaattggaaaggaagaagtgaaattatcttttttgtagatgacatgatcttctacatagaaaattaaaagaagtccacaaaacattacgttagctgtttaaaaatctatccaggcctgcagcaactcgattcttgcctcctcagaagaaagaattatgctgaggggcataaggcagggtgagagaccaaggtgagttttagagcaggagtgaaagtctattaaaaagttttagaacaggaacg

SEQ ID NO: 55463 - DNA, 522 bp, Homo sapiens
ccagaatgcactgaacttgatcctggcaaataaattggaagctgtttccaaaaaagtgatatgttcttgctacattgtctccagagtttactcctgagttggggagcagcatctcattttgcaaggggctgttggattctccatagaaacgctgggttgggggagtgtcttctgagtactggggctctacctaatgtctgattccatctgtggtaccaaaaagcccctctgaatggcagcctgtctgtgcacaatgatgccgaagactttcttttccagcatctaatgaggcatggccccaggaaagcagagaaggcggatgcttgagtctctgagggtcagaatacgcttatggtgaaatcagaactggggacaaggcaaagtactgccattgggaatccggggtggatggtcatgttagaccaggggtgtccaatcttttggcttccctgggccacttggaagaagaattgtcgtgggtcacacataaaatacactaacactaaccatagctgatgagct

SEQ ID NO: 55464 - DNA, 291 bp, Homo sapiens
tgaaaatggactaatgcacctgtactatccttttggggtttatttctccttctttcctcatttccattggatgactaaagtttcttctgctggcttaaaaattacttcttttgttgttcctcttgtgcagttctgctgaacataataaccaagtgtgtatttatttaaatctattgatttgttgaacgtatcactacctgtatcttccctctaacaaaacactttcacatattctcatatccctttgtttttatagaccactcctctccttcatcatttttgtattttgcc

SEQ ID NO: 55465 - DNA, 1250 bp, Homo sapiens
gcctggtggcgaattcggcacgaggggtagaggcggcggcggcggcggcagcgggctcggaggcagcggttgggctcgcggcgagcggacggggtcgagtcagtgcgttcgcgcgagttggaatcgaagcctcttaaaatggcagatgacttggacttcgagacaggagatgcaggggcctcagccaccttcccaatgcagtgctcagcattacgtaagaatggctttgtggtgctcaaaggccggccatgtaagatcgtcgagatgtctacttcgaagactggcaagcacggccacgccaaggtccatctggttggtattgacatctttactgggaagaaatatgaagatatctgcccgtcaactcataatatggatgtccccaacatcaaaaggaatgacttccagctgattggcatccaggatgggtacctatcactgctccaggacagcggggaggtacgagaggaccttcgtctccctgagggagaccttggcaaggagattgagcagaagtacgactgtggagaagagatcctgatcacggtgctgtctgccatgacagaggaggcagctgttgcaatcaaggccatggcaaaataactggctcccagggtggcggtggtggcagcagtgatcctctgaacctgcagaggccccctccccgagcctggcctggctctggcccggtcctaagctggactcctcctacacaatttatttgacgttttattttggttttccccaccccctcaatctgtcggggagcccctgcccttcacctagctcccttggccaggagcgagcgaagctgtggccttggtgaagctgccctcctcttctcccctcacactacagccctggtgggggagaagggggtgggtgctgcttgtggtttagtcttttttttttttttttttttttaattcaatctggaatcagaaagcggtggattctggcaaatggtccttgtgccctccccactcatccctggtctggtcccctgttgcctatagccctttaccctgagcaccaccccaacagactggggaccagccccctcgcctgcctgtgtctctccccaaacccctttagatggggagggaagaggaggagaggggaggggacctgccccctcctcaggcatctgggagggccctgcccccatgggctttacccttccctgcgggctctctccccgacacatttgttaaaatcaaacctgaataaaactacaagtttaatatgaa

SEQ ID NO: 55466 - DNA, 969 bp, Homo sapiens
gtctaggtttgtggtggtgtatccggattgcggttggggagagacgtcgttgactgtgtggctgtgctaatgtgcgatcgtatcggcgtctcgatcggtattctgtcgtagtgcacgggggtgatgcggcgtgggtggctgtggtgagtcttggcctgtgtgatgttgctgtatacttttttttagttttgtggtatggtgccccggcgttattatttttctattaacatatctgctctgtttacccaacttcttataacgccgtacacaatatagttccttttgtgtcaaacaacctctaaactacctctataaacgttttaaattttcccctatacacgtttattattcctgctgggggtgtgtttgtccacatttgtgtgtccccccctccggtttgggtgttcctctttcagaggtgtccctcgtgttcgccgttgtttgcgcgcgtactcggcgtggtgtgatacgcgggccctggtttagttttttttcgtctctctttatggggccccctttgttccctatttcggtgttacgttttctgggcccccctcgggtgtttttgttcctcccccccgtgtttttttttttttttttttttttttttgtggtttagtcttttttttttttttttttttttaattcaatctggaatcagaaagcggtggattctggcaaatggtccttgtgccctccccactcatccctggtctggtcccctgttgcctatagccctttaccctgagcaccaccccaacagactggggaccagccccctcgcctgcctgtgtctctccccaaacccctttagatggggagggaagaggaggagaggggaggggacctgccccctcctcaggcatctgggagggccctgcccccatgggctttacccttccctgcgggctctctccccgacacatttgttaaaatcaaacctgaataaaactacaagtttaatatgaa

SEQ ID NO: 55467 - DNA, 403 bp, Homo sapiens
taaatcgagctcgtaccgctccacccgacggggaggtacgagaggaccttcgtctccctgagggagaccttggcaaggagattgagcagaagtacgactgtggagaagagatcctgatcacggtgctgtctgccatgacagaggaggcagctgttgcaatcaaggccatggcaaaataactggctcccagggtggcggtggtggcagcagtgatcctctgaacctgcagaggccccctccccgagcctggcctggctctggcccggtcctaagctggactcctcctacacaatttatttgacgttttattttggttttccccaccgtatgccccgccgtatgtagttacgcgaccccccgcagcatgcatcccacgcggaatggggacctctagagcgacccc

SEQ ID NO: 55468 - DNA, 140 bp, Homo sapiens
gcggccgcctactactactactactgctcgattcaagcttctaacgatgtacggggatgggctttacccttccctgcgggctctctccccgacacatttgttaaaatcaaacctgaataaaactacaagtttaatatgaa

SEQ ID NO: 55469 - DNA, 463 bp, Homo sapiens
gcggccgcggcaccggaagtgccccccacgggaggctgccctcggggtcgcaggccgcatggccaagcgtggaccggggccgcatggcagcgcggggacccctccccccaggtcccggccaccggaagcccggaacggccacatggtcggcaggagccggcagcccctagcgcggggagctagtcctcgcgggggttccgagggggcctgagattttgaggagtggaagccggaggctcgggtcctaatcaccccggagggcctgctgcaggcatatgttagcgcttcccaacctcaagggccccaggagctttcctgaaaaaccctcctgtgaagtgtggcggtcagccaggtgtaagtggcaccccttcgagctgggaggccggagaaatggggaaacagggcgtttggacaggagcccaacttttctgtcggcctgggtggacagcgcctaaaagcctca

SEQ ID NO: 55470 - DNA, 559 bp, Homo sapiens
taccatctaagtttctttactgaggacctcagagccgaatggcctctatggatgccatagagaccaatacggactgagggtttaaagaagatggtgtccgccgcaggaccgctctatcttctcgggtgaactctatggcagagcataggcattcgatttagagaagtgaagccgagatgggtgggaacccgaccacactagcgcgctagaagagtggggcggaaagacatctcccgcgcatgtgtggaactggggggactgattccaagacaaggcgcccaccccacagagcaagttttctgaaacgtgtgagtcgtttaagtccagttaaagccgaggtggggcgtatcctgagacgcatgcgttctagacgagacaagtgatctagcggcgtggtcttttcaacgcctggcgtactgacggcgtctgaggtggaaggggttgtttaggattccgaacacgcatgcgttctgagacccaggcgtttcctttagagggtgtggagtgcagggctccttattgcgcaggcgcaaggactgcccggtaggacgagcggtct

SEQ ID NO: 55471 - DNA, 977 bp, Homo sapiens
  misc_feature (801)..(801): n is a, c, g, or t
  misc_feature (804)..(804): n is a, c, g, or t
  misc_feature (807)..(807): n is a, c, g, or t
  misc_feature (810)..(810): n is a, c, g, or t
  misc_feature (813)..(813): n is a, c, g, or t
  misc_feature (821)..(821): n is a, c, g, or t
  misc_feature (827)..(827): n is a, c, g, or t
  misc_feature (843)..(843): n is a, c, g, or t
  misc_feature (847)..(847): n is a, c, g, or t
  misc_feature (852)..(853): n is a, c, g, or t
  misc_feature (856)..(856): n is a, c, g, or t
  misc_feature (858)..(858): n is a, c, g, or t
  misc_feature (861)..(861): n is a, c, g, or t
  misc_feature (977)..(977): n is a, c, g, or t
gagggcggaggagatagatagcacgcttgcgcggctgtcatagggctgcttggttggtcagtggggagtcggcgcctgcgtactaagacccgtgtgcagcagcggcggcggcggtagaggcggcggcggcggcggcagcgggctcggaggcagcggttgggctcgcggcgagcggacggggtcgagtcagtgcgttcgcgcgagttggaatcgaagcctcttaaaatggcagatgacttggacttcgagacaggagatgcaggggcctcagccaccttcccaatgcagtgctcagcattacgtaagaatggctttgtggtgctcaaaggccggccatgtaagatcgtcgagatgtctacttcgaagactggcaagcacggccacgccaaggtccatctggttggtattgacatctttactgggaagaaatatgaagatatctgcccgtcaactcataatatggatgtccccaacatcaaaaggaatgacttccagctgattggcatccaggatgggtacctatcactgctccaggacagcggggaggtacgagaggaccttcgtctccctgagggagaccttggcaaggagattgagcagaagtacgactgtggagaagagatcctggtatggtgcctccctccctgcttctgtgctcagctttgttctgtacgtttcttcctgagctcagacatctcttggctatccctcttgcttctccagatcacggtgctgtctgccatgacagaggaggcagctgttgcaatcaaggccatggcaaaataactggctcccagcggnggngcngcngtntcttgacnggaggncctccgagctggtgtnggcngctannggncnctncattttggtttttggttcccccttgtgggcggctcacccgtcggggagggggggccttcccaggggggggggggcgcatagacgggggccccgtcatcctgctctttggctgcggn

SEQ ID NO: 55472 - DNA, 579 bp, Homo sapiens
gagggcggaggagatagatagcacgcttgcgcggctgtcatagggctgcttggttggtcagtggggagtcggcgcctgcgtactaagacccgtgtgcagcagcggcggcggcggtagaggcggcggcggcggcggcagcgggctcggaggcagcggttgggctcgcggcgagcggacggggtcgagtcagtgcgttcgcgcgagttggaatcgaagcctcttaaaatggcagatgacttggacttcgagacaggagatgcaggggcctcagccaccttcccaatgcagtgctcagcattacgtaagaatggctttgtggtgctcaaaggccggccatgtaagatcgtcgagatgtctacttcgaagactggcaagcacggccacgccaaggtccatctggttggtattgacatctttactggaaagctaaacagtctaaattaacatgaaatacttcattttgattgaggaaaaaaataaacattcagaatttttttcaaaggtcaaaaaagaccaactaaacaaacaaaaacaaaaacccacaacacaataactaacacaaaaaacacagacgggggg

SEQ ID NO: 55473 - DNA, 1012 bp, Homo sapiens
gagggcggaggagatagatagcacgcttgcgcggctgtcatagggctgcttggttggtcagtggggagtcggcgcctgcgtactaagacccgtgtgcagcagcggcggcggcggtagaggcggcggcggcggcggcagcgggctcggaggcagcggttgggctcgcggcgagcggacggggtcgagtcagtgcgttcgcgcgagttggaatcgaagcctcttaaaatggcagatgacttggacttcgagacaggagatgcaggggcctcagccaccttcccaatgcagtgctcagcattacgtaagaatggctttgtggtgctcaaaggccggccatgtaagatcgtcgagatgtctacttcgaagactggcaagcacggccacgccaaggtccatctggttggtattgacatctttactgggaagaaatatgaagatatctgcccgtcaactcataatatggatgtccccaacatcaaaaggaatgacttccagctgattggcatccaggatgggtacctatcactgctccaggacagcggggaggtacgagaggaccttcgtctccctgagggagaccttggcaaggagattgagcagaagtacgactgtggagaagagatcctgatcacggtgctgtctgccatgacagaggaggcagctgttgcaatcaaggccatggcaaaataactggctcccagggtggcggtggtggcagcagtgatcctctgaacctgcagaggccccctccccgagcctggcctggctctggcccggtcctaagctggactcctcctacacaatttatttgacgttttattttggttttccccaccccctcaatctgtcggggagcccctgcccttcacctagctcccttggccaggagcgagcgaagctgtggccttggtgaagctgccctcctcttctcccctcacactacagccctggtgggggagaagggggtgggtgctgcttggggcaaactggaggagagaaagcacatggaaag

SEQ ID NO: 55474 - DNA, 1101 bp, Homo sapiens
gagggcggaggagatagatagcacgcttgcgcggctgtcatagggctgcttggttggtcagtggggagtcggcgcctgcgtactaagacccgtgtgcagcagcggcggcggcggtagaggcggcggcggcggcggcagcgggctcggaggcagcggttgggctcgcggcgagcggacggggtcgagtcagtgcgttcgcgcgagttggaatcgaagcctcttaaaatggcagatgacttggacttcgagacaggagatgcaggggcctcagccaccttcccaatgcagtgctcagcattacgtaagaatggctttgtggtgctcaaaggccggccatgtaagatcgtcgagatgtctacttcgaagactggcaagcacggccacgccaaggtccatctggttggtattgacatctttactgggaagaaatatgaagatatctgcccgtcaactcataatatggatgtccccaacatcaaaaggaatgacttccagctgattggcatccaggatgggtacctatcactgctccaggacagcggggaggtacgagaggaccttcgtctccctgagggagaccttggcaaggagattgagcagaagtacgactgtggagaagagatcctgatcacggtgctgtctgccatgacagaggaggcagctgttgcaatcaaggccatggcaaaataactggctcccagggtggcggtggtggcagcagtgatcctctgaacctgcagaggccccctccccgagcctggcctggctctggcccggtcctaagctggactccttctaagaattattgacgttatttgggttcccacccttatttggggaagccctggcccttactatgatccttggacaagagcaaacgaaattgtgcgctgtgtacaacgacctcctattgtcccgcttgattagccccgtgtggggacaaagggcgggcgtccgcgcgtgatgagtactagtactagagtaggaacacgtgctaataaaccgggcagtcgaggaagtgtagcgcacatacaggtcgaccacgctgatcgaccagacttgagccacgtagggagctcagctagtgcttcccacactagg

SEQ ID NO: 55475 - DNA, 1301 bp, Homo sapiens
ttgttattgtgtgttgtcaattgggaatcaaaaagggggggagggtgtaagacccgtgtgcagcagcggcggcggcggtagaggcggcggcggcggcggcagcgggctcggaggcagcggttgggctcgcggcgagcggacggggtcgagtcagtgcgttcgcgcgagttggaatcgaagcctcttaaaatggcagatgacttggacttcgagacaggagatgcaggggcctcagccaccttcccaatgcagtgctcagcattacgtaagaatggctttgtggtgctcaaaggccggccatgtaagatcgtcgagatgtctacttcgaagactggcaagcacggccacgccaaggtccatctggttggtattgacatctttactgggaagaaatatgaagatatctgcccgtcaactcataatatggatgtccccaacatcaaaaggaatgacttccagctgattggcatccaggatgggtacctatcactgctccaggacagcggggaggtacgagaggaccttcgtctccctgagggagaccttggcaaggagattgagcagaagtacgactgtggagaagagatcctgatcacggtgctgtctgccatgacagaggaggcagctgttgcaatcaaggccatggcaaaataactggctcccagggtggcggtggtggcagcagtgatcctctgaacctgcagaggccccctccccgagcctggcctggctctggcccggtcctaagctggactcctcctacacaatttatttgacgttttattttggttttccccaccccctcaatctgtcggggagcccctgcccttcacctagctcccttggccaggagcgagcgaagctgtggccttggtgaagctgccctcctcttctcccctcacactacagccctggtgggggagaagggggtgggtgctgcttgtggtttagtcttttttttttttttttttttttaattcaatctggaatcagaaagcggtggattctggcaaatggtccttgtgccctccccactcatccctggtctggtcccctgttgcctatagccctttaccctgagcaccaccccaacagactggggaccagccccctcgcctgcctgtgtctctccccaaacccctttagatggggagggaagaggaggagaggggaggggacctgccccctcctcaggcatctgggagggccctgcccccatgggctttacccttccctgcgggctctctccccgacacatttgttaaaatcaaacctgaataaaactacaagtttaatatgaa

SEQ ID NO: 55476 - DNA, 1856 bp, Homo sapiens
ttgttattgtgtgttgtcaattgggaatcaaaaagggggggagggtgtaagacccgtgtgcagcagcggcggcggcggtagaggcggcggcggcggcggcagcgggctcggaggcagcggttgggctcgcggcgagcggacggggtcgagtcagtgcgttcgcgcgagttggaatcgaagcctcttaaaatggcagatgacttggacttcgagacaggagatgcaggggcctcagccaccttcccaatgcagtgctcagcattacgtaagaatggctttgtggtgctcaaaggccggccatgtaagatcgtcgagatgtctacttcgaagactggcaagcacggccacgccaaggtccatctggttggtattgacatctttactgggaagaaatatgaagatatctgcccgtcaactcataatatggatgtccccaacatcaaaaggaatgacttccagctgattggcatccaggatgggtacctatcactgctccaggacagcggggaggtacgagaggaccttcgtctccctgagggagaccttggcaaggagattgagcagaagtacgactgtggagaagagatcctgatcacggtgctgtctgccatgacagaggaggcagctgttgcaatcaaggccatggcaaaataactggctcccagggtggcggtggtggcagcagtgatcctctgaacctgcagaggccccctccccgagcctggcctggctctggcccggtcctaagctggactcctcctacacaatttatttgacgttttattttggttttccccaccccctcaatctgtcggggagcccctgcccttcacctagctcccttggccaggagcgagcgaagctgtggccttggtgaagctgccctcctcttctcccctcacactacagccctggtgggggagaagggggtgggtgctgcttgtggtttagtcttttttttttttttttttttttaattcaatctggaatcagaaagcggtggattctggcaaatggtccttgtgccctccccactcatccctggtctggtcccctgttgcctatagccctttaccctgagcaccaccccaacagactggggaccagccccctcgcctgcctgtgtctctccccaaacccctttagatggggagggaagaggaggagaggggaggggacctgccccctcctcaggcatctgggagggccctgcccccatgggctttacccttccctgcgggctctctccccgacacatttgttaaaatcaaacctgaataaaactacaagtttaatatgaaaaaaaaacaaaaaaaaaaaaaaagaaaaaaaaaaaaaaaaaaaaaaaaaaaaaaaaaaaaaaaaagaaaaaaaaaaaaaaaaaaaagagggggggggcgcgcgtcaagaaataacccctccgcggggggcgggcccctaagttaggtgcgcagcaccaccgcataattgtgtttggagacaagagaggggcgtccaccacaataggggaggctgctattatatattaagagcacagcgagcgagagagcgagcgacagcgatttaaacaaaacaggagggaagagcggcggcgaaacaaaaatgaagtgagtctaactaaggggagagaactatctttgtgggagagaacgagaggagacccctcttactatcggtgggggggggagagggaaagaacacaacaatagtgtggtgaggggcgaaccaaaaaacttctctcactcattgcaaaggatagattatatattatagcaacgcactccttgagaggaggggaagaacaatatatctaataaaacatgtattatagaaaagatggaatatcataataaggc

SEQ ID NO: 55477 - DNA, 1260 bp, Homo sapiens
tcccattttggcttttaggggtagttttcacgacacgtagaggcggcggcggcggcggcagcgggctcggaggcagcggttgggctcgcggcgagcggacggggtcgagtcagtgcgttcgcgcgagttggaatcgaagcctcttaaaatggcagatgacttggacttcgagacaggagatgcaggggcctcagccaccttcccaatgcagtgctcagcattacgtaagaatggctttgtggtgctcaaaggccggccatgtaagatcgtcgagatgtctacttcgaagactggcaagcacggccacgccaaggtccatctggttggtattgacatctttactgggaagaaatatgaagatatctgcccgtcaactcataatatggatgtccccaacatcaaaaggaatgacttccagctgattggcatccaggatgggtacctatcactgctccaggacagcggggaggtacgagaggaccttcgtctccctgagggagaccttggcaaggagattgagcagaagtacgactgtggagaagagatcctgatcacggtgctgtctgccatgacagaggaggcagctgttgcaatcaaggccatggcaaaataactggctcccagggtggcggtggtggcagcagtgatcctctgaacctgcagaggccccctccccgagcctggcctggctctggcccggtcctaagctggactcctcctacacaatttatttgacgttttattttggttttccccaccccctcaatctgtcggggagcccctgcccttcacctagctcccttggccaggagcgagcgaagctgtggccttggtgaagctgccctcctcttctcccctcacactacagccctggtgggggagaagggggtgggtgctgcttgtggtttagtcttttttttttttttttttttttaattcaatctggaatcagaaagcggtggattctggcaaatggtccttgtgccctccccactcatccctggtctggtcccctgttgcctatagccctttaccctgagcaccaccccaacagactggggaccagccccctcgcctgcctgtgtctctccccaaacccctttagatggggagggaagaggaggagaggggaggggacctgccccctcctcaggcatctgggagggccctgcccccatgggctttacccttccctgcgggctctctccccgacacatttgttaaaatcaaacctgaataaaactacaagtttaatatgaa

SEQ ID NO: 55478 - DNA, 1248 bp, Homo sapiens
tactctataggatcccgaatgagggtagaggcggcggcggcggcggcagcgggctcggaggcagcggttgggctcgcggcgagcggacggggtcgagtcagtgcgttcgcgcgagttggaatcgaagcctcttaaaatggcagatgacttggacttcgagacaggagatgcaggggcctcagccaccttcccaatgcagtgctcagcattacgtaagaatggctttgtggtgctcaaaggccggccatgtaagatcgtcgagatgtctacttcgaagactggcaagcacggccacgccaaggtccatctggttggtattgacatctttactgggaagaaatatgaagatatctgcccgtcaactcataatatggatgtccccaacatcaaaaggaatgacttccagctgattggcatccaggatgggtacctatcactgctccaggacagcggggaggtacgagaggaccttcgtctccctgagggagaccttggcaaggagattgagcagaagtacgactgtggagaagagatcctgatcacggtgctgtctgccatgacagaggaggcagctgttgcaatcaaggccatggcaaaataactggctcccagggtggcggtggtggcagcagtgatcctctgaacctgcagaggccccctccccgagcctggcctggctctggcccggtcctaagctggactcctcctacacaatttatttgacgttttattttggttttccccaccccctcaatctgtcggggagcccctgcccttcacctagctcccttggccaggagcgagcgaagctgtggccttggtgaagctgccctcctcttctcccctcacactacagccctggtgggggagaagggggtgggtgctgcttgtggtttagtcttttttttttttttttttttttaattcaatctggaatcagaaagcggtggattctggcaaatggtccttgtgccctccccactcatccctggtctggtcccctgttgcctatagccctttaccctgagcaccaccccaacagactggggaccagccccctcgcctgcctgtgtctctccccaaacccctttagatggggagggaagaggaggagaggggaggggacctgccccctcctcaggcatctgggagggccctgcccccatgggctttacccttccctgcgggctctctccccgacacatttgttaaaatcaaacctgaataaaactacaagtttaatatgaa

SEQ ID NO: 55479 - DNA, 1835 bp, Homo sapiens
ttgttattgtgtgttgtcaattgggaatcaaaaagggggggagggtgtaagacccgtgtgcagcagcggcggcggcggtagaggcggcggcggcggcggcagcgggctcggaggcagcggttgggctcgcggcgagcggacggggtcgagtcagtgcgttcgcgcgagttggaatcgaagcctcttaaaatggcagatgacttggacttcgagacaggagatgcaggggcctcagccaccttcccaatgcagtgctcagcattacgtaagaatggctttgtggtgctcaaaggccggccatgtaagatcgtcgagatgtctacttcgaagactggcaagcacggccacgccaaggtccatctggttggtattgacatctttactgggaagaaatatgaagatatctgcccgtcaactcataatatggatgtccccaacatcaaaaggaatgacttccagctgattggcatccaggatgggtacctatcactgctccaggacagcggggaggtacgagaggaccttcgtctccctgagggagaccttggcaaggagattgagcagaagtacgactgtggagaagagatcctgatcacggtgctgtctgccatgacagaggaggcagctgttgcaatcaaggccatggcaaaataactggctcccagggtggcggtggtggcagcagtgatcctctgaacctgcagaggccccctccccgagcctggcctggctctggcccggtcctaagctggactcctcctacacaatttatttgacgttttattttggttttccccaccccctcaatctgtcggggagcccctgcccttcacctagctcccttggccaggagcgagcgaagctgtggccttggtgaagctgccctcctcttctcccctcacactacagccctggtgggggagaagggggtgggtgctgcttgtggtttagtcttttttttttttttttttttttaattcaatctggaatcagaaagcggtggattctggcaaatggtccttgtgccctccccactcatccctggtctggtcccctgttgcctatagccctttaccctgagcaccaccccaacagactggggaccagccccctcgcctgcctgtgtctctccccaaacccctttagatggggagggaagaggaggagaggggaggggacctgccccctcctcaggcatctgggagggccctgcccccatgggctttacccttccctgcgggctctctccccgacacatttgttaaaatcaaacctgaataaaactacaagtttaatatgaaaagaaaaaaaaaaaaaaaaaaaaaaaaaaaaaaaaaaaaaaaaagaaaaaaaaaaaaaaaaaaaagagggggggggcgcgcgtcaagaaataacccctccgcggggggcgggcccctaagttaggtgcgcagcaccaccgcataattgtgtttggagacaagagaggggcgtccaccacaataggggaggctgctattatatattaagagcacagcgagcgagagagcgagcgacagcgatttaaacaaaacaggagggaagagcggcggcgaaacaaaaatgaagtgagtctaactaaggggagagaactatctttgtgggagagaacgagaggagacccctcttactatcggtgggggggggagagggaaagaacacaacaatagtgtggtgaggggcgaaccaaaaaacttctctcactcattgcaaaggatagattatatattatagcaacgcactccttgagaggaggggaagaacaatatatctaataaaacatgtattatagaaaagatggaatatcataataaggc

SEQ ID NO: 55480 - DNA, 1273 bp, Homo sapiens
ttgttattgtgtgttgtcaattgggaatcaaaaagggggggagggtgtaagacccgtgtgcagcagcggcggcggcggtagaggcggcggcggcggcggcagcgggctcggaggcagcggttgggctcgcggcgagcggacggggtcgagtcagtgcgttcgcgcgagttggaatcgaagcctcttaaaatggcagatgacttggacttcgagacaggagatgcaggggcctcagccaccttcccaatgcagtgctcagcattacgtaagaatggctttgtggtgctcaaaggccggccatgtaagatcgtcgagatgtctacttcgaagactggcaagcacggccacgccaaggtccatctggttggtattgacatctttactgggaagaaatatgaagatatctgcccgtcaactcataatatggatgtccccaacatcaaaaggaatgacttccagctgattggcatccaggatgggtacctatcactgctccaggacagcggggaggtacgagaggaccttcgtctccctgagggagaccttggcaaggagattgagcagaagtacgactgtggagaagagatcctgatcacggtgctgtctgccatgacagaggaggcagctgttgcaatcaaggccatggcaaaataactggctcccagggtggcggtggtggcagcagtgatcctctgaacctgcagaggccccctccccgagcctggcctggctctggcccggtcctaagctggactcctcctacacaatttatttgacgttttattttggttttccccaccccctcaatctgtcggggagcccctgcccttcacctagctcccttggccaggagcgagcgaagctgtggccttggtgaagctgccctcctcttctcccctcacactacagccctggtgggggagaagggggtgggtgctgcttgtggtttagtcttttttttttttttttttttttaattcaatctggaatcagaaagcggtggattctggcaaatggtccttgtgccctccccactcatccctggtctggtcccctgttgcctatagccctttaccctgagcaccaccccaacagactggggaccagccccctcgcctgcctgtgtctctccccaaacccctttagatggggagggaagaggaggagaggggaggggacctgccccctcctcaggcatctgggagggccctgcccccatccccgtacatcgttagaagattgaattcgagcagtagtagtagtaggcggccgc

SEQ ID NO: 55481 - DNA, 1287 bp, Homo sapiens
ttgttattgtgtgttgtcaattgggaatcaaaaagggggggagggtgtaagacccgtgtgcagcagcggcggcggcggtagaggcggcggcggcggcggcagcgggctcggaggcagcggttgggctcgcggcgagcggacggggtcgagtcagtgcgttcgcgcgagttggaatcgaagcctcttaaaatggcagatgacttggacttcgagacaggagatgcaggggcctcagccaccttcccaatgcagtgctcagcattacgtaagaatggctttgtggtgctcaaaggccggccatgtaagatcgtcgagatgtctacttcgaagactggcaagcacggccacgccaaggtccatctggttggtattgacatctttactgggaagaaatatgaagatatctgcccgtcaactcataatatggatgtccccaacatcaaaaggaatgacttccagctgattggcatccaggatgggtacctatcactgctccaggacagcggggaggtacgagaggaccttcgtctccctgagggagaccttggcaaggagattgagcagaagtacgactgtggagaagagatcctgatcacggtgctgtctgccatgacagaggaggcagctgttgcaatcaaggccatggcaaaataactggctcccagggtggcggtggtggcagcagtgatcctctgaacctgcagaggccccctccccgagcctggcctggctctggcccggtcctaagctggactcctcctacacaatttatttgacgttttattttggttttccccaccccctcaatctgtcggggagcccctgcccttcacctagctcccttggccaggagcgagcgaagctgtggccttggtgaagctgccctcctcttctcccctcacactacagccctggtgggggagaagggggtgggtgctgcttgtggtttagtcttttttttttttttttttttttaattcaatctggaatcagaaagcggtggattctggcaaatggtccttgtgccctccccactcatccctggtctggtcccctgttgcctatagccctttaccctgagcaccaccccaacagactggggaccagccccctcgcctgcctgtgtctctccccaaacccctttagatggggagggaagaggaggagaggggtgttcctttccacagtctcattcctctcgttctataattaattccccttaaagtttttcaatctagggctccagtatatccccttgagccaccttgtttagctctttttatagcg

SEQ ID NO: 55482 - DNA, 1262 bp, Homo sapiens
ttgttattgtgtgttgtcaattgggaatcaaaaagggggggagggtgtaagacccgtgtgcagcagcggcggcggcggtagaggcggcggcggcggcggcagcgggctcggaggcagcggttgggctcgcggcgagcggacggggtcgagtcagtgcgttcgcgcgagttggaatcgaagcctcttaaaatggcagatgacttggacttcgagacaggagatgcaggggcctcagccaccttcccaatgcagtgctcagcattacgtaagaatggctttgtggtgctcaaaggccggccatgtaagatcgtcgagatgtctacttcgaagactggcaagcacggccacgccaaggtccatctggttggtattgacatctttactgggaagaaatatgaagatatctgcccgtcaactcataatatggatgtccccaacatcaaaaggaatgacttccagctgattggcatccaggatgggtacctatcactgctccaggacagcggggaggtacgagaggaccttcgtctccctgagggagaccttggcaaggagattgagcagaagtacgactgtggagaagagatcctgatcacggtgctgtctgccatgacagaggaggcagctgttgcaatcaaggccatggcaaaataactggctcccagggtggcggtggtggcagcagtgatcctctgaacctgcagaggccccctccccgagcctggcctggctctggcccggtcctaagctggactcctcctacacaatttatttgacgttttattttggttttccccaccccctcaatctgtcggggagcccctgcccttcacctagctcccttggccaggagcgagcgaagctgtggccttggtgaagctgccctcctcttctcccctcacactacagccctggtgggggagaagggggtgggtgctgcttgtggtttagtcttttttttttttttttttttttaattcaatctggaatcagaaagcggtggattctggcaaatggtccttgtgccctccccactcatccctggtctggtcccctgttgcctatagccctttaccctgagcaccaccccaacagactggggaccagccccctcgcctgcctgtgtctctccccaaacccctttagatggggagggaagaggaggagaggggcaccggaggaggtgccggtggggagcccgcatacggtgtcctcgcactggcagctctcgatgtgggtgtaggtgtgtgtcagcgagccgc

SEQ ID NO: 55483 - DNA, 1379 bp, Homo sapiens
  misc_feature (1248)..(1249): n is a, c, g, or t
ttgttattgtgtgttgtcaattgggaatcaaaaagggggggagggtgtaagacccgtgtgcagcagcggcggcggcggtagaggcggcggcggcggcggcagcgggctcggaggcagcggttgggctcgcggcgagcggacggggtcgagtcagtgcgttcgcgcgagttggaatcgaagcctcttaaaatggcagatgacttggacttcgagacaggagatgcaggggcctcagccaccttcccaatgcagtgctcagcattacgtaagaatggctttgtggtgctcaaaggccggccatgtaagatcgtcgagatgtctacttcgaagactggcaagcacggccacgccaaggtccatctggttggtattgacatctttactgggaagaaatatgaagatatctgcccgtcaactcataatatggatgtccccaacatcaaaaggaatgacttccagctgattggcatccaggatgggtacctatcactgctccaggacagcggggaggtacgagaggaccttcgtctccctgagggagaccttggcaaggagattgagcagaagtacgactgtggagaagagatcctgatcacggtgctgtctgccatgacagaggaggcagctgttgcaatcaaggccatggcaaaataactggctcccagggtggcggtggtggcagcagtgatcctctgaacctgcagaggccccctccccgagcctggcctggctctggcccggtcctaagctggactcctcctacacaatttatttgacgttttattttggttttccccaccccctcaatctgtcggggagcccctgcccttcacctagctcccttggccaggagcgagcgaagctgtggccttggtgaagctgccctcctcttctcccctcacactacagccctggtgggggagaagggggtgggtgctgcttgtggtttagtcttttttttttttttttttttttaattcaatctggaatcagaaagcggtggattctggcaaatggtccttgtgccctccccactcatccctggtctggtcccctgttgcctatagcccgccgccaccatgcccaagagaaaggctgaaggggatgctaagggagataaagcaaaggtgaaggacgaaccacagagaagatccgcgaagttgtctgctaaacctgctcctccaaagccagagcccaagcctaaaaaggccctgcaaagaagggagagaaggtacccaaagggaaaanngggaaaaagctgatgctggcaaggaggggaataacccttgcagaaaaatggagatgccaaaacagaccaggcacagaaagctgaaggtgcttgagatgccaagtgaaagtgtgtgcatttttgataactg

SEQ ID NO: 55484 - DNA, 976 bp, Homo sapiens
ttgttattgtgtgttgtcaattgggaatcaaaaagggggggagggtgtaagacccgtgtgcagcagcggcggcggcggtagaggcggcggcggcggcggcagcgggctcggaggcagcggttgggctcgcggcgagcggacggggtcgagtcagtgcgttcgcgcgagttggaatcgaagcctcttaaaatggcagatgacttggacttcgagacaggagatgcaggggcctcagccaccttcccaatgcagtgctcagcattacgtaagaatggctttgtggtgctcaaaggccggccatgtaagatcgtcgagatgtctacttcgaagactggcaagcacggccacgccaaggtccatctggttggtattgacatctttactgggaagaaatatgaagatatctgcccgtcaactcataatatggatgtccccaacatcaaaaggaatgacttccagctgattggcatccaggatgggtacctatcactgctccaggacagcggggaggtacgagaggaccttcgtctccctgagggagaccttggcaaggagattgagcagaagtacgactgtggagaagagatcctgatcacggtgctgtctgccatgacagaggaggcagctgttgcaatcaaggccatggcaaaataactggctcccagggtggcggtggtggcagcagtgatcctctgaacctgcagaggccccctccccgagcctggcctggctctggcccggtcctaagctggactcctcctacacaatttatttgacgttttattttggttttccccaccccctcaatctgtcggggagcccctgcccttcacctagctcccttggccaggagcgagcgaagctgtggccttggtgaagctgccctcctcttctcccctcacactacagccctggtgggggagaagggggtgggtgctgcttggggcaaactggaggagagaaagcacatggaaag

SEQ ID NO: 55485 - DNA, 1445 bp, Homo sapiens
ggtaacatatctcttatatattacagtttctttaactttaataaagctgcagtatcctggtttcacaggaactcctggcccttccacgaacattcaaaaaggatccactgtgttctataataagtatcataggaacccacccacaaaggggaacacactggatcctttttaaacgtttttaatatataagagatatgttacagtttctttaactttaataaagctgcagtatcctggtttcacagagagagagagaggcagcggttgggctcgcggcgagcggacggggtcgagtcagtgcgttcgcgcgagttggaatcgaagcctcttaaaatggcagatgacttggacttcgagacaggagatgcaggggcctcagccaccttcccaatgcagtgctcagcattacgtaagaatggctttgtggtgctcaaaggccggccatgtaagatcgtcgagatgtctacttcgaagactggcaagcacggccacgccaaggtccatctggttggtattgacatctttactgggaagaaatatgaagatatctgcccgtcaactcataatatggatgtccccaacatcaaaaggaatgacttccagctgattggcatccaggatgggtacctatcactgctccaggacagcggggaggtacgagaggaccttcgtctccctgagggagaccttggcaaggagattgagcagaagtacgactgtggagaagagatcctgatcacggtgctgtctgccatgacagaggaggcagctgttgcaatcaaggccatggcaaaataactggctcccagggtggcggtggtggcagcagtgatcctctgaacctgcagaggccccctccccgagcctggcctggctctggcccggtcctaagctggactcctcctacacaatttatttgacgttttattttggttttccccaccccctcaatctgtcggggagcccctgcccttcacctagctcccttggccaggagcgagcgaagctgtggccttggtgaagctgccctcctcttctcccctcacactacagccctggtgggggagaagggggtgggtgctgcttgtggtttagtcttttttttttttttttttttttaattcaatctggaatcagaaagcggtggattctggcaaatggtccttgtgccctccccactcatccctggtctggtcccctgttgcctatagccctttaccctgagcaccaccccaacagactggggaccagccccctcgcctgcctgtgtctctccccaaacccctttagatggggagggaagaggaggagaggggaggggacctgccccctcctcaggcatctgggagggccctgcccccatgggctttacccttccctgcgggctctctccccgacacatttgttaaaatcaaacctgaataaaactacaagtttaatatgaa

SEQ ID NO: 55486 - DNA, 1268 bp, Homo sapiens
gcctggtggcgaattcggcacgaggggtagaggcggcggcggcggcggcagcgggctcggaggcagcggttgggctcgcggcgagcggacggggtcgagtcagtgcgttcgcgcgagttctcttcttggctctagttggaatcgaagcctcttaaaatggcagatgacttggacttcgagacaggagatgcaggggcctcagccaccttcccaatgcagtgctcagcattacgtaagaatggctttgtggtgctcaaaggccggccatgtaagatcgtcgagatgtctacttcgaagactggcaagcacggccacgccaaggtccatctggttggtattgacatctttactgggaagaaatatgaagatatctgcccgtcaactcataatatggatgtccccaacatcaaaaggaatgacttccagctgattggcatccaggatgggtacctatcactgctccaggacagcggggaggtacgagaggaccttcgtctccctgagggagaccttggcaaggagattgagcagaagtacgactgtggagaagagatcctgatcacggtgctgtctgccatgacagaggaggcagctgttgcaatcaaggccatggcaaaataactggctcccagggtggcggtggtggcagcagtgatcctctgaacctgcagaggccccctccccgagcctggcctggctctggcccggtcctaagctggactcctcctacacaatttatttgacgttttattttggttttccccaccccctcaatctgtcggggagcccctgcccttcacctagctcccttggccaggagcgagcgaagctgtggccttggtgaagctgccctcctcttctcccctcacactacagccctggtgggggagaagggggtgggtgctgcttgtggtttagtcttttttttttttttttttttttaattcaatctggaatcagaaagcggtggattctggcaaatggtccttgtgccctccccactcatccctggtctggtcccctgttgcctatagccctttaccctgagcaccaccccaacagactggggaccagccccctcgcctgcctgtgtctctccccaaacccctttagatggggagggaagaggaggagaggggaggggacctgccccctcctcaggcatctgggagggccctgcccccatgggctttacccttccctgcgggctctctccccgacacatttgttaaaatcaaacctgaataaaactacaagtttaatatgaa

SEQ ID NO: 55487 - DNA, 1135 bp, Homo sapiens
ttcattcataggtctgcgctggggccgggacgaagcacgacttcgagacaggagatgcaggggcctcagccaccttcccaatgcagtgctcagcattacgtaagaatggctttgtggtgctcaaaggccggccatgtaagatcgtcgagatgtctacttcgaagactggcaagcacggccacgccaaggtccatctggttggtattgacatctttactgggaagaaatatgaagatatctgcccgtcaactcataatatggatgtccccaacatcaaaaggaatgacttccagctgattggcatccaggatgggtacctatcactgctccaggacagcggggaggtacgagaggaccttcgtctccctgagggagaccttggcaaggagattgagcagaagtacgactgtggagaagagatcctgatcacggtgctgtctgccatgacagaggaggcagctgttgcaatcaaggccatggcaaaataactggctcccagggtggcggtggtggcagcagtgatcctctgaacctgcagaggccccctccccgagcctggcctggctctggcccggtcctaagctggactcctcctacacaatttatttgacgttttattttggttttccccaccccctcaatctgtcggggagcccctgcccttcacctagctcccttggccaggagcgagcgaagctgtggccttggtgaagctgccctcctcttctcccctcacactacagccctggtgggggagaagggggtgggtgctgcttgtggtttagtcttttttttttttttttttttttaattcaatctggaatcagaaagcggtggattctggcaaatggtccttgtgccctccccactcatccctggtctggtcccctgttgcctatagccctttaccctgagcaccaccccaacagactggggaccagccccctcgcctgcctgtgtctctccccaaacccctttagatggggagggaagaggaggagaggggaggggacctgccccctcctcaggcatctgggagggccctgcccccatgggctttacccttccctgcgggctctctccccgacacatttgttaaaatcaaacctgaataaaactacaagtttaatatgaa

SEQ ID NO: 55488 - DNA, 1163 bp, Homo sapiens
tttatttcaagttacggggctggggtttagattgtatacttcattggccgtggcagcacatttacagacttcgagacaggagatgcaggggcctcagccaccttcccaatgcagtgctcagcattacgtaagaatggctttgtggtgctcaaaggccggccatgtaagatcgtcgagatgtctacttcgaagactggcaagcacggccacgccaaggtccatctggttggtattgacatctttactgggaagaaatatgaagatatctgcccgtcaactcataatatggatgtccccaacatcaaaaggaatgacttccagctgattggcatccaggatgggtacctatcactgctccaggacagcggggaggtacgagaggaccttcgtctccctgagggagaccttggcaaggagattgagcagaagtacgactgtggagaagagatcctgatcacggtgctgtctgccatgacagaggaggcagctgttgcaatcaaggccatggcaaaataactggctcccagggtggcggtggtggcagcagtgatcctctgaacctgcagaggccccctccccgagcctggcctggctctggcccggtcctaagctggactcctcctacacaatttatttgacgttttattttggttttccccaccccctcaatctgtcggggagcccctgcccttcacctagctcccttggccaggagcgagcgaagctgtggccttggtgaagctgccctcctcttctcccctcacactacagccctggtgggggagaagggggtgggtgctgcttgtggtttagtcttttttttttttttttttttttaattcaatctggaatcagaaagcggtggattctggcaaatggtccttgtgccctccccactcatccctggtctggtcccctgttgcctatagccctttaccctgagcaccaccccaacagactggggaccagccccctcgcctgcctgtgtctctccccaaacccctttagatggggagggaagaggaggagaggggaggggacctgccccctcctcaggcatctgggagggccctgcccccatgggctttacccttccctgcgggctctctccccgacacatttgttaaaatcaaacctgaataaaactacaagtttaatatgaa

SEQ ID NO: 55489 - DNA, 983 bp, Homo sapiens
ttgttattgtgtgttgtcaattgggaatcaaaaagggggggagggtgtaagacccgtgtgcagcagcggcggcggcggtagaggcggcggcggcggcggcagcgggctcggaggcagcggttgggctcgcggcgagcggacggggtcgagtcagtgcgttcgcgcgagttggaatcgaagcctcttaaaatggcagatgacttggacttcgagacaggagatgcaggggcctcagccaccttcccaatgcagtgctcagcattacgtaagaatggctttgtggtgctcaaaggccggccatgtaagatcgtcgagatgtctacttcgaagactggcaagcacggccacgccaaggtccatctggttggtattgacatctttactgggaagaaatatgaagatatctgcccgtcaactcataatatggatgtccccaacatcaaaaggaatgacttccagctgattggcatccaggatgggtacctatcactgctccaggacagcggggaggtacgagaggaccttcgtctccctgagggagaccttggcaaggagattgagcagaagtacgactgtggagaagagatcctgatcacggtgctgtctgccatgacagaggaggcagctgttgcaatcaaggccatggcaaaataactggctcccagggtggcggtggtggcagcagtgatcctctgaacctgcagaggccccctccccgagcctggcctggctctggcccggtcctaagctggactcctcctacacaatttatttgacgttttattttggttttccccaccccctcaatctgtcggggagcccctgcccttcacctagctcccttggccagaggaagaagtgggctggtgaagtgcctcttttcctaataagctgggggaaagggggggggggcgcggactttttgacaacggacaacagggtctcaagggtgggccccaactggggggggggttttcgcccag

SEQ ID NO: 55490 - DNA, 1062 bp, Homo sapiens
aggagtacgactgtggagaagagatcctgatcacggctttgtggtgctcaaaggccggccatgtaagatcgtcgagatgtctacttcgaagactggcaagcacggccacgccaaggtccatctggttggtattgacatctttactgggaagaaatatgaagatatctgcccgtcaactcataatatggatgtccccaacatcaaaaggaatgacttccagctgattggcatccaggatgggtacctatcactgctccaggacagcggggaggtacgagaggaccttcgtctccctgagggagaccttggcaaggagattgagcagaagtacgactgtggagaagagatcctgatcacggtgctgtctgccatgacagaggaggcagctgttgcaatcaaggccatggcaaaataactggctcccagggtggcggtggtggcagcagtgatcctctgaacctgcagaggccccctccccgagcctggcctggctctggcccggtcctaagctggactcctcctacacaatttatttgacgttttattttggttttccccaccccctcaatctgtcggggagcccctgcccttcacctagctcccttggccaggagcgagcgaagctgtggccttggtgaagctgccctcctcttctcccctcacactacagccctggtgggggagaagggggtgggtgctgcttgtggtttagtcttttttttttttttttttttttaattcaatctggaatcagaaagcggtggattctggcaaatggtccttgtgccctccccactcatccctggtctggtcccctgttgcctatagccctttaccctgagcaccaccccaacagactggggaccagccccctcgcctgcctgtgtctctccccaaacccctttagatggggagggaagaggaggagaggggaggggacctgccccctcctcaggcatctgggagggccctgcccccatgggctttacccttccctgcgggctctctccccgacacatttgttaaaatcaaacctgaataaaactacaagtttaatatgaa

SEQ ID NO: 55491 - DNA, 1082 bp, Homo sapiens
agaggatcgagcgaggagagccaaagctaagacccctgcagccagacgagctacggctttgtggtgctcaaaggccggccatgtaagatcgtcgagatgtctacttcgaagactggcaagcacggccacgccaaggtccatctggttggtattgacatctttactgggaagaaatatgaagatatctgcccgtcaactcataatatggatgtccccaacatcaaaaggaatgacttccagctgattggcatccaggatgggtacctatcactgctccaggacagcggggaggtacgagaggaccttcgtctccctgagggagaccttggcaaggagattgagcagaagtacgactgtggagaagagatcctgatcacggtgctgtctgccatgacagaggaggcagctgttgcaatcaaggccatggcaaaataactggctcccagggtggcggtggtggcagcagtgatcctctgaacctgcagaggccccctccccgagcctggcctggctctggcccggtcctaagctggactcctcctacacaatttatttgacgttttattttggttttccccaccccctcaatctgtcggggagcccctgcccttcacctagctcccttggccaggagcgagcgaagctgtggccttggtgaagctgccctcctcttctcccctcacactacagccctggtgggggagaagggggtgggtgctgcttgtggtttagtcttttttttttttttttttttttaattcaatctggaatcagaaagcggtggattctggcaaatggtccttgtgccctccccactcatccctggtctggtcccctgttgcctatagccctttaccctgagcaccaccccaacagactggggaccagccccctcgcctgcctgtgtctctccccaaacccctttagatggggagggaagaggaggagaggggaggggacctgccccctcctcaggcatctgggagggccctgcccccatgggctttacccttccctgcgggctctctccccgacacatttgttaaaatcaaacctgaataaaactacaagtttaatatgaa

SEQ ID NO: 55492 - DNA, 2518 bp, Homo sapiens
ttgttattgtgtgttgtcaattgggaatcaaaaagggggggagggtgtaagacccgtgtgcagcagcggcggcggcggtagaggcggcggcggcggcggcagcgggctcggaggcagcggttgggctcgcggcgagcggacggggtcgagtcagtgcgttcgcgcgagttggaatcgaagcctcttaaaatggcagatgacttggacttcgagacaggagatgcaggggcctcagccaccttcccaatgcagtgctcagcattacgtaagaatggctttgtggtgctcaaaggccggccatgtaagatcgtcgagatgtctacttcgaagactggcaagcacggccacgccaaggttagaatttcacctccgcatcttgccttccccatgcctccagtatctttggcgctcccagcagcaagctgccaacagtgctgactttcctttaactctgcttttactgtctgattgtttttgtttagcgctcagccttcatacccattcagacaactacacctgctccccagtcttcagcctcttctgtggttacccttctgtccccgcatcattctctggcagtccctccgtttctccagctttgtgccaatctcttcaattcataggcctttatgctctagctattcagttgctccttccttattcttggttttcactttttctttcttcccttgagccgttgttaagtggttgcttccatcacgttgcccagggtttctccaattctacgccttcccctggagggactcctgcgtcaattctgagctttcaggtcaccttgctgcttcgttccccagttctagctttccctttggaactctgacgcaggatcaaactgcccctacctgccccatcccactctccttgggttccttgagcctccatgctttcatgggttttaacattcttgctagcacttccctcatcacctcagacttttcctgtctctttagaatttcaacctgattcgttcttgttgaatttcttgtggtgtttttccttaatcagtttttccatcttttgacttgacattgatcttggattattctctagtgtctggatccctctctgtgctcttctggcttccttattttctagctacatagttatttctgatctccctgcaagtccttttcttcagctctttcacatttcttagtttcttatcctttcccttctaccttccttattccccagtttctcagctccttctcctggtgtccggaaaactcttcgaaacttttactcagactcctcccactcccctagactcttagcatcttatcttttatcaaggtaactgtcttctccaagcctgccatgcagttttctattgtgctgtcaaccccaatctcaacggtggttttttagcctctgttttttttctttaagaggctttactgtttcttgagttgactggttcaattccaacactccagtctttgccccaacaatgtaattctgacttccctcatcaggcaaggtcaatttgagcctttatttcctccgttttagagtttggttgggtttctctttgtgatgcatacatacaggtccatctggttggtattgacatctttactgggaagaaatatgaagatatctgcccgtcaactcataatatggatgtccccaacatcaaaaggaatgacttccagctgattggcatccaggatgggtacctatcactgctccaggacagcggggaggtacgagaggaccttcgtctccctgagggagaccttggcaaggagattgagcagaagtacgactgtggagaagagatcctgatcacggtgctgtctgccatgacagaggaggcagctgttgcaatcaaggccatggcaaaataactggctcccagggtggcggtggtggcagcagtgatcctctgaacctgcagaggccccctccccgagcctggcctggctctggcccggtcctaagctggactcctcctacacaatttatttgacgttttattttggttttccccaccccctcaatctgtcggggagcccctgcccttcacctagctcccttggccaggagcgagcgaagctgtggccttggtgaagctgccctcctcttctcccctcacactacagccctggtgggggagaagggggtgggtgctgcttgtggtttagtcttttttttttttttttttttttaattcaatctggaatcagaaagcggtggattctggcaaatggtccttgtgccctccccactcatccctggtctggtcccctgttgcctatagccctttaccctgagcaccaccccaacagactggggaccagccccctcgcctgcctgtgtctctccccaaacccctttagatggggagggaagaggaggagaggggaggggacctgccccctcctcaggcatctgggagggccctgcccccatgggctttacccttccctgcgggctctctccccgacacatttgttaaaatcaaacctgaataaaactacaagtttaatatgaa

SEQ ID NO: 55493 - DNA, 1007 bp, Homo sapiens
ttgttattgtgtgttgtcaattgggaatcaaaaagggggggagggtgtaagacccgtgtgcagcagcggcggcggcggtagaggcggcggcggcggcggcagcgggctcggaggcagcggttgggctcgcggcgagcggacggggtcgagtcagtgcgttcgcgcgagttggaatcgaagcctcttaaaatggcagatgacttggacttcgagacaggagatgcaggggcctcagccaccttcccaatgcagtgctcagcattacgtaagaatggctttgtggtgctcaaaggccggccatgtaagatcgtcgagatgtctacttcgaagactggcaagcacggccacgccaaggtccatctggttggtattgacatctttactgggaagaaatatgaagatatctgcccgtcaactcataatatggatgtccccaacatcaaaaggaatgacttccagctgattggcatccaggatgggtacctatcactgctccaggacagcggggaggtacgagaggaccttcgtctccctgagggagaccttggcaaggagattgagcagaagtacgactgtggagaagagatcctgatcacggtgctgtctgccatgacagaggaggcagctgttgcaatcaaggccatggcaaaataactggctcccagggtggcggtggtggcagcagtgatcctctgaacctgcagaggccccctccccgagcctggcctggctctggcccggtcctaagctggactcctcctacacaatttatttgacgttttattttggttttccccaccccctcaatctgtcggggagcccctgcctgtgtctctccccaaacccctttagatggggagggaagaggaggagaggggaggggacctgccccctcctcaggcatctgggagggccctgcccccatgggctttacccttccctgcgggctctctccccgacacatttgttaaaatcaaacctgaataaaactacaagtttaatatgaa

SEQ ID NO: 55494 - DNA, 827 bp, Homo sapiens
ttgttattgtgtgttgtcaattgggaatcaaaaagggggggagggtgtaagacccgtgtgcagcagcggcggcggcggtagaggcggcggcggcggcggcagcgggctcggaggcagcggttgggctcgcggcgagcggacggggtcgagtcagtgcgttcgcgcgagttggaatcgaagcctcttaaaatggcagatgacttggacttcgagacaggagatgcaggggcctcagccaccttcccaatgcagtgctcagcattacgtaagaatggctttgtggtgctcaaaggccggccatgtaagatcgtcgagatgtctacttcgaagactggcaagcacggccacgccaaggtccatctggttggtattgacatctttactgggaagaaatatgaagatatctgcccgtcaactcataatatggatgtccccaacatcaaaaggaatgacttccagctgattggcatccaggatgggtacctatcactgctccaggacagcggggaggtacgagaggaccttcgtctccctgagggagaccttggcaaggagattgagcagaagtacgactgtggagaagagatcctgatcacggtgctgtctgccatgacagaggaggcagctgttgcaatcaaggccatggcaaaataactggctcccagggtggcggtggtggcagcagtgatcctctgaacctgcagaggccccctccccgagcctggcctggctctggcccggtcctaagctggactcctcctacacaatttatttgacgttttattttggttttccccaccacccaagaacagggtttaaaaaaaaaa

SEQ ID NO: 55495 - DNA, 826 bp, Homo sapiens
taaatcgagctcgtaccgctccacccgacggggaggtacgagaggaccttcgtctccctgagggagaccttggcaaggagattgagcagaagtacgactgtggagaagagatcctgatcacggtgctgtctgccatgacagaggaggcagctgttgcaatcaaggccatggcaaaataactggctcccagggtggcggtggtggcagcagtgatcctctgaacctgcagaggccccctccccgagcctggcctggctctggcccggtcctaagctggactcctcctacacaatttatttgacgttttattttggttttccccaccccctcaatctgtcggggagcccctgcccttcacctagctcccttggccaggagcgagcgaagctgtggccttggtgaagctgccctcctcttctcccctcacactacagccctggtgggggagaagggggtgggtgctgcttgtggtttagtcttttttttttttttttttttttaattcaatctggaatcagaaagcggtggattctggcaaatggtccttgtgccctccccactcatccctggtctggtcccctgttgcctatagccctttaccctgagcaccaccccaacagactggggaccagccccctcgcctgcctgtgtctctccccaaacccctttagatggggagggaagaggaggagaggggaggggacctgccccctcctcaggcatctgggagggccctgcccccatgggctttacccttccctgcgggctctctccccgacacatttgttaaaatcaaacctgaataaaactacaagtttaatatgaa

SEQ ID NO: 55496 - DNA, 878 bp, Homo sapiens
ttgttattgtgtgttgtcaattgggaatcaaaaagggggggagggtgtaagacccgtgtgcagcagcggcggcggcggtagaggcggcggcggcggcggcagcgggctcggaggcagcggttgggctcgcggcgagcggacggggtcgagtcagtgcgttcgcgcgagttggaatcgaagcctcttaaaatggcagatgacttggacttcgagacaggagatgcaggggcctcagccaccttcccaatgcagtgctcagcattacgtaagaatggctttgtggtgctcaaaggccggccatgtaagatcgtcgagatgtctacttcgaagactggcaagcacggccacgccaaggtccatctggttggtattgacatctttactgggaagaaatatgaagatatctgcccgtcaactcataatatggatgtccccaacatcaaaaggaatgacttccagctgattggcatccaggatgggtacctatcactgctccaggacagcggggaggtacgagaggaccttcgtctccctgagggagaccttggcaaggagattgagcagaagtacgactgtggagaagagatcctgatcacggtgctgtctgccatgacagaggaggcagctgttgcaatcaaggccatggcaaaataactggctcccagggtggcggtggtggcagcagtgatcctctgaacctgcagaggccccctccccgagcctggcctggctctggcccggtcctaagctggactcctcctacacaatttatttgacgttttattttggttttccccaccgtatgccccgccgtatgtagttacgcgaccccccgcagcatgcatcccacgcggaatggggacctctagagcgacccc

SEQ ID NO: 55497 - DNA, 1472 bp, Homo sapiens
ttgttattgtgtgttgtcaattgggaatcaaaaagggggggagggtgtaagacccgtgtgcagcagcggcggcggcggtagaggcggcggcggcggcggcagcgggctcggaggcagcggttgggctcgcggcgagcggacggggtcgagtcagtgcgttcgcgcgagttggaatcgaagcctcttaaaatggcagatgacttggacttcgagacaggagatgcaggggcctcagccaccttcccaatgcagtgctcagcattacgtaagaatggctttgtggtgctcaaaggccggccatgtaagatcgtcgagatgtctacttcgaagactggcaagcacggccacgccaaggtccatctggttggtattgacatctttactgggaagaaatatgaagatatctgcccgtcaactcataatatggatgtccccaacatcaaaaggaatgacttccagctgattggcatccaggatgggtacctatcactgctccaggacagcggggaggtacgagaggaccttcgtctccctgagggagaccttggcaaggagattgagcagaagtacgactgtggagaagagatcctgatcacggtgctgtctgccatgacagaggaggcagctgttgcaatcaaggccatggcaaaataactggctcccagggtgagtgtgacaaatccctcactgtccccttcacattttgttgtcctcagcagagctgctgtagtcttaattgtttcaggcttactttctgcccctagcctggctctgtcctccctatccttcctgttgaaggtattatcctgtcttactaatttctctctcctacctagggtggcggtggtggcagcagtgatcctctgaacctgcagaggccccctccccgagcctggcctggctctggcccggtcctaagctggactcctcctacacaatttatttgacgttttattttggttttccccaccccctcaatctgtcggggagcccctgcccttcacctagctcccttggccaggagcgagcgaagctgtggccttggtgaagctgccctcctcttctcccctcacactacagccctggtgggggagaagggggtgggtgctgcttgtggtttagtcttttttttttttttttttttttaattcaatctggaatcagaaagcggtggattctggcaaatggtccttgtgccctccccactcatccctggtctggtcccctgttgcctatagccctttaccctgagcaccaccccaacagactggggaccagccccctcgcctgcctgtgtctctccccaaacccctttagatggggagggaagaggaggagaggggaggggacctgccccctcctcaggcatctgggagggccctgcccccatgggctttacccttccctgcgggctctctccccgacacatttgttaaaatcaaacctgaataaaactacaagtttaatatgaa

SEQ ID NO: 55498 - DNA, 863 bp, Homo sapiens
gttgtgggggacggggagaaggggacagcttggcaccggtcccgtgggcgttgcagtgtgggggatgggagtatgcagcttggcactggtactgggagggatgaggatgacggtaaggttgagcagaagtacgactgtggagaagagatcctgatcacggtgctgtctgccatgacagaggaggcagctgttgcaatcaaggccatggcaaaataactggctcccagggtggcggtggtggcagcagtgatcctctgaacctgcagaggccccctccccgagcctggcctggctctggcccggtcctaagctggactcctcctacacaatttatttgacgttttattttggttttccccaccccctcaatctgtcggggagcccctgcccttcacctagctcccttggccaggagcgagcgaagctgtggccttggtgaagctgccctcctcttctcccctcacactacagccctggtgggggagaagggggtgggtgctgcttgtggtttagtcttttttttttttttttttttttaattcaatctggaatcagaaagcggtggattctggcaaatggtccttgtgccctccccactcatccctggtctggtcccctgttgcctatagccctttaccctgagcaccaccccaacagactggggaccagccccctcgcctgcctgtgtctctccccaaacccctttagatggggagggaagaggaggagaggggaggggacctgccccctcctcaggcatctgggagggccctgcccccatgggctttacccttccctgcgggctctctccccgacacatttgttaaaatcaaacctgaataaaactacaagtttaatatgaa

SEQ ID NO: 55499 - DNA, 1065 bp, Homo sapiens
ttgttattgtgtgttgtcaattgggaatcaaaaagggggggagggtgtaagacccgtgtgcagcagcggcggcggcggtagaggcggcggcggcggcggcagcgggctcggaggcagcggttgggctcgcggcgagcggacggggtcgagtcagtgcgttcgcgcgagttggaatcgaagcctcttaaaatggcagatgacttggacttcgagacaggagatgcaggggcctcagccaccttcccaatgcagtgctcagcattacgtaagaatggctttgtggtgctcaaaggccggccatgtaagatcgtcgagatgtctacttcgaagactggcaagcacggccacgccaaggtccatctggttggtattgacatctttactgggaagaaatatgaagatatctgcccgtcaactcataatatggatgtccccaacatcaaaaggaatgacttccagctgattggcatccaggatgggtacctatcactgctccaggacagcggggaggtacgagaggaccttcgtctccctgagggagaccttggcaaggagattgagcagaagtacgactgtggagaagagatcctgatcacggtgctgtctgccatgacagaggaggcagctgttgcaatcaaggccatggcaaaataactggctcccagggtggcggtggtggcagcagtgatcctctgaacctgcagaggccccctccccgagcctggcctggctctggcccggtcctaagctggactccttctaagaattattgacgttatttgggttcccacccttatttggggaagccctggcccttactatgatccttggacaagagcaaacgaaattgtgcgctgtgtacaacgacctcctattgtcccgcttgattagccccgtgtggggacaaagggcgggcgtccgcgcgtgatgagtactagtactagagtaggaacacgtgctaataaaccgggcagtcgaggaagtgtagcgcacatacaggtcgaccacgctgatcgaccagacttgagccacgtagggagctcagctagtgcttcccacactagg

SEQ ID NO: 55500 - DNA, 788 bp, Homo sapiens
ttgttattgtgtgttgtcaattgggaatcaaaaagggggggagggtgtaagacccgtgtgcagcagcggcggcggcggtagaggcggcggcggcggcggcagcgggctcggaggcagcggttgggctcgcggcgagcggacggggtcgagtcagtgcgttcgcgcgagttggaatcgaagcctcttaaaatggcagatgacttggacttcgagacaggagatgcaggggcctcagccaccttcccaatgcagtgctcagcattacgtaagaatggctttgtggtgctcaaaggccggccatgtaagatcgtcgagatgtctacttcgaagactggcaagcacggccacgccaaggtccatctggttggtattgacatctttactgggaagaaatatgaagatatctgcccgtcaactcataatatggatgtccccaacatcaaaaggaatgacttccagctgattggcatccaggatgggtacctatcactgctccaggacagcggggaggtacgagaggaccttcgtctccctgagggagaccttggcaaggagattgagcagaagtacgactgtggagaagagatcctgatcacggtgctgtctgccatgacagaggaggcagctgttgcaatcaaggccatggcaaaataactggctcccagggtggcggtggtggcagcagtgatcctctgaacctgcagaggccccctccccgagcctggcctggctctggcccggtcctaagctggactcctctcctcgctcgatctaacggggatcctctg

SEQ ID NO: 55501 - DNA, 1115 bp, Homo sapiens
aaggtgctgtttatacaccttccaaaaaatcaagacagttatgaggaaggggacctcaaatggtggtatagctcacccaacatcaaaaggaatgacttccagctgattggcatccaggatgggtacctatcactgctccaggacagcggggaggtacgagaggaccttcgtctccctgagggagaccttggcaaggagattgagcagaagtacgactgtggagaagagatcctgatcacggtgctgtctgccatgacagaggaggcagctgttgcaatcaaggccatggcaaaataactggctcccagggtgagtgtgacaaatccctcactgtccccttcacattttgttgtcctcagcagagctgctgtagtcttaattgtttcaggcttactttctgcccctagcctggctctgtcctccctatccttcctgttgaaggtattatcctgtcttactaatttctctctcctacctagggtggcggtggtggcagcagtgatcctctgaacctgcagaggccccctccccgagcctggcctggctctggcccggtcctaagctggactcctcctacacaatttatttgacgttttattttggttttccccaccccctcaatctgtcggggagcccctgcccttcacctagctcccttggccaggagcgagcgaagctgtggccttggtgaagctgccctcctcttctcccctcacactacagccctggtgggggagaagggggtgggtgctgcttgtggtttagtcttttttttttttttttttttttaattcaatctggaatcagaaagcggtggattctggcaaatggtccttgtgccctccccactcatccctggtctggtcccctgttgcctatagccctttaccctgagcaccaccccaacagactggggaccagccccctcgcctgcctgtgtctctccccaaacccctttagatggggagggaagaggaggagaggggaggggacctgccccctcctcaggcatctgggagggccctgcccccatgggctttacccttccctgcgggctctctccccgacacatttgttaaaatcaaacctgaataaaactacaagtttaatatgaa

SEQ ID NO: 55502 - DNA, 757 bp, Homo sapiens
catatacgacttgagctcagtaccctcgatagggctattcgtgcctagtcctggctctgtcctccctatccttcctgttgaaggtattatcctgtcttactaatttctctctcctacctagggtggcggtggtggcagcagtgatcctctgaacctgcagaggccccctccccgagcctggcctggctctggcccggtcctaagctggactcctcctacacaatttatttgacgttttattttggttttccccaccccctcaatctgtcggggagcccctgcccttcacctagctcccttggccaggagcgagcgaagctgtggccttggtgaagctgccctcctcttctcccctcacactacagccctggtgggggagaagggggtgggtgctgcttgtggtttagtcttttttttttttttttttttttaattcaatctggaatcagaaagcggtggattctggcaaatggtccttgtgccctccccactcatccctggtctggtcccctgttgcctatagccctttaccctgagcaccaccccaacagactggggaccagccccctcgcctgcctgtgtctctccccaaacccctttagatggggagggaagaggaggagaggggaggggacctgccccctcctcaggcatctgggagggccctgcccccatgggctttacccttccctgcgggctctctccccgacacatttgttaaaatcaaacctgaataaaactacaagtttaatatgaa

SEQ ID NO: 55503 - DNA, 910 bp, Homo sapiens
gcctggtggcgaattcggcacgaggggtagaggcggcggcggcggcggcagcgggctcggaggcagcggttgggctcgcggcgagcggacggggtcgagtcagtgcgttcgcgcgagttctcttcttggctctagttggaatcgaagcctcttaaaatggcagatgacttggacttcgagacaggagatgcaggggcctcagccaccttcccaatgcagtgctcagcattacgtaagaatggctttgtggtgctcaaaggccggccatgtaagatcgtcgagatgtctacttcgaagactggcaagcacggccacgccaaggtccatctggttggtattgacatctttactgggaagaaatatgaagatatctgcccgtcaactcataatatggatgtccccaacatcaaaaggaatgacttccagctgattggcatccaggatgggtacctatcactgctccaggacagcggggaggtacgagaggaccttcgtctccctgagggagaccttggcaaggagattgagcagaagtacgactgtggagaagagatcctgatcacggtgctgtctgccatgacagaggaggcagctgttgcaatcaaggccatggcaaaataactggctcccagggtggcggtggtggcagcagtgatcctctgaacctgcagaggccccctccccgagcctggcctggctctggcccggtcctaagctggactcctcctacacaatttatttgacgttttattttggttttccccaccccctcaatctgtcggggagcccctgcccttcacctagctcccttggccaggagcgagcgaagctgtggctgggagttgcctctcttttccttaataagctgggggggacagggggggccggagggcacactattcagggcggg

SEQ ID NO: 55504 - DNA, 936 bp, Homo sapiens
gcctggtggcgaattcggcacgaggggtagaggcggcggcggcggcggcagcgggctcggaggcagcggttgggctcgcggcgagcggacggggtcgagtcagtgcgttcgcgcgagttctcttcttggctctagttggaatcgaagcctcttaaaatggcagatgacttggacttcgagacaggagatgcaggggcctcagccaccttcccaatgcagtgctcagcattacgtaagaatggctttgtggtgctcaaaggccggccatgtaagatcgtcgagatgtctacttcgaagactggcaagcacggccacgccaaggtccatctggttggtattgacatctttactgggaagaaatatgaagatatctgcccgtcaactcataatatggatgtccccaacatcaaaaggaatgacttccagctgattggcatccaggatgggtacctatcactgctccaggacagcggggaggtacgagaggaccttcgtctccctgagggagaccttggcaaggagattgagcagaagtacgactgtggagaagagatcctgatcacggtgctgtctgccatgacagaggaggcagctgttgcaatcaaggccatggcaaaataactggctcccaggatggcggtggtggcagcagtgatcggctctggcccggtcctaagctggactcctcctacacaatttatttgacgttttattttggttttccccaccccctcaatctgtcggggagcccctgcctgtgtctctccccaaacccctttagatggggagggaagaggaggagaggggaggggacctgccccctcctcaggcatctgggagggccctgcccccatgggctttacccttccctgcgggctctctccccgacacatttgttaaaatcaaacctgaataaaactacaagtttaatatgaa

SEQ ID NO: 55505 - DNA, 614 bp, Homo sapiens
ttgttattgtgtgttgtcaattgggaatcaaaaagggggggagggtgtaagacccgtgtgcagcagcggcggcggcggtagaggcggcggcggcggcggcagcgggctcggaggcagcggttgggctcgcggcgagcggacggggtcgagtcagtgcgttcgcgcgagttggaatcgaagcctcttaaaatggcagatgacttggacttcgagacaggagatgcaggggcctcagccaccttcccaatgcagtgctcagcattacgtaagaatggctttgtggtgctcaaaggccggccatgtaagatcgtcgagatgtctacttcgaagactggcaagcacggccacgccaaggttagaatttcacctccgcatcttgccttccccatgcctccagtatctttggcgctcccagcagcaagctgccaacagtgctgactttcctttaactctgcttttactgtctgattgtttttgtttagcgctcagccttcatacccatgcctcccagtatctttggcgctccccaccagcaagctgcccaccagtgctgactttccctttaactctgcttttacagtctgattgtttttgtttagcgctcacataagacc

SEQ ID NO: 55506 - DNA, 2464 bp, Homo sapiens
ttgttattgtgtgttgtcaattgggaatcaaaaagggggggagggtgtaagacccgtgtgcagcagcggcggcggcggtagaggcggcggcggcggcggcagcgggctcggaggcagcggttgggctcgcggcgagcggacggggtcgagtcagtgcgttcgcgcgagttggaatcgaagcctcttaaaatggcagatgacttggacttcgagacaggagatgcaggggcctcagccaccttcccaatgcagtgctcagcattacgtaagaatggctttgtggtgctcaaaggccggccatgtaagatcgtcgagatgtctacttcgaagactggcaagcacggccacgccaaggttagaatttcacctccgcatcttgccttccccatgcctccagtatctttggcgctcccagcagcaagctgccaacagtgctgactttcctttaactctgcttttactgtctgattgtttttgtttagcgctcagccttcatacccattcagacaactacacctgctccccagtcttcagcctcttctgtggttacccttctgtccccgcatcattctctggcagtccctccgtttctccagctttgtgccaatctcttcaattcataggcctttatgctctagctattcagttgctccttccttattcttggttttcactttttctttcttcccttgagccgttgttaagtggttgcttccatcacgttgcccagggtttctccaattctacgccttcccctggagggactcctgcgtcaattctgagctttcaggtcaccttgctgcttcgttccccagttctagctttccctttggaactctgacgcaggatcaaactgcccctacctgccccatcccactctccttgggttccttgagcctccatgctttcatgggttttaacattcttgctagcacttccctcatcacctcagacttttcctgtctctttagaatttcaacctgattcgttcttgttgaatttcttgtggtgtttttccttaatcagtttttccatcttttgacttgacattgatcttggattattctctagtgtctggatccctctctgtgctcttctggcttccttattttctagctacatagttatttctgatctccctgcaagtccttttcttcagctctttcacatttcttagtttcttatcctttcccttctaccttccttattccccagtttctcagctccttctcctggtgtccggtcttatcttttatcaaggtaactgtcttctccaagcctgccatgcagttttctattgtgctgtcaaccccaatctcaacggtggttttttagcctctgttttttttctttaagaggctttactgtttcttgagttgactggttcaattccaacactccagtctttgccccaacaatgtaattctgacttccctcatcaggcaaggtcaatttgagcctttatttcctccgttttagagtttggttgggtttctctttgtgatgcatacatacaggtccatctggttggtattgacatctttactgggaagaaatatgaagatatctgcccgtcaactcataatatggatgtccccaacatcaaaaggaatgacttccagctgattggcatccaggatgggtacctatcactgctccaggacagcggggaggtacgagaggaccttcgtctccctgagggagaccttggcaaggagattgagcagaagtacgactgtggagaagagatcctgatcacggtgctgtctgccatgacagaggaggcagctgttgcaatcaaggccatggcaaaataactggctcccagggtggcggtggtggcagcagtgatcctctgaacctgcagaggccccctccccgagcctggcctggctctggcccggtcctaagctggactcctcctacacaatttatttgacgttttattttggttttccccaccccctcaatctgtcggggagcccctgcccttcacctagctcccttggccaggagcgagcgaagctgtggccttggtgaagctgccctcctcttctcccctcacactacagccctggtgggggagaagggggtgggtgctgcttgtggtttagtcttttttttttttttttttttttaattcaatctggaatcagaaagcggtggattctggcaaatggtccttgtgccctccccactcatccctggtctggtcccctgttgcctatagccctttaccctgagcaccaccccaacagactggggaccagccccctcgcctgcctgtgtctctccccaaacccctttagatggggagggaagaggaggagaggggaggggacctgccccctcctcaggcatctgggagggccctgcccccatgggctttacccttccctgcgggctctctccccgacacatttgttaaaatcaaacctgaataaaactacaagtttaatatgaa

SEQ ID NO: 55507 - DNA, 1011 bp, Homo sapiens
  misc_feature (35)..(35): n is a, c, g, or t
ctagaggctccccgatattctgatccagtctactncgaagactggcaagcacggccacgccaaggtccatctggttggtattgacatctttactgggaagaaatatgaagatatctgcccgtcaactcataatatggatgtccccaacatcaaaaggaatgacttccagctgattggcatccaggatgggtacctatcactgctccaggacagcggggaggtacgagaggaccttcgtctccctgagggagaccttggcaaggagattgagcagaagtacgactgtggagaagagatcctgatcacggtgctgtctgccatgacagaggaggcagctgttgcaatcaaggccatggcaaaataactggctcccagggtggcggtggtggcagcagtgatcctctgaacctgcagaggccccctccccgagcctggcctggctctggcccggtcctaagctggactcctcctacacaatttatttgacgttttattttggttttccccaccccctcaatctgtcggggagcccctgcccttcacctagctcccttggccaggagcgagcgaagctgtggccttggtgaagctgccctcctcttctcccctcacactacagccctggtgggggagaagggggtgggtgctgcttgtggtttagtcttttttttttttttttttttttaattcaatctggaatcagaaagcggtggattctggcaaatggtccttgtgccctccccactcatccctggtctggtcccctgttgcctatagccctttaccctgagcaccaccccaacagactggggaccagccccctcgcctgcctgtgtctctccccaaacccctttagatggggagggaagaggaggagaggggaggggacctgccccctcctcaggcatctgggagggccctgcccccatgggctttacccttccctgcgggctctctccccgacacatttgttaaaatcaaacctgaataaaactacaagtttaatatgaa

SEQ ID NO: 55508 - DNA, 1006 bp, Homo sapiens
ctctcttcaccctgccgtcatgtctaagtcagagtctcctaaagagcccgaacagctgaggaagctcttcattggagggttgagctttgaaacaactgatggctcctcaggctccgtcaactcataatatggatgtccccaacatcaaaaggaatgacttccagctgattggcatccaggatgggtacctatcactgctccaggacagcggggaggtacgagaggaccttcgtctccctgagggagaccttggcaaggagattgagcagaagtacgactgtggagaagagatcctgatcacggtgctgtctgccatgacagaggaggcagctgttgcaatcaaggccatggcaaaataactggctcccagggtggcggtggtggcagcagtgatcctctgaacctgcagaggccccctccccgagcctggcctggctctggcccggtcctaagctggactcctcctacacaatttatttgacgttttattttggttttccccaccccctcaatctgtcggggagcccctgcccttcacctagctcccttggccaggagcgagcgaagctgtggccttggtgaagctgccctcctcttctcccctcacactacagccctggtgggggagaagggggtgggtgctgcttgtggtttagtcttttttttttttttttttttttaattcaatctggaatcagaaagcggtggattctggcaaatggtccttgtgccctccccactcatccctggtctggtcccctgttgcctatagccctttaccctgagcaccaccccaacagactggggaccagccccctcgcctgcctgtgtctctccccaaacccctttagatggggagggaagaggaggagaggggaggggacctgccccctcctcaggcatctgggagggccctgcccccatgggctttacccttccctgcgggctctctccccgacacatttgttaaaatcaaacctgaataaaactacaagtttaatatgaa

SEQ ID NO: 55509 - DNA, 929 bp, Homo sapiens
ttgttattgtgtgttgtcaattgggaatcaaaaagggggggagggtgtaagacccgtgtgcagcagcggcggcggcggtagaggcggcggcggcggcggcagcgggctcggaggcagcggttgggctcgcggcgagcggacggggtcgagtcagtgcgttcgcgcgagttggaatcgaagcctcttaaaatggcagatgacttggacttcgagacaggagatgcaggggcctcagccaccttcccaatgcagtgctcagcattacgtaagaatggctttgtggtgctcaaaggccggccatgtaagatcgtcgagatgtctacttcgaagactggcaagcacggccacgccaaggtccatctggttggtattgacatctttactgggaagaaatatgaagatatctgcccgtcaactcataatatggatgtccccaacatcaaaaggaatgacttccagctgattggcatccaggatgggtacctatcactgctccaggacagcggggaggtacgagaggaccttcgtctccctgagggagaccttggcaaggagattgagcagaagtacgactgtggagaagagatcctgatcacggtgctgtctgccatgacagaggaggcagctgttgcaatcaaggccatggcaaaataactggctcccagggtggcggtggtggcagcagtgatcctctgaacctgcagaggccccctccccgagcctggcctggctctggcccggtcctaagctggactcctcctacacaatttatttgacgttttattttggttttccccaccaggggacctgccccctcctcaggcatctgggagggccctgcccccatgggctttacccttccctgcgggctctctccccgacacatttgttaaaatcaaacctgaataaaactacaagtttaatatgaa

SEQ ID NO: 55510 - DNA, 845 bp, Homo sapiens
ttgttattgtgtgttgtcaattgggaatcaaaaagggggggagggtgtaagacccgtgtgcagcagcggcggcggcggtagaggcggcggcggcggcggcagcgggctcggaggcagcggttgggctcgcggcgagcggacggggtcgagtcagtgcgttcgcgcgagttggaatcgaagcctcttaaaatggcagatgacttggacttcgagacaggagatgcaggggcctcagccaccttcccaatgcagtgctcagcattacgtaagaatggctttgtggtgctcaaaggccggccatgtaagatcgtcgagatgtctacttcgaagactggcaagcacggccacgccaaggtccatctggttggtattgacatctttactgggaagaaatatgaagatatctgcccgtcaactcataatatggatgtccccaacatcaaaaggaatgacttccagctgattggcatccaggatgggtacctatcactgctccaggacagcggggaggtacgagaggaccttcgtctccctgagggagaccttggcaaggagattgagcagaagtacgactgtggagaagagatcctgatcacggtgctgtctgccatgacagaggaggcagctgttgcaatcaaggccatggcaaaataactggctcccagggtggcggtggtggcagcagtgatcctctgaacctgcagaggccccctccccgagcctggcctggctctggcccggtcctaagctggactcctcctacacaatttatttgacgttttattttggttttccccaccatttgttaaaatcaaacctgaataaaactacaagtttaatatgaa

SEQ ID NO: 55511 - DNA, 1568 bp, Homo sapiens
ttgttattgtgtgttgtcaattgggaatcaaaaagggggggagggtgtaagacccgtgtgcagcagcggcggcggcggtagaggcggcggcggcggcggcagcgggctcggaggcagcggttgggctcgcggcgagcggacggggtcgagtcagtgcgttcgcgcgagttggaatcgaagcctcttaaaatggcagatgacttggacttcgagacaggagatgcaggggcctcagccaccttcccaatgcagtgctcagcattacgtaagaatggctttgtggtgctcaaaggccggccatgtaagatcgtcgagatgtctacttcgaagactggcaagcacggccacgccaaggtccatctggttggtattgacatctttactgggaagaaatatgaagatatctgcccgtcaactcataatatggatgtccccaacatcaaaaggaatgacttccagctgattggcatccaggatgggtacctatcactgctccaggacagcggggaggtacgagaggaccttcgtctccctgagggagaccttggcaaggagattgagcagaagtacgactgtggagaagagatcctggtatggtgcctccctccctgcttctgtgctcagctttgttctgtacgtttcttcctgagctcagacatctcttggctatccctcttgcttctccagatcacggtgctgtctgccatgacagaggaggcagctgttgcaatcaaggccatggcaaaataactggctcccagggtgagtgtgacaaatccctcactgtccccttcacattttgttgtcctcagcagagctgctgtagtcttaattgtttcaggcttactttctgcccctagcctggctctgtcctccctatccttcctgttgaaggtattatcctgtcttactaatttctctctcctacctagggtggcggtggtggcagcagtgatcctctgaacctgcagaggccccctccccgagcctggcctggctctggcccggtcctaagctggactcctcctacacaatttatttgacgttttattttggttttccccaccccctcaatctgtcggggagcccctgcccttcacctagctcccttggccaggagcgagcgaagctgtggccttggtgaagctgccctcctcttctcccctcacactacagccctggtgggggagaagggggtgggtgctgcttgtggtttagtcttttttttttttttttttttttaattcaatctggaatcagaaagcggtggattctggcaaatggtccttgtgccctccccactcatccctggtctggtcccctgttgcctatagccctttaccctgagcaccaccccaacagactggggaccagccccctcgcctgcctgtgtctctccccaaacccctttagatggggagggaagaggaggagaggggaggggacctgccccctcctcaggcatctgggagggccctgcccccatgggctttacccttccctgcgggctctctccccgacacatttgttaaaatcaaacctgaataaaactacaagtttaatatgaa

SEQ ID NO: 55512 - DNA, 1263 bp, Homo sapiens
ttgttattgtgtgttgtcaattgggaatcaaaaagggggggagggtgtaagacccgtgtgcagcagcggcggcggcggtagaggcggcggcggcggcggcagcgggctcggaggcagcggttgggctcgcggcgagcggacggggtcgagtcagtgcgttcgcgcgagttggaatcgaagcctcttaaaatggcagatgacttggacttcgagacaggagatgcaggggcctcagccaccttcccaatgcagtgctcagcattacgtaagaatggctttgtggtgctcaaaggccggccatgtaagatcgtcgagatgtctacttcgaagactggcaagcacggccacgccaaggtccatctggttggtattgacatctttactgggaagaaatatgaagatatctgcccgtcaactcataatatggatgtccccaacatcaaaaggaatgacttccagctgattggcatccaggatgggtacctatcactgctccaggacagcggggaggtacgagaggaccttcgtctccctgagggagaccttggcaaggagattgagcagaagtacgactgtggagaagagatcctgatcacggtgctgtctgccatgacagaggaggcagctgttgcaatcaaggccatggcaaaataactggctcccaggatggcggtggtggcagcagtgatcggctctggcccggtcctaagctggactcctcctacacaatttatttgacgttttattttggttttccccaccccctcaatctgtcggggagcccctgcccttcacctagctcccttggccaggagcgagcgaagctgtggccttggtgaagctgccctcctcttctcccctcacactacagccctggtgggggagaagggggtgggtgctgcttgtggtttagtcttttttttttttttttttttttaattcaatctggaatcagaaagcggtggattctggcaaatggtccttgtgccctccccactcatccctggtctggtcccctgttgcctatagccctttaccctgagcaccaccccaacagactggggaccagccccctcgcctgcctgtgtctctccccaaacccctttagatggggagggaagaggaggagaggggaggggacctgccccctcctcaggcatctgggagggccctgcccccatgggctttacccttccctgcgggctctctccccgacacatttgttaaaatcaaacctgaataaaactacaagtttaatatgaa

SEQ ID NO: 55513 - DNA, 806 bp, Homo sapiens
  misc_feature (761)..(761): n is a, c, g, or t
ttgttattgtgtgttgtcaattgggaatcaaaaagggggggagggtgtaagacccgtgtgcagcagcggcggcggcggtagaggcggcggcggcggcggcagcgggctcggaggcagcggttgggctcgcggcgagcggacggggtcgagtcagtgcgttcgcgcgagttggaatcgaagcctcttaaaatggcagatgacttggacttcgagacaggagatgcaggggcctcagccaccttcccaatgcagtgctcagcattacgtaagaatggctttgtggtgctcaaaggccggccatgtaagatcgtcgagatgtctacttcgaagactggcaagcacggccacgccaaggtccatctggttggtattgacatctttactgggaagaaatatgaagatatctgcccgtcaactcataatatggatgtccccaacatcaaaaggaatgacttccagctgattggcatccaggatgggtacctatcactgctccaggacagcggggaggtacgagaggaccttcgtctccctgagggagaccttggcaaggagattgagcagaagtacgactgtggagaagagatcctgatcacggtgctgtctgccatgacagaggaggcagctgttgcaatcaaggccatggcaaaataactggctcccagggtggcggtggtggcagcagtgatcctctgaacctgcagaggccccctccccgagcctggcctggctctggcccggtcctaagctggactccttgntgcctctggcctccttggtgcctctggcctccttggtgcctctgg

SEQ ID NO: 55514 - DNA, 1230 bp, Homo sapiens
gcctggtggcgaattcggcacgaggggtagaggcggcggcggcggcggcagcgggctcggaggcagcggttgggctcgcggcgagcggacggggtcgagtcagtgcgttcgcgcgagttctcttcttggctctagttggaatcgaagcctcttaaaatggcagatgacttggacttcgagacaggagatgcaggggcctcagccaccttcccaatgcagtgctcagcattacgtaagaatggctttgtggtgctcaaaggccggccatgtaagatcgtcgagatgtctacttcgaagactggcaagcacggccacgccaaggtccatctggttggtattgacatctttactgggaagaaatatgaagatatctgcccgtcaactcataatatggatgtccccaacatcaaaaggaatgacttccagctgattggcatccaggatgggtacctatcactgctccaggacagcggggaggtacgagaggaccttcgtctccctgagggagaccttggcaaggagattgagcagaagtacgactgtggagaagagatcctgatcacggtgctgtctgccatgacagaggaggcagctgttgcaatcaaggccatggcaaaataactggctcccaggatggcggtggtggcagcagtgatcggctctggcccggtcctaagctggactcctcctacacaatttatttgacgttttattttggttttccccaccccctcaatctgtcggggagcccctgcccttcacctagctcccttggccaggagcgagcgaagctgtggccttggtgaagctgccctcctcttctcccctcacactacagccctggtgggggagaagggggtgggtgctgcttgtggtttagtcttttttttttttttttttttttaattcaatctggaatcagaaagcggtggattctggcaaatggtccttgtgccctccccactcatccctggtctggtcccctgttgcctatagccctttaccctgagcaccaccccaacagactggggaccagccccctcgcctgcctgtgtctctccccaaacccctttagatggggagggaagaggaggagaggggaggggacctgccccctcctcaggcatctgggagggccctgcccccatgggctttacccttccctgcgggctctctccccgacacatttgttaaaatcaaacctgaataaaactacaagtttaatatgaa

SEQ ID NO: 55515 - DNA, 800 bp, Homo sapiens
gttgtgggggacggggagaaggggacagcttggcaccggtcccgtgggcgttgcagtgtgggggatgggagtatgcagcttggcactggtactgggagggatgaggatgacggtaaggttgagcagaagtacgactgtggagaagagatcctgatcacggtgctgtctgccatgacagaggaggcagctgttgcaatcaaggccatggcaaaataactggctcccagggctctggcccggtcctaagctggactcctcctacacaatttatttgacgttttattttggttttccccaccccctcaatctgtcggggagcccctgcccttcacctagctcccttggccaggagcgagcgaagctgtggccttggtgaagctgccctcctcttctcccctcacactacagccctggtgggggagaagggggtgggtgctgcttgtggtttagtcttttttttttttttttttttttaattcaatctggaatcagaaagcggtggattctggcaaatggtccttgtgccctccccactcatccctggtctggtcccctgttgcctatagccctttaccctgagcaccaccccaacagactggggaccagccccctcgcctgcctgtgtctctccccaaacccctttagatggggagggaagaggaggagaggggaggggacctgccccctcctcaggcatctgggagggccctgcccccatgggctttacccttccctgcgggctctctccccgacacatttgttaaaatcaaacctgaataaaactacaagtttaatatgaa

SEQ ID NO: 55516 - DNA, 586 bp, Homo sapiens
ttgttattgtgtgttgtcaattgggaatcaaaaagggggggagggtgtaagacccgtgtgcagcagcggcggcggcggtagaggcggcggcggcggcggcagcgggctcggaggcagcggttgggctcgcggcgagcggacggggtcgagtcagtgcgttcgcgcgagttggaatcgaagcctcttaaaatggcagatgacttggacttcgagacaggagatgcaggggcctcagccaccttcccaatgcagtgctcagcattacgtaagaatggctttgtggtgctcaaaggccggccatgtaagatcgtcgagatgtctacttcgaagactggcaagcacggccacgccaaggtccatctggttggtattgacatctttactgggaagaaatatgaagatatctgcccgtcaactcataatatggatgtccccaacatcaaaaggaatgacttccagctgattggcatccaggatgggtacctatcactgctccaggacagcggggaggtacgagaggaccttcgtctccctgagggagaccttggcaaggagatgatgactccgcctacacatttttttctta

SEQ ID NO: 55517 - DNA, 1391 bp, Homo sapiens
agcggagaggttgctggggtagccggcgtgggcggcgtcactgagccgcgccagctgagccaggtagggccctaccctcttctgttgctttctccctgtggctcgcgccgtcccccgccgcccgtcgaccccgcttccatgtccctggcggacacagctcccaggaacctccacgcccatggccactaggcagagggaatcctctatcacctcctgctgttccacctcgagctgcgacgcagacgacgagggcgtgcgcggcacctgcgaagatgcttccctgtgcaagaggtttgcagtaagcattggctactggcatgacccttacatacagcactttgtgagactgtctaaagagaggaaagcccctgaaatcaacagaggatattttgctcgagtccatggtgtcagtcagcttataaaggcatttctacggaagacagaatgtcattgtcaaattgtcaaccttggggcaggcatggataccaccttctggagattaaaggatgaagatcttctcccaagtaaatattttgaggttgactttccaatgattgtcacgagaaagctgcacagtatcaaatgcaagcctcccctatccagccccattctagaactgcattcagaggacacacttcagatggatggacacatactggattcaaagagatatgccgttattggagcagatctccgagacctgtctgaactggaagagaagctaaagaaatgtaacatgaatacacaattgccaacactcctgatagctgaatgtgtgctggtttacatgactccagagcagtccgcaaacctcctgaagtgggcagccaacagttttgagagagccatgttcataaactacgaacaggtgaacatgggtgatcggtttgggcagatcatgattgaaaacctgcggagacgccagtgtgacctggcgggagtggagacctgcaagtcattagagtcacagaaagaacggctcctgtcgaatgggtgggaaacagcatcggccgtcgacatgatggagttgtacaacaggttacctcgagctgaagtgagcaggatagaatcacttgaattcctggatgaaatggagctgctggagcagctcatgcggcattactgcctttgctgggcaaccaaaggaggaaatgagcttgggctgaaggagataacttattaatctgtcgaaggcttatgccgagccagaagccgaagccacttgccctcctggaggagacctgcaagctccctgagcggtgggcgggcctcgtccgcaggtctcatcccacactcttgagaagccttggtcactacagtggtcgcacatgttcctcttcctgttcctgttgacatgtcgttgtttaaataaatctcacttgccaccagtc

SEQ ID NO: 55518 - DNA, 769 bp, Homo sapiens
ggacgcgtgggtcgacccacgcatggacacatactggattcaaagagatatgccgttattggagcagatctccgagacctgtctgaactggaagagaagctaaagaaatgtaacatgaatacacaattgccaacactcctgatagctgaatgtgtgctggtttacatgactccagagcagtccgcaaacctcctgaagtgggcagccaacagttttgagagagccatgttcataaactacgaacaggtgaacatgggtgatcggtttgggcagatcatgattgaaaacctgcggagacgccagtgtgacctggcgggagtggagacctgcaagtcattagagtcacagaaagaacggctcctgtcgaatgggtgggaaacagcatcggccgtcgacatgatggagttgtacaacaggttacctcgagctgaagtgagcaggatagaatcacttgaattcctggatgaaatggagctgctggagcagctcatgcggcattactgcctttgctgggcaaccaaaggaggaaatgagcttgggctgaaggagataacttattaatctgtcgaaggcttatgccgagccagaagccgaagccacttgccctcctggaggagacctgcaagctccctgagcggtgggcgggcctcgtccgcaggtctcatcccacactcttgagaagccttggtcactacagtggtcgcacatgttcctcttcctgttcctgttgacatgtcgttgtttaaataaatctcacttgccaccagtc

SEQ ID NO: 55519 - DNA, 519 bp, Homo sapiens
tttgtttatggtattttttcttcttttcagtgaaaagacattaaaatggagccacaccataattactattttatagccgccttctttccacttaatctatcataaacattttttcatatccgtagctatgggccatgatcttcattttcaatgcagacacttgcatcgttctattttaattctttccacagatagaatcacttgaattcctggatgaaatggagctgctggagcagctcatgcggcattactgcctttgctgggcaaccaaaggaggaaatgagcttgggctgaaggagataacttattaatctgtcgaaggcttatgccgagccagaagccgaagccacttgccctcctggaggagacctgcaagctccctgagcggtgggcgggcctcgtccgcaggtctcatcccacactcttgagaagccttggtcactacagtggtcgcacatgttcctcttcctgttcctgttgacatgtcgttgtttaaataaatctcacttgccaccagtc

SEQ ID NO: 55520 - DNA, 1635 bp, Homo sapiens
acctggtgtcagataaaagaaactccatccgcacagacagatgcaaacagctcctctagttctgcagagctagttgagaactcaacattaatcattttaaaaagtactgtccttgaaatagatttgctgtgggaagaagggcagtgagtgtgggagaaaggagccgtgagcgtggggaaccccacagagcccaaaggactttttcagtattcgaaataaacaaaacaaaaacccatgaaacaaggcatttatctacagagctcaactagaaccccttttcattaggctactccacttccttcccctcatagggccctaccctcttctgttgctttctccctgtggctcgcgccgtcccccgccgcccgtcgaccccgcttccatgtccctggcggacacagctcccaggaacctccacgcccatggccactaggcagagggaatcctctatcacctcctgctgttccacctcgagctgcgacgcagacgacgagggcgtgcgcggcacctgcgaagatgcttccctgtgcaagaggtttgcagtaagcattggctactggcatgacccttacatacagcactttgtgagactgtctaaagagaggaaagcccctgaaatcaacagaggatattttgctcgagtccatggtgtcagtcagcttataaaggcatttctacggaagacagaatgtcattgtcaaattgtcaaccttggggcaggcatggataccaccttctggagattaaaggatgaagatcttctcccaagtaaatattttgaggttgactttccaatgattgtcacgagaaagctgcacagtatcaaatgcaagcctcccctatccagccccattctagaactgcattcagaggacacacttcagatggatggacacatactggattcaaagagatatgccgttattggagcagatctccgagacctgtctgaactggaagagaagctaaagaaatgtaacatgaatacacaattgccaacactcctgatagctgaatgtgtgctggtttacatgactccagagcagtccgcaaacctcctgaagtgggcagccaacagttttgagagagccatgttcataaactacgaacaggtgaacatgggtgatcggtttgggcagatcatgattgaaaacctgcggagacgccagtgtgacctggcgggagtggagacctgcaagtcattagagtcacagaaagaacggctcctgtcgaatgggtgggaaacagcatcggccgtcgacatgatggagttgtacaacaggttacctcgagctgaagtgagcaggatagaatcacttgaattcctggatgaaatggagctgctggagcagctcatgcggcattactgcctttgctgggcaaccaaaggaggaaatgagcttgggctgaaggagataacttattaatctgtcgaaggcttatgccgagccagaagccgaagccacttgccctcctggaggagacctgcaagctccctgagcggtgggcgggcctcgtccgcaggtctcatcccacactcttgagaagccttggtcactacagtggtcgcacatgttcctcttcctgttcctgttgacatgtcgttgtttaaataaatctcacttgccaccagtc

SEQ ID NO: 55521 - DNA, 1798 bp, Homo sapiens
acctggtgtcagataaaagaaactccatccgcacagacagatgcaaacagctcctctagttctgcagagctagttgagaactcaacattaatcattttaaaaagtactgtccttgaaatagatttgctgtgggaagaagggcagtgagtgtgggagaaaggagccgtgagcgtggggaaccccacagagcccaaaggactttttcagtattcgaaataaacaaaacaaaaacccatgaaacaaggcatttatctacagagctcaactagaaccccttttcattaggctactccacttccttcccctcatagggccctaccctcttctgttgctttctccctgtggctcgcgccgtcccccgccgcccgtcgaccccgcttccatgtccctggcggacacagctcccaggaacctccacgcccatggccactaggcagagggaatcctctatcacctcctgctgttccacctcgagctgcgacgcagacgacgagggcgtgcgcggcacctgcgaagatgcttccctgtgcaagagaactcccatcagcagcgcccgacagcactctcctcctcactgcccaacactgggtggcaaatcttttcatcttggccactctgataggctggacagtgaggtccttcttcctagggcgcatggaaacctgttgcagtcacctgggtttgcggagtgggaggaggtttgcagtaagcattggctactggcatgacccttacatacagcactttgtgagactgtctaaagagaggaaagcccctgaaatcaacagaggatattttgctcgagtccatggtgtcagtcagcttataaaggcatttctacggaagacagaatgtcattgtcaaattgtcaaccttggggcaggcatggataccaccttctggagattaaaggatgaagatcttctcccaagtaaatattttgaggttgactttccaatgattgtcacgagaaagctgcacagtatcaaatgcaagcctcccctatccagccccattctagaactgcattcagaggacacacttcagatggatggacacatactggattcaaagagatatgccgttattggagcagatctccgagacctgtctgaactggaagagaagctaaagaaatgtaacatgaatacacaattgccaacactcctgatagctgaatgtgtgctggtttacatgactccagagcagtccgcaaacctcctgaagtgggcagccaacagttttgagagagccatgttcataaactacgaacaggtgaacatgggtgatcggtttgggcagatcatgattgaaaacctgcggagacgccagtgtgacctggcgggagtggagacctgcaagtcattagagtcacagaaagaacggctcctgtcgaatgggtgggaaacagcatcggccgtcgacatgatggagttgtacaacaggttacctcgagctgaagtgagcaggatagaatcacttgaattcctggatgaaatggagctgctggagcagctcatgcggcattactgcctttgctgggcaaccaaaggaggaaatgagcttgggctgaaggagataacttattaatctgtcgaaggcttatgccgagccagaagccgaagccacttgccctcctggaggagacctgcaagctccctgagcggtgggcgggcctcgtccgcaggtctcatcccacactcttgagaagccttggtcactacagtggtcgcacatgttcctcttcctgttcctgttgacatgtcgttgtttaaataaatctcacttgccaccagtc

SEQ ID NO: 55522 - DNA, 1494 bp, Homo sapiens
cgctaggtacgaggctgggtttaaatcggccgaggctgtggctcgcgccgtcccccgccgcccgtcgaccccgcttccatgtccctggcggacacagctcccaggaacctccacgcccatggccactaggcagagggaatcctctatcacctcctgctgttccacctcgagctgcgacgcagacgacgagggcgtgcgcggcacctgcgaagatgcttccctgtgcaagagaactcccatcagcagcgcccgacagcactctcctcctcactgcccaacactgggtggcaaatcttttcatcttggccactctgataggctggacagtgaggtccttcttcctagggcgcatggaaacctgttgcagtcacctgggtttgcggagtgggaggaggtttgcagtaagcattggctactggcatgacccttacatacagcactttgtgagactgtctaaagagaggaaagcccctgaaatcaacagaggatattttgctcgagtccatggtgtcagtcagcttataaaggcatttctacggaagacagaatgtcattgtcaaattgtcaaccttggggcaggcatggataccaccttctggagattaaaggatgaagatcttctcccaagtaaatattttgaggttgactttccaatgattgtcacgagaaagctgcacagtatcaaatgcaagcctcccctatccagccccattctagaactgcattcagaggacacacttcagatggatggacacatactggattcaaagagatatgccgttattggagcagatctccgagacctgtctgaactggaagagaagctaaagaaatgtaacatgaatacacaattgccaacactcctgatagctgaatgtgtgctggtttacatgactccagagcagtccgcaaacctcctgaagtgggcagccaacagttttgagagagccatgttcataaactacgaacaggtgaacatgggtgatcggtttgggcagatcatgattgaaaacctgcggagacgccagtgtgacctggcgggagtggagacctgcaagtcattagagtcacagaaagaacggctcctgtcgaatgggtgggaaacagcatcggccgtcgacatgatggagttgtacaacaggttacctcgagctgaagtgagcaggatagaatcacttgaattcctggatgaaatggagctgctggagcagctcatgcggcattactgcctttgctgggcaaccaaaggaggaaatgagcttgggctgaaggagataacttattaatctgtcgaaggcttatgccgagccagaagccgaagccacttgccctcctggaggagacctgcaagctccctgagcggtgggcgggcctcgtccgcaggtctcatcccacactcttgagaagccttggtcactacagtggtcgcacatgttcctcttcctgttcctgttgacatgtcgttgtttaaataaatctcacttgccaccagtc

SEQ ID NO: 55523 - DNA, 1166 bp, Homo sapiens
agcggagaggttgctggggtagccggcgtgggcggcgtcactgagccgcgccagctgagccaggtagtttgcagtaagcattggctactggcatgacccttacatacagcactttgtgagactgtctaaagagaggaaagcccctgaaatcaacagaggatattttgctcgagtccatggtgtcagtcagcttataaaggcatttctacggaagacagaatgtcattgtcaaattgtcaaccttggggcaggcatggataccaccttctggagattaaaggatgaagatcttctcccaagtaaatattttgaggttgactttccaatgattgtcacgagaaagctgcacagtatcaaatgcaagcctcccctatccagccccattctagaactgcattcagaggacacacttcagatggatggacacatactggattcaaagagatatgccgttattggagcagatctccgagacctgtctgaactggaagagaagctaaagaaatgtaacatgaatacacaattgccaacactcctgatagctgaatgtgtgctggtttacatgactccagagcagtccgcaaacctcctgaagtgggcagccaacagttttgagagagccatgttcataaactacgaacaggtgaacatgggtgatcggtttgggcagatcatgattgaaaacctgcggagacgccagtgtgacctggcgggagtggagacctgcaagtcattagagtcacagaaagaacggctcctgtcgaatgggtgggaaacagcatcggccgtcgacatgatggagttgtacaacaggttacctcgagctgaagtgagcaggatagaatcacttgaattcctggatgaaatggagctgctggagcagctcatgcggcattactgcctttgctgggcaaccaaaggaggaaatgagcttgggctgaaggagataacttattaatctgtcgaaggcttatgccgagccagaagccgaagccacttgccctcctggaggagacctgcaagctccctgagcggtgggcgggcctcgtccgcaggtctcatcccacactcttgagaagccttggtcactacagtggtcgcacatgttcctcttcctgttcctgttgacatgtcgttgtttaaataaatctcacttgccaccagtc

SEQ ID NO: 55524 - DNA, 1226 bp, Homo sapiens
agcggagaggttgctggggtagccggcgtgggcggcgtcactgagccgcgccagctgagccaggtagggccctaccctcttctgttgctttctccctgtggctcgcgccgtcccccgccgcccgtcgaccccgcttccatgtccctggcggacacagctcccaggaacctccacgcccatggccactaggcagagggaatcctctatcacctcctgctgttccacctcgagctgcgacgcagacgacgagggcgtgcgcggcacctgcgaagatgcttccctgtgcaagaggtttgcagtaagcattggctactggcatgacccttacatacagcactttgtgagactgtctaaagagaggaaagcccctgaaatcaacagaggatattttgctcgagtccatggtgtcagtcagcttataaaggcatttctacggaagacagaatgtcattgtcaaattgtcaaccttggggcaggcatggataccaccttctggagattaaaggatgaagatcttctcccaagtaaatattttgaggttgactttccaatgattgtcacgagaaagctgcacagtatcaaattgccaacactcctgatagctgaatgtgtgctggtttacatgactccagagcagtccgcaaacctcctgaagtgggcagccaacagttttgagagagccatgttcataaactacgaacaggtgaacatgggtgatcggtttgggcagatcatgattgaaaacctgcggagacgccagtgtgacctggcgggagtggagacctgcaagtcattagagtcacagaaagaacggctcctgtcgaatgggtgggaaacagcatcggccgtcgacatgatggagttgtacaacaggttacctcgagctgaagtgagcaggatagaatcacttgaattcctggatgaaatggagctgctggagcagctcatgcggcattactgcctttgctgggcaaccaaaggaggaaatgagcttgggctgaaggagataacttattaatctgtcgaaggcttatgccgagccagaagccgaagccacttgccctcctggaggagacctgcaagctccctgagcggtgggcgggcctcgtccgcaggtctcatcccacactcttgagaagccttggtcactacagtggtcgcacatgttcctcttcctgttcctgttgacatgtcgttgtttaaataaatctcacttgccaccagtc

SEQ ID NO: 55525 - DNA, 832 bp, Homo sapiens
tcctctttcccatcttcccatagatgcaagcctcccctatccagccccattctagaactgcattcagaggacacacttcagatggatggacacatactggattcaaagagatatgccgttattggagcagatctccgagacctgtctgaactggaagagaagctaaagaaatgtaacatgaatacacaattgccaacactcctgatagctgaatgtgtgctggtttacatgactccagagcagtccgcaaacctcctgaagtgggcagccaacagttttgagagagccatgttcataaactacgaacaggtgaacatgggtgatcggtttgggcagatcatgattgaaaacctgcggagacgccagtgtgacctggcgggagtggagacctgcaagtcattagagtcacagaaagaacggctcctgtcgaatgggtgggaaacagcatcggccgtcgacatgatggagttgtacaacaggttacctcgagctgaagtgagcaggatagaatcacttgaattcctggatgaaatggagctgctggagcagctcatgcggcattactgcctttgctgggcaaccaaaggaggaaatgagcttgggctgaaggagataacttattaatctgtcgaaggcttatgccgagccagaagccgaagccacttgccctcctggaggagacctgcaagctccctgagcggtgggcgggcctcgtccgcaggtctcatcccacactcttgagaagccttggtcactacagtggtcgcacatgttcctcttcctgttcctgttgacatgtcgttgtttaaataaatctcacttgccaccagtc

SEQ ID NO: 55526 - DNA, 2001 bp, Homo sapiens
agcggagaggttgctggggtagccggcgtgggcggcgtcactgagccgcgccagctgagccaggtagggccctaccctcttctgttgctttctccctgtggctcgcgccgtcccccgccgcccgtcgaccccgcttccatgtccctggcggacacagctcccaggaacctccacgcccatggccactaggcagagggaatcctctatcacctcctgctgttccacctcgagctgcgacgcagacgacgagggcgtgcgcggcacctgcgaagatgcttccctgtgcaagaggtttgcagtaagcattggctactggcatgacccttacatacagcactttgtgagactgtctaaagagaggaaagcccctgaaatcaacagaggatattttgctcgagtccatggtgtcagtcagcttataaaggcatttctacggaagacagaatgtcattgtcaaattgtcaaccttggggcaggcatggataccaccttctggagattaaaggatgaagatcttctcccaagtaaatattttgaggttgactttccaatgattgtcacgagaaagctgcacagtatcaaatgcaagcctcccctatccagccccattctagaactgcattcagaggacacacttcagatggatggacacatactggattcaaagagatatgccgttattggagcagatctccgagacctgtctgaactggaagagaagctaaagaaatgtaacatgaatacacaattgccaacactcctgatagctgaatgtgtgctggtttacatgactccagagcagtccgcaaacctcctgaagtgggcagccaacagttttgagagagccatgttcataaactacgaacaggtgaacatgggtgatcggtttgggcagatcatgattgaaaacctgcggagacgccagtgtgacctggcgggagtggagacctgcaagtcattagagtcacagaaagaacggctcctgtcgaatgggtgggaaacagcatcggccgtcgacatgatggagttgtacaacaggttacctcgagctgaagtgagcaggatagaatcacttgaattcctggatgaaatggagctgctggagcagctcatgcggcattactgcctttgctgggcaaccaaaggaggaaatgagcttgggctgaaggagataacttattaatctgtcgaaggcttatgccgagccagaagccgaagccacttgccctcctggaggagacctgcaagctccctgagcggtgggcgggcctcgtccgcaggtctcatcccacactcttgagaagccttggtcactacagtggtcgcacatgttcctcttcctgttcctgttgacatgtcgttgtttaaataaatctcacttgccaccagtcaaaaaaaaaaaaaaaaaaaaaaaaaaaaaaaaaaaaaacaaaaaaaaaaaaaaaaaaaaaaaaaagaaaagagaggcgggggcggccgagcgcgcgaacaagaaggactcctcccgacgagggagcgggcagcaagactagcgagcgcgacgccacgccgagttgtttatgaagataaaagagggcgccgccccaatatagaggaggaggcgtgataattataacaagggagcggacggcgggccgccagtttatataacaacgagcaggagagagaggcgggaaaaaaaacgcggctgcgacgtggcggagaactgctcgtgaggaagaagaagaccacccacaccgacggggaggggggaggaacacaacaacgggggggacaacaaaatccacccctcaaggaagagaatattttacaacacccgacggcgagggagaagaatataaaaaaatttgatcgaagagcggacgtaatcaggtgtggagcgaaaccacacacagccgcaaccctattttgtcgccccgtggtatgaagaagaattggagtggccagagagtgagttgatacgtatggaaaacaaattgtttttctcaacgggggggagaa

SEQ ID NO: 55527 - DNA, 1540 bp, Homo sapiens
agcggagaggttgctggggtagccggcgtgggcggcgtcactgagccgcgccagctgagccaggtagggccctaccctcttctgttgctttctccctgtggctcgcgccgtcccccgccgcccgtcgaccccgcttccatgtccctggcggacacagctcccaggaacctccacgcccatggccactaggcagagggaatcctctatcacctcctgctgttccacctcgagctgcgacgcagacgacgagggcgtgcgcggcacctgcgaagatgcttccctgtgcaagaggtttgcagtaagcattggctactggcatgacccttacatacagcactttgtgagactgtctaaagagaggaaagcccctgaaatcaacagaggatattttgctcgagtccatggtgtcagtcagcttataaaggcatttctacggaagacagaatgtcattgtcaaattgtcaaccttggggcaggcatggataccaccttctggagattaaaggatgaagatcttctcccaagtaaatattttgaggttgactttccaatgattgtcacgagaaagctgcacagtatcaaatgcaagcctcccctatccagccccattctagaactgcattcagaggacacacttcagatggatggacacatactggattcaaagagatatgccgttattggagcagatctccgagacctgtctgaactggaagagaagctaaagaaatgtaacatgaatacacaattgccaacactcctgatagctgaatgtgtgctggtttacatgactccagagcagtccgcaaacctcctgaagtgggcagccaacagttttgagagagccatgttcataaactacgaacaggtgaacatgggtgatcggtttgggcagatcatgattgaaaacctgcggagacgccagtgtgacctggcgggagtggagacctgcaagtcattagagtcacagaaagaacggctcctgtcgaatgggtgggaaacagcatcggccgtcgacatgatggagttgtacaacaggttacctcgagctgaagtgagcaggatagaatcacttgaattcctggatgaaatggagctgctggagcagctcatgcggcattactgcctttgctgggcaaccaaaggaggaaatgagcttgggctgaaggagataacttattaatctgtcgaaggcttatgccgagccagaagccgaagccacttgccctcctggaggagacctgcaagctccctgagcggtgggcgggcctcgtccgcaggtctcatcccacactcttgagaagccttggtcactacagtggtcgcacatgttcctcttcctgttcctgttgacatgtcgttgtttaaataaatctcacttgccaccagtcaattaattcctgccccaaaaaaaagggcgggtaaaattcccagggccattacgtccacttttgtaggcctagggggaaaaagagggggaaagtggacagccggtctgggccctggggaggacccaaacggaatgtacgcggtggagaag

SEQ ID NO: 55528 - DNA, 1445 bp, Homo sapiens
agcggagaggttgctggggtagccggcgtgggcggcgtcactgagccgcgccagctgagccaggtagggccctaccctcttctgttgctttctccctgtggctcgcgccgtcccccgccgcccgtcgaccccgcttccatgtccctggcggacacagctcccaggaacctccacgcccatggccactaggcagagggaatcctctatcacctcctgctgttccacctcgagctgcgacgcagacgacgagggcgtgcgcggcacctgcgaagatgcttccctgtgcaagaggtttgcagtaagcattggctactggcatgacccttacatacagcactttgtgagactgtctaaagagaggaaagcccctgaaatcaacagaggatattttgctcgagtccatggtgtcagtcagcttataaaggcatttctacggaagacagaatgtcattgtcaaattgtcaaccttggggcaggcatggataccaccttctggagattaaaggatgaagatcttctcccaagtaaatattttgaggttgactttccaatgattgtcacgagaaagctgcacagtatcaaatgcaagcctcccctatccagccccattctagaactgcattcagaggacacacttcagatggatggacacatactggattcaaagagatatgccgttattggagcagatctccgagacctgtctgaactggaagagaagctaaagaaatgtaacatgaatacacaattgccaacactcctgatagctgaatgtgtgctggtttacatgactccagagcagtccgcaaacctcctgaagtgggcagccaacagttttgagagagccatgttcataaactacgaacaggtgaacatgggtgatcggtttgggcagatcatgattgaaaacctgcggagacgccagtgtgacctggcgggagtggagacctgcaagtcattagagtcacagaaagaacggctcctgtcgaatgggtgggaaacagcatcggccgtcgacatgatggagttgtacaacaggttacctcgagctgaagtgagcaggatagaatcacttgaattcctggatgaaatggagctgctggagcagctcatgcggcattactgcctttgctgggcaaccaaaggaggaaatgagcttgggctgaaggagataacttattaatctgtcgaaggcttatgccgagccagaagccgaagccacttgccctcctggaggagacctgcaagctccctgagcggtgggcgggcctcgtccgcaggtctcatcccacactcttgagaagccttggtcactacagtggtcgcacatgttcctcttcctgttcctgttgacatgtcgttgtttaaataaatctcacttgccaccagtccccccaaagaaaagtaaatgcgtccgaatttaatttttcctcttttctggggga

SEQ ID NO: 55529 - DNA, 940 bp, Homo sapiens
cctgatttaaaaatccttaaacactattgctcttaggtgcctagtgcttgatatgtggaagatgatcagcacatgtaagagtaaagaaataaaaagtattgtgtgtttttccccaggatgaagatcttctcccaagtaaatattttgaggttgactttccaatgattgtcacgagaaagctgcacagtatcaaatggacacatactggattcaaagagatatgccgttattggagcagatctccgagacctgtctgaactggaagagaagctaaagaaatgtaacatgaatacacaattgccaacactcctgatagctgaatgtgtgctggtttacatgactccagagcagtccgcaaacctcctgaagtgggcagccaacagttttgagagagccatgttcataaactacgaacaggtgaacatgggtgatcggtttgggcagatcatgattgaaaacctgcggagacgccagtgtgacctggcgggagtggagacctgcaagtcattagagtcacagaaagaacggctcctgtcgaatgggtgggaaacagcatcggccgtcgacatgatggagttgtacaacaggttacctcgagctgaagtgagcaggatagaatcacttgaattcctggatgaaatggagctgctggagcagctcatgcggcattactgcctttgctgggcaaccaaaggaggaaatgagcttgggctgaaggagataacttattaatctgtcgaaggcttatgccgagccagaagccgaagccacttgccctcctggaggagacctgcaagctccctgagcggtgggcgggcctcgtccgcaggtctcatcccacactcttgagaagccttggtcactacagtggtcgcacatgttcctcttcctgttcctgttgacatgtcgttgtttaaataaatctcacttgccaccagtc

SEQ ID NO: 55530 - DNA, 1070 bp, Homo sapiens
agcggagaggttgctggggtagccggcgtgggcggcgtcactgagccgcgccagctgagccaggtagggccctaccctcttctgttgctttctccctgtggctcgcgccgtcccccgccgcccgtcgaccccgcttccatgtccctggcggacacagctcccaggaacctccacgcccatggccactaggcagagggaatcctctatcacctcctgctgttccacctcgagctgcgacgcagacgacgagggcgtgcgcggcacctgcgaagatgcttccctgtgcaagaggtttgcagtaagcattggctactggcatgacccttacatacagcactttgtgagactgtctaaagagaggaaagcccctgaaatcaacagaggatattttgctcgagtccatggtgtcagtcagcttataaaggcattgccaacactcctgatagctgaatgtgtgctggtttacatgactccagagcagtccgcaaacctcctgaagtgggcagccaacagttttgagagagccatgttcataaactacgaacaggtgaacatgggtgatcggtttgggcagatcatgattgaaaacctgcggagacgccagtgtgacctggcgggagtggagacctgcaagtcattagagtcacagaaagaacggctcctgtcgaatgggtgggaaacagcatcggccgtcgacatgatggagttgtacaacaggttacctcgagctgaagtgagcaggatagaatcacttgaattcctggatgaaatggagctgctggagcagctcatgcggcattactgcctttgctgggcaaccaaaggaggaaatgagcttgggctgaaggagataacttattaatctgtcgaaggcttatgccgagccagaagccgaagccacttgccctcctggaggagacctgcaagctccctgagcggtgggcgggcctcgtccgcaggtctcatcccacactcttgagaagccttggtcactacagtggtcgcacatgttcctcttcctgttcctgttgacatgtcgttgtttaaataaatctcacttgccaccagtc

SEQ ID NO: 55531 - DNA, 1299 bp, Homo sapiens
agcggagaggttgctggggtagccggcgtgggcggcgtcactgagccgcgccagctgagccaggtagggccctaccctcttctgttgctttctccctgtggctcgcgccgtcccccgccgcccgtcgaccccgcttccatgtccctggcggacacagctcccaggaacctccacgcccatggccactaggcagagggaatcctctatcacctcctgctgttccacctcgagctgcgacgcagacgacgagggcgtgcgcggcacctgcgaagatgcttccctgtgcaagaggtttgcagtaagcattggctactggcatgacccttacatacagcactttgtgagactgtctaaagagaggaaagcccctgaaatcaacagaggatattttgctcgagtccatggtgtcagtcagcttataaaggcatttctacggaagacagaatgtcattgtcaaattgtcaaccttggggcaggcatggataccaccttctggagattaaaggatgaagatcttctcccaagtaaatattttgaggttgactttccaatgattgtcacgagaaagctgcacagtatcaaatgcaagcctcccctatccagccccattctagaactgcattcagaggacacacttcagatggatggacacatactggattcaaagagatatgccgttattggagcagatctccgagacctgtctgaactggaagagaagctaaagaaatgtaacatgaatacacaattgccaacactcctgatagctgaatgtgtgctggtttacatgactccagagcagtccgcaaacctcctgaagtgggcagccaacagttttgagagagccatgttcataaactacgaacaggtgaacatgggtgatcggtttgggcagatcatgattgaaaacctgcggagacgccagtgtgacctggcgggagtggagacctgcaagtcattagagtcacaggatagaatcacttgaattcctggatgaaatggagctgctggagcagctcatgcggcattactgcctttgctgggcaaccaaaggaggaaatgagcttgggctgaaggagataacttattaatctgtcgaaggcttatgccgagccagaagccgaagccacttgccctcctggaggagacctgcaagctccctgagcggtgggcgggcctcgtccgcaggtctcatcccacactcttgagaagccttggtcactacagtggtcgcacatgttcctcttcctgttcctgttgacatgtcgttgtttaaataaatctcacttgccaccagtc

SEQ ID NO: 55532 - DNA, 1293 bp, Homo sapiens
agcggagaggttgctggggtagccggcgtgggcggcgtcactgagccgcgccagctgagccaggtagggccctaccctcttctgttgctttctccctgtggctcgcgccgtcccccgccgcccgtcgaccccgcttccatgtccctggcggacacagctcccaggaacctccacgcccatggccactaggcagagggaatcctctatcacctcctgctgttccacctcgagctgcgacgcagacgacgagggcgtgcgcggcacctgcgaagatgcttccctgtgcaagaggtttgcagtaagcattggctactggcatgacccttacatacagcactttgtgagactgtctaaagagaggaaagcccctgaaatcaacagaggatattttgctcgagtccatggtgtcagtcagcttataaaggcatttctacggaagacagaatgtcattgtcaaattgtcaaccttggggcaggcatggataccaccttctggagattaaaggatgaagatcttctcccaagtaaatattttgaggttgactttccaatgattgtcacgagaaagctgcacagtatcaaatgcaagcctcccctatccagccccattctagaactgcattcagaggacacacttcagatggatggacacatactggattcaaagagatatgccgttattggagcagatctccgagacctgtctgaactggaagagaagctaaagaaatgtaacatgaatacacaattgccaacactcctgatagctgaatgtgtgctggtttacatgactccagagcagtccgcaaacctcctgaagtgggcagccaacagttttgagagagccatgttcataaactacgaacaggtgaacatgggtgatcggtttgggcagatcatgattgaaaacctgcggagacgccagtgtgacctggcgggagtggagacctgcaagtcattagagtcacagaaagaacggctcctgtcgaatgggtgggaaacagcatcggccgtcgacatgatggagttgtacaacaggttacctcgagctgaagtgagcagggctgaaggagataacttattaatctgtcgaaggcttatgccgagccagaagccgaagccacttgccctcctggaggagacctgcaagctccctgagcggtgggcgggcctcgtccgcaggtctcatcccacactcttgagaagccttggtcactacagtggtcgcacatgttcctcttcctgttcctgttgacatgtcgttgtttaaataaatctcacttgccaccagtc

SEQ ID NO: 55533 - DNA, 381 bp, Homo sapiens
gtgctccggtggtttacctcctacaacaggttacctcgagctgaatatgagcgatagaatcacttgaattcctggatgaaatggagctgctggagcagctcatgcggcattactgcctttgctgggcaaccaaaggaggaaatgagcttgggctgaaggagataacttattaatctgtcgaaggcttatgccgagccagaagccgaagccacttgccctcctggaggagacctgcaagctccctgagcggtgggcgggcctcgtccgcaggtctcatcccacactcttgagaagccttggtcactacagtggtcgcacatgttcctcttcctgttcctgttgacatgtcgttgtttaaataaatctcacttgccaccagtc

SEQ ID NO: 55534 - DNA, 331 bp, Homo sapiens
cagtgtgacctggcgggagtggagacctgcaagtcattagagtcacaggtcagagagcagggactgggatatccatttggacccttagtcaaccaagatatataaaggtctttctttgcagatatgatcatggagaagccctgttcagtgcctgtcagcagcacaggctgctgagcctccatgtgggccgctagttcatgatgctgggaagaccaagtcctgcttcaccatcacatttcctacaccctattattttgactttgtattacgcaaattttcaaacaaacataaaggtagagggaatggtgaaataaacacacacgtctcatca

SEQ ID NO: 55535 - DNA, 1482 bp, Homo sapiens
  misc_feature (1456)..(1456): n is a, c, g, or t
agcggagaggttgctggggtagccggcgtgggcggcgtcactgagccgcgccagctgagccaggtagggccctaccctcttctgttgctttctccctgtggctcgcgccgtcccccgccgcccgtcgaccccgcttccatgtccctggcggacacagctcccaggaacctccacgcccatggccactaggcagagggaatcctctatcacctcctgctgttccacctcgagctgcgacgcagacgacgagggcgtgcgcggcacctgcgaagatgcttccctgtgcaagaggtttgcagtaagcattggctactggcatgacccttacatacagcactttgtgagactgtctaaagagaggaaagcccctgaaatcaacagaggatattttgctcgagtccatggtgtcagtcagcttataaaggcatttctacggaagacagaatgtcattgtcaaattgtcaaccttggggcaggcatggataccaccttctggagattaaaggatgaagatcttctcccaagtaaatattttgaggttgactttccaatgattgtcacgagaaagctgcacagtatcaaatgcaagcctcccctatccagccccattctagaactgcattcagaggacacacttcagatggatggacacatactggattcaaagagatatgccgttattggagcagatctccgagacctgtctgaactggaagagaagctaaagaaatgtaacatgaatacacaattgccaacactcctgatagctgaatgtgtgctggtttacatgactccagagcagtccgcaaacctcctgaagtgggcagccaacagttttgagagagccatgttcataaactacgaacaggtgaacatgggtgatcggtttgggcagatcatgattgaaaacctgcggagacgccagtgtgacctggcgggagtggagacctgcaagtcattagagtcacagaaagaacggctcctgtcgaatgggtgggaaacagcatcggccgtcgacatgatggagttgtacaacaggttacctcgagctgaagtgagcaggatagaatcacttgaattcctggatgaaatggagctgctggagcagctcatgcggcattactgcctttgctgggcaaccaaaggaggaaatgagcttgggctgaaggagataacttattaatctgtcgaaggcttatgccgagccagaagccgaagccacttgccctcctggaggagacctgcaagctccctgagcggtgggcgggcctcgtccgcaggtctcatcccacactcttgagaagccttggtcactacagtggtcgcacatgttcctcttcctgttcctgttgacatgtcgttgtttaaataaatctcacttgccaccagtcatttcacttcatttctttgaaacaccactctgctgggccagccaagtcctgcaattcacattaantctcgcagctagctgcgttcttcatc

SEQ ID NO: 55536 - DNA, 1331 bp, Homo sapiens
agcggagaggttgctggggtagccggcgtgggcggcgtcactgagccgcgccagctgagccaggtagggccctaccctcttctgttgctttctccctgtggctcgcgccgtcccccgccgcccgtcgaccccgcttccatgtccctggcggacacagctcccaggaacctccacgcccatggccactaggcagagggaatcctctatcacctcctgctgttccacctcgagctgcgacgcagacgacgagggcgtgcgcggcacctgcgaagatgcttccctgtgcaagaggtttgcagtaagcattggctactggcatgacccttacatacagcactttgtgagactgtctaaagagaggaaagcccctgaaatcaacagaggatattttgctcgagtccatggtgtcagtcagcttataaaggcatttctacggaagacagaatgtcattgtcaaattgtcaaccttggggcaggcatggataccaccttctggagattaaaggatgaagatcttctcccaagtaaatattttgaggttgactttccaatgattgtcacgagaaagctgcacagtatcaaatgcaagcctcccctatccagccccattctagaactgcattcagaggacacacttcagatggatggacacatactggattcaaagagatatgccgttattggagcagatctccgagacctgtctgaactggaagagaagctaaagaaatgtaacatgaatacacaattgccaacactcctgatagctgaatgtgtgctggtttacatgactccagagcagtccgcaaacctcctgaagtgggcagccaacagttttgagagagccatgttcataaactacgaacaggtgaacatgggtgatcggtttgggcagatcatgattgaaaacaaagaacggctcctgtcgaatgggtgggaaacagcatcggccgtcgacatgatggagttgtacaacaggttacctcgagctgaagtgagcaggatagaatcacttgaattcctggatgaaatggagctgctggagcagctcatgcggcattactgcctttgctgggcaaccaaaggaggaaatgagcttgggctgaaggagataacttattaatctgtcgaaggcttatgccgagccagaagccgaagccacttgccctcctggaggagacctgcaagctccctgagcggtgggcgggcctcgtccgcaggtctcatcccacactcttgagaagccttggtcactacagtggtcgcacatgttcctcttcctgttcctgttgacatgtcgttgtttaaataaatctcacttgccaccagtc

SEQ ID NO: 55537 - DNA, 845 bp, Homo sapiens
agcggagaggttgctggggtagccggcgtgggcggcgtcactgagccgcgccagctgagccaggtagggccctaccctcttctgttgctttctccctgtggctcgcgccgtcccccgccgcccgtcgaccccgcttccatgtccctggcggacacagctcccaggaacctccacgcccatggccactaggcagagggaatcctctatcacctcctgctgttccacctcgagctgcgacgcagacgacgagggcgtgcgcggcacctgcgaagatgcttccctgtgcaagaggtttgcagtaagcattggctactggcatgacccttacatacagcactttgtgagactgtctaaagagaggaaagcccctgaaatcaacagaggatattttgctcgagtccatggtgtcagtcagcttataaaggcatttctacggaagacagaatgtcattgtcaaattgtcaaccttggggcaggcatggataccaccttctggagattaaaggatgaagatcttctcccaagtaaatattttgaggttgactttccaatgattgtcacgagaaagctgcacagtatcaagtaagtgtggcatggccagaagaacaaaagccagcgagaattcagatccagctctcaagagatggcagatctgaatgccagagacttcactttagggtgttgccttccgttcactgccccccaccaactttttttttgccctggcactcattccagcatgttctacagtctgcaaaatgcaatatacatttccttattacagatcacaggctctatggctccccatgtaattacaattaacacgaggccaaccaaatctccca

SEQ ID NO: 55538 - DNA, 298 bp, Homo sapiens
caagtcactgatgtttgtgtatgtctacgtgtatgtgtgcttgtgtgtgtgtttctgtatgtatgcatatttgtgtctgtgattgtgtgtgtttgtatgtgtgtgtgcgtgcgcatatatttagcttttcctcataaatctttattattaaaatgagctcacaacagaagaggatgagaactcttgggctatgtaggaaatgcagggccagagggtgtattaggatcaagaagaggccagacccccaggtcgtggacctcctcctgccatgggcccacagcccatgtggttttgtgag

SEQ ID NO: 55539 - DNA, 472 bp, Homo sapiens
aagaaaggggtggcagtggcaactgtcaagacattttataacttttactttcaagatagtgtctagacttcttttggaaattttcttataatctcttagttttttatgtcaagaaaaggactggtgtagcattaagacctattctggcatcaatgatattagggaaagcttttaaccatattggcagagccagactttaagggctaagtcatatgacttgggcagggaacagccttttttaaagatcatgaaattatttcacatagtgcgattttttgagtttggcttgatggatgtttgctgatccagacgttatcattggtgacattatttttagtgaaatgaaccaggagtgagtttgttcactgttggctgtatttttacaaaatgagctttacaatattttttctgacttaaaaaagtcatacatatcactttagaacacctcgtacaaagtagggagttatttaaa

SEQ ID NO: 55540 - DNA, 183 bp, Homo sapiens
ctaaaacatgacattatcaggcttactgattttcaaattagggctttccttaatttttaaatgcttggaatgcttattcttctacataaggcaacatgatgctgagacagttacactccctcttcttttttaaatatgaaggagattttcaaccatcttttataagtaagaaaatagaagctg

SEQ ID NO: 55541 - DNA, 2477 bp, Homo sapiens
  misc_feature (1555)..(1555): n is a, c, g, or t
  misc_feature (1702)..(1702): n is a, c, g, or t
tgaattattaatttttgcggctggacgcggtgactcatacctgtaatctcaacactttgggaggccgaggtgggcagatcacctgaggtcaggagtttgagaccagcctggccagcatggtgaaactctgtctctactaaaaatacaataattagctgggtgtggtggcacgcacctgtaatcccagctactggggaggctgaggcaggagaatctcatgaacccaggaggcagaggtggcggtgagctgagattgcaccactacactccagactgggatttaagaaaatgtgtagttaaatattgcctaaaatgctcgaatgtaggttataaacaatgagaatagggcccatgaagagattttcgtttttcacagaggtgagacttaaaaaggccttgaaggataaatagaaatagaagcagagtagaagggttattccaggagaatattagtttggatgagggcacagaggcaggaagatggagcttagcttgagggaatggaggtcactggtgctgtgaatatttgcagacagccatatccagagctgagaggtgaaagaacagactggaatagttcttttctttttcactctcctaccttatttgcttttggtttagcaaggaggatcgaaagtaaaccaagagaaatggtggggggcagcagagggaggtgggagggaaactccaggatgagttatggtcagccaaaagaagctgttgaaataaaatgaccaagagttaatgcctttatagacgcagggatgcacagcctagatccccttcctctaaaggacttgctgcccatccactgaaagcttggtcagcagccagcccccagctatcggctctttcagggcctgccttgttgcaaagggccgcctccctgcaaagagctgccttgctcaaagagctgccttgcactaggtcatgctcttctggtggcagcttgcatcctgtcacagagaggcaggggtgtgaaagcacagccatctcatttgctctgcaggacaatatccactccagagttcctgctagactggccaagaccttgttgccattcaacttctttcccattctactcgctccctccttccttcacaggtgttgagccctaataaaattttgcacccgaaattctgcttcattatctgtttctggagaacccaacctgtaacattttcccagccagggctgaatacacacacacacacacacacacacacacacacacacgtgctctctctgtatatatgtttctgtgtatgtatatatgtatgtatatttttaattacttttctccattcaatagtatactgcctatcaattattagcaaattgtattttcaacctgttggcttatttattctaaatatagccattttcctctaaagagaaatctttgttgccaaaagaattttataatggcaaaatcagtcattttccccactaatcgcaatgtaattttgcccattttgagatgggcaaaaatcatatgttcagaacagtaaggtgagacagaatcagctaatttactgataactgtgggcactanctgaactgacgtatcatgctgctacgcactttagtaccaggctctctggtggccagttctttgcaggataacgtggaataatgcttatgtaaaatatgacttccaagactaattctcaacttcagactccccactcccagcattatngctttggcattagtaatgttagtcagaaatatgagtaattcttggcaagaatgggaagcattcaacttgtaacttcaaaaagacattatctgaaaggttgaaagccagtttctaatagtacctggtgtcttggcttcagggctcacagcaatcctgtggagaaagtatgagtttcccatttcaacaaagaaggtgaggcttagagggaaaggaagttgctcaagatttgctctggaacagagccaggattcccactcagatcttcgactctgaatcctgcaggccttcacctgtgcgagcactgagcgcctggctgccagctccagagctcctctggggccttggtcagtgtggtgttgtttatgtccagcacactttccgttggtctactggaggacagttcctgtacaggcagatgacttccttcaccaaggacctgtgactctctccctgagggctttctctgacatcatctgcacatggacagcttagactgaaagtttcaggggttcgatgccttccagaggcacctctctaacaataagagcccagattgagtggaaataccccagcttccttaccactccagcctccatgcccttagtggcatgattccgaggtgcatcctacactgactcttggtggctccctggccagagctcattcgcgtggccctcagcagctctcctccttccctggctgtcttcctcaccacctctccgtgattccaggaatcagctcccgaataaacgacttgcacccgaaaattgtctca

SEQ ID NO: 55542 - DNA, 376 bp, Homo sapiens
tcttttgccctaaatagacatcattggcatcttctatcatccccatcaccagtgaaagaaaagtagaacatccttcccctctactcttcagctctaagtcagagagactgggaattgaggaaaatttgaagtaggagtatcctgaatttgacaagatccgtcttgtagtctaaaggaccttgctatcagggtcatatcacttccctgaagtgggttagacctcatttcatacctgtgagcaaaagccatagtttctctcttgtggcagttgagccagtgcaaaaactgcaggctgcctttcagaccaaggagattcccaatggccttctgctattaaaggaacaaaaagtacacaattcctttgctgcaaaaacaa

SEQ ID NO: 55543 - DNA, 586 bp, Homo sapiens
gtcaactatttgggtcatgaccttttgattttataataaaataccacaagatttttatatagtatgtattgtgtcttttgtacacaggttagattattttctctccacaataattataaagttgagactgggaagcttccttcattttgcagatttggaacccgagacactgaatgattaaatggcagagctgccaggcgtggtgactgatgtgtgcctgtagtctcagctactcaggaggctgaggcaggaggatcacttgagccccaggagtttgagtccagtctgggcaacatagaaaccccatctctaaaataaataaaataaatgactgagctgttgtgaaagggttagtgatagagaccagaactcttaactgtcaggccaatgtctttccacttcctcacactgatcccacataactctgggtatgatagtgagtgtcaggggtcagacatgggtctgttcagctgagctgcctgattgttccttataaagtttgtcaacctcttcttttttttgaacaagttaagaggaaaggaattaaagctttatggatgatcacttttcaaagttcttgaagcaa

SEQ ID NO: 55544 - DNA, 644 bp, Homo sapiens
gcagcaaaggatgaagaagggcaaaatgatgaaaggtgaggtggaaagaggttatgagatggtaaagaaaagttaacttctggcacttgattgccacttccgtcaggctggtcctgcctctctcccttgccttctgattgtttcatttcctgtttatttgatcatatctgaattagttcactggttagcctcttccttagttcccacttccttaccaaagccctaattatatttcctcttgtttgccttttctctcctactcttctctaacatctgcagccacactctccattcactccatgctgacaaggcagtggcaaacacttttctctgctgccagccactccactgttgactggattgctgccagccccaggcaaacctgtgaagttgtttcatactctgcttctctttgagtgcctccttctctccttcctcttcctttctgggctccagtctttctcttcacttgtgcttgtcagaacctccctgtgatactgcctccaggcatttcccccatgttggctcaccgcactattatctttgcttatcaacttgcattcagctggctggcatgtttcaaaaccacactgccctcccaggcctgtgtgccttttgagaaagaccagtgctggatgagcctc

SEQ ID NO: 55545 - DNA, 493 bp, Homo sapiens
aatttaatttggaaggctcctcacaaatcatcttattttccagtttcaaaaaccaagttctgagtggagattaagacagggtctctttatttcccagtgcagtctcctatctatttatttgtgaatgaatgaattagttaattaatgagccagggtttcactttgtcacccaggctggattgcagaagaagtcatcgtggccaagcgtggtggctcatgcctgtaatcccagcactttgggaggccaagacaggtggatcacttgaggtcaggagttcaagaccagcctggccaacatggtgaaaccctgtctctactaaaaatacaaaattagccaggcgtggtggcgcgtgcctgtaatcccagctactcaggaggctgaggcaaaagagtcacttgaacctgggaggcagaggcagcagtgagctgagattgcgccattgcactccagcctggccaaaaaatgtgaaactccgtctaaaaaaaaaaaaaa

SEQ ID NO: 55546 - DNA, 450 bp, Homo sapiens
tccttagagctccagctaatccagatgcaacattgacgaattagtgccggaatgagtatcagcacttgaaaaccctacagagatgccttggtcactccagataagagtttctgtggctgagaggccccactgtatgactcctgtttctgcctgctggacttcactttctggggcttggcatctgatgacctctgtatacatgctgtgcctcctgttctttatgtggccacttcactttgtcctttgggtttcagcttaaaagtagagtcaactagaaatcttcattaccatgctgagactagttaggatgcccctggctcatcagctgtaatgcctctgtcaaagctccactcaaacatgctagaaccatcgccttcccctcctcaactgtaaaccacagaaatgcagaggccctgtctgttttgttcatcagatcctccggagcatagc

SEQ ID NO: 55547 - DNA, 596 bp, Homo sapiens
cagcggagttaacggctgcggttcgaagtggctgtgggtattgctgcggctggtgcgtcgtcgctctagccagtaaatgacctgcgacataactatttgcaaaacaaatggggaagaccaagataaagataagttatatcacaggaaagcaattgaaaatgcaaaaatgaagcatctgaatgaaggactaataacactgaattcagcttttgtgaatcttatctgcagatatgtacagaccacatcctaagattgacttctgcctcaacagaaatacatgagccagtgccttattggaaatgatttgcgtgttttaagaactggtgtatataggtacatcttgaatgttctgctttccttgccttatgcctgtacttcacctcagccttcaattccattgtgtttccttgctacttggtatcttgaaatctggtacgaaactattgcatgatccctgcacctttgcttctgcatatatcatagctctcttatagtgagtgtgcacaatctatttcatttgatgtaatcaaagtttaatatattggatagttaaaaataaaatacaactttaaatgcgcaaaagtattagttctcat

SEQ ID NO: 55548 - DNA, 633 bp, Homo sapiens
cagcggagttaacggctgcggttcgaagtggctgtgggtattgctgcggctggtgcgtcgtcgctctaggtacgttggggccgggcgagtgtcctgcgagagcggcgattggcggggtggcggctctaggagcgtcggtcgcctctctgagggccggccccggaggcctcggagcgccgggcctaccggacgtttgcggcgaagctgccctgactgaaaagcgtccgcggggccgtctgacaggtccgggaagaggcccctgaggggcggacgggcgcgtctccaccgttttcgcagagggatactggtgaagcgggagtggtgtgcggcctcaggtccgggcggcactggggttagggactgcggagggaagtggtgcgtgttttttgtcctgaggggtaagtaaaagctcgctcttgtccggaatgctttcagaaattaacggataaatctccacctccaccaattttagtgtcccattgccaaattttcttgagttgttttaatcatctaatgaagtcaggtgccagaaggcaactggatctcgcctggcggccttgaagtttgttaaaaagtagggaccagagcatcaggaaaaatacaaaattctgagtaaaatgctgaaatcccgta

SEQ ID NO: 55549 - DNA, 593 bp, Homo sapiens
cagcggagttaacggctgcggttcgaagtggctgtgggtattgctgcggctggtgcgtcgtcgctctaggaatcctgctttttttttttctttgagacacggtctcactctgtcacccttgctggagtgcagtggtgcaatcacagatcacggcagtgtctaattcctgggctcaagtgaaccttttgcatcagcctcctgaatagctgagaccacaggatatgaaagatggcaagtccagatagaagtaaacggaagatattaaaagccaaaaagacaatgcccctaagttgccggaagcaagtagagatgctgaataagtcaaggaatgttgaagcgctgaaaacagcaattgggagtaatgttccaagcggtaatcagagtttcagtcctagtgtcataactaggacgactgaaataaccaaatgtagcccttctgaaaatggtgcatcctcattggactctaataaaaattcaatatcagagaaaagtaaagtattctctcagaattgcataaaaccagtagaagaaattgttcattcagaaacaaaattggaacaagttgtttgttcgtaccaaaagccaagtagaac

SEQ ID NO: 55550 - DNA, 867 bp, Homo sapiens
ccagttttctccaagtttggcaagcaagtttgagaaagagaggacgcaataattttttttgccttatttttgttaaaaccttaccgcacttaaggaaacggactttctacctttccgtgtttctgtgttgaaaatgaagtttctaaccacgtgttccttcctttacgacacaatggctttttctgttctgaagacttgcatatggttaatatgtatggaagaagaggacagttgtactgaatagtccacattagaaaaattatgtcatattcacttaaattgttattctagattgcgacttaatactgtttttattatgattttgtcatatttattgtagccagtaaatgacctgcgacataactatttgcaaaacaaatggggaagaccaagataaagataagttatatcacaggaaagcaattgaaaatgcaaaaatgaagcatctgaatgaaggactaataacactgaattcagcttttgtgaatcttatctgcagatatgtacagaccacatcctaagattgacttctgcctcaacagaaatacatgagccagtgccttattggaaatgatttgcgtgttttaagaactggtgtatataggtacatcttgaatgttctgctttccttgccttatgcctgtacttcacctcagccttcaattccattgtgtttccttgctacttggtatcttgaaatctggtacgaaactattgcatgatccctgcacctttgcttctgcatatatcatagctctcttatagtgagtgtgcacaatctatttcatttgatgtaatcaaagtttaatatattggatagttaaaaataaaatacaactttaaatgcgcaaaagtattagttctcat

SEQ ID NO: 55551 - DNA, 565 bp, Homo sapiens
cagcggagttaacggctgcggttcgaagtggctgtgggtattgctgcggctggtgcgtcgtcgctctagccagtaaatgacctgcgacataactatttgcaaaacaaatggggaagaccaagataaagataagttatatcacaggaaagcaattgaaaatgcaaaaatgaagcatctgaatgaaggactaataacactgaattcagcttttgtgaatcttatctgcagatatgtacagaccacatcctaagattgacttctgcctcaacagaaatacatgagccagtgccttattggaaatgatttgcgtgttttaagaactggtgtatataggtacatcttgaatgttctgctttccttgccttatgcctgtacttcacctcagccttcaattccattgtgtttccttgctacttggtatcttgaaatctggtacgaaactattgcatgatccctgcacctttgcttctgcatatatcatagctctcttatagtgagtgtgcacaatctatttcatttgatgtaatcaaagtttaatatattgccctcccggagactctgtaga

SEQ ID NO: 55552 - DNA, 543 bp, Homo sapiens
cagcggagttaacggctgcggttcgaagtggctgtgggtattgctgcggctggtgcgtcgtcgctctagccagtaaatgacctgcgacataactatttgcaaaacaaatggggaagaccaagataaagataagttatatcacaggaaagcaattgaaaatgcatcttatctgcagatatgtacagaccacatcctaagattgacttctgcctcaacagaaatacatgagccagtgccttattggaaatgatttgcgtgttttaagaactggtgtatataggtacatcttgaatgttctgctttccttgccttatgcctgtacttcacctcagccttcaattccattgtgtttccttgctacttggtatcttgaaatctggtacgaaactattgcatgatccctgcacctttgcttctgcatatatcatagctctcttatagtgagtgtgcacaatctatttcatttgatgtaatcaaagtttaatatattggatagttaaaaataaaatacaactttaaatgcgcaaaagtattagttctcat

SEQ ID NO: 55553 - DNA, 412 bp, Homo sapiens
tatgtatttcatgttgaggcaagaagtcaatcttatggatgtggtctgtacatatctgcaagataagattgacttctgcctcaacagaaatacatgagccagtgccttattggaaatgatttgcgtgttttaagaactggtgtatataggtacatcttgaatgttctgctttccttgccttatgcctgtacttcacctcagccttcaattccattgtgtttccttgctacttggtatcttgaaatctggtacgaaactattgcatgatccctgcacctttgcttctgcatatatcatagctctcttatagtgagtgtgcacaatctatttcatttgatgtaatcaaagtttaatatattggatagttaaaaataaaatacaactttaaatgcgcaaaagtattagttctcat

SEQ ID NO: 55554 - DNA, 430 bp, Homo sapiens
cgtttattctgcaatacgtttgtagaagtgttgactccgatcttaatcaaatttacttcactctcagtcttatctgcagatatgtacagaccacatcctaagattgacttctgcctcaacagaaatacatgagccagtgccttattggaaatgatttgcgtgttttaagaactggtgtatataggtacatcttgaatgttctgctttccttgccttatgcctgtacttcacctcagccttcaattccattgtgtttccttgctacttggtatcttgaaatctggtacgaaactattgcatgatccctgcacctttgcttctgcatatatcatagctctcttatagtgagtgtgcacaatctatttcatttgatgtaatcaaagtttaatatattggatagttaaaaataaaatacaactttaaatgcgca

SEQ ID NO: 55555 - DNA, 380 bp, Homo sapiens
gatcacggcagtgtctaattcctgggctcaagtgaaccttttgcatcagcctcctgaatagctgagaccacaggtatgtgccacacctggatgaattctccctttaaaataatataagaatgtttttatgtgtaggccgcaaagctgtagcagtgtcttcaggcaaagctgctaattttatgcatcatgattatcacttttagcaaatacatcataaaaccatgctagaggaaagatttgatttgttcattttctttggaaaataatacaaaaattgtattcatgaagagacaatcatataatacacagtcctataggaaaaatagaattgtataggcatattagggtcttaattaatgaagagtattgtgctgtttttt

SEQ ID NO: 55556 - DNA, 398 bp, Homo sapiens
  misc_feature (20)..(20): n is a, c, g, or t
  misc_feature (29)..(29): n is a, c, g, or t
  misc_feature (52)..(52): n is a, c, g, or t
  misc_feature (101)..(101): n is a, c, g, or t
  misc_feature (106)..(107): n is a, c, g, or t
gaagaaggtggttgatctgngcgacatcntccaatacccctctgcccccggntgcccctggacgtctgcctcaaagctcattggctgagcatcgagggctnccagnncgccaaggctgacctcctgctcagcacccagccaggccgtgaggagggctcccctcttgagctggaacgcctgaaactggagcctcacgaagggctgctgctccgcttcccctacgcggcctgacttcagcctgacatggacccactacccttctcctttccttcccaggccctttggcttctgatttttctcttttttaaaaacaaacaaacaaactgttgcagattatgagtgaacccccaaatagggtgttttctgccttcaaataaaagtcacccctgcatggtgaa

SEQ ID NO: 55557 - DNA, 1621 bp, Homo sapiens
ggactccttacatcagctcctctgagtctcgtgattcagccttgcctccctctctccccctttgccccctccccgtcccacccttaggcgctgggagaagggagggtggggaggtcaggggcctctcagaggggcctcacttgttaacccagcccccatttcaggtctgaaggggcgtctcgattacctgagctctctgaaggtgaagggccttgtgctgggtccaattcacaagaaccagaaggatgatgtcgctcagactgacttgctgcagatcgaccccaattttggctccaaggaagattttgacagtctcttgcaatcggctaaaaaaaagagcatccgtgtcattctggaccttactcccaactaccggggtgagaactcgtggttctccactcaggttgacactgtggccaccaaggtgaaggcctcaggaaactgggagaggggggatcttgactgacattttagatcctgtctgctgctcactgattatgactgtggacgcgtctccctgcttctctgggtctgtttcttcatctctaaaataggatgctctggagttttggctgcaagctggcgtggatgggttccaggttcgggacatagagaatctgaaggatgcatcctcattcttggctgagtggcaaaatatcaccaagggcttcagtgaagacaggctcttgattgcggggactaactcctccgaccttcagcagatcctgagcctactcgaatccaacaaagacttgctgttgactagctcatacctgtctgattctggttctactggggagcatacaaaatccctagtcacacagtatttgaatgccactggcaatcgctggtgcagctggagtttgtctcaggcaaggctcctgacttccttcttgccggctcaacttctccgactctaccagctgatgctcttcaccctgccagggacccctgttttcagctacggggatgagattggcctggatgcagctgcccttcctggacagcctatggaggctccagtcatgctgtgggatgagtccagcttccctgacatcccaggggctgtaagtgccaacatgactgtgaagggccagagtgaagaccctggctccctcctttccttgttccggcggctgagtgaccagcggagtaaggagcgctccctactgcatggggacttccacgcgttctccgctgggcctggactcttctcctatatccgccactgggaccagaatgagcgttttctggtagtgcttaactttggggatgtgggcctctcggctggactgcaggcctccgacctgcctgccagcgccagcctgccagccaaggctgacctcctgctcagcacccagccaggccgtgaggagggctcccctcttgagctggaacgcctgaaactggagcctcacgaagggctgctgctccgcttcccctacgcggcctgacttcagcctgacatggacccactacccttctcctttccttcccaggccctttggcttctgatttttctcttttttaaaaacaaacaaacaaactgttgcagattatgagtgaacccccaaatagggtgttttctgccttcaaataaaagtcacccctgcatggtgaa

SEQ ID NO: 55558 - DNA, 684 bp, Homo sapiens
ggttcaagtgatcctccctcctcagcctccccagtatctgggactatagggatgtaacactacacccagctaatttttaaaaattttgtagtagagatgagggctcattatgttgctgaggctggtttcaaatgcctgggctcaagcaatcctcttggccttgacctcccagactgctggaattacagatgtgagccaccatgcctgaccccaggcctttttaaagtcctattttctctgcttttcagcctatggaggctccagtcatgctgtgggatgagtccagcttccctgacatcccaggggctgtaagtgccaacatgactgtgaagggccagagtgaagaccctggctccctcctttccttgttccggcggctgagtgaccagcggagtaaggagcgctccctactgcatggggacttccacgcgttctccgctgggcctggactcttctcctatatccgccactgggaccagaatgagcgttttctggtagtgcttaactttggggatgacttcagcctgacatggacccactacccttctcctttccttcccaggccctttggcttctgatttttctcttttttaaaaacaaacaaacaaactgttgcagattatgagtgaacccccaaatagggtgttttctgccttcaaataaaagtcacccctgcatggtgaa

SEQ ID NO: 55559 - DNA, 540 bp, Homo sapiens
agagtgaagacccttcacagtcatgttggcacttacagcccctgggatgtcagggaagctggactcatcccacagcatgactggagcctccataggctgtccaggaagggcagctgcatccaggccaatctcatccccgtagctgagtgaccagcggagtaaggagcgctccctactgcatggggacttccacgcgttctccgctgggcctggactcttctcctatatccgccactgggaccagaatgagcgttttctggtagtgcttaactttggggatgtgggcctctcggctggactgcaggcctccgacctgcctgccagcgccagcctgccagccaaggctgacctcctgctcagcacccagccaggacttcagcctgacatggacccactacccttctcctttccttcccaggccctttggcttctgatttttctcttttttaaaaacaaacaaacaaactgttgcagattatgagtgaacccccaaatagggtgttttctgccttcaaataaaagtcacccctgcatggtgaa

SEQ ID NO: 55560 - DNA, 1022 bp, Homo sapiens
  misc_feature (252)..(252): n is a, c, g, or t
ctctacaggatctgatggagaccaggctgagtgaccagcggagtaaggagcgctccctactgcatggggacttccacgcgttctccgctgggcctggactcttctcctatatccgccactgggaccagaatgagcgttttctggtagtgcttaactttggggatgtgggcctctcggctggactgcaggcctccgacctgcctgccagcgccagcctgccagccaaggctgacctcctgctcagcacccagncaggcctatggaggctccagtcatgctgtgggatgagtccagcttccctgacatcccaggggctgtaagtgccaacatgactgtgaagggccagagtgaagaccctggctccctcctttccttgttccggcggctgagtgaccagcggagtaaggagcgctccctactgcatggggacttccacgcgttctccgctgggcctggactcttctcctccgaccttcagcagatcctgagcctactcgaatccaacaaagacttgctgttgactagctcatacctgtctgattctggttctactggggagcatacaaaatccctagtcacacagtatttgaatgccactggcaatcgctggtgcagctggagtttgtctcaggcaaggctcctgacttccttcttgccggctcaacttctccgactctaccagctgatgctcttcaccctgccagggacccctgttttcagctacggggatgagattggcctggatgcagctgcccttcctggacaggccgtgaggagggctcccctcttgagctggaacgcctgaaactggagcctcacgaagggctgctgctccgcttcccctacgcggcctgacttcagcctgacatggacccactacccttctcctttccttcccaggccctttggcttctgatttttctcttttttaaaaacaaacaaacaaactgttgcagattatgagtgaacccccaaatagggtgttttctgccttcaaataaaagtcacccctgcatggtgaa

SEQ ID NO: 55561 - DNA, 390 bp, Homo sapiens
gaagaaaaggagaatgggggtgaagttccacagtgtgtgcaggactgccaggattccattcagcagcactggcctcttttcaaatctaaactgccctggggctatgctttgaatttcaatctttcatccttggccttgctctgagcagttattgtactcacaccttccccaggcctcaggaaactgggagaggggggatcttgactgacattttagatcctgtctgctgctcactgattatgactgtggacgcgtctccctgcttctctgggtctgtttcttcatctctaaaataggtatgctaacattccaatgctaagatgttacacgaagttatgtttatggacataccttttctctgggaaaacggtatgctcccgtctttacacc

SEQ ID NO: 55562 - DNA, 1939 bp, Homo sapiens
  misc_feature (17)..(18): n is a, c, g, or t
  misc_feature (31)..(31): n is a, c, g, or t
ctccccgtagaaccccnnctttcgaagcctnctttggcactgctggcctactggagatgcagtagccgaaactgcgcggaggcacagaggccggggagagcgttctgggtccgagggtccaggtaggggttgagccaccatctgaccgcaagctgcgtcgtgtcgccggttctgcaggcaccatgagccaggacaccgaggtggatatgaaggaggtggagctgaatgagttagagcccgagaagcagccgatgaacgcggcgtctggggcggccatgtccctggcgggagccgagaagaatggtctggtgaagatcaaggtggcggaagacgaggcggaggcggcagccgcggctaagttcacgggcctgtccaaggaggagctgctgaaggtggcaggcagccccggctgggtacgcacccgctgggcactgctgctgctcttctggctcggctggctcggcatgcttgctggtgccgtggtcataatcgtgcgagcgccgcgttgtcgcgagctaccggcgcagaagtggtggcacacgggcgccctctaccgcatcggcgaccttcaggccttccagggccacggcgcgggcaacctggcgggtctgaaggggcgtctcgattacctgagctctctgaaggtgaagggccttgtgctgggtccaattcacaagaaccagaaggatgatgtcgctcagactgacttgctgcagatcgaccccaattttggctccaaggaagattttgacagtctcttgcaatcggctaaaaaaaagagcatccgtgtcattctggaccttactcccaactaccggggtgagaactcgtggttctccactcaggttgacactgtggccaccaaggtgaaggatgctctggagttttggctgcaagctggcgtggatgggttccaggttcgggacatagagaatctgaaggatgcatcctcattcttggctgagtggcaaaatatcaccaagggcttcagtgaagacaggctcttgattgcggggactaactcctccgaccttcagcagatcctgagcctactcgaatccaacaaagacttgctgttgactagctcatacctgtctgattctggttctactggggagcatacaaaatccctagtcacacagtatttgaatgccactggcaatcgctggtgcagctggagtttgtctcaggcaaggctcctgacttccttcttgccggctcaacttctccgactctaccagctgatgctcttcaccctgccagggacccctgttttcagctacggggatgagattggcctggatgcagctgcccttcctggacagcctatggaggctccagtcatgctgtgggatgagtccagcttccctgacatcccaggggctgtaagtgccaacatgactgtgaagggccagagtgaagaccctggctccctcctttccttgttccggcggctgagtgaccagcggagtaaggagcgctccctactgcatggggacttccacgcgttctccgctgggcctggactcttctcctatatccgccactgggaccagaatgagcgttttctggtagtgcttaactttggggatgtgggcctctcggctggactgcaggcctccgacctgcctgccagcgccagcctgccagccaaggctgacctcctgctcagcacccagccaggccgtgaggagggctcccctcttgagctggaacgcctgaaactggagcctcacgaagggctgctgctccgcttcccctacgcggcctgacttcagcctgacatggacccactacccttctcctttccttcccaggccctttggcttctgatttttctcttttttaaaaacaaacaaacaaactgttgcagattatgagtgaacccccaaatagggtgttttctgccttcaaataaaagtcacccctgcatggtgaa

SEQ ID NO: 55563 - DNA, 2219 bp, Homo sapiens
  misc_feature (1)..(1): n is a, c, g, or t
  misc_feature (4)..(4): n is a, c, g, or t
  misc_feature (21)..(21): n is a, c, g, or t
  misc_feature (33)..(33): n is a, c, g, or t
  misc_feature (42)..(42): n is a, c, g, or t
  misc_feature (129)..(130): n is a, c, g, or t
nttntgctgcagtcgttttantgatccccgtcngtcgccggntctgcaggcaccatgagccaggacacccgaggtggatatgaaggaggtggagctgaatgagttagagcccgagaagcagcccgatgnncgcggcgtctggggcggccatgtccctggcgggagccgagaagaatggtctggtgaagatcaaggtggcaaaagacgaggagatgcagtagccgaaactgcgcggaggcacagaggccggggagagcgttctgggtccgagggtccaggtaggggttgagccaccatctgaccgcaagctgcgtcgtgtcgccggttctgcaggcaccatgagccaggacaccgaggtggatatgaaggaggtggagctgaatgagttagagcccgagaagcagccgatgaacgcggcgtctggggcggccatgtccctggcgggagccgagaagaatggtctggtgaagatcaaggtggcggaagacgaggcggaggcggcagccgcggctaagttcacgggcctgtccaaggaggagctgctgaaggtggcaggcagccccggctgggtacgcacccgctgggcactgctgctgctcttctggctcggctggctcggcatgcttgctggtgccgtggtcataatcgtgcgagcgccgcgttgtcgcgagctaccggcgcagaagtggtggcacacgggcgccctctaccgcatcggcgaccttcaggccttccagggccacggcgcgggcaacctggcgggtctgaaggggcgtctcgattacctgagctctctgaaggtgaagggccttgtgctgggtccaattcacaagaaccagaaggatgatgtcgctcagactgacttgctgcagatcgaccccaattttggctccaaggaagattttgacagtctcttgcaatcggctaaaaaaaagagcatccgtgtcattctggaccttactcccaactaccggggtgagaactcgtggttctccactcaggttgacactgtggccaccaaggtgaaggcctcaggaaactgggagaggggggatcttgactgacattttagatcctgtctgctgctcactgattatgactgtggacgcgtctccctgcttctctgggtctgtttcttcatctctaaaataggatgctctggagttttggctgcaagctggcgtggatgggttccaggttcgggacatagagaatctgaaggatgcatcctcattcttggctgagtggcaaaatatcaccaagggcttcagtgaagacaggctcttgattgcggggactaactcctccgaccttcagcagatcctgagcctactcgaatccaacaaagacttgctgttgactagctcatacctgtctgattctggttctactggggagcatacaaaatccctagtcacacagtatttgaatgccactggcaatcgctggtgcagctggagtttgtctcaggcaaggctcctgacttccttcttgccggctcaacttctccgactctaccagctgatgctcttcaccctgccagggacccctgttttcagctacggggatgagattggcctggatgcagctgcccttcctggacagcctatggaggctccagtcatgctgtgggatgagtccagcttccctgacatcccaggggctgtaagtgccaacatgactgtgaagggccagagtgaagaccctggctccctcctttccttgttccggcggctgagtgaccagcggagtaaggagcgctccctactgcatggggacttccacgcgttctccgctgggcctggactcttctcctatatccgccactgggaccagaatgagcgttttctggtagtgcttaactttggggatgtgggcctctcggctggactgcaggcctccgacctgcctgccagcgccagcctgccagccaaggctgacctcctgctcagcacccagccaggccgtgaggagggctcccctcttgagctggaacgcctgaaactggagcctcacgaagggctgctgctccgcttcccctacgcggcctgacttcagcctgacatggacccactacccttctcctttccttcccaggccctttggcttctgatttttctcttttttaaaaacaaacaaacaaactgttgcagattatgagtgaacccccaaatagggtgttttctgccttcaaataaaagtcacccctgcatggtgaa

SEQ ID NO: 55564 - DNA, 1887 bp, Homo sapiens
  misc_feature (17)..(18): n is a, c, g, or t
  misc_feature (31)..(31): n is a, c, g, or t
ctccccgtagaaccccnnctttcgaagcctnctttggcactgctggcctactggagatgcagtagccgaaactgcgcggaggcacagaggccggggagagcgttctgggtccgagggtccaggtaggggttgagccaccatctgaccgcaagctgcgtcgtgtcgccggttctgcaggcaccatgagccaggacaccgaggtggatatgaaggaggtggagctgaatgagttagagcccgagaagcagccgatgaacgcggcgtctggggcggccatgtccctggcgggagccgagaagaatggtctggtgaagatcaaggtggcggaagacgaggcggaggcggcagccgcggctaagttcacgggcctgtccaaggaggagctgctgaaggtggcaggcagccccggctgggtacgcacccgctgggcactgctgctgctcttctggctcggctggctcggcatgcttgctggtgccgtggtcataatcgtgcgagcgccgcgttgtcgcgagctaccggcgcagaagtggtggcacacgggcgccctctaccgcatcggcgaccttcaggccttccagggccacggcgcgggcaacctggcgggtctgaaggggcgtctcgattacctgagctctctgaaggtgaagggccttgtgctgggtccaattcacaagaaccagaaggatgatgtcgctcagactgacttgctgcagatcgaccccaattttggctccaaggaagattttgacagtctcttgcaatcggctaaaaaaaagagcatccgtgtcattctggaccttactcccaactaccggggtgagaactcgtggttctccactcaggttgacactgtggccaccaaggtgaaggatgctctggagttttggctgcaagctggcgtggatgggttccaggttcgggacatagagaatctgaaggatgcatcctcattcttggctgagtggcaaaatatcaccaagggcttcagtgaagacaggctcttgattgcggggactaactcctccgaccttcagcagatcctgagcctactcgaatccaacaaagacttgctgttgactagctcatacctgtctgattctggttctactggggagcatacaaaatcttgtctcaggcaaggctcctgacttccttcttgccggctcaacttctccgactctaccagctgatgctcttcaccctgccagggacccctgttttcagctacggggatgagattggcctggatgcagctgcccttcctggacagcctatggaggctccagtcatgctgtgggatgagtccagcttccctgacatcccaggggctgtaagtgccaacatgactgtgaagggccagagtgaagaccctggctccctcctttccttgttccggcggctgagtgaccagcggagtaaggagcgctccctactgcatggggacttccacgcgttctccgctgggcctggactcttctcctatatccgccactgggaccagaatgagcgttttctggtagtgcttaactttggggatgtgggcctctcggctggactgcaggcctccgacctgcctgccagcgccagcctgccagccaaggctgacctcctgctcagcacccagccaggccgtgaggagggctcccctcttgagctggaacgcctgaaactggagcctcacgaagggctgctgctccgcttcccctacgcggcctgacttcagcctgacatggacccactacccttctcctttccttcccaggccctttggcttctgatttttctcttttttaaaaacaaacaaacaaactgttgcagattatgagtgaacccccaaatagggtgttttctgccttcaaataaaagtcacccctgcatggtgaa

SEQ ID NO: 55565 - DNA, 1967 bp, Homo sapiens
  misc_feature (17)..(18): n is a, c, g, or t
  misc_feature (31)..(31): n is a, c, g, or t
ctccccgtagaaccccnnctttcgaagcctnctttggcactgctggcctactggagatgcagtagccgaaactgcgcggaggcacagaggccggggagagcgttctgggtccgagggtccaggtaggggttgagccaccatctgaccgcaagctgcgtcgtgtcgccggttctgcaggcaccatgagccaggacaccgaggtggatatgaaggaggtggagctgaatgagttagagcccgagaagcagccgatgaacgcggcgtctggggcggccatgtccctggcgggagccgagaagaatggtctggtgaagatcaaggtggcggaagacgaggcggaggcggcagccgcggctaagttcacgggcctgtccaaggaggagctgctgaaggtggcaggcagccccggctgggtacgcacccgctgggcactgctgctgctcttctggctcggctggctcggcatgcttgctggtgccgtggtcataatcgtgcgagcgccgcgttgtcgcgagctaccggcgcagaagtggtggcacacgggcgccctctaccgcatcggcgaccttcaggccttccagggccacggcgcgggcaacctggcgggtctgaaggggcgtctcgattacctgagctctctgaaggtgaagggccttgtgctgggtccaattcacaagaaccagaaggatgatgtcgctcagactgacttgctgcagatcgaccccaattttggctccaaggaagattttgacagtctcttgcaatcggctaaaaaaaagagcatccgtgtcattctggaccttactcccaactaccggggtgagaactcgtggttctccactcaggttgacactgtggccaccaaggtgaaggatgctctggagttttggctgcaagctggcgtggatgggttccaggttcgggacatagagaatctgaaggatgcatcctcattcttggctgagtggcaaaatatcaccaagggcttcagtgaagacaggctcttgattgcggggactaactcctccgaccttcagcagatcctgagcctactcgaatccaacaaagacttgctgttgactagctcatacctgtctgattctggttctactggggagcatacaaaatccctagtcacacagtatttgaatgccactggcaatcgctggtgcagctggagtttgtctcaggcaaggctcctgacttccttcttgccggctcaacttctccgactctaccagctgatgctcttcaccctgccagggacccctgttttcagctacggggatgagattggcctggatgcagctgcccttcctggacagcctatggaggctccagtcatgctgtgggatgagtccagcttccctgacatcccaggggctgtaagtgccaacatgactgtgaagggccagagtgaagaccctggctccctcctttccttgttccggcggctgagtgaccagcggagtaaggagcgctccctactgcatggggacttccacgcgttctccgctgggcctggactcttctcctatatccgccactgggaccagaatgagcgttttctggtagtgcttaactttggggatgtgggcctctcggctggactgcaggcctccgacctgcctgccagcgccagcctgccagccaaggctgacctcctgctcagcacccagccaggccgtgaggagggctcccctcttgagctggaacgcctgaaactggagcctcacgaagggctgctgctccgcttcccctacgcggcctgacttcagcctgacatggacccactacccttctcctttccttcccaggccctttggcttctgatttttctcttttttaaaaacaaacaaacaaactgttgcagattatgagtgaacccccaaatagggtgttttctgccttcaaataaaagtcacccctgcatggtgaaaaaaacaacacaaaaaaaaaccggggtt

SEQ ID NO: 55566 - DNA, 1971 bp, Homo sapiens
  misc_feature (17)..(18): n is a, c, g, or t
  misc_feature (31)..(31): n is a, c, g, or t
ctccccgtagaaccccnnctttcgaagcctnctttggcactgctggcctactggagatgcagtagccgaaactgcgcggaggcacagaggccggggagagcgttctgggtccgagggtccaggtaggggttgagccaccatctgaccgcaagctgcgtcgtgtcgccggttctgcaggcaccatgagccaggacaccgaggtggatatgaaggaggtggagctgaatgagttagagcccgagaagcagccgatgaacgcggcgtctggggcggccatgtccctggcgggagccgagaagaatggtctggtgaagatcaaggtggcggaagacgaggcggaggcggcagccgcggctaagttcacgggcctgtccaaggaggagctgctgaaggtggcaggcagccccggctgggtacgcacccgctgggcactgctgctgctcttctggctcggctggctcggcatgcttgctggtgccgtggtcataatcgtgcgagcgccgcgttgtcgcgagctaccggcgcagaagtggtggcacacgggcgccctctaccgcatcggcgaccttcaggccttccagggccacggcgcgggcaacctggcgggtctgaaggggcgtctcgattacctgagctctctgaaggtgaagggccttgtgctgggtccaattcacaagaaccagaaggatgatgtcgctcagactgacttgctgcagatcgaccccaattttggctccaaggaagattttgacagtctcttgcaatcggctaaaaaaaagagcatccgtgtcattctggaccttactcccaactaccggggtgagaactcgtggttctccactcaggttgacactgtggccaccaaggtgaaggatgctctggagttttggctgcaagctggcgtggatgggttccaggttcgggacatagagaatctgaaggatgcatcctcattcttggctgagtggcaaaatatcaccaagggcttcagtgaagacaggctcttgattgcggggactaactcctccgaccttcagcagatcctgagcctactcgaatccaacaaagacttgctgttgactagctcatacctgtctgattctggttctactggggagcatacaaaatccctagtcacacagtatttgaatgccactggcaatcgctggtgcagctggagtttgtctcaggcaaggctcctgacttccttcttgccggctcaacttctccgactctaccagctgatgctcttcaccctgccagggacccctgttttcagctacggggatgagattggcctggatgcagctgcccttcctggacagcctatggaggctccagtcatgctgtgggatgagtccagcttccctgacatcccaggggctgtaagtgccaacatgactgtgaagggccagagtgaagaccctggctccctcctttccttgttccggcggctgagtgaccagcggagtaaggagcgctccctactgcatggggacttccacgcgttctccgctgggcctggactcttctcctatatccgccactgggaccagaatgagcgttttctggtagtgcttaactttggggatgtgggcctctcggctggactgcaggcctccgacctgcctgccagcgccagcctgccagccaaggctgacctcctgctcagcacccagccaggccgtgaggagggctcccctcttgagctggaacgcctgaaactggagcctcacgaagggctgctgctccgcttcccctacgcggcctgacttcagcctgacatggacccactacccttctcctttccttcccaggccctttggcttctgatttttctcttttttaaaaacaaacaaacaaactgttgcagattatgagtgaacccccaaatagggtgttttctgccttcaaataaaagtcacccctgcatggtgaagtcttccctctgcttctctcatagcaggaatt

SEQ ID NO: 55567 - DNA, 2149 bp, Homo sapiens
  misc_feature (17)..(18): n is a, c, g, or t
  misc_feature (31)..(31): n is a, c, g, or t
ctccccgtagaaccccnnctttcgaagcctnctttggcactgctggcctactggagatgcagtagccgaaactgcgcggaggcacagaggccggggagagcgttctgggtccgagggtccaggtaggggttgagccaccatctgaccgcaagctgcgtcgtgtcgccggttctgcaggcaccatgagccaggacaccgaggtggatatgaaggaggtggagctgaatgagttagagcccgagaagcagccgatgaacgcggcgtctggggcggccatgtccctggcgggagccgagaagaatggtctggtgaagatcaaggtggcggaagacgaggcggaggcggcagccgcggctaagttcacgggcctgtccaaggaggagctgctgaaggtggcaggcagccccggctgggtacgcacccgctgggcactgctgctgctcttctggctcggctggctcggcatgcttgctggtgccgtggtcataatcgtgcgagcgccgcgttgtcgcgagctaccggcgcagaagtggtggcacacgggcgccctctaccgcatcggcgaccttcaggccttccagggccacggcgcgggcaacctggcgggtctgaaggggcgtctcgattacctgagctctctgaaggtgaagggccttgtgctgggtccaattcacaagaaccagaaggatgatgtcgctcagactgacttgctgcagatcgaccccaattttggctccaaggaagattttgacagtctcttgcaatcggctaaaaaaaagagcatccgtgtcattctggaccttactcccaactaccggggtgagaactcgtggttctccactcaggttgacactgtggccaccaaggtgaaggatgctctggagttttggctgcaagctggcgtggatgggttccaggttcgggacatagagaatctgaaggatgcatcctcattcttggctgagtggcaaaatatcaccaagggcttcagtgaagacaggctcttgattgcggggactaactcctccgaccttcagcagatcctgagcctactcgaatccaacaaagacttgctgttgactagctcatacctgtctgattctggttctactggggagcatacaaaatccctagtcacacagtatttgaatgccactggcaatcgctggtgcagctggagtttgtctcaggcaaggctcctgacttccttcttgccggctcaacttctccgactctaccagctgatgctcttcaccctgccagggacccctgttttcagctacggggatgagattggcctggatgcagctgcccttcctggacagcctatggaggctccagtcatgctgtgggatgagtccagcttccctgacatcccaggggctgtaagtgccaacatgactgtgaagggccagagtgaagaccctggctccctcctttccttgttccggcggctgagtgaccagcggagtaaggagcgctccctactgcatggggacttccacgcgttctccgctgggcctggactcttctcctatatccgccactgggaccagaatgagcgttttctggtagtgcttaactttggggatgtgggcctctcggctggactgcaggcctccgacctgcctgccagcgccagcctgccagccaaggctgacctcctgctcagcacccagccaggccgtgaggagggctcccctcttgagctggaacgcctgaaactggagcctcacgaagggctgctgctccgcttcccctacgcggcctgacttcagcctgacatggacccactacccttctcctttccttcccaggccctttggcttctgatttttctcttttttaaaaacaaacaaacaaactgttgcagattatgagtgaacccccaaatagggtgttttctgccttcaaataaaagtcacccctgcatggtgaaaaaaaaaaaaactaactacaataataaaaaaaaaagggggggggggtaaaaaattttccgggggggggccaaagtttagggggtcccggttttttgtgggaaaggggggcccttaggggggcgttataaaacagggagggcggggttaaaaaggtggggggggggaatcggcgagggggatttgggagaggacctcgggggggaaatggc

SEQ ID NO: 55568 - DNA, 2143 bp, Homo sapiens
aatacgctagtagaggctgggataaaatcggacgaggaccagtgcatgtggcaggagcggtgagatcactgcctcacggcgatcctggactgacggtcacgactgcctaccctctaaccctgttctgagctgccccttgcccacacaccccaaacctgtgtgcaggatccgcctccatggagctacagcctcctgaagcctcgatcgccgtcgtgtcgattccgcgccagttgcctggctcacattcggaggctggtgtccagggtctcagcgcgggggacgactcagagacggggtctgactgtgttacccaggctggtcttcaactcttggcctcaagtgatcctcctgccttagcttccaagaatgctgaggttacaggcaccatgagccaggacaccgaggtggatatgaaggaggtggagctgaatgagttagagcccgagaagcagccgatgaacgcggcgtctggggcggccatgtccctggcgggagccgagaagaatggtctggtgaagatcaaggtggcggaagacgaggcggaggcggcagccgcggctaagttcacgggcctgtccaaggaggagctgctgaaggtggcaggcagccccggctgggtacgcacccgctgggcactgctgctgctcttctggctcggctggctcggcatgcttgctggtgccgtggtcataatcgtgcgagcgccgcgttgtcgcgagctaccggcgcagaagtggtggcacacgggcgccctctaccgcatcggcgaccttcaggccttccagggccacggcgcgggcaacctggcgggtctgaaggggcgtctcgattacctgagctctctgaaggtgaagggccttgtgctgggtccaattcacaagaaccagaaggatgatgtcgctcagactgacttgctgcagatcgaccccaattttggctccaaggaagattttgacagtctcttgcaatcggctaaaaaaaagagcatccgtgtcattctggaccttactcccaactaccggggtgagaactcgtggttctccactcaggttgacactgtggccaccaaggtgaaggatgctctggagttttggctgcaagctggcgtggatgggttccaggttcgggacatagagaatctgaaggatgcatcctcattcttggctgagtggcaaaatatcaccaagggcttcagtgaagacaggctcttgattgcggggactaactcctccgaccttcagcagatcctgagcctactcgaatccaacaaagacttgctgttgactagctcatacctgtctgattctggttctactggggagcatacaaaatccctagtcacacagtatttgaatgccactggcaatcgctggtgcagctggagtttgtctcaggcaaggctcctgacttccttcttgccggctcaacttctccgactctaccagctgatgctcttcaccctgccagggacccctgttttcagctacggggatgagattggcctggatgcagctgcccttcctggacagcctatggaggctccagtcatgctgtgggatgagtccagcttccctgacatcccaggggctgtaagtgccaacatgactgtgaagggccagagtgaagaccctggctccctcctttccttgttccggcggctgagtgaccagcggagtaaggagcgctccctactgcatggggacttccacgcgttctccgctgggcctggactcttctcctatatccgccactgggaccagaatgagcgttttctggtagtgcttaactttggggatgtgggcctctcggctggactgcaggcctccgacctgcctgccagcgccagcctgccagccaaggctgacctcctgctcagcacccagccaggccgtgaggagggctcccctcttgagctggaacgcctgaaactggagcctcacgaagggctgctgctccgcttcccctacgcggcctgacttcagcctgacatggacccactacccttctcctttccttcccaggccctttggcttctgatttttctcttttttaaaaacaaacaaacaaactgttgcagattatgagtgaacccccaaatagggtgttttctgccttcaaataaaagtcacccctgcatggtgaa

SEQ ID NO: 55569 - DNA, 2236 bp, Homo sapiens
aatacgctagtagaggctgggataaaatcggacgaggaccagtgcatgtggcaggagcggtgagatcactgcctcacggcgatcctggactgacggtcacgactgcctaccctctaaccctgttctgagctgccccttgcccacacaccccaaacctgtgtgcaggatccgcctccatggagctacagcctcctgaagcctcgatcgccgtcgtgtcgattccgcgccagttgcctggctcacattcggaggctggtgtccagggtctcagcgcgggggacgactcagagttggggtctcactgtgttgcccagactggtctcgaactcttggcctcaggtgatcctcttccctcagcttcccagaatgccgagatgatagagacggggtctgactgtgttacccaggctggtcttcaactcttggcctcaagtgatcctcctgccttagcttccaagaatgctgaggttacaggcaccatgagccaggacaccgaggtggatatgaaggaggtggagctgaatgagttagagcccgagaagcagccgatgaacgcggcgtctggggcggccatgtccctggcgggagccgagaagaatggtctggtgaagatcaaggtggcggaagacgaggcggaggcggcagccgcggctaagttcacgggcctgtccaaggaggagctgctgaaggtggcaggcagccccggctgggtacgcacccgctgggcactgctgctgctcttctggctcggctggctcggcatgcttgctggtgccgtggtcataatcgtgcgagcgccgcgttgtcgcgagctaccggcgcagaagtggtggcacacgggcgccctctaccgcatcggcgaccttcaggccttccagggccacggcgcgggcaacctggcgggtctgaaggggcgtctcgattacctgagctctctgaaggtgaagggccttgtgctgggtccaattcacaagaaccagaaggatgatgtcgctcagactgacttgctgcagatcgaccccaattttggctccaaggaagattttgacagtctcttgcaatcggctaaaaaaaagagcatccgtgtcattctggaccttactcccaactaccggggtgagaactcgtggttctccactcaggttgacactgtggccaccaaggtgaaggatgctctggagttttggctgcaagctggcgtggatgggttccaggttcgggacatagagaatctgaaggatgcatcctcattcttggctgagtggcaaaatatcaccaagggcttcagtgaagacaggctcttgattgcggggactaactcctccgaccttcagcagatcctgagcctactcgaatccaacaaagacttgctgttgactagctcatacctgtctgattctggttctactggggagcatacaaaatccctagtcacacagtatttgaatgccactggcaatcgctggtgcagctggagtttgtctcaggcaaggctcctgacttccttcttgccggctcaacttctccgactctaccagctgatgctcttcaccctgccagggacccctgttttcagctacggggatgagattggcctggatgcagctgcccttcctggacagcctatggaggctccagtcatgctgtgggatgagtccagcttccctgacatcccaggggctgtaagtgccaacatgactgtgaagggccagagtgaagaccctggctccctcctttccttgttccggcggctgagtgaccagcggagtaaggagcgctccctactgcatggggacttccacgcgttctccgctgggcctggactcttctcctatatccgccactgggaccagaatgagcgttttctggtagtgcttaactttggggatgtgggcctctcggctggactgcaggcctccgacctgcctgccagcgccagcctgccagccaaggctgacctcctgctcagcacccagccaggccgtgaggagggctcccctcttgagctggaacgcctgaaactggagcctcacgaagggctgctgctccgcttcccctacgcggcctgacttcagcctgacatggacccactacccttctcctttccttcccaggccctttggcttctgatttttctcttttttaaaaacaaacaaacaaactgttgcagattatgagtgaacccccaaatagggtgttttctgccttcaaataaaagtcacccctgcatggtgaa

SEQ ID NO: 55570 - DNA, 2332 bp, Homo sapiens
aatacgctagtagaggctgggataaaatcggacgaggaccagtgcatgtggcaggagcggtgagatcactgcctcacggcgatcctggactgacggtcacgactgcctaccctctaaccctgttctgagctgccccttgcccacacaccccaaacctgtgtgcaggatccgcctccatggagctacagcctcctgaagcctcgatcgccgtcgtgtcgattccgcgccagttgcctggctcacattcggaggctggtgtccagggtctcagcgcgggggacgactcagagttggggtctcactgtgttgcccagactggtctcgaactcttggcctcaggtgatcctcttccctcagcttcccagaatgccgagatgatagagacggggtctgactgtgttacccaggctggtcttcaactcttggcctcaagtgatcctcctgccttagcttccaagaatgctgaggttacagtagaaacggggtttcaccatgttagccaggctgatattgaattcctgacctcaattgatccgactgcctcggcctccggaagtgctgggattacaggcaccatgagccaggacaccgaggtggatatgaaggaggtggagctgaatgagttagagcccgagaagcagccgatgaacgcggcgtctggggcggccatgtccctggcgggagccgagaagaatggtctggtgaagatcaaggtggcggaagacgaggcggaggcggcagccgcggctaagttcacgggcctgtccaaggaggagctgctgaaggtggcaggcagccccggctgggtacgcacccgctgggcactgctgctgctcttctggctcggctggctcggcatgcttgctggtgccgtggtcataatcgtgcgagcgccgcgttgtcgcgagctaccggcgcagaagtggtggcacacgggcgccctctaccgcatcggcgaccttcaggccttccagggccacggcgcgggcaacctggcgggtctgaaggggcgtctcgattacctgagctctctgaaggtgaagggccttgtgctgggtccaattcacaagaaccagaaggatgatgtcgctcagactgacttgctgcagatcgaccccaattttggctccaaggaagattttgacagtctcttgcaatcggctaaaaaaaagagcatccgtgtcattctggaccttactcccaactaccggggtgagaactcgtggttctccactcaggttgacactgtggccaccaaggtgaaggatgctctggagttttggctgcaagctggcgtggatgggttccaggttcgggacatagagaatctgaaggatgcatcctcattcttggctgagtggcaaaatatcaccaagggcttcagtgaagacaggctcttgattgcggggactaactcctccgaccttcagcagatcctgagcctactcgaatccaacaaagacttgctgttgactagctcatacctgtctgattctggttctactggggagcatacaaaatccctagtcacacagtatttgaatgccactggcaatcgctggtgcagctggagtttgtctcaggcaaggctcctgacttccttcttgccggctcaacttctccgactctaccagctgatgctcttcaccctgccagggacccctgttttcagctacggggatgagattggcctggatgcagctgcccttcctggacagcctatggaggctccagtcatgctgtgggatgagtccagcttccctgacatcccaggggctgtaagtgccaacatgactgtgaagggccagagtgaagaccctggctccctcctttccttgttccggcggctgagtgaccagcggagtaaggagcgctccctactgcatggggacttccacgcgttctccgctgggcctggactcttctcctatatccgccactgggaccagaatgagcgttttctggtagtgcttaactttggggatgtgggcctctcggctggactgcaggcctccgacctgcctgccagcgccagcctgccagccaaggctgacctcctgctcagcacccagccaggccgtgaggagggctcccctcttgagctggaacgcctgaaactggagcctcacgaagggctgctgctccgcttcccctacgcggcctgacttcagcctgacatggacccactacccttctcctttccttcccaggccctttggcttctgatttttctcttttttaaaaacaaacaaacaaactgttgcagattatgagtgaacccccaaatagggtgttttctgccttcaaataaaagtcacccctgcatggtgaa

SEQ ID NO: 55571 - DNA, 2122 bp, Homo sapiens
aatacgctagtagaggctgggataaaatcggacgaggaccagtgcatgtggcaggagcggtgagatcactgcctcacggcgatcctggactgacggtcacgactgcctaccctctaaccctgttctgagctgccccttgcccacacaccccaaacctgtgtgcaggatccgcctccatggagctacagcctcctgaagcctcgatcgccgtcgtgtcgattccgcgccagttgcctggctcacattcggaggctggtgtccagggtctcagcgcgggggacgactcaggtactggatcccgggctaagctcgggaggaggtcccctttggtggggccatttcgggaaagtatgtcaggacgcaccatgagccaggacaccgaggtggatatgaaggaggtggagctgaatgagttagagcccgagaagcagccgatgaacgcggcgtctggggcggccatgtccctggcgggagccgagaagaatggtctggtgaagatcaaggtggcggaagacgaggcggaggcggcagccgcggctaagttcacgggcctgtccaaggaggagctgctgaaggtggcaggcagccccggctgggtacgcacccgctgggcactgctgctgctcttctggctcggctggctcggcatgcttgctggtgccgtggtcataatcgtgcgagcgccgcgttgtcgcgagctaccggcgcagaagtggtggcacacgggcgccctctaccgcatcggcgaccttcaggccttccagggccacggcgcgggcaacctggcgggtctgaaggggcgtctcgattacctgagctctctgaaggtgaagggccttgtgctgggtccaattcacaagaaccagaaggatgatgtcgctcagactgacttgctgcagatcgaccccaattttggctccaaggaagattttgacagtctcttgcaatcggctaaaaaaaagagcatccgtgtcattctggaccttactcccaactaccggggtgagaactcgtggttctccactcaggttgacactgtggccaccaaggtgaaggatgctctggagttttggctgcaagctggcgtggatgggttccaggttcgggacatagagaatctgaaggatgcatcctcattcttggctgagtggcaaaatatcaccaagggcttcagtgaagacaggctcttgattgcggggactaactcctccgaccttcagcagatcctgagcctactcgaatccaacaaagacttgctgttgactagctcatacctgtctgattctggttctactggggagcatacaaaatccctagtcacacagtatttgaatgccactggcaatcgctggtgcagctggagtttgtctcaggcaaggctcctgacttccttcttgccggctcaacttctccgactctaccagctgatgctcttcaccctgccagggacccctgttttcagctacggggatgagattggcctggatgcagctgcccttcctggacagcctatggaggctccagtcatgctgtgggatgagtccagcttccctgacatcccaggggctgtaagtgccaacatgactgtgaagggccagagtgaagaccctggctccctcctttccttgttccggcggctgagtgaccagcggagtaaggagcgctccctactgcatggggacttccacgcgttctccgctgggcctggactcttctcctatatccgccactgggaccagaatgagcgttttctggtagtgcttaactttggggatgtgggcctctcggctggactgcaggcctccgacctgcctgccagcgccagcctgccagccaaggctgacctcctgctcagcacccagccaggccgtgaggagggctcccctcttgagctggaacgcctgaaactggagcctcacgaagggctgctgctccgcttcccctacgcggcctgacttcagcctgacatggacccactacccttctcctttccttcccaggccctttggcttctgatttttctcttttttaaaaacaaacaaacaaactgttgcagattatgagtgaacccccaaatagggtgttttctgccttcaaataaaagtcacccctgcatggtgaa

SEQ ID NO: 55572 - DNA, 1855 bp, Homo sapiens
  misc_feature (17)..(18): n is a, c, g, or t
  misc_feature (31)..(31): n is a, c, g, or t
ctccccgtagaaccccnnctttcgaagcctnctttggcactgctggcctactggagatgcagtagccgaaactgcgcggaggcacagaggccggggagagcgttctgggtccgagggtccaggtaggggttgagccaccatctgaccgcaagctgcgtcgtgtcgccggttctgcaggcaccatgagccaggacaccgaggtggatatgaaggaggtggagctgaatgagttagagcccgagaagcagccgatgaacgcggcgtctggggcggccatgtccctggcgggagccgagaagaatggtctggtgaagatcaaggtggcggaagacgaggcggaggcggcagccgcggctaagttcacgggcctgtccaaggaggagctgctgaaggtggcaggcagccccggctgggtacgcacccgctgggcactgctgctgctcttctggctcggctggctcggcatgcttgctggtgccgtggtcataatcgtgcgagcgccgcgttgtcgcgagctaccggcgcagaagtggtggcacacgggcgccctctaccgcatcggcgaccttcaggccttccagggccacggcgcgggcaacctggcgggtctgaaggggcgtctcgattacctgagctctctgaaggtgaagggccttgtgctgggtccaattcacaagaaccagaaggatgatgtcgctcagactgacttgctgcagatcgaccccaattttggctccaaggaagattttgacagtctcttgcaatcggctaaaaaaaagagcatccgtgtcattctggaccttactcccaactaccggggtgagaactcgtggttctccactcaggttgacactgtggccaccaaggtgaaggatgctctggagttttggctgcaagctggcgtggatgggttccaggttcgggacatagagaatctgaaggatgcatcctcattcttggctgagtggcaaaatatcaccaagggcttcagtgaagacaggctcttgattgcggggactaactcctccgaccttcagcagatcctgagcctactcgaatccaacaaagacttgctgttgactagctcatacctgtctgattctggttctactggggagcatacaaaatccctagtcacacagtatttgaatgccactggcaatcgctggtgcagctggagtttgtctcaggcaaggctcctgacttccttcttgccggctcaacttctccgactctaccagctgatgctcttcaccctgccagggacccctgttttcagctacggggatgagattggcctggatgcagctgcccttcctggacagggccagagtgaagaccctggctccctcctttccttgttccggcggctgagtgaccagcggagtaaggagcgctccctactgcatggggacttccacgcgttctccgctgggcctggactcttctcctatatccgccactgggaccagaatgagcgttttctggtagtgcttaactttggggatgtgggcctctcggctggactgcaggcctccgacctgcctgccagcgccagcctgccagccaaggctgacctcctgctcagcacccagccaggccgtgaggagggctcccctcttgagctggaacgcctgaaactggagcctcacgaagggctgctgctccgcttcccctacgcggcctgacttcagcctgacatggacccactacccttctcctttccttcccaggccctttggcttctgatttttctcttttttaaaaacaaacaaacaaactgttgcagattatgagtgaacccccaaatagggtgttttctgccttcaaataaaagtcacccctgcatggtgaa

SEQ ID NO: 55573 - DNA, 2077 bp, Homo sapiens
aatacgctagtagaggctgggataaaatcggacgaggaccagtgcatgtggcaggagcggtgagatcactgcctcacggcgatcctggactgacggtcacgactgcctaccctctaaccctgttctgagctgccccttgcccacacaccccaaacctgtgtgcaggatccgcctccatggagctacagcctcctgaagcctcgatcgccgtcgtgtcgattccgcgccagttgcctggctcacattcggaggctggtgtccagggtctcagcgcgggggacgactcaggcaccatgagccaggacaccgaggtggatatgaaggaggtggagctgaatgagttagagcccgagaagcagccgatgaacgcggcgtctggggcggccatgtccctggcgggagccgagaagaatggtctggtgaagatcaattttcccccaaaaaaaaaaggggggggggtggcggaagacgaggcggaggcggcagccgcggctaagttcacgggcctgtccaaggaggagctgctgaaggtggcaggcagccccggctgggtacgcacccgctgggcactgctgctgctcttctggctcggctggctcggcatgcttgctggtgccgtggtcataatcgtgcgagcgccgcgttgtcgcgagctaccggcgcagaagtggtggcacacgggcgccctctaccgcatcggcgaccttcaggccttccagggccacggcgcgggcaacctggcgggtctgaaggggcgtctcgattacctgagctctctgaaggtgaagggccttgtgctgggtccaattcacaagaaccagaaggatgatgtcgctcagactgacttgctgcagatcgaccccaattttggctccaaggaagattttgacagtctcttgcaatcggctaaaaaaaagagcatccgtgtcattctggaccttactcccaactaccggggtgagaactcgtggttctccactcaggttgacactgtggccaccaaggtgaaggatgctctggagttttggctgcaagctggcgtggatgggttccaggttcgggacatagagaatctgaaggatgcatcctcattcttggctgagtggcaaaatatcaccaagggcttcagtgaagacaggctcttgattgcggggactaactcctccgaccttcagcagatcctgagcctactcgaatccaacaaagacttgctgttgactagctcatacctgtctgattctggttctactggggagcatacaaaatccctagtcacacagtatttgaatgccactggcaatcgctggtgcagctggagtttgtctcaggcaaggctcctgacttccttcttgccggctcaacttctccgactctaccagctgatgctcttcaccctgccagggacccctgttttcagctacggggatgagattggcctggatgcagctgcccttcctggacagcctatggaggctccagtcatgctgtgggatgagtccagcttccctgacatcccaggggctgtaagtgccaacatgactgtgaagggccagagtgaagaccctggctccctcctttccttgttccggcggctgagtgaccagcggagtaaggagcgctccctactgcatggggacttccacgcgttctccgctgggcctggactcttctcctatatccgccactgggaccagaatgagcgttttctggtagtgcttaactttggggatgtgggcctctcggctggactgcaggcctccgacctgcctgccagcgccagcctgccagccaaggctgacctcctgctcagcacccagccaggccgtgaggagggctcccctcttgagctggaacgcctgaaactggagcctcacgaagggctgctgctccgcttcccctacgcggcctgacttcagcctgacatggacccactacccttctcctttccttcccaggccctttggcttctgatttttctcttttttaaaaacaaacaaacaaactgttgcagattatgagtgaacccccaaatagggtgttttctgccttcaaataaaagtcacccctgcatggtgaa

SEQ ID NO: 55574 - DNA, 1370 bp, Homo sapiens
  misc_feature (17)..(18): n is a, c, g, or t
  misc_feature (31)..(31): n is a, c, g, or t
ctccccgtagaaccccnnctttcgaagcctnctttggcactgctggcctactggagatgcagtagccgaaactgcgcggaggcacagaggccggggagagcgttctgggtccgagggtccaggtaggggttgagccaccatctgaccgcaagctgcgtcgtgtcgccggttctgcaggcaccatgagccaggacaccgaggtggatatgaaggaggtggagctgaatgagttagagcccgagaagcagccgatgaacgcggcgtctggggcggccatgtccctggcgggagccgagaagaatggtctggtgaagatcaaggtggcggaagacgaggcggaggcggcagccgcggctaagttcacgggcctgtccaaggaggagctgctgaaggtggcaggcagccccggctgggtacgcacccgctgggcactgctgctgctcttctggctcggctggctcggcatgcttgctggtgccgtggtcataatcgtgcgagcgccgcgttgtcgcgagctaccggcgcagaagtggtggcacacgggcgccctctaccgcatcggcgaccttcaggccttccagggccacggcgcgggcaacctggcgggtctgaaggggcgtctcgattacctgagctctctgaaggtgaagggccttgtgctgggtccaattcacaagaaccagaaggatgatgtcgctcagactgacttgctgcagatcgaccccaattttggctccaaggaagattttgacagtctcttgcaatcggctaaaaaaaagagcatccgtgtcattctggaccttactcccaactaccggggtgagaactcgtggttctccactcaggttgacactgtggccaccaaggtgaaggatgctctggagttttggctgcaagctggcgtggatgggttccaggttcgggacatagagaatctgaaggatgcatcctcattcttggctgagtggcaaaatatcaccaagggcttcagtgaagacaggctcttgattgcggggactaactcctccgaccttcagcagatcctgagcctactcgaatccaacaaagacttgctgttgactagctcatacctgtctgattctggttctactggggagcatacaaaatccctagtcacacagtatttgaatgccactggcaatcgctggtgcagctggagtgtgtctcaggcaaggctcctgaccgcaagctgcgtcgtgtcgccggttctgcaggcaccatgagccaggacaccgaggtggatatgaaggaggtggagctgaatgagttagagcccgagaagcagccgatgaacgcggcgtctggggcggccatgtccctggcgggagccgagaagaatggtctggtga

SEQ ID NO: 55575 - DNA, 1088 bp, Homo sapiens
gaggatccccatcccaaagacaggtgataatgctggcgaggatatggagaaaagggaacccttgtacactgtgtggtgggattgtaaattagtacaaccactgtgaagaacagttcgcagttcctcgaaaatctaaaaatagatctaccatatgatccagtgatcttactgctgggtgtatatacccaaaagaaaggaaatcagtataccaaagagatatctgcactcccatgtttgttgcagcactgttcacaatagccaggatttgaaagcaacctaagtacccacctgcatttgaatgccactggcgatcgctggtgctgctggagtttgtctcaggcaaggctcctgacttccttcttgccggctcaacttctccgactctaccagctgatgctcttcaccctgccagggacccctgttttcagctacggggatgagattggcctggatgcagctgcccttcctggacagcctatggaggctccagtcatgctgtgggatgagtccagcttccctgacatcccaggggctgtaagtgccaacatgactgtgaagggccagagtgaagaccctggctccctcctttccttgttccggcggctgagtgaccagcggagtaaggagcgctccctactgcatggggacttccacgcgttctccgctgggcctggactcttctcctatatccgccactgggaccagaatgagcgttttctggtagtgcttaactttggggatgtgggcctctcggctggactgcaggcctccgacctgcctgccagcgccagcctgccagccaaggctgacctcctgctcagcacccagccaggccgtgaggagggctcccctcttgagctggaacgcctgaaactggagcctcacgaagggctgctgctccgcttcccctacgcggcctgacttcagcctgacatggacccactacccttctcctttccttcccaggccctttggcttctgatttttctcttttttaaaaacaaacaaacaaactgttgcagattatgagtgaacccccaaatagggtgttttctgccttcaaataaaagtcacccctgcatggtgaa

SEQ ID NO: 55576 - DNA, 1241 bp, Homo sapiens
  misc_feature (17)..(18): n is a, c, g, or t
  misc_feature (31)..(31): n is a, c, g, or t
ctccccgtagaaccccnnctttcgaagcctnctttggcactgctggcctactggagatgcagtagccgaaactgcgcggaggcacagaggccggggagagcgttctgggtccgagggtccaggtaggggttgagccaccatctgaccgcaagctgcgtcgtgtcgccggttctgcaggcaccatgagccaggacaccgaggtggatatgaaggaggtggagctgaatgagttagagcccgagaagcagccgatgaacgcggcgtctggggcggccatgtccctggcgggagccgagaagaatggtctggtgaagatcaaggtggcggaagacgaggcggaggcggcagccgcggctaagttcacgggcctgtccaaggaggagctgctgaaggtggcaggcagccccggctgggtacgcacccgctgggcactgctgctgctcttctggctcggctggctcggcatgcttgctggtgccgtggtcataatcgtgcgagcgccgcgttgtcgcgagctaccggcgcagaagtggtggcacacgggcgccctctaccgcatcggcgaccttcaggccttccagggccacggcgcgggcaacctggcgggtctgaaggggcgtctcgattacctgagctctctgaaggtgaagggccttgtgctgggtccaattcacaagaaccagaaggatgatgtcgctcagactgacttgctgcagatcgaccccaattttggctccaaggaagattttgacagtctcttgcaatcggctaaaaaaaagagcatccgtgtcattctggaccttactcccaactaccggggtgagaactcgtggttctccactcaggttgacactgtggccaccaaggtgaaggatgctctggagttttggctgcaagctggcgtggatgggttccaggttcgggacatagagaatctgaaggatgcatcctcattcttggctgagtggcaaaatatcaccaagggcttcagtgaagacaggctcttgattgcggggactaactcctccgaccttcagcagatcctgagcctactcgaatccaacaaagacttgctgttgactagctcatacctgtctgattctggttctactggggagcatacaaaatccctagtcacacagtattttggaaatgcccactgggccattcccttggttgccacctgggaagtttgtgtcttcagggccaagggcttccctggacttttcctttttttggcc

SEQ ID NO: 55577 - DNA, 857 bp, Homo sapiens
cgtcccctcacccgctgtttcagttctcccatctccctcagtgacctggatctgacctcacaccatcagcagggggcacccaccatgcacacctgtctcggagtaggcagctcagcctgggtcatggaacccaggctggagtgcagtggcatgatcttggttcattgcagcctccgcctcccaggccgaagtgatcatcccacctcagcctcctgagtagctgggatatgtaccatagataagcctatggaggctccagtcatgctgtgggatgagtccagcttccctgacatcccaggggctgtaagtgccaacatgactgtgaagggccagagtgaagaccctggctccctcctttccttgttccggcggctgagtgaccagcggagtaaggagcgctccctactgcatggggacttccacgcgttctccgctgggcctggactcttctcctatatccgccactgggaccagaatgagcgttttctggtagtgcttaactttggggatgtgggcctctcggctggactgcaggcctccgacctgcctgccagcgccagcctgccagccaaggctgacctcctgctcagcacccagccaggccgtgaggagggctcccctcttgagctggaacgcctgaaactggagcctcacgaagggctgctgctccgcttcccctacgcggcctgacttcagcctgacatggacccactacccttctcctttccttcccaggccctttggcttctgatttttctcttttttaaaaacaaacaaacaaactgttgcagattatgagtgaacccccaaatagggtgttttctgccttcaaataaaagtcacccctgcatggtgaa

SEQ ID NO: 55578 - DNA, 1181 bp, Homo sapiens
  misc_feature (1)..(1): n is a, c, g, or t
  misc_feature (4)..(4): n is a, c, g, or t
  misc_feature (21)..(21): n is a, c, g, or t
  misc_feature (33)..(33): n is a, c, g, or t
  misc_feature (42)..(42): n is a, c, g, or t
  misc_feature (129)..(130): n is a, c, g, or t
  misc_feature (1121)..(1122): n is a, c, g, or t
  misc_feature (1149)..(1149): n is a, c, g, or t
nttntgctgcagtcgttttantgatccccgtcngtcgccggntctgcaggcaccatgagccaggacacccgaggtggatatgaaggaggtggagctgaatgagttagagcccgagaagcagcccgatgnncgcggcgtctggggcggccatgtccctggcgggagccgagaagaatggtctggtgaagatcaaggtggcaaaagacgaggagatgcagtagccgaaactgcgcggaggcacagaggccggggagagcgttctgggtccgagggtccaggtaggggttgagccaccatctgaccgcaagctgcgtcgtgtcgccggttctgcaggcaccatgagccaggacaccgaggtggatatgaaggaggtggagctgaatgagttagagcccgagaagcagccgatgaacgcggcgtctggggcggccatgtccctggcgggagccgagaagaatggtctggtgaagatcaaggtggcggaagacgaggcggaggcggcagccgcggctaagttcacgggcctgtccaaggaggagctgctgaaggtggcaggcagccccggctgggtacgcacccgctgggcactgctgctgctcttctggctcggctggctcggcatgcttgctggtgccgtggtcataatcgtgcgagcgccgcgttgtcgcgagctaccggcgcagaagtggtggcacacgggcgccctctaccgcatcggcgaccttcaggccttccagggccacggcgcgggcaacctggcgggtctgaaggggcgtctcgattacctgagctctctgaaggtgaagggccttgtgctgggtccaattcacaagaaccagaaggatgatgtcgctcagactgacttgctgcagatcgaccccaattttggctccaaggaagattttgacagtctcttgcaatcggctaaaaaaaagagcatccgtgtcattctggaccttactcccaactaccggggtgagaactcgtggttctccactcaggttgacactgtggccaccaaggtgaagaggttgaaagggatgcctccgggaagtttttgggcttgcaaaacctgggccgtttggattgggggtttccaaaggtttcgggggaacaattannaggaaaatcccggaaaaggggattgcnaatcccctccaaatttcctttggggcttgaaa

SEQ ID NO: 55579 - DNA, 1132 bp, Homo sapiens
  misc_feature (1)..(1): n is a, c, g, or t
  misc_feature (4)..(4): n is a, c, g, or t
  misc_feature (21)..(21): n is a, c, g, or t
  misc_feature (33)..(33): n is a, c, g, or t
  misc_feature (42)..(42): n is a, c, g, or t
  misc_feature (129)..(130): n is a, c, g, or t
nttntgctgcagtcgttttantgatccccgtcngtcgccggntctgcaggcaccatgagccaggacacccgaggtggatatgaaggaggtggagctgaatgagttagagcccgagaagcagcccgatgnncgcggcgtctggggcggccatgtccctggcgggagccgagaagaatggtctggtgaagatcaaggtggcaaaagacgaggagatgcagtagccgaaactgcgcggaggcacagaggccggggagagcgttctgggtccgagggtccaggtaggggttgagccaccatctgaccgcaagctgcgtcgtgtcgccggttctgcaggcaccatgagccaggacaccgaggtggatatgaaggaggtggagctgaatgagttagagcccgagaagcagccgatgaacgcggcgtctggggcggccatgtccctggcgggagccgagaagaatggtctggtgaagatcaaggtggcggaagacgaggcggaggcggcagccgcggctaagttcacgggcctgtccaaggaggagctgctgaaggtggcaggcagccccggctgggtacgcacccgctgggcactgctgctgctcttctggctcggctggctcggcatgcttgctggtgccgtggtcataatcgtgcgagcgccgcgttgtcgcgagctaccggcgcagaagtggtggcacacgggcgccctctaccgcatcggcgaccttcaggccttccagggccacggcgcgggcaacctggcgggtctgaaggggcgtctcgattacctgagctctctgaaggtgaagggccttgtgctgggtccaattcacaagaaccagaaggatgatgtcgctcagactgacttgctgcagatcgaccccaattttggctccaaggaagattttgacagtctcttgcaatcggctaaaaaaaagagcatccgtgtcattctggaccttactcccaactaccggggtgagaactcgtggttctccactcaggttgacactgtggccaccaaggtgaagatgctctggagcttctggctgcagctgccgtgccatgcgctcccggtccgcgacctcccgcctctgccgctgctcctccccttgcctgctgccccctctccccc

SEQ ID NO: 55580 - DNA, 1018 bp, Homo sapiens
  misc_feature (1)..(1): n is a, c, g, or t
  misc_feature (4)..(4): n is a, c, g, or t
  misc_feature (21)..(21): n is a, c, g, or t
  misc_feature (33)..(33): n is a, c, g, or t
  misc_feature (42)..(42): n is a, c, g, or t
  misc_feature (129)..(130): n is a, c, g, or t
  misc_feature (1011)..(1011): n is a, c, g, or t
nttntgctgcagtcgttttantgatccccgtcngtcgccggntctgcaggcaccatgagccaggacacccgaggtggatatgaaggaggtggagctgaatgagttagagcccgagaagcagcccgatgnncgcggcgtctggggcggccatgtccctggcgggagccgagaagaatggtctggtgaagatcaaggtggcaaaagacgaggagatgcagtagccgaaactgcgcggaggcacagaggccggggagagcgttctgggtccgagggtccaggtaggggttgagccaccatctgaccgcaagctgcgtcgtgtcgccggttctgcaggcaccatgagccaggacaccgaggtggatatgaaggaggtggagctgaatgagttagagcccgagaagcagccgatgaacgcggcgtctggggcggccatgtccctggcgggagccgagaagaatggtctggtgaagatcaaggtggcggaagacgaggcggaggcggcagccgcggctaagttcacgggcctgtccaaggaggagctgctgaaggtggcaggcagccccggctgggtacgcacccgctgggcactgctgctgctcttctggctcggctggctcggcatgcttgctggtgccgtggtcataatcgtgcgagcgccgcgttgtcgcgagctaccggcgcagaagtggtggcacacgggcgccctctaccgcatcggcgaccttcaggccttccagggccacggcgcgggcaacctggcgggtctgaaggggcgtctcgattacctgagctctctgaaggtgaagggccttgtgctgggtccaattcacaagaaccagaaggatgatgtcgctcagactgacttgctgcagatcgaccccaattttggctccaaggaagattttgacagtctcttgcaatcggctaaaaaaaagaaagaagcaatcccgttgtcaattcctgggacccttaactccccaaacttacccgggggttgaagaaaactccctnggtttct

SEQ ID NO: 55581 - DNA, 1224 bp, Homo sapiens
aatacgctagtagaggctgggataaaatcggacgaggaccagtgcatgtggcaggagcggtgagatcactgcctcacggcgatcctggactgacggtcacgactgcctaccctctaaccctgttctgagctgccccttgcccacacaccccaaacctgtgtgcaggatccgcctccatggagctacagcctcctgaagcctcgatcgccgtcgtgtcgattccgcgccagttgcctggctcacattcggaggctggtgtccagggtctcagcgcgggggacgactcagagacggggtctgactgtgttacccaggctggtcttcaactcttggcctcaagtgatcctcctgccttagcttccaagaatgctgaggttacaggcaccatgagccaggacaccgaggtggatatgaaggaggtggagctgaatgagttagagcccgagaagcagccgatgaacgcggcgtctggggcggccatgtccctggcgggagccgagaagaatggtctggtgaagatcaaggtggcggaagacgaggcggaggcggcagccgcggctaagttcacgggcctgtccaaggaggagctgctgaaggtggcaggcagccccggctgggtacgcacccgctgggcactgctgctgctcttctggctcggctggctcggcatgcttgctggtgccgtggtcataatcgtgcgagcgccgcgttgtcgcgagctaccggcgcagaagtggtggcacacgggcgccctctaccgcatcggcgaccttcaggccttccagggccacggcgcgggcaacctggcgggtctgaaggggcgtctcgattacctgagctctctgaaggtgaagggccttgtgctgggtccaattcacaagaaccagaaggatgatgtcgctcagactgacttgctgcagatcgaccccaattttggctccaaggaagattttgacagtctcttgcaatcggctaaaaaaaagaagtgggtatcctggggttcccaaggaaacagctagaaaggacttggccagaggaaaagtaggctagaacttttgtctggtttcctgctaactggctctgagttttcctagggcaggtagaggggagatttgttagtcttcagcctaaaatggatttgtccagtcgtctgggggctttctacttggctgtggaatcttgagcaggtcatttaacttctgggcttcagtgcccttatttgca

SEQ ID NO: 55582 - DNA, 1158 bp, Homo sapiens
  misc_feature (1)..(1): n is a, c, g, or t
  misc_feature (4)..(4): n is a, c, g, or t
  misc_feature (21)..(21): n is a, c, g, or t
  misc_feature (33)..(33): n is a, c, g, or t
  misc_feature (42)..(42): n is a, c, g, or t
  misc_feature (129)..(130): n is a, c, g, or t
  misc_feature (1047)..(1047): n is a, c, g, or t
  misc_feature (1059)..(1059): n is a, c, g, or t
  misc_feature (1066)..(1066): n is a, c, g, or t
  misc_feature (1092)..(1092): n is a, c, g, or t
  misc_feature (1103)..(1103): n is a, c, g, or t
  misc_feature (1109)..(1110): n is a, c, g, or t
  misc_feature (1116)..(1116): n is a, c, g, or t
nttntgctgcagtcgttttantgatccccgtcngtcgccggntctgcaggcaccatgagccaggacacccgaggtggatatgaaggaggtggagctgaatgagttagagcccgagaagcagcccgatgnncgcggcgtctggggcggccatgtccctggcgggagccgagaagaatggtctggtgaagatcaaggtggcaaaagacgaggagatgcagtagccgaaactgcgcggaggcacagaggccggggagagcgttctgggtccgagggtccaggtaggggttgagccaccatctgaccgcaagctgcgtcgtgtcgccggttctgcaggcaccatgagccaggacaccgaggtggatatgaaggaggtggagctgaatgagttagagcccgagaagcagccgatgaacgcggcgtctggggcggccatgtccctggcgggagccgagaagaatggtctggtgaagatcaaggtggcggaagacgaggcggaggcggcagccgcggctaagttcacgggcctgtccaaggaggagctgctgaaggtggcaggcagccccggctgggtacgcacccgctgggcactgctgctgctcttctggctcggctggctcggcatgcttgctggtgccgtggtcataatcgtgcgagcgccgcgttgtcgcgagctaccggcgcagaagtggtggcacacgggcgccctctaccgcatcggcgaccttcaggccttccagggccacggcgcgggcaacctggcgggtctgaaggggcgtctcgattacctgagctctctgaaggtgaagggccttgtgctgggtccaattcacaagaaccagaaggatgatgtcgctcagactgacttgctgcagatcgaccccaattttggctccaaggaagattttgacagtctcttgcaatcggctaaaaaaaagagcatccgtgtcattctggaccttactcccaactaccggggtgagaactcgtggttctccactcaggttgacactgtggccaccaaggtgaagatgctctggagtttggtgnagctggcgttgntggttcnggttcgggactaagaatctgaggtgntcccatctggngggggnnattccnggttttgaaaggttttgggggaacccccacttattggcttta

SEQ ID NO: 55583 - DNA, 1443 bp, Homo sapiens
  misc_feature (1421)..(1421): n is a, c, g, or t
aagtcccagaggcctgagagggcaagccttggtgggggaaaaggcagaagttgtgactggctgcctctgagagtgcaagtagccatgcaaagttgggaaaaccagacggcggccggagccgtgaaccaggggcaaatggaggatggtgttggggtagtcactagcctgccggaatggaagaagaggggcgtttgggggcggtaaggcctaaaggacactggaggggcctcgggatttggggcaggatcacaggcctagtccacttaaaggtggctccgtgccaggccttcccagaatcaggttgaaaagaactttagggttagacaggttggagatgagaaattggaccatgcaggaagtactgtcggaggcgtgttcctgactttactaccctgagccgcccacggctggggcagtccccgaggttccaccttaaggggcgggccggggcggggctccgctgccccttcccagaggccgcgcctgctgctgagcagatgcagtagccgaaactgcgcggaggcacagaggccggggagagcgttctgggtccgagggtccaggtaggggttgagccaccatctgaccgcaagctgcgtcgtgtcgccggttctgcaggcaccatgagccaggacaccgaggtggatatgaaggaggtggagctgaatgagttagagcccgagaagcagccgatgaacgcggcgtctggggcggccatgtccctggcgggagccgagaagaatggtctggtgaagatcaaggtggcggaagacgaggcggaggcggcagccgcggctaagttcacgggcctgtccaaggaggagctgctgaaggtggcaggcagccccggctgggtacgcacccgctgggcactgctgctgctcttctggctcggctggctcggcatgcttgctggtgccgtggtcataatcgtgcgagcgccgcgttgtcgcgagctaccggcgcagaagtggtggcacacgggcgccctctaccgcatcggcgaccttcaggccttccagggccacggcgcgggcaacctggcgggtctgaaggggcgtctcgattacctgagctctctgaaggtgaagggccttgtgctgggtccaattcacaagaaccagaaggatgatgtcgctcagactgacttgctgcagatcgaccccaattttggctccaaggaagattttgacagtctcttgcaatcggctaaaaaaaagagcatccgtgtcattctggaccttactcccaactaccggggtgagaactcgtggttctccactcaggttgacactgtggccaccaaggtgaaggatgctctggagttttggctgcaagctggcgtggatgggttccaggttcgggacatagagaatctgaagatgatccattttggtggtgggaatttccagggttcgganacggctgtgggggaactccgct

SEQ ID NO: 55584 - DNA, 2281 bp, Homo sapiens
gaacttgcggcgcgaaaaaggcgcgcatgcgtcctacgggagcgtgctggctcaccgaccgcattgcggcttggttttctcacccagtgcatgtggcaggagcggtgagatcactgcctcacggcgatcctggactgacggtcacgactgcctaccctctaaccctgttctgagctgccccttgcccacacaccccaaacctgtgtgcaggatccgcctccatggagctacagcctcctgaagcctcgatcgccgtcgtgtcgattccgcgccagttgcctggctcacattcggaggctggtgtccagggtctcagcgcgggggacgactcagagttggggtctcactgtgttgcccagactggtctcgaactcttggcctcaggtgatcctcttccctcagcttcccagaatgccgagatgatagagacggggtctgactgtgttacccaggctggtcttcaactcttggcctcaagtgatcctcctgccttagcttccaagaatgctgaggttacaggcaccatgagccaggacaccgaggtggatatgaaggaggtggagctgaatgagttagagcccgagaagcagccgatgaacgcggcgtctggggcggccatgtccctggcgggagccgagaagaatggtctggtgaagatcaaggtggcggaagacgaggcggaggcggcagccgcggctaagttcacgggcctgtccaaggaggagctgctgaaggtggcaggcagccccggctgggtacgcacccgctgggcactgctgctgctcttctggctcggctggctcggcatgcttgctggtgccgtggtcataatcgtgcgagcgccgcgttgtcgcgagctaccggcgcagaagtggtggcacacgggcgccctctaccgcatcggcgaccttcaggccttccagggccacggcgcgggcaacctggcgggtctgaaggggcgtctcgattacctgagctctctgaaggtgaagggccttgtgctgggtccaattcacaagaaccagaaggatgatgtcgctcagactgacttgctgcagatcgaccccaattttggctccaaggaagattttgacagtctcttgcaatcggctaaaaaaaagagcatccgtgtcattctggaccttactcccaactaccggggtgagaactcgtggttctccactcaggttgacactgtggccaccaaggtgaaggatgctctggagttttggctgcaagctggcgtggatgggttccaggttcgggacatagagaatctgaaggatgcatcctcattcttggctgagtggcaaaatatcaccaagggcttcagtgaagacaggctcttgattgcggggactaactcctccgaccttcagcagatcctgagcctactcgaatccaacaaagacttgctgttgactagctcatacctgtctgattctggttctactggggagcatacaaaatccctagtcacacagtatttgaatgccactggcaatcgctggtgcagctggagtttgtctcaggcaaggctcctgacttccttcttgccggctcaacttctccgactctaccagctgatgctcttcaccctgccagggacccctgttttcagctacggggatgagattggcctggatgcagctgcccttcctggacagcctatggaggctccagtcatgctgtgggatgagtccagcttccctgacatcccaggggctgtaagtgccaacatgactgtgaagggccagagtgaagaccctggctccctcctttccttgttccggcggctgagtgaccagcggagtaaggagcgctccctactgcatggggacttccacgcgttctccgctgggcctggactcttctcctatatccgccactgggaccagaatgagcgttttctggtagtgcttaactttggggatgtgggcctctcggctggactgcaggcctccgacctgcctgccagcgccagcctgccagccaaggctgacctcctgctcagcacccagccaggccgtgaggagggctcccctcttgagctggaacgcctgaaactggagcctcacgaagggctgctgctccgcttcccctacgcggcctgacttcagcctgacatggacccactacccttctcctttccttcccaggccctttggcttctgatttttctcttttttaaaaacaaacaaacaaactgttgcagattatgagtgaacccccaaatagggtgttttctgccttcaaataaaagtcacccctgcatggtgaa

SEQ ID NO: 55585 - DNA, 2095 bp, Homo sapiens
  misc_feature (1)..(1): n is a, c, g, or t
  misc_feature (4)..(4): n is a, c, g, or t
  misc_feature (21)..(21): n is a, c, g, or t
  misc_feature (33)..(33): n is a, c, g, or t
  misc_feature (42)..(42): n is a, c, g, or t
  misc_feature (129)..(130): n is a, c, g, or t
nttntgctgcagtcgttttantgatccccgtcngtcgccggntctgcaggcaccatgagccaggacacccgaggtggatatgaaggaggtggagctgaatgagttagagcccgagaagcagcccgatgnncgcggcgtctggggcggccatgtccctggcgggagccgagaagaatggtctggtgaagatcaaggtggcaaaagacgaggagatgcagtagccgaaactgcgcggaggcacagaggccggggagagcgttctgggtccgagggtccaggtaggggttgagccaccatctgaccgcaagctgcgtcgtgtcgccggttctgcaggcaccatgagccaggacaccgaggtggatatgaaggaggtggagctgaatgagttagagcccgagaagcagccgatgaacgcggcgtctggggcggccatgtccctggcgggagccgagaagaatggtctggtgaagatcaaggtggcggaagacgaggcggaggcggcagccgcggctaagttcacgggcctgtccaaggaggagctgctgaaggtggcaggcagccccggctgggtacgcacccgctgggcactgctgctgctcttctggctcggctggctcggcatgcttgctggtgccgtggtcataatcgtgcgagcgccgcgttgtcgcgagctaccggcgcagaagtggtggcacacgggcgccctctaccgcatcggcgaccttcaggccttccagggccacggcgcgggcaacctggcgggtctgaaggggcgtctcgattacctgagctctctgaaggtgaagggccttgtgctgggtccaattcacaagaaccagaaggatgatgtcgctcagactgacttgctgcagatcgaccccaattttggctccaaggaagattttgacagtctcttgcaatcggctaaaaaaaagagcatccgtgtcattctggaccttactcccaactaccggggtgagaactcgtggttctccactcaggttgacactgtggccaccaaggtgaaggatgctctggagttttggctgcaagctggcgtggatgggttccaggttcgggacatagagaatctgaaggatgcatcctcattcttggctgagtggcaaaatatcaccaagggcttcagtgaagacaggctcttgattgcggggactaactcctccgaccttcagcagatcctgagcctactcgaatccaacaaagacttgctgttgactagctcatacctgtctgattctggttctactggggagcatacaaaatccctagtcacacagtatttgaatgccactggcaatcgctggtgcagctggagtttgtctcaggcaaggctcctgacttccttcttgccggctcaacttctccgactctaccagctgatgctcttcaccctgccagggacccctgttttcagctacggggatgagattggcctggatgcagctgcccttcctggacagcctatggaggctccagtcatgctgtgggatgagtccagcttccctgacatcccaggggctgtaagtgccaacatgactgtgaagggccagagtgaagaccctggctccctcctttccttgttccggcggctgagtgaccagcggagtaaggagcgctccctactgcatggggacttccacgcgttctccgctgggcctggactcttctcctatatccgccactgggaccagaatgagcgttttctggtagtgcttaactttggggatgtgggcctctcggctggactgcaggcctccgacctgcctgccagcgccagcctgccagccaaggctgacctcctgctcagcacccagccaggccgtgaggagggctcccctcttgagctggaacgcctgaaactggagcctcacgaagggctgctgctccgcttcccctacgcggcctgacttcagcctgacatggacccactacccttctcctttccttcccaggccctttggcttctgatttttctcttttttaaaaacaaacaaacaaactgttgcagattatgagtgaacccccaaatagggtgttttctgccttcaaataaaagtcacccctgcatggtgaa

SEQ ID NO: 55586 - DNA, 2072 bp, Homo sapiens
  misc_feature (17)..(18): n is a, c, g, or t
  misc_feature (31)..(31): n is a, c, g, or t
ctccccgtagaaccccnnctttcgaagcctnctttggcactgctggcctactggagatgcagtagccgaaactgcgcggaggcacagaggccggggagagcgttctgggtccgagggtccaggtaggggttgagccaccatctgaccgcaagctgcgtcgtgtcgccggttctgcaggcaccatgagccaggacaccgaggtggatatgaaggaggtggagctgaatgagttagagcccgagaagcagccgatgaacgcggcgtctggggcggccatgtccctggcgggagccgagaagaatggtctggtgaagatcaaggtggcggaagacgaggcggaggcggcagccgcggctaagttcacgggcctgtccaaggaggagctgctgaaggtggcaggcagccccggctgggtacgcacccgctgggcactgctgctgctcttctggctcggctggctcggcatgcttgctggtgccgtggtcataatcgtgcgagcgccgcgttgtcgcgagctaccggcgcagaagtggtggcacacgggcgccctctaccgcatcggcgaccttcaggccttccagggccacggcgcgggcaacctggcgggtctgaaggggcgtctcgattacctgagctctctgaaggtgaagggccttgtgctgggtccaattcacaagaaccagaaggatgatgtcgctcagactgacttgctgcagatcgaccccaattttggctccaaggaagattttgacagtctcttgcaatcggctaaaaaaaagagcatccgtgtcattctggaccttactcccaactaccggggtgagaactcgtggttctccactcaggttgacactgtggccaccaaggtgaaggatgctctggagttttggctgcaagctggcgtggatgggttccaggttcgggacatagagaatctgaaggatgcatcctcattcttggctgagtggcaaaatatcaccaagggcttcagtgaagacaggctcttgattgcggggactaactcctccgaccttcagcagatcctgagcctactcgaatccaacaaagacttgctgttgactagctcatacctgtctgattctggttctactggggagcatacaaaatccctagtcacacagtatttgaatgccactggcaatcgctggtgcagctggagtttgtctcaggcaaggctcctgacttccttcttgccggctcaacttctccgactctaccagctgatgctcttcaccctgccagggacccctgttttcagctacggggatgagattggcctggatgcagctgcccttcctggacagacagcatttccctatgtcgcccaggctggagtgcagtggcatgatcttggttcattgcagcctccgcctcccaggccgaagtgatcatcccacctcagcctcctgagtagctgggatatgtaccatagataagcctatggaggctccagtcatgctgtgggatgagtccagcttccctgacatcccaggggctgtaagtgccaacatgactgtgaagggccagagtgaagaccctggctccctcctttccttgttccggcggctgagtgaccagcggagtaaggagcgctccctactgcatggggacttccacgcgttctccgctgggcctggactcttctcctatatccgccactgggaccagaatgagcgttttctggtagtgcttaactttggggatgtgggcctctcggctggactgcaggcctccgacctgcctgccagcgccagcctgccagccaaggctgacctcctgctcagcacccagccaggccgtgaggagggctcccctcttgagctggaacgcctgaaactggagcctcacgaagggctgctgctccgcttcccctacgcggcctgacttcagcctgacatggacccactacccttctcctttccttcccaggccctttggcttctgatttttctcttttttaaaaacaaacaaacaaactgttgcagattatgagtgaacccccaaatagggtgttttctgccttcaaataaaagtcacccctgcatggtgaa

SEQ ID NO: 55587 - DNA, 2053 bp, Homo sapiens
aactagtcaggtacgaggctggtggtaatcggcagaggccgccagtgcatgtggcaggagcggtgagatcactgcctcacggcgatcctggactgacggtcacgactgcctaccctctaaccctgttctgagctgccccttgcccacacaccccaaacctgtgtgcaggatccgcctccatggagctacagcctcctgaagcctcgatcgccgtcgtgtcgattccgcgccagttgcctggctcacattcggaggctggtgtccagggtctcagcgcgggggacgactcaggcaccatgagccaggacaccgaggtggatatgaaggaggtggagctgaatgagttagagcccgagaagcagccgatgaacgcggcgtctggggcggccatgtccctggcgggagccgagaagaatggtctggtgaagatcaaggtggcggaagacgaggcggaggcggcagccgcggctaagttcacgggcctgtccaaggaggagctgctgaaggtggcaggcagccccggctgggtacgcacccgctgggcactgctgctgctcttctggctcggctggctcggcatgcttgctggtgccgtggtcataatcgtgcgagcgccgcgttgtcgcgagctaccggcgcagaagtggtggcacacgggcgccctctaccgcatcggcgaccttcaggccttccagggccacggcgcgggcaacctggcgggtctgaaggggcgtctcgattacctgagctctctgaaggtgaagggccttgtgctgggtccaattcacaagaaccagaaggatgatgtcgctcagactgacttgctgcagatcgaccccaattttggctccaaggaagattttgacagtctcttgcaatcggctaaaaaaaagagcatccgtgtcattctggaccttactcccaactaccggggtgagaactcgtggttctccactcaggttgacactgtggccaccaaggtgaaggatgctctggagttttggctgcaagctggcgtggatgggttccaggttcgggacatagagaatctgaaggatgcatcctcattcttggctgagtggcaaaatatcaccaagggcttcagtgaagacaggctcttgattgcggggactaactcctccgaccttcagcagatcctgagcctactcgaatccaacaaagacttgctgttgactagctcatacctgtctgattctggttctactggggagcatacaaaatccctagtcacacagtatttgaatgccactggcaatcgctggtgcagctggagtttgtctcaggcaaggctcctgacttccttcttgccggctcaacttctccgactctaccagctgatgctcttcaccctgccagggacccctgttttcagctacggggatgagattggcctggatgcagctgcccttcctggacagcctatggaggctccagtcatgctgtgggatgagtccagcttccctgacatcccaggggctgtaagtgccaacatgactgtgaagggccagagtgaagaccctggctccctcctttccttgttccggcggctgagtgaccagcggagtaaggagcgctccctactgcatggggacttccacgcgttctccgctgggcctggactcttctcctatatccgccactgggaccagaatgagcgttttctggtagtgcttaactttggggatgtgggcctctcggctggactgcaggcctccgacctgcctgccagcgccagcctgccagccaaggctgacctcctgctcagcacccagccaggccgtgaggagggctcccctcttgagctggaacgcctgaaactggagcctcacgaagggctgctgctccgcttcccctacgcggcctgacttcagcctgacatggacccactacccttctcctttccttcccaggccctttggcttctgatttttctcttttttaaaaacaaacaaacaaactgttgcagattatgagtgaacccccaaatagggtgttttctgccttcaaataaaagtcacccctgcatggtgaa

SEQ ID NO: 55588 - DNA, 2131 bp, Homo sapiens
  misc_feature (1)..(1): n is a, c, g, or t
  misc_feature (4)..(4): n is a, c, g, or t
  misc_feature (21)..(21): n is a, c, g, or t
  misc_feature (33)..(33): n is a, c, g, or t
  misc_feature (42)..(42): n is a, c, g, or t
  misc_feature (129)..(130): n is a, c, g, or t
nttntgctgcagtcgttttantgatccccgtcngtcgccggntctgcaggcaccatgagccaggacacccgaggtggatatgaaggaggtggagctgaatgagttagagcccgagaagcagcccgatgnncgcggcgtctggggcggccatgtccctggcgggagccgagaagaatggtctggtgaagatcaaggtggcaaaagacgaggagatgcagtagccgaaactgcgcggaggcacagaggccggggagagcgttctgggtccgagggtccaggtaggggttgagccaccatctgaccgcaagctgcgtcgtgtcgccggttctgcaggcaccatgagccaggacaccgaggtggatatgaaggaggtggagctgaatgagttagagcccgagaagcagccgatgaacgcggcgtctggggcggccatgtccctggcgggagccgagaagaatggtctggtgaagatcaaggtggcggaagacgaggcggaggcggcagccgcggctaagttcacgggcctgtccaaggaggagctgctgaaggtggcaggcagccccggctgggtacgcacccgctgggcactgctgctgctcttctggctcggctggctcggcatgcttgctggtgccgtggtcataatcgtgcgagcgccgcgttgtcgcgagctaccggcgcagaagtggtggcacacgggcgccctctaccgcatcggcgaccttcaggccttccagggccacggcgcgggcaacctggcgggtctgaaggggcgtctcgattacctgagctctctgaaggtgaagggccttgtgctgggtccaattcacaagaaccagaaggatgatgtcgctcagactgacttgctgcagatcgaccccaattttggctccaaggaagattttgacagtctcttgcaatcggctaaaaaaaagaactgtctcatgattgcgtcttcctccgttgttttaggcatccgtgtcattctggaccttactcccaactaccggggtgagaactcgtggttctccactcaggttgacactgtggccaccaaggtgaaggatgctctggagttttggctgcaagctggcgtggatgggttccaggttcgggacatagagaatctgaaggatgcatcctcattcttggctgagtggcaaaatatcaccaagggcttcagtgaagacaggctcttgattgcggggactaactcctccgaccttcagcagatcctgagcctactcgaatccaacaaagacttgctgttgactagctcatacctgtctgattctggttctactggggagcatacaaaatccctagtcacacagtatttgaatgccactggcaatcgctggtgcagctggagtttgtctcaggcaaggctcctgacttccttcttgccggctcaacttctccgactctaccagctgatgctcttcaccctgccagggacccctgttttcagctacggggatgagattggcctggatgcagctgcccttcctggacagcctatggaggctccagtcatgctgtgggatgagtccagcttccctgacatcccaggggctgtaagtgccaacatgactgtgaagggccagagtgaagaccctggctccctcctttccttgttccggcggctgagtgaccagcggagtaaggagcgctccctactgcatggggacttccacgcgttctccgctgggcctggactcttctcctatatccgccactgggaccagaatgagcgttttctggtagtgcttaactttggggatgtgggcctctcggctggactgcaggcctccgacctgcctgccagcgccagcctgccagccaaggctgacctcctgctcagcacccagccaggccgtgaggagggctcccctcttgagctggaacgcctgaaactggagcctcacgaagggctgctgctccgcttcccctacgcggcctgacttcagcctgacatggacccactacccttctcctttccttcccaggccctttggcttctgatttttctcttttttaaaaacaaacaaacaaactgttgcagattatgagtgaacccccaaatagggtgttttctgccttcaaataaaagtcacccctgcatggtgaa

SEQ ID NO: 55589 - DNA, 1534 bp, Homo sapiens
  misc_feature (17)..(18): n is a, c, g, or t
  misc_feature (31)..(31): n is a, c, g, or t
ctccccgtagaaccccnnctttcgaagcctnctttggcactgctggcctactggagatgcagtagccgaaactgcgcggaggcacagaggccggggagagcgttctgggtccgagggtccaggtaggggttgagccaccatctgaccgcaagctgcgtcgtgtcgccggttctgcaggcaccatgagccaggacaccgaggtggatatgaaggaggtggagctgaatgagttagagcccgagaagcagccgatgaacgcggcgtctggggcggccatgtccctggcgggagccgagaagaatggtctggtgaagatcaaggtggcggaagacgaggcggaggcggcagccgcggctaagttcacgggcctgtccaaggaggagctgctgaaggtggcaggcagccccggctgggtacgcacccgctgggcactgctgctgctcttctggctcggctggctcggcatgcttgctggtgccgtggtcataatcgtgcgagcgccgcgttgtcgcgagctaccggcgcagaagtggtggcacacgggcgccctctaccgcatcggcgaccttcaggccttccagggccacggcgcgggcaacctggcgggtctgaaggggcgtctcgattacctgagctctctgaaggtgaagggccttgtgctgggtccaattcacaagaaccagaaggatgatgtcgctcagactgacttgctgcagatcgaccccaattttggctccaaggaagattttgacagtctcttgcaatcggctaaaaaaaagagcatccgtgtcattctggaccttactcccaactaccggggtgagaactcgtggttctccactcaggttgacactgtggccaccaaggtgaaggatgctctggagttttggctgcaagctggcgtggatgggttccaggttcgggacatagagaatctgaaggatgcatcctcattcttggctgagtggcaaaatatcaccaagggcttcagtgaagacaggctcttgattgcggggactaactcctccgaccttcagcagatcctgagcctactcgaatccaacaaagacttgctgttgactagctcatacctgtctgattctggttctactggggagcatacaaaatccctagtcacacagtatttgaatgccactggcaatcgctggtgcagctggagtttgtctcaggcaaggctcctgacttccttcttgccggctcaacttctccgactctaccagctgatgctcttcaccctgccagggacccctgttttcagctacggggatgagattggcctggatgcagctgcccttcctggacagcctcacgaagggctgctgctccgcttcccctacgcggcctgacttcagcctgacatggacccactacccttctcctttccttcccaggccctttggcttctgatttttctcttttttaaaaacaaacaaacaaactgttgcagattatgagtgaacccccaaatagggtgttttctgccttcaaataaaagtcacccctgcatggtgaa

SEQ ID NO: 55590 - DNA, 1212 bp, Homo sapiens
  misc_feature (1)..(1): n is a, c, g, or t
  misc_feature (4)..(4): n is a, c, g, or t
  misc_feature (21)..(21): n is a, c, g, or t
  misc_feature (33)..(33): n is a, c, g, or t
  misc_feature (42)..(42): n is a, c, g, or t
  misc_feature (129)..(130): n is a, c, g, or t
nttntgctgcagtcgttttantgatccccgtcngtcgccggntctgcaggcaccatgagccaggacacccgaggtggatatgaaggaggtggagctgaatgagttagagcccgagaagcagcccgatgnncgcggcgtctggggcggccatgtccctggcgggagccgagaagaatggtctggtgaagatcaaggtggcaaaagacgaggagatgcagtagccgaaactgcgcggaggcacagaggccggggagagcgttctgggtccgagggtccaggtaggggttgagccaccatctgaccgcaagctgcgtcgtgtcgccggttctgcaggcaccatgagccaggacaccgaggtggatatgaaggaggtggagctgaatgagttagagcccgagaagcagccgatgaacgcggcgtctggggcggccatgtccctggcgggagccgagaagaatggtctggtgaagatcaaggtggcggaagacgaggcggaggcggcagccgcggctaagttcacgggcctgtccaaggaggagctgctgttttcagctacggggatgagattggcctggatgcagctgcccttcctggacagcctatggaggctccagtcatgctgtgggatgagtccagcttccctgacatcccaggggctgtaagtgccaacatgactgtgaagggccagagtgaagaccctggctccctcctttccttgttccggcggctgagtgaccagcggagtaaggagcgctccctactgcatggggacttccacgcgttctccgctgggcctggactcttctcctatatccgccactgggaccagaatgagcgttttctggtagtgcttaactttggggatgtgggcctctcggctggactgcaggcctccgacctgcctgccagcgccagcctgccagccaaggctgacctcctgctcagcacccagccaggccgtgaggagggctcccctcttgagctggaacgcctgaaactggagcctcacgaagggctgctgctccgcttcccctacgcggcctgacttcagcctgacatggacccactacccttctcctttccttcccaggccctttggcttctgatttttctcttttttaaaaacaaacaaacaaactgttgcagattatgagtgaacccccaaatagggtgttttctgccttcaaataaaagtcacccctgcatggtgaa

SEQ ID NO: 55591 - DNA, 1002 bp, Homo sapiens
  misc_feature (17)..(18): n is a, c, g, or t
  misc_feature (31)..(31): n is a, c, g, or t
  misc_feature (980)..(980): n is a, c, g, or t
ctccccgtagaaccccnnctttcgaagcctnctttggcactgctggcctactggagatgcagtagccgaaactgcgcggaggcacagaggccggggagagcgttctgggtccgagggtccaggtaggggttgagccaccatctgaccgcaagctgcgtcgtgtcgccggttctgcaggcaccatgagccaggacaccgaggtggatatgaaggaggtggagctgaatgagttagagcccgagaagcagccgatgaacgcggcgtctggggcggccatgtccctggcgggagccgagaagaatggtctggtgaagatcaaggtggcggaagacgaggcggaggcggcagccgcggctaagttcacgggcctgtccaaggaggagctgctgaaggtggcaggcagccccggctgggtacgcacccgctgggcactgctgctgctcttctggctcggctggctcggcatgcttgctggtgccgtggtcataatcgtgcgagcgccgcgttgtcgcgagctaccggcgcagaagtggtggcacacgggcgccctctaccgcatcggcgaccttcaggccttccagggccacggcgcgggcaacctggcgggtctgaaggggcgtctcgattacctgagctctctgaaggtgaagggccttgtgctgggtccaattcacaagaaccagaaggatgatgtcgctcagactgacttgctgcagatcgaccccaattttggctccaaggaagattttgacagtctcttgcaatcggctaaaaaaaagagcatccgtgtcattctggaccttactcccaactaccggggtgagaactcgtggttctccactcaggttgacactgtggccaccaaggtgaaggatgctctggagttttggctgcaagctggcgtggatgggttccaggttcgggacatagagaatctgaagatgatccattttggtggtgggaatttccagggttcgganacggctgtgggggaactccgct

SEQ ID NO: 55592 - DNA, 1469 bp, Homo sapiens
  misc_feature (1)..(1): n is a, c, g, or t
  misc_feature (4)..(4): n is a, c, g, or t
  misc_feature (21)..(21): n is a, c, g, or t
  misc_feature (33)..(33): n is a, c, g, or t
  misc_feature (42)..(42): n is a, c, g, or t
  misc_feature (129)..(130): n is a, c, g, or t
nttntgctgcagtcgttttantgatccccgtcngtcgccggntctgcaggcaccatgagccaggacacccgaggtggatatgaaggaggtggagctgaatgagttagagcccgagaagcagcccgatgnncgcggcgtctggggcggccatgtccctggcgggagccgagaagaatggtctggtgaagatcaaggtggcaaaagacgaggagatgcagtagccgaaactgcgcggaggcacagaggccggggagagcgttctgggtccgagggtccaggtaggggttgagccaccatctgaccgcaagctgcgtcgtgtcgccggttctgcaggcaccatgagccaggacaccgaggtggatatgaaggaggtggagctgaatgagttagagcccgagaagcagccgatgaacgcggcgtctggggcggccatgtccctggcgggagccgagaagaatggtctggtgaagatcaaggtggcggaagacgaggcggaggcggcagccgcggctaagttcacgggcctgtccaaggaggagctgctgaaggtggcaggcagccccggctgggtacgcacccgctgggcactgctgctgctcttctggctcggctggctcggcatgcttgctggtgccgtggtcataatcgtgcgagcgccgcgttgtcgcgagctaccggcgcagaagtggtggcacacgggcgccctctaccgcatcggcgaccttcaggccttccagggccacggcgcgggcaacctggcgggtctgaaggggcgtctcgattacctgagctctctgaaggtgaagggccttgtgctgggtccaattcacaagaaccagaaggatgatgtcgctcagactgacttgctgcagatcgaccccaattttggctccaaggaagattttgacagtctcttgcaatcggctaaaaaaaagagcatccgtgtcattctggaccttactcccaactaccggggtgagaactcgtggttctccactcaggttgacactgtggccaccaaggtgaaggcctcaggaaactgggagaggggggatcttgactgacattttagatcctgtctgctgctcactgattatgactgtggacgcgtctccctgcttctctgggtctgtttcttcatctctaaaataggtatgctaacattccaatgctaagatgttacacgaagttatgtttatggacataccttttctctggggccttttctgtggctttcaaagttgaagctgtgtgatttgccagaggcaagaatgagaagtaaaatgctgtagcactaagaaaatgagtggaagggtagagctggaggggtccaaaggctaagcctttgtagtgcaggtggggaagacccaggcaaggcacaggactctccccagctcccggggaagtgtgtggtgggtgaggtttagtgtgggctggaattttctgagccttttcctgagaactgatgt

SEQ ID NO: 55593 - DNA, 1176 bp, Homo sapiens
  misc_feature (1)..(1): n is a, c, g, or t
  misc_feature (4)..(4): n is a, c, g, or t
  misc_feature (21)..(21): n is a, c, g, or t
  misc_feature (33)..(33): n is a, c, g, or t
  misc_feature (42)..(42): n is a, c, g, or t
  misc_feature (129)..(130): n is a, c, g, or t
nttntgctgcagtcgttttantgatccccgtcngtcgccggntctgcaggcaccatgagccaggacacccgaggtggatatgaaggaggtggagctgaatgagttagagcccgagaagcagcccgatgnncgcggcgtctggggcggccatgtccctggcgggagccgagaagaatggtctggtgaagatcaaggtggcaaaagacgaggagatgcagtagccgaaactgcgcggaggcacagaggccggggagagcgttctgggtccgagggtccaggtaggggttgagccaccatctgaccgcaagctgcgtcgtgtcgccggttctgcaggcaccatgagccaggacaccgaggtggatatgaaggaggtggagctgaatgagttagagcccgagaagcagccgatgaacgcggcgtctggggcggccatgtccctggcgggagccgagaagaatggtctggtgaagatcaaggtggcggaagacgaggcggaggcggcagccgcggctaagttcacgggcctgtccaaggaggagctgctgaaggtggcaggcagccccggctgggtacgcacccgctgggcactgctgctgctcttctggctcggctggctcggcatgcttgctggtgccgtggtcataatcgtgcgagcgccgcgttgtcgcgagctaccggcgcagaagtggtggcacacgggcgccctctaccgcatcggcgaccttcaggccttccagggccacggcgcgggcaacctggcgggtctgaaggggcgtctcgattacctgagctctctgaaggtgaagggccttgtgctgggtccaattcacaagaaccagaaggatgatgtcgctcagactgacttgctgcagatcgaccccaattttggctccaaggaagattttgacagtctcttgcaatcggctaaaaaaaagaagtgggtatcctggggttcccaaggaaacagctagaaaggacttggccagaggaaaagtaggctagaacttttgtctggtttcctgctaactggctctgagttttcctagggcaggtagaggggagatttgttagtcttcagcctaaaatggatttgtccagtcgtctgggggctttctacttggctgtggaatcttgagcaggtcatttaacttctgggcttcagtgcccttatttgca

SEQ ID NO: 55594 - DNA, 305 bp, Homo sapiens
aggctccccatttgtaaatgtcttgtattcctgtcaagatggttaggaggattgaaaaacgccgttgtattttatttgattttgataatacacttaacatgagatctaacctcttaacaaatttttaagtgtataatgcagtattgttagctatagtgttcaagtgcattgggaggcgctatccaaatgcaaccccttccccgccctcacccccaccccccgtttattgctacttgttattttcatggttgtgctgaatttttccccaaggcaaatctttacctctgcccttgaagttgcatatg

SEQ ID NO: 55595 - DNA, 373 bp, Homo sapiens
attttccatggtagagcttgtctgtttttgtttttgtttttgtttttttgagacagaatcttgctctgttggccaggctgcagtgcaatggcatgatctcagctcactgcaacctctgtctcccgggctcaagcaattctcctgcctcagcctcccgagtagctgggattacagtagtgtgccaccaagcctggctaatttttgtatttttagtagagagggggtttcaccatgttgatcaggctggtctcgaactcctgacctcaggtaatctgcctgcctcggcctcccaaagtgctgggattagaggcgtgagccaccatgcccagctgcttgtctgtttttttaaaaatacagtctacctattgccagg

SEQ ID NO: 55596 - DNA, 177 bp, Homo sapiens
ccatgggcagtgcatcccattaagtcaaatggctgagtccatttaatcttggcactgtctctccccatccttccttacaatggcatatgctttctaatctcttgagactctttaggcccttctcttaccataccgtatctccagaattacttctgatttgacccattacatgaatga

SEQ ID NO: 55597 - DNA, 445 bp, Homo sapiens
ttcttcatgtacactgcaaagggcaacttctctagaagcattaaaagtgtcaattaggttttcaagtaagcgtcatttattcatatatacattcatttgtctttttatttacaaaattaaatcattttcccatgaacattaaaatgggaagagagaacaaagaaaatagagttgaataataataacattgattctggaccagacactgggctggacaataactcgagggttaccttatttatttacacaaagacccgatgaggtacacactaattattttcatctccctattaccaatcatgagactgaagctgagaagggttaaaaacttgcctaagctcacacaactaagaagtgtccgagctgggctttgaacccaaggtttgatcaagggttgtgcccttaactgccataccatcctgcctcacagatctgggttagggat

SEQ ID NO: 55598 - DNA, 336 bp, Homo sapiens
agtagtccttccacacacccaaaaactcttctgtgccttccatgtttcttccacctgcaaagagagcccattgccatatgctttttcatcagctacttggctgtgctctaaagcacatcatttacattcttcacatttgtttatttataaaattagtctaactggtcctgaaacttctatccacctctgagcagcagctatgatggttgagagataaggatcctcaggagggccatttagccagggccttatattcacaaagggccttagttgggtcatttgttcttgccttccaaaaaggttatttttttatgtgtttaaagcatgattttaagt

SEQ ID NO: 55599 - DNA, 304 bp, Homo sapiens
tttttgttacacagatacaaaaaatacatagttatatgccctgatcaagccagagacaagtctggaaaacaagtaaaacaggcatgcgtaatttttgtttttttgagacaaggtcttgctttgttgcccaggctggagtgcagaggcatgatctcggttcactgcaacctccgtctcctgggttcaagcgattctcgtgtctcagcctcccgagtaggtgggattacaggcattcaacaccatgcccagctaatttttgtatttttagtggagacggggtttcaccatgttggccagactggtc

SEQ ID NO: 55600 - DNA, 184 bp, Homo sapiens
tacacaacttattagcttactacaagttcactgataactctactgcaagaacatgtataaattccaagaataaaatataaataaggcattacgaaggttttcttggaaggaagatctgtttgaactgagagataaaacatgaattttaattgttttaattaattattatcacaaaatgaagtga

SEQ ID NO: 55601 - DNA, 260 bp, Homo sapiens
ctccgtccagcctccgcaaaggtttttattaagtcagtctagcatggtaatccagcattggcactgttcccgtgctcggttcagcagcacatatacaaaaaaaaattggaatgatacagagattagcatggcgcctgcgcaaggataacacacaaattcatgaagtatgccattattttttaagaaagaaaaaaaaagaaaaaagaaaaaaatctgttcccttgatgattgtgatatgcattaaaatttggtaatcactg

SEQ ID NO: 55602 - DNA, 633 bp, Homo sapiens
catatcccaaagcccttccaaatagtgatattctccagggcaaggatcctctccaatttattatcatatccctggatcctcctatgacctttggcatagctgttggaggagtgagcagatgagtgagtaagtaactgatcttctcctcacccatcctcagaggaagaccacgggacaggtgtgagtggtgcctcccaaagatactccaaataccaacccctagcacctgtggatgtgactttatttggaaattgggtcttggcagatgtcattaagttaaagatcttgagatgagatccatcctgaatttagagtgggccttaaatcctgataaagagacagaaaaagagaagacacagagacatacacaggagagagccatgtgaagccagaggcagagattggaaagatttatctataagaaaagccaagaactgccagaagctaggagagaggcatgggataaattttcccattcctcacaccattcacaaaaattaacttaaaatggatcaaagactcaaatgtaaagctaaaattatgaaaacccctaaaagaaaagatgggataaatcttaatgacctagcattaggcaatggtttcttagatatgactccaaaagcatgagcaaca

SEQ ID NO: 55603 - DNA, 526 bp, Homo sapiens
cctctgacagagtgtatattcacgtaataatcttacttattgttcatctccctctcactagtatactagtgccattcggatggggtttttttctgttttggttattcctcagtgaatatttgtagactaattaatagcactgaagatcattcatggaatcattcataggcagcaaataagttctaagtacccaaaagtgttactggaggttatcaatatggctaattacatgaaagtttatatacttaatctctaaatagagcaaatctttacagttctacagaaatgattgggaaggaggagccaaggaaaatttctgctatcacaaaagtttccctaggggcgatatagctattgaacttagaagacgtttttattttgccaaaaggtcgattttgctgaccttggctaggtgcagtgcctcccacctgtaattctagcatgttgggaggccaagatgggaggatttcttgagcccaggagtttgagaccagcctgagcaacatagtgagatctcgtctctatt

SEQ ID NO: 55604 - DNA, 393 bp, Homo sapiens
ccgtttctagactctgacatccagccatctcaatattccagagaagaggatgagtgtgaagggtggtggcgattttaaacaaggtgatcaggaagaccttgtggataacttcgggtctgagcacactccatcaggctgccggatagtctcaccattactcccgttatttggaacctcttcactgcaacgtgaccttgtttatagacagtggaattttccagatgctacacaatatgtgacgttgcaacagattgaagaagcaaatatgagaatcatatcttctatggaatcagaaactcaatttgcaaaaatgaaaaacaatgtgactcttctcactattcttttcggatatacaattatgttcaattaaaatgttatttatgtcataaataa

SEQ ID NO: 55605 - DNA, 442 bp, Homo sapiens
ccgtttctagactctgacatccagccatctcaatattccagagaagaggatgagtgtgaagggtggtggcgattttaaacaaggtgatcaggaagaccttgtggataacttcgggtctgagcacactccatcaggctgccggatagtctcaccattactcccgttatttggaacctcttcactgcaacgtgaccttgtttatgtgagtttagctctctgagactcagtttcctcaaatgcaatatgataagagacagtggaattttccagatgctacacaatatgtgacgttgcaacagattgaagaagcaaatatgagaatcatatcttctatggaatcagaaactcaatttgcaaaaatgaaaaacaatgtgactcttctcactattcttttcggatatacaattatgttcaattaaaatgttatttatgtcataaataa

SEQ ID NO: 55606 - DNA, 473 bp, Homo sapiens
catgcacaaaaataattgatgacatcagcatagttatgggaattagacttattagttaattacagaaccagcagagggagcacaaaccctgcataaataataaccatttcttctgggtatcttataaaatagtggtaatggtggaaggaagaaacagattcaaaaactaaattgttagtatcagaaaatgggctttgctttcttggaatggtgttagggcagaaacctaatacattgttcatatggtctacgtataaatgttgacgtcttaggtactgaagagaagaaaaatgtgtgtgtgtgtgtgtgtgtgtgtgtgtgtgcgcgcgtgcgcttctccttgttatcatggtgaaaccctcccttctgtggaataattaaggtcagatggtgaaactttcctagagttggcaaatacttgttgtatctgaccctgatatcacaggagctttcattttagccttgctcatcct

SEQ ID NO: 55607 - DNA, 1052 bp, Homo sapiens
aagcattcggaaccttgattccacaggacagaagataaaagaatattatcaggcaggtaacacaagaaatacaaattcaaaatcagtgcatacagtgcgcagtcttccaaatgaagagatgaatgttaaaactattcagagaccactggtcattaagttgagcaaaaatcaagacgtattttacagcgtaatattgataggtcttaaaggaaatgttttcagtcatataatatgttgacactgcaaacataagcagagcttttgcggtacagtctggcattaagtattacgagagaaaaacattttgcccagagacacttactggggctctatttgctctggaaactattagagaatgttgtatctatataatagaataatattcattaataagaattatttaaggtttggtttataaacttgggcatacataataatgtcaattaaatggcaatataaaaattgtaaatgttgataactacataaaatttttatgtctgttaaattaatatgatatgaatgacaattatttgaagtttctagctcttttcccttgtgagagttgtcagaatcaaaatgaagtcacttgtattaaattctaacaaaaaataaataaagccaggaggttaagaagggagctctcacacacgtctatcgtaagaactgctacaaagcatctctgaagggctcttctgcacatatgcctgtaataagaacttttgccagcagtccctgcatctctacatccatggagccccattgacattccccacctgcagcggccactgcagctcaaactgcagcttgctacgtgagtcacaaggatagctagctggatgcataagaacatttgactgacacagtctcccctgtatccaatgttctctttgttttcaaacaaattccttatgcttttcccttttgcctttaaaagcttctcctggcttcaacctgtttggatatgcctgtggtccctatagccctcatatgctggatttgcaaatcccctgcacactccagaataaactcagttcaataaactctttgaagaa

SEQ ID NO: 55608 - DNA, 353 bp, Homo sapiens
tgtaaaaaaaaaatagaacttttaattcaagatttaaaagtgttcaggtaatgctgaaaaaaattatactgtgccttccactcccccactccctcgcaaggggacaactctaaaacaaaaaatagggctcaaattccatgatcattttactgttttatatttggcacattagatataaagatttcttcaaaattacctctggccattctatagaaaatcagtccattgagaaagaagtggtagtagatattcaatataaccagcaagccaaacgtttaaatttttaaagcaaggaaattggtaaattcaggaaactattctggtgaaactaccgtgtacataattcacaaaga

SEQ ID NO: 55609 - DNA, 354 bp, Homo sapiens
ggaggtgaggggaaggaggcagggaggcttgagagaggtgtccctgcagttatccatctgacaacatgccagttccagagattcccccagtagagagaattcctttccaactgttctgaaaataagaatattcctgagagggccagcccccgccacaggattggtctccaccctgctgtgaacacgtctgtaagctgttgtaagctgactggtagcggagatcctggtacagtaggaagtctgaaggaaggagaaggatattttggcacttggaggagaggaaattcaggaaggagaaatctggctgaggggcgacagagtgggcagtaagacaggggagagagaatagagggg

SEQ ID NO: 55610 - DNA, 363 bp, Homo sapiens
cgtgaataactgcctaattagtggacatgaaaactggacagtctccaaagtcatcagagatgaccacgcttgccaggcaacttactagactaagggtgacgtgcccatcatgcaggaagcttctccaaggctggcgagagcaacttgtctgctttgagaaatgcagatctatcaggatccagaatcggactctgaaaaagctgtcatttcatgtctctaaaacagcctttgatttaatgtacaagatgtcaagaagtaaaggacaataaaataaaaaccaaaaaaggagaactatttcaattaagaagcattcctatatcaattcttggaaatcacataaaataaaagctgtcagaatcaatc

SEQ ID NO: 55611 - DNA, 306 bp, Homo sapiens
tcccattcttagaccccagaaactgggtttatcccaccgaaaaacacaaggactgacagtggcattccacttctcagaagtggctttccaaataataataataaataatattaggaagaaggagaaatagaggctggtcaagcaaggcatctgtccattataccctccttgcctaggtcctcataatctactatctccctccagatttaataaaattgatctaagagtaagtagaagaaaccacatgtacgtgtaagaggtatacaagagggggctatttaaccaatgaacaataagaaaaacaaa

SEQ ID NO: 55612 - DNA, 442 bp, Homo sapiens
aatcattctacctggcagaggtacaggatgagtcaggcaaaagaaatgtggcaaatggactactcacactgagaaagccaagcccatgtctttgaactcttaactttgtgttctttcaaacagaataagagtcagtatcctgccacaatggagaccaaggaatcacggggaataatgttcaatgcccccagccagttgtactagaaaatattgcctggttgataaagtacatctcccacggtttgactccccttcctcttcctggtgccccctctcattgctgccctgggctgtacacagtcccttaagcattacatccatcagatctggctgcctttaaagtgactcatgttccaaatgatctttcctcccatcactccaccagtcctatagcaaaactcctctcagtttccgactcatccatatcaagccagaaattgag

SEQ ID NO: 55613 - DNA, 255 bp, Homo sapiens
gtgttcgcctttgtcttgggacaggatggtggctgggaggtgcaggtctacagtcacaccataagtgggccaagtccttgttcctgacactgatagttactagaggcttggaaggatggagtagggcggtgggagggtggcaggcaggtgatgagatattggttagtgggtactatgtacagttaaatagaaacagtaagttctcatgtttgatagtatagaagggtgactatagataacagtaatatatatttc

SEQ ID NO: 55614 - DNA, 860 bp, Homo sapiens
gattctattatgccatcttgttttttcccccagtctttggtcttttcatgttttcttttttgtacttgctttagaataaattgactatttatattcattgcctaattttctattgacttgtatatttttcttgtgaaaggtaagaattctttatatgttacagttattaatcatttgtcatgtatgttcctaatacttttcttccaaatctatcatttgtgtatgatctcatttatgatatatttttcaattttccaattcattgataaagttaatgatttatacttctgtagttcctggtgttgaagtaatttatattcctggagtatactctacttgatcatatggtagtattcatttgataagttgctagattctgtttagttgtactttatttaggattgctgcatctttatttgttttatagattgcatttctctggaatgaccacagcaatatttccagcccttgatgatcttctagaactttgccacttccctgcatcaagaggtaaaatccatttctattctcttgaattgaacagcttcaatgaattgagtgctgaagaattaacactctgtgacttcatgacttgttggaaattgtgaggaatctcaggccacatggaggggccagtgaagatgttccagcttatagccccagctaaggtttcaactaatagccagactcaaccaccaggtatatgaatgaaccttcagatgattctagtctccagccttcaagcttccccagtcgatgctgagtggagcaaaaaaaggaattattctcactgagccctgtccaaattgcaaatacctgacaaaaataaatattgttgttttaagccactaaaaaatgga

SEQ ID NO: 55615 - DNA, 754 bp, Homo sapiens
gtctccccgccccgcccctcgtctcctccaagatggcgagcggcggcagcgggggggtgtcagtacctgcgctgtggagtgaagtgaaccggtatggccagaacggcgacttcacgcgcgctctcaagaccgtcaataagatactacagatcaacaaagatgacgtaactgccctgcattgtaaagtggtatgccttatccagaatggaagtttcaaggaagctttgaatgtcatcaatactcacaccaaagtgttagccaataactctctctcctttgaaaaggcatattgcgagtacaggctgaacagaattgagaatgccttgaagacaatagaaagtgccaaccagcagacagacaaactgaaggagctttatggacaagtgttataccgtttggaacgctatgatgaatgcttagcagtgtatagagatctcgtccgaaactcccaagatgattatgatgaggagaggaaaacaaacctttcagcagttgttgcagctcaaagcaattgggaaaaagtggttccagagaacctgggcctccaagaaggcacacatgagctgtgctacaacactgcatgtgcactgataggccaaggccagctgaaccaggccatgaaaatcctacaaaaagctgaaggttggaagtttgttaaacttatctgtaaatataacgtgcatataactttgtagagtatcttctaaaattgcatttgacttctgtgaaattattaaatggaagttattgatgc

SEQ ID NO: 55616 - DNA, 3878 bp, Homo sapiens
gtctccccgccccgcccctcgtctcctccaagatggcgagcggcggcagcgggggggtgtcagtacctgcgctgtggagtgaagtgaaccggtatggccagaacggcgacttcacgcgcgctctcaagaccgtcaataagatactacagatcaacaaagatgacgtaactgccctgcattgtaaagtggtatgccttatccagaatggaagtttcaaggaagctttgaatgtcatcaatactcacaccaaagtgttagccaataactctctctcctttgaaaaggcatattgcgagtacaggctgaacagaattgagaatgccttgaagacaatagaaagtgccaaccagcagacagacaaactgaaggagctttatggacaagtgttataccgtttggaacgctatgatgaatgcttagcagtgtatagagatctcgtccgaaactcccaagatgattatgatgaggagaggaaaacaaacctttcagcagttgttgcagctcaaagcaattgggaaaaagtggttccagagaacctgggcctccaagaaggcacacatgagctgtgctacaacactgcatgtgcactgataggccaaggccagctgaaccaggccatgaaaatcctacaaaaagctgaagatctttgccgccgttcattatcagaagacactgatgggactgaggaagacccacaggcagaactggccatcattcatggtcagatggcttatattctgcagcttcagggtcgaacagaggaggctttgcaactttacaatcaaataataaaactaaaaccaacagatgtgggattactagctgtaattgcaaataacatcattaccattaacaaggaccaaaatgtctttgactccaagaagaaagtgaaattaaccaatgcggaaggagtagagtttaagctttccaagaaacaactacaagctatagaatttaacaaagctttacttgctatgtacacaaaccaggctgaacaatgccgcaaaatatctgccagtttacagtcccaaagtcccgagcatctcttacctgtgttaatccaagctgcccagctctgccgtgaaaagcagcacacaaaagcaatagagctgcttcaggaattttcagatcagcatccagaaaatgcagctgaaattaagctgaccatggcacagttgaaaatttctcaaggtaatatttctaaagcatgtctaatattgagaagcatagaggagttaaagcataaaccaggcatggtatctgcattagttaccatgtatagccatgaagaagatattgatagtgccattgaggtcttcacacaagctatccagtggtatcaaaaccatcagccaaaatctcctgctcatttgtccttgataagagaagctgcaaacttcaaactcaaatatgggcggaagaaggaggcaattagtgacctacaacagctgtggaaacaaaatccaaaagatattcacaccctggcacagcttatttctgcttactcacttgtagatccagagaaagccaaagctcttagtaaacacttgccatcgtcagatagtatgtctctaaaagtagatgttgaggctcttgaaaattctgctggtgctacatacattcggaagaagggtggaaaagttactggagatagtcaaccaaaggaacaaggacagggagatttgaaaaagaagaaaaagaaaaagaagggaaaattgcctaagaattatgacccaaaagttaccccagatccagaaagatggctgccaatgcgagaacgttcttactaccggggaagaaagaagggtaaaaagaaggatcagattggaaaagggacccagggagcaactgcaggagcttcatctgaactggatgccagtaaaactgtgagcagcccacccacctccccaagacctggcagtgctgcaacagtatctgcctctacaagtaacatcatacccccaagacaccagaaacctgcaggggctccagcaacaaaaaagaaacagcaacagaaaaagaagaaaggtggaaaaggtggctggtgatgagaatattcttgttgcaggctgtttttaaactagtgtcagtgacactaggaatataataaaggtaacacagcaagaagcacagaactactccctcttcatctccatattttcataatttcttgtgtttcaaatagggaaacatcttcctcaaagtctgcctagtgagatatggcctactggttgcctcatagctttgtacagattatgaggactgaaaataattgggcatttacccatcttggtatctgttgtatcctttatctgtgtgtgctgatttgatcttttttcagtttcacataccttatctaaggtttcccaggatttaaacagaaactacttctatgatttcagctggagtctgaagatacttgtttctgttcaagtcccactttaaattatgtcttaggagactgaaagtggaatcttctgagcattcctaaatatctgcttagaaatatcatgtgataaagagggaccttcttaatacactgatgttcttcactaaatggatggccacaagaaaaataaagtaaatgtcttaaataatttaaccataaattttctgtcatgtgatactggaatatgggatacttttcatgtttatatatatatatatatgtatatatatatacatatatatatatatataaacatgaaatatatatatatggctcctttgtgccccatgtcattttcagattatggtagcatgctgatacagcaccatgaaagaactcaaggaaaatatatcaatgtaagaagttcactcttagacctagtgttctgaggtcacatgggtttggactgtctcaatcagaaagattaatgactgttatcaagaacatgaacattggcttcctccatagagaagaaatcagtatctgagttgcataccaggcagtattaaaatctaacaggtctgtttggcccattgatagatactcaaatggtgtctccttctggttatggattttgaccattgattacctttctcaatgtaatgaagtattttacagtcaatttgtggtgtaaatgttgctcttgtctttccttgcttacaaactactttcacattgaacagctgtgagacagacatattgagatgcctgcccttgttagtattcattttatgctgcccaagatatcatttaatttagacttaacaagtatttccttgtgattatattactctgtccttgttaataaagtgctgctgtgtttgactctgaacatactaccaaaacttcttcaaagagttttttatgaaagactttcctcctttacaagaaagaaatggggtgctgcctttctgtttagtaaaagcagaatttgcagtggcatctaaagagatcttttttaaataaaaattatgtattgtggcataatcctttttttgagctctacagagaacagtcttttggtaatagtggcaggtatttattccttctgaatatataccccattataggaataactgttacttatttaggattccatcattgaaaattttgacccaaggcacagcagtgaaatttatagttctcaatttagttgtcattattgacaggcattggtattattagtcattgctaagcaactaaaacttcatcagttcaaataagttttaattgtcaaatgaagtataaacacatgaactttctagaaatatttcctcttttggataggtctttaaccagttcatatatatactttgtcaaatatatggatgtgtatgtgtacatttataagaaccagtatggatacatccattcactgtggtacattttaaaataaaatattttagcagtgaatatggaaaaaggtgtt

SEQ ID NO: 55617 - DNA, 3288 bp, Homo sapiens
gtctccccgccccgcccctcgtctcctccaagatggcgagcggcggcagcgggggggtgtcagtacctgcgctgtggagtgaagtgaaccggtatggccagaacggcgacttcacgcgcgctctcaagaccgtcaataagatactacagatcaacaaagatgacgtaactgccctgcattgtaaagtggtatgccttatccagaatggaagtttcaaggaagctttgaatgtcatcaatactcacaccaaagtgttagccaataactctctctcctttgaaaaggcatattgcgagtacaggctgaacagaattgagaatgccttgaagacaatagaaagtgccaaccagcagacagacaaactgaaggagctttatggacaagtgttataccgtttggaacgctatgatgaatgcttagcagtgtatagagatctcgtccgaaactcccaagatgattatgatgaggagaggaaaacaaacctttcagcagttgttgcagctcaaagcaattgggaaaaagtggttccagagaacctgggcctccaagaaggcacacatgagctgtgctacaacactgcatgtgcactgataggccaaggccagctgaaccaggccatgaaaatcctacaaaaagctgaagatctttgccgccgttcattatcagaagacactgatgggactgaggaagacccacaggcagaactggccatcattcatggtcagatggcttatattctgcagcttcagggtcgaacagaggaggctttgcaactttacaatcaaataataaaactaaaaccaacagatgtgggattactagctgtaattgcaaataacatcattaccattaacaaggaccaaaatgtctttgactccaagaagaaagtgaaattaaccaatgcggaaggagtagagtttaagctttccaagaaacaactacaagctatagaatttaacaaagctttacttgctatgtacacaaaccaggctgaacaatgccgcaaaatatctgccagtttacagtcccaaagtcccgagcatctcttacctgtgttaatccaagctgcccagctctgccgtgaaaagcagcacacaaaagcaatagagctgcttcaggaattttcagatcagcatccagaaaatgcagctgaaattaagctgaccatggcacagttgaaaatttctcaaggtaatatttctaaagcatgtctaatattgagaagcatagaggagttaaagcataaaccaggcatggtatctgcattagttaccatgtatagccatgaagaagatattgatagtgccattgaggtcttcacacaagctatccagtggtatcaaaaccatcagccaaaatctcctgctcatttgtccttgataagagaagctgcaaacttcaaactcaaatatgggcggaagaaggaggcaattagtgacctacaacagctgtggaaacaaaatccaaaagatattcacaccctggcacagcttatttctgcttactcacttgtagatccagagaaagccaaagctcttagtaaacacttgccatcgtcagatagtatgtctctaaaagtagatgttgaggctcttgaaaattctgctggtgctacatacattcggaagaagggtggaaaagttactggagatagtcaaccaaaggaacaaggacagggagatttgaaaaagaagaaaaagaaaaagaagggaaaattgcctaagaattatgacccaaaagttaccccagatccagaaagatggctgccaatgcgagaacgttcttactaccggggaagaaagaagggtaaaaagaaggatcagattggaaaagggacccagggagcaactgcaggagcttcatctgaactggatgccagtaaaactgtgagcagcccacccacctccccaagacctggcagtgctgcaacagtatctgcctctacaagtaacatcatacccccaagacaccagaaacctgcaggggctccagcaacaaaaaagaaacagcaacagaaaaagaagaaaggtggaaaaggtggctggtgatgagaatattcttgttgcaggctgtttttaaactagtgtcagtgacactaggaatataataaaggtaacacagcaagaagcacagaactactccctcttcatctccatattttcataatttcttgtgtttcaaatagggaaacatcttcctcaaagtctgcctagtgagatatggcctactggttgcctcatagctttgtacagattatgaggactgaaaataattgggcatttacccatcttggtatctgttgtatcctttatctgtgtgtgctgatttgatcttttttcagtttcacataccttatctaaggtttcccaggatttaaacagaaactacttctatgatttcagctggagtctgaagatacttgtttctgttcaagtcccactttaaattatgtcttaggagactgaaagtggaatcttctgagcattcctaaatatctgcttagaaatatcatgtgataaagagggaccttcttaatacactgatgttcttcactaaatggatggccacaagaaaaataaagtaaatgtcttaaataatttaaccataaattttctgtcatgtgatactggaatatgggatacttttcatgtttatatatatatatatatgtatatatatatacatatatatatatatataaacatgaaatatatatatatggctcctttgtgccccatgtcattttcagattatggtagcatgctgatacagcaccatgaaagaactcaaggaaaatatatcaatgtaagaagttcactcttagacctagtgttctgaggtcacatgggtttggactgtctcaatcagaaagattaatgactgttatcaagaacatgaacattggcttcctccatagagaagaaatcagtatctgagttgcataccaggcagtattaaaatctaacaggtctgtttggcccattgatagatactcaaatggtgtctccttctggttatggattttgaccattgattacctttctcaatgtaatgaagtattttacagtcaatttgtggtgtaaatgttgctcttgtctttccttgcttacaaactactttcacattgaacagctgtgagacagacatattgagatgcctgcccttgttagtattcattttatgctgcccaagatatcatttaatttagacttaacaagtatttccttgtgattatattactctgtccttgttaataaagtgctgctgtgtttgactctgaacatacta

SEQ ID NO: 55618 - DNA, 3578 bp, Homo sapiens
gtctccccgccccgcccctcgtctcctccaagatggcgagcggcggcagcgggggggtgtcagtacctgcgctgtggagtgaagtgaaccggtatggccagaacggcgacttcacgcgcgctctcaagaccgtcaataagatactacagatcaacaaagatgacgtaactgccctgcattgtaaagtggtatgccttatccagaatggaagtttcaaggaagctttgaatgtcatcaatactcacaccaaagtgttagccaataactctctctcctttgaaaaggcatattgcgagtacaggctgaacagaattgagaatgccttgaagacaatagaaagtgccaaccagcagacagacaaactgaaggagctttatggacaagtgttataccgtttggaacgctatgatgaatgcttagcagtgtatagagatctcgtccgaaactcccaagatgattatgatgaggagaggaaaacaaacctttcagcagttgttgcagctcaaagcaattgggaaaaagtggttccagagaacctgggcctccaagaaggcacacatgagctgtgctacaacactgcatgtgcactgataggccaaggccagctgaaccaggccatgaaaatcctacaaaaagctgaagatctttgccgccgttcattatcagaagacactgatgggactgaggaagacccacaggcagaactggccatcattcatggtcagatggcttatattctgcagcttcagggtcgaacagaggaggctttgcaactttacaatcaaataataaaactaaaaccaacagatgtgggattactagctgtaattgcaaataacatcattaccattaacaaggaccaaaatgtctttgactccaagaagaaagtgaaattaaccaatgcggaaggagtagagtttaagctttccaagaaacaactacaagctatagaatttaacaaagctttacttgctatgtacacaaaccaggctgaacaatgccgcaaaatatctgccagtttacagtcccaaagtcccgagcatctcttacctgtgttaatccaagctgcccagctctgccgtgaaaagcagcacacaaaagcaatagagctgcttcaggaattttcagatcagcatccagaaaatgcagctgaaattaagctgaccatggcacagttgaaaatttctcaaggtaatatttctaaagcatgtctaatattgagaagcatagaggagttaaagcataaaccaggcatggtatctgcattagttaccatgtatagccatgaagaagatattgatagtgccattgaggtcttcacacaagctatccagtggtatcaaaaccatcagccaaaatctcctgctcatttgtccttgataagagaagctgcaaacttcaaactcaaatatgggcggaagaaggaggcaattagtgacctacaacagctgtggaaacaaaatccaaaagatattcacaccctggcacagcttatttctgcttactcacttgtagatccagagaaagccaaagctcttagtaaacacttgccatcgtcagatagtatgtctctaaaagtagatgttgaggctcttgaaaattctgctggtgctacatacattcggaagaagggtggaaaagttactggagatagtcaaccaaaggaacaaggacagggagatttgaaaaagaagaaaaagaaaaagaagggaaaattgcctaagaattatgacccaaaagttaccccagatccagaaagatggctgccaatgcgagaacgttcttactaccggggaagaaagaagggtaaaaagaaggatcagattggaaaagggacccagggagcaactgcaggagcttcatctgaactggatgccagtaaaactgtgagcagcccacccacctccccaagacctggcagtgctgcaacagtatctgcctctacaagtaacatcatacccccaagacaccagaaacctgcaggggctccagcaacaaaaaagaaacagcaacagaaaaagaagaaaggtggaaaaggtggctggtgatgagaatattcttgttgcaggctgtttttaaactagtgtcagtgacactaggaatataataaaggtaacacagcaagaagcacagaactactccctcttcatctccatattttcataatttcttgtgtttcaaatagggaaacatcttcctcaaagtctgcctagtgagatatggcctactggttgcctcatagctttgtacagattatgaggactgaaaataattgggcatttacccatcttggtatctgttgtatcctttatctgtgtgtgctgatttgatcttttttcagtttcacataccttatctaaggtttcccaggatttaaacagaaactacttctatgatttcagctggagtctgaagatacttgtttctgttcaagtcccactttaaattatgtcttaggagactgaaagtggaatcttctgagcattcctaaatatctgcttagaaatatcatgtgataaagagggaccttcttaatacactgatgttcttcactaaatggatggccacaagaaaaataaagtaaatgtcttaaataatttaaccataaattttctgtcatgtgatactggaatatgggatacttttcatgtttatatatatatatatatgtatatatatatacatatatatatatatataaacatgaaatatatatatatggctcctttgtgccccatgtcattttcagattatggtagcatgctgatacagcaccatgaaagaactcaaggaaaatatatcaatgtaagaagttcactcttagacctagtgttctgaggtcacatgggtttggactgtctcaatcagaaagattaatgactgttatcaagaacatgaacattggcttcctccatagagaagaaatcagtatctgagttgcataccaggcagtattaaaatctaacaggtctgtttggcccattgatagatactcaaatggtgtctccttctggttatggattttgaccattgattacctttctcaatgtaatgaagtattttacagtcaatttgtggtgtaaatgttgctcttgtctttccttgcttacaaactactttcacattgaacagctgtgagacagacatattgagatgcctgcccttgttagtattcattttatgctgcccaagatatcatttaatttagacttaacaagtatttccttgtgattatattactctgtccttgttaataaagtgctgctgtgtttgactctgaacatactaccaaaacttcttcaaagagttttttatgaaagactttcctcctttacaagaaagaaatggggtgctgcctttctgtttagtaaaagcagaatttgcagtggcatctaaagagatcttttttaaataaaaattatgtattgtggcataatcctttttttgagctctacagagaacagtcttttggtaatagtggcaggtatttattccttctgaatatataccccattataggaataactgttacttatttaggattccatcatacacgtcgcgagggtaccgagcgctga

SEQ ID NO: 55619 - DNA, 3824 bp, Homo sapiens
gtctccccgccccgcccctcgtctcctccaagatggcgagcggcggcagcgggggggtgtcagtacctgcgctgtggagtgaagtgaaccggtatggccagaacggcgacttcacgcgcgctctcaagaccgtcaataagatactacagatcaacaaagatgacgtaactgccctgcattgtaaagtggtatgccttatccagaatggaagtttcaaggaagctttgaatgtcatcaatactcacaccaaagtgttagccaataactctctctcctttgaaaaggcatattgcgagtacaggctgaacagaattgagaatgccttgaagacaatagaaagtgccaaccagcagacagacaaactgaaggagctttatggacaagtgttataccgtttggaacgctatgatgaatgcttagcagtgtatagagatctcgtccgaaactcccaagatgattatgatgaggagaggaaaacaaacctttcagcagttgttgcagctcaaagcaattgggaaaaagtggttccagagaacctgggcctccaagaaggcacacatgagctgtgctacaacactgcatgtgcactgataggccaaggccagctgaaccaggccatgaaaatcctacaaaaagctgaagatctttgccgccgttcattatcagaagacactgatgggactgaggaagacccacaggcagaactggccatcattcatggtcagatggcttatattctgcagcttcagggtcgaacagaggaggctttgcaactttacaatcaaataataaaactaaaaccaacagatgtgggattactagctgtaattgcaaataacatcattaccattaacaaggaccaaaatgtctttgactccaagaagaaagtgaaattaaccaatgcggaaggagtagagtttaagctttccaagaaacaactacaagctatagaatttaacaaagctttacttgctatgtacacaaaccaggctgaacaatgccgcaaaatatctgccagtttacagtcccaaagtcccgagcatctcttacctgtgttaatccaagctgcccagctctgccgtgaaaagcagcacacaaaagcaatagagctgcttcaggaattttcagatcagcatccagaaaatgcagctgaaattaagctgaccatggcacagttgaaaatttctcaaggtaatatttctaaagcatgtctaatattgagaagcatagaggagttaaagcataaaccaggcatggtatctgcattagttaccatgtatagccatgaagaagatattgatagtgccattgaggtcttcacacaagctatccagtggtatcaaaaccatcagccaaaatctcctgctcatttgtccttgataagagaagctgcaaacttcaaactcaaatatgggcggaagaaggaggcaattagtgacctacaacagctgtggaaacaaaatccaaaagatattcacaccctggcacagcttatttctgcttactcacttgtagatccagagaaagccaaagctcttagtaaacacttgccatcgtcagatagtatgtctctaaaagtagatgttgaggctcttgaaaattctgctggtgctacatacattcggaagaagggtggaaaagttactggagatagtcaaccaaaggaacaaggacagggagatttgaaaaagaagaaaaagaaaaagaagggaaaattgcctaagaattatgacccaaaagttaccccagatccagaaagatggctgccaatgcgagaacgttcttactaccggggaagaaagaagggtaaaaagaaggatcagattggaaaagggacccagggagcaactgcaggagcttcatctgaactggatgccagtaaaactgtgagcagcccacccacctccccaagacctggcagtgctgcaacagtatctgcctctacaagtaacatcatacccccaagacaccagaaacctgcaggggctccagcaacaaaaaagaaacagcaacagaaaaagaagaaaggtggaaaaggtggctggtgatgagaatattcttgttgcaggctgtttttaaactagtgtcagtgacactaggaatataataaaggtaacacagcaagaagcacagaactactccctcttcatctccatattttcataatttcttgtgtttcaaatagggaaacatcttcctcaaagtctgcctagtgagatatggcctactggttgcctcatagctttgtacagattatgaggactgaaaataattgggcatttacccatcttggtatctgttgtatcctttatctgtgtgtgctgatttgatcttttttcagtttcacataccttatctaaggtttcccaggatttaaacagaaactacttctatgatttcagctggagtctgaagatacttgtttctgttcaagtcccactttaaattatgtcttaggagactgaaagtggaatcttctgagcattcctaaatatctgcttagaaatatcatgtgataaagagggaccttcttaatacactgatgttcttcactaaatggatggccacaagaaaaataaagtaaatgtcttaaataatttaaccataaattttctgtcatgtgatactggaatatgggatacttttcatgtttatatatatatatatatgtatatatatatacatatatatatatatataaacatgaaatatatatatatggctcctttgtgccccatgtcattttcagattatggtagcatgctgatacagcaccatgaaagaactcaaggaaaatatatcaatgtaagaagttcactcttagacctagtgttctgaggtcacatgggtttggactgtctcaatcagaaagattaatgactgttatcaagaacatgaacattggcttcctccatagagaagaaatcagtatctgagttgcataccaggcagtattctggttatggattttgaccattgattacctttctcaatgtaatgaagtattttacagtcaatttgtggtgtaaatgttgctcttgtctttccttgcttacaaactactttcacattgaacagctgtgagacagacatattgagatgcctgcccttgttagtattcattttatgctgcccaagatatcatttaatttagacttaacaagtatttccttgtgattatattactctgtccttgttaataaagtgctgctgtgtttgactctgaacatactaccaaaacttcttcaaagagttttttatgaaagactttcctcctttacaagaaagaaatggggtgctgcctttctgtttagtaaaagcagaatttgcagtggcatctaaagagatcttttttaaataaaaattatgtattgtggcataatcctttttttgagctctacagagaacagtcttttggtaatagtggcaggtatttattccttctgaatatataccccattataggaataactgttacttatttaggattccatcattgaaaattttgacccaaggcacagcagtgaaatttatagttctcaatttagttgtcattattgacaggcattggtattattagtcattgctaagcaactaaaacttcatcagttcaaataagttttaattgtcaaatgaagtataaacacatgaactttctagaaatatttcctcttttggataggtctttaaccagttcatatatatactttgtcaaatatatggatgtgtatgtgtacatttataagaaccagtatggatacatccattcactgtggtacattttaaaataaaatattttagcagtgaatatggaaaaaggtgtt

SEQ ID NO: 55620 - DNA, 4462 bp, Homo sapiens
gtctccccgccccgcccctcgtctcctccaagatggcgagcggcggcagcgggggggtgtcagtacctgcgctgtggagtgaagtgaaccggtatggccagaacggcgacttcacgcgcgctctcaagaccgtcaataagatactacagatcaacaaagatgacgtaactgccctgcattgtaaagtggtatgccttatccagaatggaagtttcaaggaagctttgaatgtcatcaatactcacaccaaagtgttagccaataactctctctcctttgaaaaggcatattgcgagtacaggctgaacagaattgagaatgccttgaagacaatagaaagtgccaaccagcagacagacaaactgaaggagctttatggacaagtgttataccgtttggaacgctatgatgaatgcttagcagtgtatagagatctcgtccgaaactcccaagatgattatgatgaggagaggaaaacaaacctttcagcagttgttgcagctcaaagcaattgggaaaaagtggttccagagaacctgggcctccaagaaggcacacatgagctgtgctacaacactgcatgtgcactgataggccaaggccagctgaaccaggccatgaaaatcctacaaaaagctgaaggttggaagtttgttaaacttatctgtaaatataacgtgcatataactttgtagagtatcttctaaaattgcatttgacttctgtgaaattattaaatggaagttattgatgcagtgacaatttctccaagttcctgtcgtctttctctctcttttttttttttccagcctgggcaacagagtgagacctccaactttaaaaacaaacaaaaaaaatattaaaaaactaaataactgaaatgctagtagtgtttatctctgggtggtaggattgtttatttttatacttttctataattgatttttcgcaattaatatttactacatttgtattttttaatgcactttacaaatatttttagcacagacacaacaaatgaaagcaaagtgccaaagagctgggaaagtcaagagactgataatatatatgtagtatatttgatgctaatgtaaatttcacaactgcttgttactacgattatcttggaatcttctgcttaggaatttagatcttgctctttggaatagtgaaagaaatgggatttacccagcaatactacttttaaaacaatttttctcctgtagatctttgccgccgttcattatcagaagacactgatgggactgaggaagacccacaggcagaactggccatcattcatggtcagatggcttatattctgcagcttcagggtcgaacagaggaggctttgcaactttacaatcaaataataaaactaaaaccaacagatgtgggattactagctgtaattgcaaataacatcattaccattaacaaggaccaaaatgtctttgactccaagaagaaagtgaaattaaccaatgcggaaggagtagagtttaagctttccaagaaacaactacaagctatagaatttaacaaagctttacttgctatgtacacaaaccaggctgaacaatgccgcaaaatatctgccagtttacagtcccaaagtcccgagcatctcttacctgtgttaatccaagctgcccagctctgccgtgaaaagcagcacacaaaagcaatagagctgcttcaggaattttcagatcagcatccagaaaatgcagctgaaattaagctgaccatggcacagttgaaaatttctcaaggtaatatttctaaagcatgtctaatattgagaagcatagaggagttaaagcataaaccaggcatggtatctgcattagttaccatgtatagccatgaagaagatattgatagtgccattgaggtcttcacacaagctatccagtggtatcaaaaccatcagccaaaatctcctgctcatttgtccttgataagagaagctgcaaacttcaaactcaaatatgggcggaagaaggaggcaattagtgacctacaacagctgtggaaacaaaatccaaaagatattcacaccctggcacagcttatttctgcttactcacttgtagatccagagaaagccaaagctcttagtaaacacttgccatcgtcagatagtatgtctctaaaagtagatgttgaggctcttgaaaattctgctggtgctacatacattcggaagaagggtggaaaagttactggagatagtcaaccaaaggaacaaggacagggagatttgaaaaagaagaaaaagaaaaagaagggaaaattgcctaagaattatgacccaaaagttaccccagatccagaaagatggctgccaatgcgagaacgttcttactaccggggaagaaagaagggtaaaaagaaggatcagattggaaaagggacccagggagcaactgcaggagcttcatctgaactggatgccagtaaaactgtgagcagcccacccacctccccaagacctggcagtgctgcaacagtatctgcctctacaagtaacatcatacccccaagacaccagaaacctgcaggggctccagcaacaaaaaagaaacagcaacagaaaaagaagaaaggtggaaaaggtggctggtgatgagaatattcttgttgcaggctgtttttaaactagtgtcagtgacactaggaatataataaaggtaacacagcaagaagcacagaactactccctcttcatctccatattttcataatttcttgtgtttcaaatagggaaacatcttcctcaaagtctgcctagtgagatatggcctactggttgcctcatagctttgtacagattatgaggactgaaaataattgggcatttacccatcttggtatctgttgtatcctttatctgtgtgtgctgatttgatcttttttcagtttcacataccttatctaaggtttcccaggatttaaacagaaactacttctatgatttcagctggagtctgaagatacttgtttctgttcaagtcccactttaaattatgtcttaggagactgaaagtggaatcttctgagcattcctaaatatctgcttagaaatatcatgtgataaagagggaccttcttaatacactgatgttcttcactaaatggatggccacaagaaaaataaagtaaatgtcttaaataatttaaccataaattttctgtcatgtgatactggaatatgggatacttttcatgtttatatatatatatatatgtatatatatatacatatatatatatatataaacatgaaatatatatatatggctcctttgtgccccatgtcattttcagattatggtagcatgctgatacagcaccatgaaagaactcaaggaaaatatatcaatgtaagaagttcactcttagacctagtgttctgaggtcacatgggtttggactgtctcaatcagaaagattaatgactgttatcaagaacatgaacattggcttcctccatagagaagaaatcagtatctgagttgcataccaggcagtattaaaatctaacaggtctgtttggcccattgatagatactcaaatggtgtctccttctggttatggattttgaccattgattacctttctcaatgtaatgaagtattttacagtcaatttgtggtgtaaatgttgctcttgtctttccttgcttacaaactactttcacattgaacagctgtgagacagacatattgagatgcctgcccttgttagtattcattttatgctgcccaagatatcatttaatttagacttaacaagtatttccttgtgattatattactctgtccttgttaataaagtgctgctgtgtttgactctgaacatactaccaaaacttcttcaaagagttttttatgaaagactttcctcctttacaagaaagaaatggggtgctgcctttctgtttagtaaaagcagaatttgcagtggcatctaaagagatcttttttaaataaaaattatgtattgtggcataatcctttttttgagctctacagagaacagtcttttggtaatagtggcaggtatttattccttctgaatatataccccattataggaataactgttacttatttaggattccatcattgaaaattttgacccaaggcacagcagtgaaatttatagttctcaatttagttgtcattattgacaggcattggtattattagtcattgctaagcaactaaaacttcatcagttcaaataagttttaattgtcaaatgaagtataaacacatgaactttctagaaatatttcctcttttggataggtctttaaccagttcatatatatactttgtcaaatatatggatgtgtatgtgtacatttataagaaccagtatggatacatccattcactgtggtacattttaaaataaaatattttagcagtgaatatggaaaaaggtgtt

SEQ ID NO: 55621 - DNA, 3078 bp, Homo sapiens
cggacgcgtgggtcgacccacgcgtccggacccacgcgtccgattaccattaacaaggaccaaaatgtctttgactccaagaagaaagtgaaattaaccaatgcggaaggagtagagtttaagctttccaagaaacaactacaagctatagaatttaacaaagctttacttgctatgtacacaaaccaggctgaacaatgccgcaaaatatctgccagtttacagtcccaaagtcccgagcatctcttacctgtgttaatccaagctgcccagctctgccgtgaaaagcagcacacaaaagcaatagagctgcttcaggaattttcagatcagcatccagaaaatgcagctgaaattaagctgaccatggcacagttgaaaatttctcaaggtaatatttctaaagcatgtctaatattgagaagcatagaggagttaaagcataaaccaggcatggtatctgcattagttaccatgtatagccatgaagaagatattgatagtgccattgaggtcttcacacaagctatccagtggtatcaaaaccatcagccaaaatctcctgctcatttgtccttgataagagaagctgcaaacttcaaactcaaatatgggcggaagaaggaggcaattagtgacctacaacagctgtggaaacaaaatccaaaagatattcacaccctggcacagcttatttctgcttactcacttgtagatccagagaaagccaaagctcttagtaaacacttgccatcgtcagatagtatgtctctaaaagtagatgttgaggctcttgaaaattctgctggtgctacatacattcggaagaagggtggaaaagttactggagatagtcaaccaaaggaacaaggacagggagatttgaaaaagaagaaaaagaaaaagaagggaaaattgcctaagaattatgacccaaaagttaccccagatccagaaagatggctgccaatgcgagaacgttcttactaccggggaagaaagaagggtaaaaagaaggatcagattggaaaagggacccagggagcaactgcaggagcttcatctgaactggatgccagtaaaactgtgagcagcccacccacctccccaagacctggcagtgctgcaacagtatctgcctctacaagtaacatcatacccccaagacaccagaaacctgcaggggctccagcaacaaaaaagaaacagcaacagaaaaagaagaaaggtggaaaaggtggctggtgatgagaatattcttgttgcaggctgtttttaaactagtgtcagtgacactaggaatataataaaggtaacacagcaagaagcacagaactactccctcttcatctccatattttcataatttcttgtgtttcaaatagggaaacatcttcctcaaagtctgcctagtgagatatggcctactggttgcctcatagctttgtacagattatgaggactgaaaataattgggcatttacccatcttggtatctgttgtatcctttatctgtgtgtgctgatttgatcttttttcagtttcacataccttatctaaggtttcccaggatttaaacagaaactacttctatgatttcagctggagtctgaagatacttgtttctgttcaagtcccactttaaattatgtcttaggagactgaaagtggaatcttctgagcattcctaaatatctgcttagaaatatcatgtgataaagagggaccttcttaatacactgatgttcttcactaaatggatggccacaagaaaaataaagtaaatgtcttaaataatttaaccataaattttctgtcatgtgatactggaatatgggatacttttcatgtttatatatatatatatatgtatatatatatacatatatatatatatataaacatgaaatatatatatatggctcctttgtgccccatgtcattttcagattatggtagcatgctgatacagcaccatgaaagaactcaaggaaaatatatcaatgtaagaagttcactcttagacctagtgttctgaggtcacatgggtttggactgtctcaatcagaaagattaatgactgttatcaagaacatgaacattggcttcctccatagagaagaaatcagtatctgagttgcataccaggcagtattaaaatctaacaggtctgtttggcccattgatagatactcaaatggtgtctccttctggttatggattttgaccattgattacctttctcaatgtaatgaagtattttacagtcaatttgtggtgtaaatgttgctcttgtctttccttgcttacaaactactttcacattgaacagctgtgagacagacatattgagatgcctgcccttgttagtattcattttatgctgcccaagatatcatttaatttagacttaacaagtatttccttgtgattatattactctgtccttgttaataaagtgctgctgtgtttgactctgaacatactaccaaaacttcttcaaagagttttttatgaaagactttcctcctttacaagaaagaaatggggtgctgcctttctgtttagtaaaagcagaatttgcagtggcatctaaagagatcttttttaaataaaaattatgtattgtggcataatcctttttttgagctctacagagaacagtcttttggtaatagtggcaggtatttattccttctgaatatataccccattataggaataactgttacttatttaggattccatcattgaaaattttgacccaaggcacagcagtgaaatttatagttctcaatttagttgtcattattgacaggcattggtattattagtcattgctaagcaactaaaacttcatcagttcaaataagttttaattgtcaaatgaagtataaacacatgaactttctagaaatatttcctcttttggataggtctttaaccagttcatatatatactttgtcaaatatatggatgtgtatgtgtacatttataagaaccagtatggatacatccattcactgtggtacattttaaaataaaatattttagcagtgaatatggaaaaaggtgtt

SEQ ID NO: 55622 - DNA, 1970 bp, Homo sapiens
  misc_feature (1907)..(1907): n is a, c, g, or t
  misc_feature (1970)..(1970): n is a, c, g, or t
gtctccccgccccgcccctcgtctcctccaagatggcgagcggcggcagcgggggggtgtcagtacctgcgctgtggagtgaagtgaaccggtatggccagaacggcgacttcacgcgcgctctcaagaccgtcaataagatactacagatcaacaaagatgacgtaactgccctgcattgtaaagtggtatgccttatccagaatggaagtttcaaggaagctttgaatgtcatcaatactcacaccaaagtgttagccaataactctctctcctttgaaaaggcatattgcgagtacaggctgaacagaattgagaatgccttgaagacaatagaaagtgccaaccagcagacagacaaactgaaggagctttatggacaagtgttataccgtttggaacgctatgatgaatgcttagcagtgtatagagatctcgtccgaaactcccaagatgattatgatgaggagaggaaaacaaacctttcagcagttgttgcagctcaaagcaattgggaaaaagtggttccagagaacctgggcctccaagaaggcacacatgagctgtgctacaacactgcatgtgcactgataggccaaggccagctgaaccaggccatgaaaatcctacaaaaagctgaagatctttgccgccgttcattatcagaagacactgatgggactgaggaagacccacaggcagaactggccatcattcatggtcagatggcttatattctgcagcttcagggtcgaacagaggaggctttgcaactttacaatcaaataataaaactaaaaccaacagatgtgggattactagctgtaattgcaaataacatcattaccattaacaaggaccaaaatgtctttgactccaagaagaaagtgaaattaaccaatgcggaaggagtagagtttaagctttccaagaaacaactacaagctatagaatttaacaaagctttacttgctatgtacacaaaccaggctgaacaatgccgcaaaatatctgccagtttacagtcccaaagtcccgagcatctcttacctgtgttaatccaagctgcccagctctgccgtgaaaagcagcacacaaaagcaatagagctgcttcaggaattttcagatcagcatccagaaaatgcagctgaaattaagctgaccatggcacagttgaaaatttctcaaggtaatatttctaaagcatgtctaatattgagaagcatagaggagttaaagcataaaccaggcatggtatctgcattagttaccatgtatagccatgaagaagatattgatagtgccattgaggtcttcacacaagctatccagtggtatcaaaaccatcagccaaaatctcctgctcatttgtccttgataagagaagctgcaaacttcaaactcaaatatgggcggaagaaggaggcaattagtgacctacaacagctgtggaaacaaaatccaaaagatattcacaccctggcacagcttatttctgcttactcacttgtagatccagagaaagccaaagctcttagtaaacacttgccatcgtcagatagtatgtctctaaaagtagatgttgaggctcttgaaaattctgctggtgctacatacattcggaagaagggtggaaaagttactggagatagtcaaccaaaggaacaaggacagggagatttgaaaaagaagaaaaagaaaaagaagggaaaattgcctaagaattatgacccaaaagttaccccagatccagaaagatggctgccaatgcgagaacgttcttactaccggggaagaaagaagggtaaaaagaaggatcagattggaaaagggacccagggagcaactgcaggagcttcatctgaactggatgccagtaaaactgtgagcagcccacaccccccnccaatcggactgccaaattctccggtttgccccgggatattatagaaaattatttgtatgaan

SEQ ID NO: 55623 - DNA, 1943 bp, Homo sapiens
gtctccccgccccgcccctcgtctcctccaagatggcgagcggcggcagcgggggggtgtcagtacctgcgctgtggagtgaagtgaaccggtatggccagaacggcgacttcacgcgcgctctcaagaccgtcaataagatactacagatcaacaaagatgacgtaactgccctgcattgtaaagtggtatgccttatccagaatggaagtttcaaggaagctttgaatgtcatcaatactcacaccaaagtgttagccaataactctctctcctttgaaaaggcatattgcgagtacaggctgaacagaattgagaatgccttgaagacaatagaaagtgccaaccagcagacagacaaactgaaggagctttatggacaagtgttataccgtttggaacgctatgatgaatgcttagcagtgtatagagatctcgtccgaaactcccaagatgattatgatgaggagaggaaaacaaacctttcagcagttgttgcagctcaaagcaattgggaaaaagtggttccagagaacctgggcctccaagaaggcacacatgagctgtgctacaacactgcatgtgcactgataggccaaggccagctgaaccaggccatgaaaatcctacaaaaagctgaagatctttgccgccgttcattatcagaagacactgatgggactgaggaagacccacaggcagaactggccatcattcatggtcagatggcttatattctgcagcttcagggtcgaacagaggaggctttgcaactttacaatcaaataataaaactaaaaccaacagatgtgggattactagctgtaattgcaaataacatcattaccattaacaaggaccaaaatgtctttgactccaagaagaaagtgaaattaaccaatgcggaaggagtagagtttaagctttccaagaaacaactacaagctatagaatttaacaaagctttacttgctatgtacacaaaccaggctgaacaatgccgcaaaatatctgccagtttacagtcccaaagtcccgagcatctcttacctgtgttaatccaagctgcccagctctgccgtgaaaagcagcacacaaaagcaatagagctgcttcaggaattttcagatcagcatccagaaaatgcagctgaaattaagctgaccatggcacagttgaaaatttctcaaggtaatatttctaaagcatgtctaatattgagaagcatagaggagttaaagcataaaccaggcatggtatctgcattagttaccatgtatagccatgaagaagatattgatagtgccattgaggtcttcacacaagctatccagtggtatcaaaaccatcagccaaaatctcctgctcatttgtccttgataagagaagctgcaaacttcaaactcaaatatgggcggaagaaggaggcaattagtgacctacaacagctgtggaaacaaaatccaaaagatattcacaccctggcacagcttatttctgcttactcacttgtagatccagagaaagccaaagctcttagtaaacacttgccatcgtcagatagtatgtctctaaaagtagatgttgaggctcttgaaaattctgctggtgctacatacattcggaagaagggtggaaaagttactggagatagtcaaccaaaggaacaaggacagggagatttgaaaaagaagaaaaagaaaaagaagggaaaattgcctaagaattatgacccaaaagttaccccagatccagaaagatggctgccaatgcgagaacgttcttactaccggggaagaaagaagggtaaaaagaaggatcagattggaaaagggacccagggagcaactgcaggagcttcatctgaactggatgccagtaaaactgtgagcagcccacccacctccccaagagcgactaagttaagatcctgtagagtcacc

SEQ ID NO: 55624 - DNA, 2948 bp, Homo sapiens
cttaaatgtccagcagtgtcttattgtagaaacatttctaagggcttattctcaacttctgtacttaccaaaccatttgtgaactggcactgctttaaaggaaagttttattttacagatatctaccttcatatttggaaaacacggttgttcatggtatttctagaagtaaagttaactatgttctctaaagggagtagcttttatgataaatcaggtattagcggagagcctttatttgctatttcttcagcgttttttattttcaaaagcggtattctgggagtgaagggggagttcactaatttatacctttggctgtgtaggtatctgcattagttaccatgtatagccatgaagaagatattgatagtgccattgaggtcttcacacaagctatccagtggtatcaaaaccatcagccaaaatctcctgctcatttgtccttgataagagaagctgcaaacttcaaactcaaatatgggcggaagaaggaggcaattagtgacctacaacagctgtggaaacaaaatccaaaagatattcacaccctggcacagcttatttctgcttactcacttgtagatccagagaaagccaaagctcttagtaaacacttgccatcgtcagatagtatgtctctaaaagtagatgttgaggctcttgaaaattctgctggtgctacatacattcggaagaagggtggaaaagttactggagatagtcaaccaaaggaacaaggacagggagatttgaaaaagaagaaaaagaaaaagaagggaaaattgcctaagaattatgacccaaaagttaccccagatccagaaagatggctgccaatgcgagaacgttcttactaccggggaagaaagaagggtaaaaagaaggatcagattggaaaagggacccagggagcaactgcaggagcttcatctgaactggatgccagtaaaactgtgagcagcccacccacctccccaagacctggcagtgctgcaacagtatctgcctctacaagtaacatcatacccccaagacaccagaaacctgcaggggctccagcaacaaaaaagaaacagcaacagaaaaagaagaaaggtggaaaaggtggctggtgatgagaatattcttgttgcaggctgtttttaaactagtgtcagtgacactaggaatataataaaggtaacacagcaagaagcacagaactactccctcttcatctccatattttcataatttcttgtgtttcaaatagggaaacatcttcctcaaagtctgcctagtgagatatggcctactggttgcctcatagctttgtacagattatgaggactgaaaataattgggcatttacccatcttggtatctgttgtatcctttatctgtgtgtgctgatttgatcttttttcagtttcacataccttatctaaggtttcccaggatttaaacagaaactacttctatgatttcagctggagtctgaagatacttgtttctgttcaagtcccactttaaattatgtcttaggagactgaaagtggaatcttctgagcattcctaaatatctgcttagaaatatcatgtgataaagagggaccttcttaatacactgatgttcttcactaaatggatggccacaagaaaaataaagtaaatgtcttaaataatttaaccataaattttctgtcatgtgatactggaatatgggatacttttcatgtttatatatatatatatatgtatatatatatacatatatatatatatataaacatgaaatatatatatatggctcctttgtgccccatgtcattttcagattatggtagcatgctgatacagcaccatgaaagaactcaaggaaaatatatcaatgtaagaagttcactcttagacctagtgttctgaggtcacatgggtttggactgtctcaatcagaaagattaatgactgttatcaagaacatgaacattggcttcctccatagagaagaaatcagtatctgagttgcataccaggcagtattaaaatctaacaggtctgtttggcccattgatagatactcaaatggtgtctccttctggttatggattttgaccattgattacctttctcaatgtaatgaagtattttacagtcaatttgtggtgtaaatgttgctcttgtctttccttgcttacaaactactttcacattgaacagctgtgagacagacatattgagatgcctgcccttgttagtattcattttatgctgcccaagatatcatttaatttagacttaacaagtatttccttgtgattatattactctgtccttgttaataaagtgctgctgtgtttgactctgaacatactaccaaaacttcttcaaagagttttttatgaaagactttcctcctttacaagaaagaaatggggtgctgcctttctgtttagtaaaagcagaatttgcagtggcatctaaagagatcttttttaaataaaaattatgtattgtggcataatcctttttttgagctctacagagaacagtcttttggtaatagtggcaggtatttattccttctgaatatataccccattataggaataactgttacttatttaggattccatcattgaaaattttgacccaaggcacagcagtgaaatttatagttctcaatttagttgtcattattgacaggcattggtattattagtcattgctaagcaactaaaacttcatcagttcaaataagttttaattgtcaaatgaagtataaacacatgaactttctagaaatatttcctcttttggataggtctttaaccagttcatatatatactttgtcaaatatatggatgtgtatgtgtacatttataagaaccagtatggatacatccattcactgtggtacattttaaaataaaatattttagcagtgaatatggaaaaaggtgtt

SEQ ID NO: 55625 - DNA, 2759 bp, Homo sapiens
ggacctcaacgcgtcgccacgcgtcgtagttctagatcgcgatctaaactggcacagttgacatttctcaaggtaatatttctaaagcatgtctaatattgagaagcatagaggagttaaagcataaaccaggcatggtatctgcattagttaccatgtatagccatgaagaagatattgatagtgccattgaggtcttcacacaagctatccagtggtatcaaaaccatcagccaaaatctcctgctcatttgtccttgataagagaagctgcaaacttcaaactcaaatatgggcggaagaaggaggcaattagtgacctacaacagctgtggaaacaaaatccaaaagatattcacaccctggcacagcttatttctgcttactcacttgtagatccagagaaagccaaagctcttagtaaacacttgccatcgtcagatagtatgtctctaaaagtagatgttgaggctcttgaaaattctgctggtgctacatacattcggaagaagggtggaaaagttactggagatagtcaaccaaaggaacaaggacagggagatttgaaaaagaagaaaaagaaaaagaagggaaaattgcctaagaattatgacccaaaagttaccccagatccagaaagatggctgccaatgcgagaacgttcttactaccggggaagaaagaagggtaaaaagaaggatcagattggaaaagggacccagggagcaactgcaggagcttcatctgaactggatgccagtaaaactgtgagcagcccacccacctccccaagacctggcagtgctgcaacagtatctgcctctacaagtaacatcatacccccaagacaccagaaacctgcaggggctccagcaacaaaaaagaaacagcaacagaaaaagaagaaaggtggaaaaggtggctggtgatgagaatattcttgttgcaggctgtttttaaactagtgtcagtgacactaggaatataataaaggtaacacagcaagaagcacagaactactccctcttcatctccatattttcataatttcttgtgtttcaaatagggaaacatcttcctcaaagtctgcctagtgagatatggcctactggttgcctcatagctttgtacagattatgaggactgaaaataattgggcatttacccatcttggtatctgttgtatcctttatctgtgtgtgctgatttgatcttttttcagtttcacataccttatctaaggtttcccaggatttaaacagaaactacttctatgatttcagctggagtctgaagatacttgtttctgttcaagtcccactttaaattatgtcttaggagactgaaagtggaatcttctgagcattcctaaatatctgcttagaaatatcatgtgataaagagggaccttcttaatacactgatgttcttcactaaatggatggccacaagaaaaataaagtaaatgtcttaaataatttaaccataaattttctgtcatgtgatactggaatatgggatacttttcatgtttatatatatatatatatgtatatatatatacatatatatatatatataaacatgaaatatatatatatggctcctttgtgccccatgtcattttcagattatggtagcatgctgatacagcaccatgaaagaactcaaggaaaatatatcaatgtaagaagttcactcttagacctagtgttctgaggtcacatgggtttggactgtctcaatcagaaagattaatgactgttatcaagaacatgaacattggcttcctccatagagaagaaatcagtatctgagttgcataccaggcagtattaaaatctaacaggtctgtttggcccattgatagatactcaaatggtgtctccttctggttatggattttgaccattgattacctttctcaatgtaatgaagtattttacagtcaatttgtggtgtaaatgttgctcttgtctttccttgcttacaaactactttcacattgaacagctgtgagacagacatattgagatgcctgcccttgttagtattcattttatgctgcccaagatatcatttaatttagacttaacaagtatttccttgtgattatattactctgtccttgttaataaagtgctgctgtgtttgactctgaacatactaccaaaacttcttcaaagagttttttatgaaagactttcctcctttacaagaaagaaatggggtgctgcctttctgtttagtaaaagcagaatttgcagtggcatctaaagagatcttttttaaataaaaattatgtattgtggcataatcctttttttgagctctacagagaacagtcttttggtaatagtggcaggtatttattccttctgaatatataccccattataggaataactgttacttatttaggattccatcattgaaaattttgacccaaggcacagcagtgaaatttatagttctcaatttagttgtcattattgacaggcattggtattattagtcattgctaagcaactaaaacttcatcagttcaaataagttttaattgtcaaatgaagtataaacacatgaactttctagaaatatttcctcttttggataggtctttaaccagttcatatatatactttgtcaaatatatggatgtgtatgtgtacatttataagaaccagtatggatacatccattcactgtggtacattttaaaataaaatattttagcagtgaatatggaaaaaggtgtt

SEQ ID NO: 55626 - DNA, 1798 bp, Homo sapiens
gtctccccgccccgcccctcgtctcctccaagatggcgagcggcggcagcgggggggtgtcagtacctgcgctgtggagtgaagtgaaccggtatggccagaacggcgacttcacgcgcgctctcaagaccgtcaataagatactacagatcaacaaagatgacgtaactgccctgcattgtaaagtggtatgccttatccagaatggaagtttcaaggaagctttgaatgtcatcaatactcacaccaaagtgttagccaataactctctctcctttgaaaaggcatattgcgagtacaggctgaacagaattgagaatgccttgaagacaatagaaagtgccaaccagcagacagacaaactgaaggagctttatggacaagtgttataccgtttggaacgctatgatgaatgcttagcagtgtatagagatctcgtccgaaactcccaagatgattatgatgaggagaggaaaacaaacctttcagcagttgttgcagctcaaagcaattgggaaaaagtggttccagagaacctgggcctccaagaaggcacacatgagctgtgctacaacactgcatgtgcactgataggccaaggccagctgaaccaggccatgaaaatcctacaaaaagctgaagatctttgccgccgttcattatcagaagacactgatgggactgaggaagacccacaggcagaactggccatcattcatggtcagatggcttatattctgcagcttcagggtcgaacagaggaggctttgcaactttacaatcaaataataaaactaaaaccaacagatgtgggattactagctgtaattgcaaataacatcattaccattaacaaggaccaaaatgtctttgactccaagaagaaagtgaaattaaccaatgcggaaggagtagagtttaagctttccaagaaacaactacaagctatagaatttaacaaagctttacttgctatgtacacaaaccaggctgaacaatgccgcaaaatatctgccagtttacagtcccaaagtcccgagcatctcttacctgtgttaatccaagctgcccagctctgccgtgaaaagcagcacacaaaagcaatagagctgcttcaggaattttcagatcagcatccagaaaatgcagctgaaattaagctgaccatggcacagttgaaaatttctcaaggtaatatttctaaagcatgtctaatattgagaagcatagaggagttaaagcataaaccaggcatggtatctgcattagttaccatgtatagccatgaagaagatattgatagtgccattgaggtcttcacacaagctatccagtggtatcaaaaccatcagccaaaatctcctgctcatttgtccttgataagagaagctgcaaacttcaaactcaaatatgggcggaagaaggaggcaattagtgacctacaacagctgtggaaacaaaatccaaaagatattcacaccctggcacagcttatttctgcttactcacttgtagatccagagaaagccaaagctcttagtaaacacttgccatcgtcagatagtatgtctctaaaagtagatgttgaggctcttgaaaattctgctggtgctacatacattcggaagaagggtggaaaagttactggagatagtcaaccaaaggaacaagggtaatatttttcattgtaacgttctctaatgctgattttaaattagacaaggaataaaaaatacattctcatagaaatttcatgtgaataaagttctagttctctttgttccttttccatttctct

SEQ ID NO: 55627 - DNA, 2565 bp, Homo sapiens
tcccaaagtgttgggattacagtattttaatgcactacaaatgccatgcccttagactggataggtttacaagctgtacgaattgaaaaaatcaaatatgggcggaagaaggaggcaattagtgacctacaacagctgtggaaacaaaatccaaaagatattcacaccctggcacagcttatttctgcttactcacttgtagatccagagaaagccaaagctcttagtaaacacttgccatcgtcagatagtatgtctctaaaagtagatgttgaggctcttgaaaattctgctggtgctacatacattcggaagaagggtggaaaagttactggagatagtcaaccaaaggaacaaggacagggagatttgaaaaagaagaaaaagaaaaagaagggaaaattgcctaagaattatgacccaaaagttaccccagatccagaaagatggctgccaatgcgagaacgttcttactaccggggaagaaagaagggtaaaaagaaggatcagattggaaaagggacccagggagcaactgcaggagcttcatctgaactggatgccagtaaaactgtgagcagcccacccacctccccaagacctggcagtgctgcaacagtatctgcctctacaagtaacatcatacccccaagacaccagaaacctgcaggggctccagcaacaaaaaagaaacagcaacagaaaaagaagaaaggtggaaaaggtggctggtgatgagaatattcttgttgcaggctgtttttaaactagtgtcagtgacactaggaatataataaaggtaacacagcaagaagcacagaactactccctcttcatctccatattttcataatttcttgtgtttcaaatagggaaacatcttcctcaaagtctgcctagtgagatatggcctactggttgcctcatagctttgtacagattatgaggactgaaaataattgggcatttacccatcttggtatctgttgtatcctttatctgtgtgtgctgatttgatcttttttcagtttcacataccttatctaaggtttcccaggatttaaacagaaactacttctatgatttcagctggagtctgaagatacttgtttctgttcaagtcccactttaaattatgtcttaggagactgaaagtggaatcttctgagcattcctaaatatctgcttagaaatatcatgtgataaagagggaccttcttaatacactgatgttcttcactaaatggatggccacaagaaaaataaagtaaatgtcttaaataatttaaccataaattttctgtcatgtgatactggaatatgggatacttttcatgtttatatatatatatatatgtatatatatatacatatatatatatatataaacatgaaatatatatatatggctcctttgtgccccatgtcattttcagattatggtagcatgctgatacagcaccatgaaagaactcaaggaaaatatatcaatgtaagaagttcactcttagacctagtgttctgaggtcacatgggtttggactgtctcaatcagaaagattaatgactgttatcaagaacatgaacattggcttcctccatagagaagaaatcagtatctgagttgcataccaggcagtattaaaatctaacaggtctgtttggcccattgatagatactcaaatggtgtctccttctggttatggattttgaccattgattacctttctcaatgtaatgaagtattttacagtcaatttgtggtgtaaatgttgctcttgtctttccttgcttacaaactactttcacattgaacagctgtgagacagacatattgagatgcctgcccttgttagtattcattttatgctgcccaagatatcatttaatttagacttaacaagtatttccttgtgattatattactctgtccttgttaataaagtgctgctgtgtttgactctgaacatactaccaaaacttcttcaaagagttttttatgaaagactttcctcctttacaagaaagaaatggggtgctgcctttctgtttagtaaaagcagaatttgcagtggcatctaaagagatcttttttaaataaaaattatgtattgtggcataatcctttttttgagctctacagagaacagtcttttggtaatagtggcaggtatttattccttctgaatatataccccattataggaataactgttacttatttaggattccatcattgaaaattttgacccaaggcacagcagtgaaatttatagttctcaatttagttgtcattattgacaggcattggtattattagtcattgctaagcaactaaaacttcatcagttcaaataagttttaattgtcaaatgaagtataaacacatgaactttctagaaatatttcctcttttggataggtctttaaccagttcatatatatactttgtcaaatatatggatgtgtatgtgtacatttataagaaccagtatggatacatccattcactgtggtacattttaaaataaaatattttagcagtgaatatggaaaaaggtgtt

SEQ ID NO: 55628 - DNA, 1325 bp, Homo sapiens
gtctccccgccccgcccctcgtctcctccaagatggcgagcggcggcagcgggggggtgtcagtacctgcgctgtggagtgaagtgaaccggtatggccagaacggcgacttcacgcgcgctctcaagaccgtcaataagatactacagatcaacaaagatgacgtaactgccctgcattgtaaagtggtatgccttatccagaatggaagtttcaaggaagctttgaatgtcatcaatactcacaccaaagtgttagccaataactctctctcctttgaaaaggcatattgcgagtacaggctgaacagaattgagaatgccttgaagacaatagaaagtgccaaccagcagacagacaaactgaaggagctttatggacaagtgttataccgtttggaacgctatgatgaatgcttagcagtgtatagagatctcgtccgaaactcccaagatgattatgatgaggagaggaaaacaaacctttcagcagttgttgcagctcaaagcaattgggaaaaagtggttccagagaacctgggcctccaagaaggcacacatgagctgtgctacaacactgcatgtgcactgataggccaaggccagctgaaccaggccatgaaaatcctacaaaaagctgaagatctttgccgccgttcattatcagaagacactgatgggactgaggaagacccacaggcagaactggccatcattcatggtcagatggcttatattctgcagcttcagggtcgaacagaggaggctttgcaactttacaatcaaataataaaactaaaaccaacagatgtgggattactagctgtaattgcaaataacatcattaccattaacaaggaccaaaatgtctttgactccaagaagaaagtgaaattaaccaatgcggaaggagtagagtttaagctttccaagaaacaactacaagctatagaatttaacaaagctttacttgctatgtacacaaaccaggctgaacaatgccgcaaaatatctgccagtttacagtcccaaagtcccgagcatctcttacctgtgttaatccaagctgcccagctctgccgtgaaaagcagcacacaaaagcaatagagctgcttcaggaattttcagatcagcatccagaaaatgcagctgaaattaagctgaccatggcacagttgaaaatttctcaaggtaatatttctaaagcatgtctaatattgagaagcatagaggagttaaagcataaaccaggcatggtatctgcattagttaccatgtatagccatcagctccttcagtttgtctgtgcatcgataacaccggta

SEQ ID NO: 55629 - DNA, 2368 bp, Homo sapiens
ctacacagtatatgtggatgttctggaaaattcgtgctagtctgctccagtatcgagttcggaaaaacgggtgtaatagttactgggagcatactctaccaaaggatcatgcgtacaggcagatttgcaataagagaacatagaatgatgaaggggacgcatatgcctatccacattataacacctttaattaactcctcataatcgcacgactatgatggcatagtcggaattgacctaggagagcattgcttgactgaccgggaataagacgtaaggctcggagaaggacagggatctatgattgtgaagacacgcggaatccaggcagctagctgtccggagctgcatcgtagaactggatgccagtaaaactgtgagcagcccacccacctccccaagacctggcagtgctgcaacagtatctgcctctacaagtaacatcatacccccaagacaccagaaacctgcaggggctccagcaacaaaaaagaaacagcaacagaaaaagaagaaaggtggaaaaggtggctggtgatgagaatattcttgttgcaggctgtttttaaactagtgtcagtgacactaggaatataataaaggtaacacagcaagaagcacagaactactccctcttcatctccatattttcataatttcttgtgtttcaaatagggaaacatcttcctcaaagtctgcctagtgagatatggcctactggttgcctcatagctttgtacagattatgaggactgaaaataattgggcatttacccatcttggtatctgttgtatcctttatctgtgtgtgctgatttgatcttttttcagtttcacataccttatctaaggtttcccaggatttaaacagaaactacttctatgatttcagctggagtctgaagatacttgtttctgttcaagtcccactttaaattatgtcttaggagactgaaagtggaatcttctgagcattcctaaatatctgcttagaaatatcatgtgataaagagggaccttcttaatacactgatgttcttcactaaatggatggccacaagaaaaataaagtaaatgtcttaaataatttaaccataaattttctgtcatgtgatactggaatatgggatacttttcatgtttatatatatatatatatgtatatatatatacatatatatatatatataaacatgaaatatatatatatggctcctttgtgccccatgtcattttcagattatggtagcatgctgatacagcaccatgaaagaactcaaggaaaatatatcaatgtaagaagttcactcttagacctagtgttctgaggtcacatgggtttggactgtctcaatcagaaagattaatgactgttatcaagaacatgaacattggcttcctccatagagaagaaatcagtatctgagttgcataccaggcagtattaaaatctaacaggtctgtttggcccattgatagatactcaaatggtgtctccttctggttatggattttgaccattgattacctttctcaatgtaatgaagtattttacagtcaatttgtggtgtaaatgttgctcttgtctttccttgcttacaaactactttcacattgaacagctgtgagacagacatattgagatgcctgcccttgttagtattcattttatgctgcccaagatatcatttaatttagacttaacaagtatttccttgtgattatattactctgtccttgttaataaagtgctgctgtgtttgactctgaacatactaccaaaacttcttcaaagagttttttatgaaagactttcctcctttacaagaaagaaatggggtgctgcctttctgtttagtaaaagcagaatttgcagtggcatctaaagagatcttttttaaataaaaattatgtattgtggcataatcctttttttgagctctacagagaacagtcttttggtaatagtggcaggtatttattccttctgaatatataccccattataggaataactgttacttatttaggattccatcattgaaaattttgacccaaggcacagcagtgaaatttatagttctcaatttagttgtcattattgacaggcattggtattattagtcattgctaagcaactaaaacttcatcagttcaaataagttttaattgtcaaatgaagtataaacacatgaactttctagaaatatttcctcttttggataggtctttaaccagttcatatatatactttgtcaaatatatggatgtgtatgtgtacatttataagaaccagtatggatacatccattcactgtggtacattttaaaataaaatattttagcagtgaatatggaaaaaggtgtt

SEQ ID NO: 55630 - DNA, 1091 bp, Homo sapiens
gtctccccgccccgcccctcgtctcctccaagatggcgagcggcggcagcgggggggtgtcagtacctgcgctgtggagtgaagtgaaccggtatggccagaacggcgacttcacgcgcgctctcaagaccgtcaataagatactacagatcaacaaagatgacgtaactgccctgcattgtaaagtggtatgccttatccagaatggaagtttcaaggaagctttgaatgtcatcaatactcacaccaaagtgttagccaataactctctctcctttgaaaaggcatattgcgagtacaggctgaacagaattgagaatgccttgaagacaatagaaagtgccaaccagcagacagacaaactgaaggagctttatggacaagtgttataccgtttggaacgctatgatgaatgcttagcagtgtatagagatctcgtccgaaactcccaagatgattatgatgaggagaggaaaacaaacctttcagcagttgttgcagctcaaagcaattgggaaaaagtggttccagagaacctgggcctccaagaaggcacacatgagctgtgctacaacactgcatgtgcactgataggccaaggccagctgaaccaggccatgaaaatcctacaaaaagctgaagatcttgccgccgttcattatcagacacactgatggaactgtattatattaaaatactaaaaatccaaaaaaaaaagaaaaaaaaaaaaaaaaagaaaaaaaaaaaaaaaaaaaaaaaaaggggggggggggaaaaaaaattccccggggggggccaaatttgaggcgaaccatttttgagtaaaaaagggtcggcccataagtgaggggggagaataagcaagcaaggaggaggaggggggggagtaaaaaaccggtgggggaggtggaaaacgttgaaccagtggagattgtgtgaaagagacccaattctggggggtggcacatgttggccaactacaaacagaggtatagactgaggagaaaataaattgaggggtatatggtgttaaccacaggagatgtgtgggaagaaattggacaggactgttaaaatttcgagggataaaa

SEQ ID NO: 55631 - DNA, 210 bp, Homo sapiens
acctacaacagctgtggaagtaagctctgaaacgtggagttgtagaaataacacatttattgttgctacttgatatgagggagttacttgtttatattactttctccagttttataaacagttcaataattttcttatttcttcttttagacaaaatccaaaagatattcacaccctggcacagcttatttctgcttactcacttgtaga

SEQ ID NO: 55632 - DNA, 154 bp, Homo sapiens
caaatcttaactaatttgttagctttggtaagctgataccaagtcttaaaccatgtttatgataagtgcccaactaactcttatagagcacttacttaatgctctataaatattttatcacaaagatggtaatgatttttttttctctttgtag

SEQ ID NO: 55633 - DNA, 2253 bp, Homo sapiens
attcccaggcttagagacatcgtttaaacaaactatcttgaaaatattatgacacatctctcatttctttataatcgttatgcaggaaaattgcctaagaattatgacccaaaagttaccccagatccagaaagatggctgccaatgcgagaacgttcttactaccggggaagaaagaagggtaaaaagaaggatcagattggaaaagggacccagggagcaactgcaggagcttcatctgaactggatgccagtaaaactgtgagcagcccacccacctccccaagacctggcagtgctgcaacagtatctgcctctacaagtaacatcatacccccaagacaccagaaacctgcaggggctccagcaacaaaaaagaaacagcaacagaaaaagaagaaaggtggaaaaggtggctggtgatgagaatattcttgttgcaggctgtttttaaactagtgtcagtgacactaggaatataataaaggtaacacagcaagaagcacagaactactccctcttcatctccatattttcataatttcttgtgtttcaaatagggaaacatcttcctcaaagtctgcctagtgagatatggcctactggttgcctcatagctttgtacagattatgaggactgaaaataattgggcatttacccatcttggtatctgttgtatcctttatctgtgtgtgctgatttgatcttttttcagtttcacataccttatctaaggtttcccaggatttaaacagaaactacttctatgatttcagctggagtctgaagatacttgtttctgttcaagtcccactttaaattatgtcttaggagactgaaagtggaatcttctgagcattcctaaatatctgcttagaaatatcatgtgataaagagggaccttcttaatacactgatgttcttcactaaatggatggccacaagaaaaataaagtaaatgtcttaaataatttaaccataaattttctgtcatgtgatactggaatatgggatacttttcatgtttatatatatatatatatgtatatatatatacatatatatatatatataaacatgaaatatatatatatggctcctttgtgccccatgtcattttcagattatggtagcatgctgatacagcaccatgaaagaactcaaggaaaatatatcaatgtaagaagttcactcttagacctagtgttctgaggtcacatgggtttggactgtctcaatcagaaagattaatgactgttatcaagaacatgaacattggcttcctccatagagaagaaatcagtatctgagttgcataccaggcagtattaaaatctaacaggtctgtttggcccattgatagatactcaaatggtgtctccttctggttatggattttgaccattgattacctttctcaatgtaatgaagtattttacagtcaatttgtggtgtaaatgttgctcttgtctttccttgcttacaaactactttcacattgaacagctgtgagacagacatattgagatgcctgcccttgttagtattcattttatgctgcccaagatatcatttaatttagacttaacaagtatttccttgtgattatattactctgtccttgttaataaagtgctgctgtgtttgactctgaacatactaccaaaacttcttcaaagagttttttatgaaagactttcctcctttacaagaaagaaatggggtgctgcctttctgtttagtaaaagcagaatttgcagtggcatctaaagagatcttttttaaataaaaattatgtattgtggcataatcctttttttgagctctacagagaacagtcttttggtaatagtggcaggtatttattccttctgaatatataccccattataggaataactgttacttatttaggattccatcattgaaaattttgacccaaggcacagcagtgaaatttatagttctcaatttagttgtcattattgacaggcattggtattattagtcattgctaagcaactaaaacttcatcagttcaaataagttttaattgtcaaatgaagtataaacacatgaactttctagaaatatttcctcttttggataggtctttaaccagttcatatatatactttgtcaaatatatggatgtgtatgtgtacatttataagaaccagtatggatacatccattcactgtggtacattttaaaataaaatattttagcagtgaatatggaaaaaggtgtt

SEQ ID NO: 55634 - DNA, 530 bp, Homo sapiens
tctgcccacagaaccctctaaatccccttgtaaatttaactgttagtccaaagaggaacagctctttggacactaggaaaaaaccttgtagagagagtaaaaaatttaacacccatagtaggcctaaaagcagcacacaaaagcaatagagctgcttcaggaattttcagatcagcatccagaaaatgcagctgaaattaagctgaccatggcacagttgaaaatttctcaaggtaatatttctaaagcatgtctaatattgagaagcatagaggagttaaagcataaaccaggcatggtatctgcattagttaccatgtatagccatgaagaagatattgatagtgccattgaggtcttcacacaagctatccagtggtatcaaaaccatcagccaaaatctcctgctcatttgtccttgataagagaagctgcaaacttcaaactcaaatatgggcggaagaaggaggcaattagtgttcctcggcagcagagatatcaacctccaacagatattctcatagtggtac

SEQ ID NO: 55635 - DNA, 3837 bp, Homo sapiens
gtctccccgccccgcccctcgtctcctccaagatggcgagcggcggcagcgggggggtgtcagtacctgcgctgtggagtgaagtgaaccggtatggccagaacggcgacttcacgcgcgctctcaagaccgtcaataagatactacagatcaacaaagatgacgtaactgccctgcattgtaaagtggtatgccttatccagaatggaagtttcaaggaagctttgaatgtcatcaatactcacaccaaagtgttagccaataactctctctcctttgaaaaggcatattgcgagtacaggctgaacagaattgagaatgccttgaagacaatagaaagtgccaaccagcagacagacaaactgaaggagctttatggacaagtgttataccgtttggaacgctatgatgaatgcttagcagtgtatagagatctcgtccgaaactcccaagatgattatgatgaggagaggaaaacaaacctttcagcagttgttgcagctcaaagcaattgggaaaaagtggttccagagaacctgggcctccaagaaggcacacatgagctgtgctacaacactgcatgtgcactgataggccaaggccagctgaaccaggccatgaaaatcctacaaaaagctgaagatctttgccgccgttcattatcagaagacactgatgggactgaggaagacccacaggcagaactggccatcattcatggtcagatggcttatattctgcagcttcagggtcgaacagaggaggctttgcaactttacaatcaaataataaaactaaaaccaacagatgtgggattactagctgtaattgcaaataacatcattaccattaacaaggaccaaaatgtctttgactccaagaagaaagtgaaattaaccaatgcggaaggagtagagtttaagctttccaagaaacaactacaagctatagaatttaacaaagctttacttgctatgtacacaaaccaggctgaacaatgccgcaaaatatctgccagtttacagtcccaaagtcccgagcatctcttacctgtgttaatccaagctgcccagctctgccgtgaaaagcagcacacaaaagcaatagagctgcttcaggaattttcagatcagcatccagaaaatgcagctgaaattaagctgaccatggcacagttgaaaatttctcaaggtaatatttctaaagcatgtctaatattgagaagcatagaggagttaaagcataaaccaggcatggtatctgcattagttaccatgtatagccatgaagaagatattgatagtgccattgaggtcttcacacaagctatccagtggtatcaaaaccatcagccaaaatctcctgctcatttgtccttgataagagaagctgcaaacttcaaactcaaatatgggcggaagaaggaggcaattagtgacctacaacagctgtggaaacaaaatccaaaagatattcacaccctggcacagcttatttctgcttactcacttgtagatccagagaaagccaaagctcttagtaaacacttgccatcgtcagatagtatgtctctaaaagtagatgttgaggctcttgaaaattctgctggtgctacatacattcggaagaagggtggaaaagttactggagatagtcaaccaaaggaacaaggacagggagatttgaaaaagaagaaaaagaaaaagaagggaaaattgcctaagaattatgacccaaaagttaccccagatccagaaagatggctgccaatgcgagaacgttcttactaccggggaagaaagaagggtaaaaagaaggatcagattggaaaagggacccagggagcaactgcaggagcttcatctgaactggatgccagtaaaactgtgagcagcccacccacctccccaagacctggcagtgctgcaacagtatctgcctctacaagtaacatcatacccccaagacaccagaaacctgcaggggctccagcaacaaaaaagaaacagcaacagaaaaagaagaaaggtggaaaaggtggctggtgatgagaatattcttgttgcaggctgtttttaaactagtgtcagtgacactaggaatataataaaggtaacacagcaagaagcacagaactactccctcttcatctccatattttcataatttcttgtgtttcaaatagggaaacatcttcctcaaagtctgcctagtgagatatggcctactggttgcctcatagctttgtacagattatgaggactgaaaataattgggcatttacccatcttggtatctgttgtatcctttatctgtgtgtgctgatttgatcttttttcagtttcacataccttatctaaggtttcccaggatttaaacagaaactacttctatgatttcagctggagtctgaagatacttgtttctgttcaagtcccactttaaattatgtcttaggagactgaaagtggaatcttctgagcattcctaaatatctgcttagaaatatcatgtgataaagagggaccttcttaatacactgatgttcttcactaaatggatggccacaagaaaaataaagtaaatgtcttaaataatttaaccataaattttctgtcatgtgatactggaatatgggatacttttcatgtttatatatatcatgaaatatatatatatggctcctttgtgccccatgtcattttcagattatggtagcatgctgatacagcaccatgaaagaactcaaggaaaatatatcaatgtaagaagttcactcttagacctagtgttctgaggtcacatgggtttggactgtctcaatcagaaagattaatgactgttatcaagaacatgaacattggcttcctccatagagaagaaatcagtatctgagttgcataccaggcagtattaaaatctaacaggtctgtttggcccattgatagatactcaaatggtgtctccttctggttatggattttgaccattgattacctttctcaatgtaatgaagtattttacagtcaatttgtggtgtaaatgttgctcttgtctttccttgcttacaaactactttcacattgaacagctgtgagacagacatattgagatgcctgcccttgttagtattcattttatgctgcccaagatatcatttaatttagacttaacaagtatttccttgtgattatattactctgtccttgttaataaagtgctgctgtgtttgactctgaacatactaccaaaacttcttcaaagagttttttatgaaagactttcctcctttacaagaaagaaatggggtgctgcctttctgtttagtaaaagcagaatttgcagtggcatctaaagagatcttttttaaataaaaattatgtattgtggcataatcctttttttgagctctacagagaacagtcttttggtaatagtggcaggtatttattccttctgaatatataccccattataggaataactgttacttatttaggattccatcattgaaaattttgacccaaggcacagcagtgaaatttatagttctcaatttagttgtcattattgacaggcattggtattattagtcattgctaagcaactaaaacttcatcagttcaaataagttttaattgtcaaatgaagtataaacacatgaactttctagaaatatttcctcttttggataggtctttaaccagttcatatatatactttgtcaaatatatggatgtgtatgtgtacatttataagaaccagtatggatacatccattcactgtggtacattttaaaataaaatattttagcagtgaatatggaaaaaggtgtt

SEQ ID NO: 55636 - DNA, 3882 bp, Homo sapiens
aaagacacccccccccccaccattataaaaaaaaagatggcgagcggcggcagcgggggggtgtcagtacctgcgctgtggagtgaagtgaaccggtatggccagaacggcgacttcacgcgcgctctcaagaccgtcaataagatactacagatcaacaaagatgacgtaactgccctgcattgtaaagtggtatgccttatccagaatggaagtttcaaggaagctttgaatgtcatcaatactcacaccaaagtgttagccaataactctctctcctttgaaaaggcatattgcgagtacaggctgaacagaattgagaatgccttgaagacaatagaaagtgccaaccagcagacagacaaactgaaggagctttatggacaagtgttataccgtttggaacgctatgatgaatgcttagcagtgtatagagatctcgtccgaaactcccaagatgattatgatgaggagaggaaaacaaacctttcagcagttgttgcagctcaaagcaattgggaaaaagtggttccagagaacctgggcctccaagaaggcacacatgagctgtgctacaacactgcatgtgcactgataggccaaggccagctgaaccaggccatgaaaatcctacaaaaagctgaagatctttgccgccgttcattatcagaagacactgatgggactgaggaagacccacaggcagaactggccatcattcatggtcagatggcttatattctgcagcttcagggtcgaacagaggaggctttgcaactttacaatcaaataataaaactaaaaccaacagatgtgggattactagctgtaattgcaaataacatcattaccattaacaaggaccaaaatgtctttgactccaagaagaaagtgaaattaaccaatgcggaaggagtagagtttaagctttccaagaaacaactacaagctatagaatttaacaaagctttacttgctatgtacacaaaccaggctgaacaatgccgcaaaatatctgccagtttacagtcccaaagtcccgagcatctcttacctgtgttaatccaagctgcccagctctgccgtgaaaagcagcacacaaaagcaatagagctgcttcaggaattttcagatcagcatccagaaaatgcagctgaaattaagctgaccatggcacagttgaaaatttctcaaggtaatatttctaaagcatgtctaatattgagaagcatagaggagttaaagcataaaccaggcatggtatctgcattagttaccatgtatagccatgaagaagatattgatagtgccattgaggtcttcacacaagctatccagtggtatcaaaaccatcagccaaaatctcctgctcatttgtccttgataagagaagctgcaaacttcaaactcaaatatgggcggaagaaggaggcaattagtgacctacaacagctgtggaaacaaaatccaaaagatattcacaccctggcacagcttatttctgcttactcacttgtagatccagagaaagccaaagctcttagtaaacacttgccatcgtcagatagtatgtctctaaaagtagatgttgaggctcttgaaaattctgctggtgctacatacattcggaagaagggtggaaaagttactggagatagtcaaccaaaggaacaaggacagggagatttgaaaaagaagaaaaagaaaaagaagggaaaattgcctaagaattatgacccaaaagttaccccagatccagaaagatggctgccaatgcgagaacgttcttactaccggggaagaaagaagggtaaaaagaaggatcagattggaaaagggacccagggagcaactgcaggagcttcatctgaactggatgccagtaaaactgtgagcagcccacccacctccccaagacctggcagtgctgcaacagtatctgcctctacaagtaacatcatacccccaagacaccagaaacctgcaggggctccagcaacaaaaaagaaacagcaacagaaaaagaagaaaggtggaaaaggtggctggtgatgagaatattcttgttgcaggctgtttttaaactagtgtcagtgacactaggaatataataaaggtaacacagcaagaagcacagaactactccctcttcatctccatattttcataatttcttgtgtttcaaatagggaaacatcttcctcaaagtctgcctagtgagatatggcctactggttgcctcatagctttgtacagattatgaggactgaaaataattgggcatttacccatcttggtatctgttgtatcctttatctgtgtgtgctgatttgatcttttttcagtttcacataccttatctaaggtttcccaggatttaaacagaaactacttctatgatttcagctggagtctgaagatacttgtttctgttcaagtcccactttaaattatgtcttaggagactgaaagtggaatcttctgagcattcctaaatatctgcttagaaatatcatgtgataaagagggaccttcttaatacactgatgttcttcactaaatggatggccacaagaaaaataaagtaaatgtcttaaataatttaaccataaattttctgtcatgtgatactggaatatgggatacttttcatgtttatatatatatatatatgtatatatatatacatatatatatatatataaacatgaaatatatatatatggctcctttgtgccccatgtcattttcagattatggtagcatgctgatacagcaccatgaaagaactcaaggaaaatatatcaatgtaagaagttcactcttagacctagtgttctgaggtcacatgggtttggactgtctcaatcagaaagattaatgactgttatcaagaacatgaacattggcttcctccatagagaagaaatcagtatctgagttgcataccaggcagtattaaaatctaacaggtctgtttggcccattgatagatactcaaatggtgtctccttctggttatggattttgaccattgattacctttctcaatgtaatgaagtattttacagtcaatttgtggtgtaaatgttgctcttgtctttccttgcttacaaactactttcacattgaacagctgtgagacagacatattgagatgcctgcccttgttagtattcattttatgctgcccaagatatcatttaatttagacttaacaagtatttccttgtgattatattactctgtccttgttaataaagtgctgctgtgtttgactctgaacatactaccaaaacttcttcaaagagttttttatgaaagactttcctcctttacaagaaagaaatggggtgctgcctttctgtttagtaaaagcagaatttgcagtggcatctaaagagatcttttttaaataaaaattatgtattgtggcataatcctttttttgagctctacagagaacagtcttttggtaatagtggcaggtatttattccttctgaatatataccccattataggaataactgttacttatttaggattccatcattgaaaattttgacccaaggcacagcagtgaaatttatagttctcaatttagttgtcattattgacaggcattggtattattagtcattgctaagcaactaaaacttcatcagttcaaataagttttaattgtcaaatgaagtataaacacatgaactttctagaaatatttcctcttttggataggtctttaaccagttcatatatatactttgtcaaatatatggatgtgtatgtgtacatttataagaaccagtatggatacatccattcactgtggtacattttaaaataaaatattttagcagtgaatatggaaaaaggtgtt

SEQ ID NO: 55637 - DNA, 3824 bp, Homo sapiens
gtctccccgccccgcccctcgtctcctccaagatggcgagcggcggcagcgggggggtgtcagtacctgcgctgtggagtgaagtgaaccggtatggccagaacggcgacttcacgcgcgctctcaagaccgtcaataagatactacagatcaacaaagatgacgtaactgccctgcattgtaaagtggtatgccttatccagaatggaagtttcaaggaagctttgaatgtcatcaatactcacaccaaagtgttagccaataactctctctcctttgaaaaggcatattgcgagtacaggctgaacagaattgagaatgccttgaagacaatagaaagtgccaaccagcagacagacaaactgaaggagctttatggacaagtgttataccgtttggaacgctatgatgaatgcttagcagtgtatagagatctcgtccgaaactcccaagatgattatgatgaggagaggaaaacaaacctttcagcagttgttgcagctcaaagcaattgggaaaaagtggttccagagaacctgggcctccaagaaggcacacatgagctgtgctacaacactgcatgtgcactgataggccaaggccagctgaaccaggccatgaaaatcctacaaaaagctgaagatctttgccgccgttcattatcagaagacactgatgggactgaggaagacccacaggcagaactggccatcattcatggtcagatggcttatattctgcagcttcagggtcgaacagaggaggctttgcaactttacaatcaaataataaaactaaaaccaacagatgtgggattactagctgtaattgcaaataacatcattaccattaacaaggaccaaaatgtctttgactccaagaagaaagtgaaattaaccaatgcggaaggagtagagtttaagctttccaagaaacaactacaagctatagaatttaacaaagctttacttgctatgtacacaaaccaggctgaacaatgccgcaaaatatctgccagtttacagtcccaaagtcccgagcatctcttacctgtgttaatccaagctgcccagctctgccgtgaaaagcagcacacaaaagcaatagagctgcttcaggaattttcagatcagcatccagaaaatgcagctgaaattaagctgaccatggcacagttgaaaatttctcaaggtaatatttctaaagcatgtctaatattgagaagcatagaggagttaaagcataaaccaggcatggtatctgcattagttaccatgtatagccatgaagaagatattgatagtgccattgaggtcttcacacaagctatccagtggtatcaaaaccatcagccaaaatctcctgctcatttgtccttgataagagaagctgcaaacttcaaactcaaatatgggcggaagaaggaggcaattagtgacctacaacagctgtggaaacaaaatccaaaagatattcacaccctggcacagcttatttctgcttactcacttgtagatccagagaaagccaaagctcttagtaaacacttgccatcgtcagatagtatgtctctaaaagtagatgttgaggctcttgaaaattctgctggtgctacatacattcggaagaagggtggaaaagttactggagatagtcaaccaaaggaacaaggacagggagatttgaaaaagaagaaaaagaaaaagaagggaaaattgcctaagaattatgacccaaaagttaccccagatccagaaagatggctgccaatgcgagaacgttcttactaccggggaagaaagaagggtaaaaagaaggatcagattggaaaagggacccagggagcaactgcaggagcttcatctgaactggatgccagtaaaactgtgagcagcccacccacctccccaagacctggcagtgctgcaacagtatctgcctctacaagtaacatcatacccccaagacaccagaaacctgcaggggctccagcaacaaaaaagaaacagcaacagaaaaagaagaaaggtggaaaaggtggctggtgatgagaatattcttgttgcaggctgtttttaaactagtgtcagtgacactaggaatataataaaggtaacacagcaagaagcacagaactactccctcttcatctccatattttcataatttcttgtgtttcaaatagggaaacatcttcctcaaagtctgcctagtgagatatggcctactggttgcctcatagctttgtacagattatgaggactgaaaataattgggcatttacccatcttggtatctgttgtatcctttatctgtgtgtgctgatttgatcttttttcagtttcacataccttatctaaggtttcccaggatttaaacagaaactacttctatgatttcagctggagtctgaagatacttgtttctgttcaagtcccactttaaattatgtcttaggagactgaaagtggaatcttctgagcattcctaaatatctgcttagaaatatcatgtgataaagagggaccttcttaatacactgatgttcttcactaaatggatggccacaagaatggaatatgggatacttttcatgtttatatatatatatatatgtatatatatatacatatatatatatatataaacatgaaatatatatatatggctcctttgtgccccatgtcattttcagattatggtagcatgctgatacagcaccatgaaagaactcaaggaaaatatatcaatgtaagaagttcactcttagacctagtgttctgaggtcacatgggtttggactgtctcaatcagaaagattaatgactgttatcaagaacatgaacattggcttcctccatagagaagaaatcagtatctgagttgcataccaggcagtattaaaatctaacaggtctgtttggcccattgatagatactcaaatggtgtctccttctggttatggattttgaccattgattacctttctcaatgtaatgaagtattttacagtcaatttgtggtgtaaatgttgctcttgtctttccttgcttacaaactactttcacattgaacagctgtgagacagacatattgagatgcctgcccttgttagtattcattttatgctgcccaagatatcatttaatttagacttaacaagtatttccttgtgattatattactctgtccttgttaataaagtgctgctgtgtttgactctgaacatactaccaaaacttcttcaaagagttttttatgaaagactttcctcctttacaagaaagaaatggggtgctgcctttctgtttagtaaaagcagaatttgcagtggcatctaaagagatcttttttaaataaaaattatgtattgtggcataatcctttttttgagctctacagagaacagtcttttggtaatagtggcaggtatttattccttctgaatatataccccattataggaataactgttacttatttaggattccatcattgaaaattttgacccaaggcacagcagtgaaatttatagttctcaatttagttgtcattattgacaggcattggtattattagtcattgctaagcaactaaaacttcatcagttcaaataagttttaattgtcaaatgaagtataaacacatgaactttctagaaatatttcctcttttggataggtctttaaccagttcatatatatactttgtcaaatatatggatgtgtatgtgtacatttataagaaccagtatggatacatccattcactgtggtacattttaaaataaaatattttagcagtgaatatggaaaaaggtgtt

SEQ ID NO: 55638 - DNA, 3781 bp, Homo sapiens
gtctccccgccccgcccctcgtctcctccaagatggcgagcggcggcagcgggggggtgtcagtacctgcgctgtggagtgaagtgaaccggtatggccagaacggcgacttcacgcgcgctctcaagaccgtcaataagatactacagatcaacaaagatgacgtaactgccctgcattgtaaagtggtatgccttatccagaatggaagtttcaaggaagctttgaatgtcatcaatactcacaccaaagtgttagccaataactctctctcctttgaaaaggcatattgcgagtacaggctgaacagaattgagaatgccttgaagacaatagaaagtgccaaccagcagacagacaaactgaaggagctttatggacaagtgttataccgtttggaacgctatgatgaatgcttagcagtgtatagagatctcgtccgaaactcccaagatgattatgatgaggagaggaaaacaaacctttcagcagttgttgcagctcaaagcaattgggaaaaagtggttccagagaacctgggcctccaagaaggcacacatgagctgtgctacaacactgcatgtgcactgataggccaaggccagctgaaccaggccatgaaaatcctacaaaaagctgaagatctttgccgccgttcattatcagaagacactgatgggactgaggaagacccacaggcagaactggccatcattcatggtcagatggcttatattctgcagcttcagggtcgaacagaggaggctttgcaactttacaatcaaataataaaactaaaaccaacagatgtgggattactagctgtaattgcaaataacatcattaccattaacaaggaccaaaatgtctttgactccaagaagaaagtgaaattaaccaatgcggaaggagtagagtttaagctttccaagaaacaactacaagctatagaatttaacaaagctttacttgctatgtacacaaaccaggctgaacaatgccgcaaaatatctgccagtttacagtcccaaagtcccgagcatctcttacctgtgttaatccaagctgcccagctctgccgtgaaaagcagcacacaaaagcaatagagctgcttcaggaattttcagatcagcatccagaaaatgcagctgaaattaagctgaccatggcacagttgaaaatttctcaaggtaatatttctaaagcatgtctaatattgagaagcatagaggagttaaagcataaaccaggcatggtatctgcattagttaccatgtatagccatgaagaagatattgatagtgccattgaggtcttcacacaagctatccagtggtatcaaaaccatcagccaaaatctcctgctcatttgtccttgataagagaagctgcaaacttcaaactcaaatatgggcggaagaaggaggcaattagtgacctacaacagctgtggaaacaaaatccaaaagatattcacaccctggcacagcttatttctgcttactcacttgtagatccagagaaagccaaagctcttagtaaacacttgccatcgtcagatagtatgtctctaaaagtagatgttgaggctcttgaaaattctgctggtgctacatacattcggaagaagggtggaaaagttactggagatagtcaaccaaaggaacaaggacagggagatttgaaaaagaagaaaaagaaaaagaagggaaaattgcctaagaattatgacccaaaagttaccccagatccagaaagatggctgccaatgcgagaacgttcttactaccggggaagaaagaagggtaaaaagaaggatcagattggaaaagggacccagggagcaactgcaggagcttcatctgaactggatgccagtaaaactgtgagcagcccacccacctccccaagacctggcagtgctgcaacagtatctgcctctacaagtaacatcatacccccaagacaccagaaacctgcaggggctccagcaacaaaaaagaaacagcaacagaaaaagaagaaagtgtcagtgacactaggaatataataaaggtaacacagcaagaagcacagaactactccctcttcatctccatattttcataatttcttgtgtttcaaatagggaaacatcttcctcaaagtctgcctagtgagatatggcctactggttgcctcatagctttgtacagattatgaggactgaaaataattgggcatttacccatcttggtatctgttgtatcctttatctgtgtgtgctgatttgatcttttttcagtttcacataccttatctaaggtttcccaggatttaaacagaaactacttctatgatttcagctggagtctgaagatacttgtttctgttcaagtcccactttaaattatgtcttaggagactgaaagtggaatcttctgagcattcctaaatatctgcttagaaatatcatgtgataaagagggaccttcttaatacactgatgttcttcactaaatggatggccacaagaaaaataaagtaaatgtcttaaataatttaaccataaattttctgtcatgtgatactggaatatgggatacttttcatgtttatatatatcatgaaatatatatatatggctcctttgtgccccatgtcattttcagattatggtagcatgctgatacagcaccatgaaagaactcaaggaaaatatatcaatgtaagaagttcactcttagacctagtgttctgaggtcacatgggtttggactgtctcaatcagaaagattaatgactgttatcaagaacatgaacattggcttcctccatagagaagaaatcagtatctgagttgcataccaggcagtattaaaatctaacaggtctgtttggcccattgatagatactcaaatggtgtctccttctggttatggattttgaccattgattacctttctcaatgtaatgaagtattttacagtcaatttgtggtgtaaatgttgctcttgtctttccttgcttacaaactactttcacattgaacagctgtgagacagacatattgagatgcctgcccttgttagtattcattttatgctgcccaagatatcatttaatttagacttaacaagtatttccttgtgattatattactctgtccttgttaataaagtgctgctgtgtttgactctgaacatactaccaaaacttcttcaaagagttttttatgaaagactttcctcctttacaagaaagaaatggggtgctgcctttctgtttagtaaaagcagaatttgcagtggcatctaaagagatcttttttaaataaaaattatgtattgtggcataatcctttttttgagctctacagagaacagtcttttggtaatagtggcaggtatttattccttctgaatatataccccattataggaataactgttacttatttaggattccatcattgaaaattttgacccaaggcacagcagtgaaatttatagttctcaatttagttgtcattattgacaggcattggtattattagtcattgctaagcaactaaaacttcatcagttcaaataagttttaattgtcaaatgaagtataaacacatgaactttctagaaatatttcctcttttggataggtctttaaccagttcatatatatactttgtcaaatatatggatgtgtatgtgtacatttataagaaccagtatggatacatccattcactgtggtacattttaaaataaaatattttagcagtgaatatggaaaaaggtgtt

SEQ ID NO: 55639 - DNA, 3992 bp, Homo sapiens
gtctccccgccccgcccctcgtctcctccaagatggcgagcggcggcagcgggggggtgtcagtacctgcgctgtggagtgaagtgaaccggtatggccagaacggcgacttcacgcgcgctctcaagaccgtcaataagatactacagatcaacaaagatgacgtaactgccctgcattgtaaagtggtatgccttatccagaatggaagtttcaaggaagctttgaatgtcatcaatactcacaccaaagtgttagccaataactctctctcctttgaaaaggcatattgcgagtacaggctgaacagaattgagaatgccttgaagacaatagaaagtgccaaccagcagacagacaaactgaaggagctttatggacaagtgttataccgtttggaacgctatgatgaatgcttagcagtgtatagagatctcgtccgaaactcccaagatgattatgatgaggagaggaaaacaaacctttcagcagttgttgcagctcaaagcaattgggaaaaagtggttccagagaacctgggcctccaagaaggcacacatgagctgtgctacaacactgcatgtgcactgataggccaaggccagctgaaccaggccatgaaaatcctacaaaaagctgaagatctttgccgccgttcattatcagaagacactgatgggactgaggaagacccacaggcagaactggccatcattcatggtcagatggcttatattctgcagcttcagggtcgaacagaggaggctttgcaactttacaatcaaataataaaactaaaaccaacagatgtgggattactagctgtaattgcaaataacatcattaccattaacaaggaccaaaatgtctttgactccaagaagaaagtgaaattaaccaatgcggaaggagtagagtttaagctttccaagaaacaactacaagctatagaatttaacaaagctttacttgctatgtacacaaaccaggctgaacaatgccgcaaaatatctgccagtttacagtcccaaagtcccgagcatctcttacctgtgttaatccaagctgcccagctctgccgtgaaaagcagcacacaaaagcaatagagctgcttcaggaattttcagatcagcatccagaaaatgcagctgaaattaagctgaccatggcacagttgaaaatttctcaaggtaatatttctaaagcatgtctaatattgagaagcatagaggagttaaagcataaaccaggcatggtatctgcattagttaccatgtatagccatgaagaagatattgatagtgccattgaggtcttcacacaagctatccagtggtatcaaaaccatcagccaaaatctcctgctcatttgtccttgataagagaagctgcaaacttcaaactcaaatatgggcggaagaaggaggcaattagtgacctacaacagctgtggaaacaaaatccaaaagatattcacaccctggcacagcttatttctgcttactcacttgtagatccagagaaagccaaagctcttagtaaacacttgccatcgtcagatagtatgtctctaaaagtagatgttgaggctcttgaaaattctgctggtgctacatacattcggaagaagggtggaaaagttactggagatagtcaaccaaaggaacaaggggcatagaggagtacaccggagggaatagtcacttcttcctgaggacagtgggaagttaggaaaggcttcatggagaagatgattgtgttgactctgaggaagatgaggacgagacagggagatttgaaaaagaagaaaaagaaaaagaagggaaaattgcctaagaattatgacccaaaagttaccccagatccagaaagatggctgccaatgcgagaacgttcttactaccggggaagaaagaagggtaaaaagaaggatcagattggaaaagggacccagggagcaactgcaggagcttcatctgaactggatgccagtaaaactgtgagcagcccacccacctccccaagacctggcagtgctgcaacagtatctgcctctacaagtaacatcatacccccaagacaccagaaacctgcaggggctccagcaacaaaaaagaaacagcaacagaaaaagaagaaaggtggaaaaggtggctggtgatgagaatattcttgttgcaggctgtttttaaactagtgtcagtgacactaggaatataataaaggtaacacagcaagaagcacagaactactccctcttcatctccatattttcataatttcttgtgtttcaaatagggaaacatcttcctcaaagtctgcctagtgagatatggcctactggttgcctcatagctttgtacagattatgaggactgaaaataattgggcatttacccatcttggtatctgttgtatcctttatctgtgtgtgctgatttgatcttttttcagtttcacataccttatctaaggtttcccaggatttaaacagaaactacttctatgatttcagctggagtctgaagatacttgtttctgttcaagtcccactttaaattatgtcttaggagactgaaagtggaatcttctgagcattcctaaatatctgcttagaaatatcatgtgataaagagggaccttcttaatacactgatgttcttcactaaatggatggccacaagaaaaataaagtaaatgtcttaaataatttaaccataaattttctgtcatgtgatactggaatatgggatacttttcatgtttatatatatatatatatgtatatatatatacatatatatatatatataaacatgaaatatatatatatggctcctttgtgccccatgtcattttcagattatggtagcatgctgatacagcaccatgaaagaactcaaggaaaatatatcaatgtaagaagttcactcttagacctagtgttctgaggtcacatgggtttggactgtctcaatcagaaagattaatgactgttatcaagaacatgaacattggcttcctccatagagaagaaatcagtatctgagttgcataccaggcagtattaaaatctaacaggtctgtttggcccattgatagatactcaaatggtgtctccttctggttatggattttgaccattgattacctttctcaatgtaatgaagtattttacagtcaatttgtggtgtaaatgttgctcttgtctttccttgcttacaaactactttcacattgaacagctgtgagacagacatattgagatgcctgcccttgttagtattcattttatgctgcccaagatatcatttaatttagacttaacaagtatttccttgtgattatattactctgtccttgttaataaagtgctgctgtgtttgactctgaacatactaccaaaacttcttcaaagagttttttatgaaagactttcctcctttacaagaaagaaatggggtgctgcctttctgtttagtaaaagcagaatttgcagtggcatctaaagagatcttttttaaataaaaattatgtattgtggcataatcctttttttgagctctacagagaacagtcttttggtaatagtggcaggtatttattccttctgaatatataccccattataggaataactgttacttatttaggattccatcattgaaaattttgacccaaggcacagcagtgaaatttatagttctcaatttagttgtcattattgacaggcattggtattattagtcattgctaagcaactaaaacttcatcagttcaaataagttttaattgtcaaatgaagtataaacacatgaactttctagaaatatttcctcttttggataggtctttaaccagttcatatatatactttgtcaaatatatggatgtgtatgtgtacatttataagaaccagtatggatacatccattcactgtggtacattttaaaataaaatattttagcagtgaatatggaaaaaggtgtt

SEQ ID NO: 55640 - DNA, 3116 bp, Homo sapiens
tccacggtggcatccatgatgcatcgtcaggagactgtggagtgtttgcgcaagttcaatgcccggagaaaactgaagggtgccatcctcacgaccatgcttgtctccaggaacttctcagctgccaaaaacctattgaacaagaagtcggatggcggtgtcaagccaagaaacaactacaagctatagaatttaacaaagctttacttgctatgtacacaaaccaggctgaacaatgccgcaaaatatctgccagtttacagtcccaaagtcccgagcatctcttacctgtgttaatccaagctgcccagctctgccgtgaaaagcagcacacaaaagcaatagagctgcttcaggaattttcagatcagcatccagaaaatgcagctgaaattaagctgaccatggcacagttgaaaatttctcaaggtaatatttctaaagcatgtctaatattgagaagcatagaggagttaaagcataaaccaggcatggtatctgcattagttaccatgtatagccatgaagaagatattgatagtgccattgaggtcttcacacaagctatccagtggtatcaaaaccatcagccaaaatctcctgctcatttgtccttgataagagaagctgcaaacttcaaactcaaatatgggcggaagaaggaggcaattagtgacctacaacagctgtggaaacaaaatccaaaagatattcacaccctggcacagcttatttctgcttactcacttgtagatccagagaaagccaaagctcttagtaaacacttgccatcgtcagatagtatgtctctaaaagtagatgttgaggctcttgaaaattctgctggtgctacatacattcggaagaagggtggaaaagttactggagatagtcaaccaaaggaacaaggacagggagatttgaaaaagaagaaaaagaaaaagaagggaaaattgcctaagaattatgacccaaaagttaccccagatccagaaagatggctgccaatgcgagaacgttcttactaccggggaagaaagaagggtaaaaagaaggatcagattggaaaagggacccagggagcaactgcaggagcttcatctgaactggatgccagtaaaactgtgagcagcccacccacctccccaagacctggcagtgctgcaacagtatctgcctctacaagtaacatcatacccccaagacaccagaaacctgcaggggctccagcaacaaaaaagaaacagcaacagaaaaagaagaaaggtggaaaaggtggctggtgatgagaatattcttgttgcaggctgtttttaaactagtgtcagtgacactaggaatataataaaggtaacacagcaagaagcacagaactactccctcttcatctccatattttcataatttcttgtgtttcaaatagggaaacatcttcctcaaagtctgcctagtgagatatggcctactggttgcctcatagctttgtacagattatgaggactgaaaataattgggcatttacccatcttggtatctgttgtatcctttatctgtgtgtgctgatttgatcttttttcagtttcacataccttatctaaggtttcccaggatttaaacagaaactacttctatgatttcagctggagtctgaagatacttgtttctgttcaagtcccactttaaattatgtcttaggagactgaaagtggaatcttctgagcattcctaaatatctgcttagaaatatcatgtgataaagagggaccttcttaatacactgatgttcttcactaaatggatggccacaagaaaaataaagtaaatgtcttaaataatttaaccataaattttctgtcatgtgatactggaatatgggatacttttcatgtttatatatatatatatatgtatatatatatacatatatatatatatataaacatgaaatatatatatatggctcctttgtgccccatgtcattttcagattatggtagcatgctgatacagcaccatgaaagaactcaaggaaaatatatcaatgtaagaagttcactcttagacctagtgttctgaggtcacatgggtttggactgtctcaatcagaaagattaatgactgttatcaagaacatgaacattggcttcctccatagagaagaaatcagtatctgagttgcataccaggcagtattaaaatctaacaggtctgtttggcccattgatagatactcaaatggtgtctccttctggttatggattttgaccattgattacctttctcaatgtaatgaagtattttacagtcaatttgtggtgtaaatgttgctcttgtctttccttgcttacaaactactttcacattgaacagctgtgagacagacatattgagatgcctgcccttgttagtattcattttatgctgcccaagatatcatttaatttagacttaacaagtatttccttgtgattatattactctgtccttgttaataaagtgctgctgtgtttgactctgaacatactaccaaaacttcttcaaagagttttttatgaaagactttcctcctttacaagaaagaaatggggtgctgcctttctgtttagtaaaagcagaatttgcagtggcatctaaagagatcttttttaaataaaaattatgtattgtggcataatcctttttttgagctctacagagaacagtcttttggtaatagtggcaggtatttattccttctgaatatataccccattataggaataactgttacttatttaggattccatcattgaaaattttgacccaaggcacagcagtgaaatttatagttctcaatttagttgtcattattgacaggcattggtattattagtcattgctaagcaactaaaacttcatcagttcaaataagttttaattgtcaaatgaagtataaacacatgaactttctagaaatatttcctcttttggataggtctttaaccagttcatatatatactttgtcaaatatatggatgtgtatgtgtacatttataagaaccagtatggatacatccattcactgtggtacattttaaaataaaatattttagcagtgaatatggaaaaaggtgtt

SEQ ID NO: 55641 - DNA, 3070 bp, Homo sapiens
taaattagcggccgtgcagactgcaaataacatcattaccattaacaaggaccaaaatgtctttgactccaagaagaaagtgaaattaaccaatgcggaaggagtagagtttaagctttccaagaaacaactacaagctatagaatttaacaaagctttacttgctatgtacacaaaccaggctgaacaatgccgcaaaatatctgccagtttacagtcccaaagtcccgagcatctcttacctgtgttaatccaagctgcccagctctgccgtgaaaagcagcacacaaaagcaatagagctgcttcaggaattttcagatcagcatccagaaaatgcagctgaaattaagctgaccatggcacagttgaaaatttctcaaggtaatatttctaaagcatgtctaatattgagaagcatagaggagttaaagcataaaccaggcatggtatctgcattagttaccatgtatagccatgaagaagatattgatagtgccattgaggtcttcacacaagctatccagtggtatcaaaaccatcagccaaaatctcctgctcatttgtccttgataagagaagctgcaaacttcaaactcaaatatgggcggaagaaggaggcaattagtgacctacaacagctgtggaaacaaaatccaaaagatattcacaccctggcacagcttatttctgcttactcacttgtagatccagagaaagccaaagctcttagtaaacacttgccatcgtcagatagtatgtctctaaaagtagatgttgaggctcttgaaaattctgctggtgctacatacattcggaagaagggtggaaaagttactggagatagtcaaccaaaggaacaaggacagggagatttgaaaaagaagaaaaagaaaaagaagggaaaattgcctaagaattatgacccaaaagttaccccagatccagaaagatggctgccaatgcgagaacgttcttactaccggggaagaaagaagggtaaaaagaaggatcagattggaaaagggacccagggagcaactgcaggagcttcatctgaactggatgccagtaaaactgtgagcagcccacccacctccccaagacctggcagtgctgcaacagtatctgcctctacaagtaacatcatacccccaagacaccagaaacctgcaggggctccagcaacaaaaaagaaacagcaacagaaaaagaagaaaggtggaaaaggtggctggtgatgagaatattcttgttgcaggctgtttttaaactagtgtcagtgacactaggaatataataaaggtaacacagcaagaagcacagaactactccctcttcatctccatattttcataatttcttgtgtttcaaatagggaaacatcttcctcaaagtctgcctagtgagatatggcctactggttgcctcatagctttgtacagattatgaggactgaaaataattgggcatttacccatcttggtatctgttgtatcctttatctgtgtgtgctgatttgatcttttttcagtttcacataccttatctaaggtttcccaggatttaaacagaaactacttctatgatttcagctggagtctgaagatacttgtttctgttcaagtcccactttaaattatgtcttaggagactgaaagtggaatcttctgagcattcctaaatatctgcttagaaatatcatgtgataaagagggaccttcttaatacactgatgttcttcactaaatggatggccacaagaaaaataaagtaaatgtcttaaataatttaaccataaattttctgtcatgtgatactggaatatgggatacttttcatgtttatatatatatatatatgtatatatatatacatatatatatatatataaacatgaaatatatatatatggctcctttgtgccccatgtcattttcagattatggtagcatgctgatacagcaccatgaaagaactcaaggaaaatatatcaatgtaagaagttcactcttagacctagtgttctgaggtcacatgggtttggactgtctcaatcagaaagattaatgactgttatcaagaacatgaacattggcttcctccatagagaagaaatcagtatctgagttgcataccaggcagtattaaaatctaacaggtctgtttggcccattgatagatactcaaatggtgtctccttctggttatggattttgaccattgattacctttctcaatgtaatgaagtattttacagtcaatttgtggtgtaaatgttgctcttgtctttccttgcttacaaactactttcacattgaacagctgtgagacagacatattgagatgcctgcccttgttagtattcattttatgctgcccaagatatcatttaatttagacttaacaagtatttccttgtgattatattactctgtccttgttaataaagtgctgctgtgtttgactctgaacatactaccaaaacttcttcaaagagttttttatgaaagactttcctcctttacaagaaagaaatggggtgctgcctttctgtttagtaaaagcagaatttgcagtggcatctaaagagatcttttttaaataaaaattatgtattgtggcataatcctttttttgagctctacagagaacagtcttttggtaatagtggcaggtatttattccttctgaatatataccccattataggaataactgttacttatttaggattccatcattgaaaattttgacccaaggcacagcagtgaaatttatagttctcaatttagttgtcattattgacaggcattggtattattagtcattgctaagcaactaaaacttcatcagttcaaataagttttaattgtcaaatgaagtataaacacatgaactttctagaaatatttcctcttttggataggtctttaaccagttcatatatatactttgtcaaatatatggatgtgtatgtgtacatttataagaaccagtatggatacatccattcactgtggtacattttaaaataaaatattttagcagtgaatatggaaaaaggtgtt

SEQ ID NO: 55642 - DNA, 2920 bp, Homo sapiens
tctgcccacagaaccctctaaatccccttgtaaatttaactgttagtccaaagaggaacagctctttggacactaggaaaaaaccttgtagagagagtaaaaaatttaacacccatagtaggcctaaaagcagcacacaaaagcaatagagctgcttcaggaattttcagatcagcatccagaaaatgcagctgaaattaagctgaccatggcacagttgaaaatttctcaaggtaatatttctaaagcatgtctaatattgagaagcatagaggagttaaagcataaaccaggcatggtatctgcattagttaccatgtatagccatgaagaagatattgatagtgccattgaggtcttcacacaagctatccagtggtatcaaaaccatcagccaaaatctcctgctcatttgtccttgataagagaagctgcaaacttcaaactcaaatatgggcggaagaaggaggcaattagtgacctacaacagctgtggaaacaaaatccaaaagatattcacaccctggcacagcttatttctgcttactcacttgtagatccagagaaagccaaagctcttagtaaacacttgccatcgtcagatagtatgtctctaaaagtagatgttgaggctcttgaaaattctgctggtgctacatacattcggaagaagggtggaaaagttactggagatagtcaaccaaaggaacaaggacagggagatttgaaaaagaagaaaaagaaaaagaagggaaaattgcctaagaattatgacccaaaagttaccccagatccagaaagatggctgccaatgcgagaacgttcttactaccggggaagaaagaagggtaaaaagaaggatcagattggaaaagggacccagggagcaactgcaggagcttcatctgaactggatgccagtaaaactgtgagcagcccacccacctccccaagacctggcagtgctgcaacagtatctgcctctacaagtaacatcatacccccaagacaccagaaacctgcaggggctccagcaacaaaaaagaaacagcaacagaaaaagaagaaaggtggaaaaggtggctggtgatgagaatattcttgttgcaggctgtttttaaactagtgtcagtgacactaggaatataataaaggtaacacagcaagaagcacagaactactccctcttcatctccatattttcataatttcttgtgtttcaaatagggaaacatcttcctcaaagtctgcctagtgagatatggcctactggttgcctcatagctttgtacagattatgaggactgaaaataattgggcatttacccatcttggtatctgttgtatcctttatctgtgtgtgctgatttgatcttttttcagtttcacataccttatctaaggtttcccaggatttaaacagaaactacttctatgatttcagctggagtctgaagatacttgtttctgttcaagtcccactttaaattatgtcttaggagactgaaagtggaatcttctgagcattcctaaatatctgcttagaaatatcatgtgataaagagggaccttcttaatacactgatgttcttcactaaatggatggccacaagaaaaataaagtaaatgtcttaaataatttaaccataaattttctgtcatgtgatactggaatatgggatacttttcatgtttatatatatatatatatgtatatatatatacatatatatatatatataaacatgaaatatatatatatggctcctttgtgccccatgtcattttcagattatggtagcatgctgatacagcaccatgaaagaactcaaggaaaatatatcaatgtaagaagttcactcttagacctagtgttctgaggtcacatgggtttggactgtctcaatcagaaagattaatgactgttatcaagaacatgaacattggcttcctccatagagaagaaatcagtatctgagttgcataccaggcagtattaaaatctaacaggtctgtttggcccattgatagatactcaaatggtgtctccttctggttatggattttgaccattgattacctttctcaatgtaatgaagtattttacagtcaatttgtggtgtaaatgttgctcttgtctttccttgcttacaaactactttcacattgaacagctgtgagacagacatattgagatgcctgcccttgttagtattcattttatgctgcccaagatatcatttaatttagacttaacaagtatttccttgtgattatattactctgtccttgttaataaagtgctgctgtgtttgactctgaacatactaccaaaacttcttcaaagagttttttatgaaagactttcctcctttacaagaaagaaatggggtgctgcctttctgtttagtaaaagcagaatttgcagtggcatctaaagagatcttttttaaataaaaattatgtattgtggcataatcctttttttgagctctacagagaacagtcttttggtaatagtggcaggtatttattccttctgaatatataccccattataggaataactgttacttatttaggattccatcattgaaaattttgacccaaggcacagcagtgaaatttatagttctcaatttagttgtcattattgacaggcattggtattattagtcattgctaagcaactaaaacttcatcagttcaaataagttttaattgtcaaatgaagtataaacacatgaactttctagaaatatttcctcttttggataggtctttaaccagttcatatatatactttgtcaaatatatggatgtgtatgtgtacatttataagaaccagtatggatacatccattcactgtggtacattttaaaataaaatattttagcagtgaatatggaaaaaggtgtt

SEQ ID NO: 55643 - DNA, 2686 bp, Homo sapiens
gtggtattcgacgtcatgtcacatattgatgagtagaaagaccctagcgcataaaccaggcatggtatctgcattagttaccatgtatagccatgaagaagatattgatagtgccattgaggtcttcacacaagctatccagtggtatcaaaaccatcagccaaaatctcctgctcatttgtccttgataagagaagctgcaaacttcaaactcaaatatgggcggaagaaggaggcaattagtgacctacaacagctgtggaaacaaaatccaaaagatattcacaccctggcacagcttatttctgcttactcacttgtagatccagagaaagccaaagctcttagtaaacacttgccatcgtcagatagtatgtctctaaaagtagatgttgaggctcttgaaaattctgctggtgctacatacattcggaagaagggtggaaaagttactggagatagtcaaccaaaggaacaaggacagggagatttgaaaaagaagaaaaagaaaaagaagggaaaattgcctaagaattatgacccaaaagttaccccagatccagaaagatggctgccaatgcgagaacgttcttactaccggggaagaaagaagggtaaaaagaaggatcagattggaaaagggacccagggagcaactgcaggagcttcatctgaactggatgccagtaaaactgtgagcagcccacccacctccccaagacctggcagtgctgcaacagtatctgcctctacaagtaacatcatacccccaagacaccagaaacctgcaggggctccagcaacaaaaaagaaacagcaacagaaaaagaagaaaggtggaaaaggtggctggtgatgagaatattcttgttgcaggctgtttttaaactagtgtcagtgacactaggaatataataaaggtaacacagcaagaagcacagaactactccctcttcatctccatattttcataatttcttgtgtttcaaatagggaaacatcttcctcaaagtctgcctagtgagatatggcctactggttgcctcatagctttgtacagattatgaggactgaaaataattgggcatttacccatcttggtatctgttgtatcctttatctgtgtgtgctgatttgatcttttttcagtttcacataccttatctaaggtttcccaggatttaaacagaaactacttctatgatttcagctggagtctgaagatacttgtttctgttcaagtcccactttaaattatgtcttaggagactgaaagtggaatcttctgagcattcctaaatatctgcttagaaatatcatgtgataaagagggaccttcttaatacactgatgttcttcactaaatggatggccacaagaaaaataaagtaaatgtcttaaataatttaaccataaattttctgtcatgtgatactggaatatgggatacttttcatgtttatatatatatatatatgtatatatatatacatatatatatatatataaacatgaaatatatatatatggctcctttgtgccccatgtcattttcagattatggtagcatgctgatacagcaccatgaaagaactcaaggaaaatatatcaatgtaagaagttcactcttagacctagtgttctgaggtcacatgggtttggactgtctcaatcagaaagattaatgactgttatcaagaacatgaacattggcttcctccatagagaagaaatcagtatctgagttgcataccaggcagtattaaaatctaacaggtctgtttggcccattgatagatactcaaatggtgtctccttctggttatggattttgaccattgattacctttctcaatgtaatgaagtattttacagtcaatttgtggtgtaaatgttgctcttgtctttccttgcttacaaactactttcacattgaacagctgtgagacagacatattgagatgcctgcccttgttagtattcattttatgctgcccaagatatcatttaatttagacttaacaagtatttccttgtgattatattactctgtccttgttaataaagtgctgctgtgtttgactctgaacatactaccaaaacttcttcaaagagttttttatgaaagactttcctcctttacaagaaagaaatggggtgctgcctttctgtttagtaaaagcagaatttgcagtggcatctaaagagatcttttttaaataaaaattatgtattgtggcataatcctttttttgagctctacagagaacagtcttttggtaatagtggcaggtatttattccttctgaatatataccccattataggaataactgttacttatttaggattccatcattgaaaattttgacccaaggcacagcagtgaaatttatagttctcaatttagttgtcattattgacaggcattggtattattagtcattgctaagcaactaaaacttcatcagttcaaataagttttaattgtcaaatgaagtataaacacatgaactttctagaaatatttcctcttttggataggtctttaaccagttcatatatatactttgtcaaatatatggatgtgtatgtgtacatttataagaaccagtatggatacatccattcactgtggtacattttaaaataaaatattttagcagtgaatatggaaaaaggtgtt

SEQ ID NO: 55644 - DNA, 1702 bp, Homo sapiens
gtctccccgccccgcccctcgtctcctccaagatggcgagcggcggcagcgggggggtgtcagtacctgcgctgtggagtgaagtgaaccggtatggccagaacggcgacttcacgcgcgctctcaagaccgtcaataagatactacagatcaacaaagatgacgtaactgccctgcattgtaaagtggtatgccttatccagaatggaagtttcaaggaagctttgaatgtcatcaatactcacaccaaagtgttagccaataactctctctcctttgaaaaggcatattgcgagtacaggctgaacagaattgagaatgccttgaagacaatagaaagtgccaaccagcagacagacaaactgaaggagctttatggacaagtgttataccgtttggaacgctatgatgaatgcttagcagtgtatagagatctcgtccgaaactcccaagatgattatgatgaggagaggaaaacaaacctttcagcagttgttgcagctcaaagcaattgggaaaaagtggttccagagaacctgggcctccaagaaggcacacatgagctgtgctacaacactgcatgtgcactgataggccaaggccagctgaaccaggccatgaaaatcctacaaaaagctgaagatctttgccgccgttcattatcagaagacactgatgggactgaggaagacccacaggcagaactggccatcattcatggtcagatggcttatattctgcagcttcagggtcgaacagaggaggctttgcaactttacaatcaaataataaaactaaaaccaacagatgtgggattactagctgtaattgcaaataacatcattaccattaacaaggaccaaaatgtctttgactccaagaagaaagtgaaattaaccaatgcggaaggagtagagtttaagctttccaagaaacaactacaagctatagaatttaacaaagctttacttgctatgtacacaaaccaggctgaacaatgccgcaaaatatctgccagtttacagtcccaaagtcccgagcatctcttacctgtgttaatccaagctgcccagctctgccgtgaaaagcagcacacaaaagcaatagagctgcttcaggaattttcagatcagcatccagaaaatgcagctgaaattaagctgaccatggcacagttgaaaatttctcaaggtaatatttctaaagcatgtctaatattgagaagcatagaggagttaaagcataaaccaggcatggtatctgcattagttaccatgtatagccatgaagaagatattgatagtgccattgaggtcttcacacaagctatccagtggtatcaaaaccatcagccaaaatctcctgctcatttgtccttgataagagaagctgcaaacttcaaactcaaatatgggcggaagaaggaggcaattagtgacctacaacagctgtggaaacaaaatccaaaagatattcacaccctggcacagcttatttctgcttactcacttgtagatccagagaaagccaaagctcttagtaaacacttgccatcgtcagatagtatgtctctaaaagtagatgttgaggctcttgaaaattctgctggtgctacatacattcggaagaagggtggaaaagttactggagatagtcaaccaaaggaacaaggacagggagattgacaaaacaacacacaaac

SEQ ID NO: 55645 - DNA, 1396 bp, Homo sapiens
gtctccccgccccgcccctcgtctcctccaagatggcgagcggcggcagcgggggggtgtcagtacctgcgctgtggagtgaagtgaaccggtatggccagaacggcgacttcacgcgcgctctcaagaccgtcaataagatactacagatcaacaaagatgacgtaactgccctgcattgtaaagtggtatgccttatccagaatggaagtttcaaggaagctttgaatgtcatcaatactcacaccaaagtgttagccaataactctctctcctttgaaaaggcatattgcgagtacaggctgaacagaattgagaatgccttgaagacaatagaaagtgccaaccagcagacagacaaactgaaggagctttatggacaagtgttataccgtttggaacgctatgatgaatgcttagcagtgtatagagatctcgtccgaaactcccaagatgattatgatgaggagaggaaaacaaacctttcagcagttgttgcagctcaaagcaattgggaaaaagtggttccagagaacctgggcctccaagaaggcacacatgagctgtgctacaacactgcatgtgcactgataggccaaggccagctgaaccaggccatgaaaatcctacaaaaagctgaagatctttgccgccgttcattatcagaagacactgatgggactgaggaagacccacaggcagaactggccatcattcatggtcagatggcttatattctgcagcttcagggtcgaacagaggaggctttgcaactttacaatcaaataataaaactaaaaccaacagatgtgggattactagctgtaattgcaaataacatcattaccattaacaaggaccaaaatgtctttgactccaagaagaaagtgaaattaaccaatgcggaaggagtagagtttaagctttccaagaaacaactacaagctatagaatttaacaaagctttacttgctatgtacacaaaccaggctgaacaatgccgcaaaatatctgccagtttacagtcccaaagtcccgagcatctcttacctgtgttaatccaagctgcccagctctgccgtgaaaagcagcacacaaaagcaatagagctgcttcaggaattttcagatcagcatccagaaaatgcagctgaaattaagctgaccatggcacagttgaaaatttctcaaggtaatatttctaaagcatgtctaatattgagaagcatagaggagttaaagcataaaccaggcatggtatctgcattagttaccatgtatagccatgaagaagatattgatagtgccattgaggtcttcacacaagctatccagtggtatcaaaaccatcagccaaaatctcctgctctcttatcaaggacaaatgagcaggtcga

SEQ ID NO: 55646 - DNA, 2393 bp, Homo sapiens
tgcggagcttgattagagatcgggattgtgactcctgacaagatattgctggaggcatatattaagtggatccgggggatcaattcaggttgcccaaacagcacatgccatggccctgtgctgggagtgcagaacgatggcagtgtgaatgctgaaggacagcctatgaatgggagggagtgtgtcaaaccatccggtgagaaggctgctgggggtttctgaggaggcaggcgggaaggggaaggccttgcagatggatgggccttggttcacaaaagcaacaggtaagagagtggctgtggacacggggaagaaagaagggtaaaaagaaggatcagattggaaaagggacccagggagcaactgcaggagcttcatctgaactggatgccagtaaaactgtgagcagcccacccacctccccaagacctggcagtgctgcaacagtatctgcctctacaagtaacatcatacccccaagacaccagaaacctgcaggggctccagcaacaaaaaagaaacagcaacagaaaaagaagaaaggtggaaaaggtggctggtgatgagaatattcttgttgcaggctgtttttaaactagtgtcagtgacactaggaatataataaaggtaacacagcaagaagcacagaactactccctcttcatctccatattttcataatttcttgtgtttcaaatagggaaacatcttcctcaaagtctgcctagtgagatatggcctactggttgcctcatagctttgtacagattatgaggactgaaaataattgggcatttacccatcttggtatctgttgtatcctttatctgtgtgtgctgatttgatcttttttcagtttcacataccttatctaaggtttcccaggatttaaacagaaactacttctatgatttcagctggagtctgaagatacttgtttctgttcaagtcccactttaaattatgtcttaggagactgaaagtggaatcttctgagcattcctaaatatctgcttagaaatatcatgtgataaagagggaccttcttaatacactgatgttcttcactaaatggatggccacaagaaaaataaagtaaatgtcttaaataatttaaccataaattttctgtcatgtgatactggaatatgggatacttttcatgtttatatatatatatatatgtatatatatatacatatatatatatatataaacatgaaatatatatatatggctcctttgtgccccatgtcattttcagattatggtagcatgctgatacagcaccatgaaagaactcaaggaaaatatatcaatgtaagaagttcactcttagacctagtgttctgaggtcacatgggtttggactgtctcaatcagaaagattaatgactgttatcaagaacatgaacattggcttcctccatagagaagaaatcagtatctgagttgcataccaggcagtattaaaatctaacaggtctgtttggcccattgatagatactcaaatggtgtctccttctggttatggattttgaccattgattacctttctcaatgtaatgaagtattttacagtcaatttgtggtgtaaatgttgctcttgtctttccttgcttacaaactactttcacattgaacagctgtgagacagacatattgagatgcctgcccttgttagtattcattttatgctgcccaagatatcatttaatttagacttaacaagtatttccttgtgattatattactctgtccttgttaataaagtgctgctgtgtttgactctgaacatactaccaaaacttcttcaaagagttttttatgaaagactttcctcctttacaagaaagaaatggggtgctgcctttctgtttagtaaaagcagaatttgcagtggcatctaaagagatcttttttaaataaaaattatgtattgtggcataatcctttttttgagctctacagagaacagtcttttggtaatagtggcaggtatttattccttctgaatatataccccattataggaataactgttacttatttaggattccatcattgaaaattttgacccaaggcacagcagtgaaatttatagttctcaatttagttgtcattattgacaggcattggtattattagtcattgctaagcaactaaaacttcatcagttcaaataagttttaattgtcaaatgaagtataaacacatgaactttctagaaatatttcctcttttggataggtctttaaccagttcatatatatactttgtcaaatatatggatgtgtatgtgtacatttataagaaccagtatggatacatccattcactgtggtacattttaaaataaaatattttagcagtgaatatggaaaaaggtgtt

SEQ ID NO: 55647 - DNA, 803 bp, Homo sapiens
gtctccccgccccgcccctcgtctcctccaagatggcgagcggcggcagcgggggggtgtcagtacctgcgctgtggagtgaagtgaaccggtatggccagaacggcgacttcacgcgcgctctcaagaccgtcaataagatactacagatcaacaaagatgacgtaactgccctgcattgtaaagtggtatgccttatccagaatggaagtttcaaggaagctttgaatgtcatcaatactcacaccaaagtgttagccaataactctctctcctttgaaaaggcatattgcgagtacaggctgaacagaattgagaatgccttgaagacaatagaaagtgccaaccagcagacagacaaactgaaggagctttatggacaagtgttataccgtttggaacgctatgatgaatgcttagcagtgtatagagatctcgtccgaaactcccaagatgattatgatgaggagaggaaaacaaacctttcagcagttgttgcagctcaaagcaattgggaaaaagtggttccagagaacctgggcctccaagaaggcacacatgagctgtgctacaacactgcatgtgcactgataggccaaggccagctgaaccaggccatgaaaatcctacaaaaagctgaaggttggaagtttgttaaacttatctgtaaatataacgtgcatataactttgtagagtatcttctaaaattgcatttgacttctgtgaaattattaaatggaagttattgatgcggggccccaaacaatttttccctgccccacccctataacccctccccat

SEQ ID NO: 55648 - DNA, 2167 bp, Homo sapiens
acctgggagtttgcttaagccctcttcaacaaatacagattgtaattttcacaaaaggaatctttgacaatgtctttttatttgttttttgaggtagggtcttgctctgtcacccaggctggagtgcagtggtacaatcttggctcactatagcctcgacctcccaggctcaggtgattctcccacctcagcctcccaactagctgggaccacaggtgcccgccaccaggcctggctatttttttgtattttgtgtagagatggggttttgccatgttggccatgctggtctcgaactcctgggctcaagcaatccaccatcctcagcctcccaaagtgctgggattacaggcgtgggccaccacactcggccaacaatttcttaagattgaaaaggaaaagcagagaggcagggcctacaatccatgccatcagtggcacagggccctgtgccctggcatctgggttcacgctctgctgttgctgtcttcgaattcctagtgatgtttgaacaaaggccctatgtttgcattttgcactgggccccacaaatcacatggcccatcctgagaagaggagtctcacacctccagtctcctaaatcacctctggaagtttttctcaacgaaagaactgaagctttcctcaaaagttccgtaggggagacagttcatcaccatacccaatgaagaacattctcatacattgtgggtttgaatgtaagagtaatacagacttttcagtgagcagtttggtgatgtgtagcagattttaaatttacctaccctttgatccaataatttcacttctagaaacttgaggaaatgattagataaatttacgtatgtgtctgtgtgaatgttcattgaaggaatattcataagaacagaaatttagaaacagcataaagttctgtactattaaaggattggctaaattttaccataatcacaaagtaattacagtcactacaaccaataacattaaaaaagatacagtaatgtagatctatgtttattgtaacaaagatatccacaggatattgaatggggaagggaggtttcaaaatagtatgcaccgtgtctcactttcattttaaaatgcagctgtgcatttacataaaactaagccaggtatggtggctcacagctatagtcccagctacttgggaggcggaggtgggagggtcacttgggcccagaatttcaaggctgcagtgagctatgattaagccactgcactccagcctgggcaacagagtgagacctccaactttaaaaacaaacaaaaaaaatattaaaaaactaaataactgaaatgctagtagtgtttatctctgggtggtaggattgtttatttttatacttttctataattgatttttcgcaattaatatttactacatttgtattttttaatgcactttacaaatatttttagcacagacacaacaaatgaaagcaaagtgccaaagagctgggaaagtcaagagactgataatatatatgtagtatatttgatgctaatgtaaatttcacaactgcttgttactacgattatcttggaatcttctgcttaggaatttagatcttgctctttggaatagtgaaagaaatgggatttacccagcaatactacttttaaaacaatttttctcctgtagatctttgccgccgttcattatcagaagacactgtaagtattccatcattgttaaacctaaattttacacttctgactatgatagattactgaggcttcattgtactatttattgactttttttagaagatggcaattcattaagtaggaatcacactagaaaccaccctctagtatcagttatttgatgaagtctactagagtgagaaatcacaatacaaaaaattttgacataaccttaagcacttgattatacatttatataatgtaaatttattcccccattttaggatgtaggactaaggtctttgaggactggtctgctcctaggagttccatgtatatttcttatgtagtgacataattcaacattcccaatttacacttttggttttttctttttaagtgtaacaatatcttaaatacagttggtaagcacttccattatagagtccttatgttttttttttgttgtttgttttttaccaatctcttaccatttttc

SEQ ID NO: 55649 - DNA, 1946 bp, Homo sapiens
  misc_feature (1944)..(1946): n is a, c, g, or t
ggcaccggaaagaacaagaaaaaagaacaccttatttttatcttcttcagtgagccaatgttcattcaaaagagagattaaagtgctttttgctgactagtcacagtcagagtcagaatcacaggtggattagtagggagtgttataaaagccttgaagtgaaagcccgcagttgtcttactaagaagagaagccttcaatggatccagctgtggctctggtgctctgtctctcctgtttgtttctcctttcactctggaggcagagctctggaagagggaggctcccgtctggccccactcctctcccgattattggaaatatcctgcagttagatgttaaggacatgagcaaatccttaaccaatctctcaaaaatctatggccctgtgttcactctgtattttggcctggaacgcatggtggtgctgcatggatatgaagtggtgaaggaagccctgattgatcttggagaggagttttctggaagaggccatttcccactggctgaaagagctaacagaggatttggaatcgttttcagcaatggaaagagatggaaggagatccggcgtttctccctcatgacgctgcggaattttgggatggggaagaggagcattgaggaccgtgttcaagaggaagcccgctgccttgtggaggagttgagaaaaaccaaggcttcaccctgtgatcccactttcatcctgggctgtgctccctgcaatgtgatctgctccattattttccagaaacgtttcgattataaagatcagcaatttcttaacttgatggaaaaattgaatgaaaacatcaggattgtaagcaccccctggatccagatatgcaataattttcccactatcattgattatttcccgggaacccataacaaattacttaaaaaccttgcttttatggaaagtgatattttggagaaagtaaaagaacaccaagaatcgatggacatcaacaaccctcgggactttattgattgcttcctgatcaaaatggagaaggaaaagcaaaaccaacagtctgaattcactattgaaaacttggtaatcactgcagctgacttacttggagctgggacagagacaacaagcacaaccctgagatatgctctccttctcctgctgaagcacccagaggtcacagctaaagtccaggaagagattgaacgtgtcgttggcagaaaccggagcccctgcatgcaggacaggggccacatgccctacacagatgctgtggtgcacgaggtccagagatacatcgacctcatccccaccagcctgccccatgcagtgacctgtgacgttaaattcagaaactacctcattcccaagggcacaaccatattaacttccctcacttctgtgctacatgacaacaaagaatttcccaacccagagatgtttgaccctcgtcactttctggatgaaggtggaaattttaagaaaagtaactacttcatgcctttctcagcaggaaaacggatttgtgtgggagagggcctggcccgcatggagctgtttttattcctgaccttcattttacagaactttaacctgaaatctctgattgacccaaaggaccttgacacaactcctgttgtcaatggatttgcttctgtcccgcccttctatcagctgtgcttcattcctgtctgaagaagcacagatggtctggctgctcctgtgctgtccctgcagctctctttcctctggtccaaatttcactatctgtgatgcttcttctgacccgtcatctcacattttcccttcccccaagatctagtgaacattcagcctccattaaaaaagtttcactgtgcaaatatatctgctattccccatactctataatagttacattgagtgccacataatgctgatacttgtctaatgttgagttattaacatattattattaaatagagaannn

SEQ ID NO: 55650 - DNA, 1229 bp, Homo sapiens
gcatatttaggcaagctccctgtgcaagttcccttatctgcacaaaacatctagtttctcaaaagtctatggccctgtgttcactgtgtattttggcctgaagcccattgtggtgttgcatggatatgaagcagtgaaggaggccctgattgatcatggagaggagttttctggaagaggaagttttccagtggctgaaaaagttaacaaaggacttggaatccttttcagcaatggaaagagatggaaggagatccggcgtttctgcctcatgactcttatgtctcttattttcaggaaaacggatgtgtatgggagagggcctggcccgcatggagctgtttttattcctgaccaccattttgcagaactttaacctgaaatctcaggttgacccaaaggatattgacatcacccccattgccaatgcatttggtcgtgtgccacccttgtaccagctctgcttcattcctgtctgaagaagggcagatagtttggctgctcctgtgctgtcacctgcaattctcccttatcagggccattggcctctcccttctctctgtgagggatattttctctgacttgtcaatccacatcttcccattccctcaagatccaatgaacatccaacctccattaaagagagtttcttgggtcacttcctaaatatatctgctattctccatactctgtatcacttgtattgaccaccacatatgctaatacctatctactgctgagttgtcagtatgttatcactagaaaacaaagaaaaatgattaataaatgacaattcagagccatttattctctgcatgctctagataaaaatgattattatttactgggtcagttcttagatttctttcttttgagtaaaatgaaagtaagaaatgaaagaaaatagaatgtgaagaggctgtgctggccctcatagtgttaagcacaaaaagggagaaaggtaagagggtaggaaagctgttttagctaaatgccacctagagttattggaggtctgaatttggaaaaaaaaactatgtccaggagcagctgtaacctgtagggaaatactggaacaatcatccataagagggatgaacattaagtgtttgaattcatgctctgcttttgtgttactgtaaacacaagatcaagatttggataatctttttcctttgtgtttccaacttagatcatgtctaaatatatgctttcatatggctaatcat

SEQ ID NO: 55651 - DNA, 715 bp, Homo sapiens
gagcagtggtttgtagttctccttgaagaggtccttaacatcactcctaagttggattcttaggtattttactctctttgaagcagttgtgaatgggagttcactcatgttttggctctctgtctgttattggtgtataagaatgcttgtgaattttgtacattgattttgtatcctgagactttactgaagttgcttatcagcttaaggagattttgggctgtgacaatgtggttttctagttacacaatcatgtcatctgcaaacagggacaatttgacttcctcttttcctaattgattacccttaatttctttctcctattcaatatttttttctagtactatactttacagtttctatgttggtaagtatacaatgtgagtaattttgaatttactgtcatcaaatatgctgttaaataatttgtcagataattgcatcaaatcattcctaggaaaagcaaaaccaacagtctgaattcactattgacacaaccctgagatatgctctccttctcctgctgaagcacccagaggtcacaggtatgatcacagaggatgagttaattgagttttaggaaagatgttgggaaggtgctgctagtgttctcctttctgtttctcttagagaagttccattatttaaatttctgtgcccgcagctgtaatctgtcccaatttaatggtgtgattaaaatggaatatcctggcct

SEQ ID NO: 55652 - DNA, 2534 bp, Homo sapiens
  misc_feature (2532)..(2534): n is a, c, g, or t
ctcgtgccgaattcggcacgagaacacaggacttggaatccttttcagcaatggaaagagatggaaggagatccggcgtttctgcctcatgactctgcggaattttgggatggggaagaggagcatcgaggaccgtgttcaagaggaagcccgctgccttgtggaggagttgagaaaaaccaatgcctcaccctgtgatcccactttcatcctgggctgtgctccctgcaatgtgatctgctctgttattttccatgatcgatttgattataaagatcagaggtttcttaacttgatggaaaaattcaatgaaaacctcaggattctgagctctccatggatccaggaagtcataataaaatagctgaaaattttgcttacattaaaagttatgtattggagagaataaaagaacatcaagaatccctggacatgaacagtgctcgggactttattgattgtttcctgatcaaaatggaacaggaaaagcacaatcaacagtctgaatttactgttgaaagcttgatagccactgtaactgatatgtttggggctggaacagagacaacgagcaccactctgagatatggactcctgctcctgctgaagtacccagaggtcacagctaaagtccaggaagagattgaatgtgtagttggcagaaaccggagcccctgtatgcaggacaggagtcacatgccctacacagatgctgtggtgcacgagatccagagatacattgacctcctccccaccaacctgccccatgcagtgacctgtgatgttaaattcaaaaactacctcatccccaagggcacgaccataataacatccctgacttctgtgctgcacaatgacaaagaattccccaacccagagatgtttgaccctggccactttctggataagagtggcaactttaagaaaagtgactacttcatgcctttctcagcagctctcaaaaatctatggccctgtgttcactctgtattttggcctggaacgcatggtggtgctgcatggatatgaagtggtgaaggaagccctgattgatcttggagaggagttttctggaagaggccatttcccactggctgaaagagctaacagaggatttggaatcgttttcagcaatggaaagagatggaaggagatccggcgtttctccctcatgacgctgcggaattttgggatggggaagaggagcattgaggaccgtgttcaagaggaagcccgctgccttgtggaggagttgagaaaaaccaaggcttcaccctgtgatcccactttcatcctgggctgtgctccctgcaatgtgatctgctccattattttccagaaacgtttcgattataaagatcagcaatttcttaacttgatggaaaaattgaatgaaaacatcaggattgtaagcaccccctggatccagatatgcaataattttcccactatcattgattatttcccgggaacccataacaaattacttaaaaaccttgcttttatggaaagtgatattttggagaaagtaaaagaacaccaagaatcgatggacatcaacaaccctcgggactttattgattgcttcctgatcaaaatggagaaggaaaagcaaaaccaacagtctgaattcactattgaaaacttggtaatcactgcagctgacttacttggagctgggacagagacaacaagcacaaccctgagatatgctctccttctcctgctgaagcacccagaggtcacagctaaagtccaggaagagattgaacgtgtcgttggcagaaaccggagcccctgcatgcaggacaggggccacatgccctacacagatgctgtggtgcacgaggtccagagatacatcgacctcatccccaccagcctgccccatgcagtgacctgtgacgttaaattcagaaactacctcattcccaagggcacaaccatattaacttccctcacttctgtgctacatgacaacaaagaatttcccaacccagagatgtttgaccctcgtcactttctggatgaaggtggaaattttaagaaaagtaactacttcatgcctttctcagcaggaaaacggatttgtgtgggagagggcctggcccgcatggagctgtttttattcctgaccttcattttacagaactttaacctgaaatctctgattgacccaaaggaccttgacacaactcctgttgtcaatggatttgcttctgtcccgcccttctatcagctgtgcttcattcctgtctgaagaagcacagatggtctggctgctcctgtgctgtccctgcagctctctttcctctggtccaaatttcactatctgtgatgcttcttctgacccgtcatctcacattttcccttcccccaagatctagtgaacattcagcctccattaaaaaagtttcactgtgcaaatatatctgctattccccatactctataatagttacattgagtgccacataatgctgatacttgtctaatgttgagttattaacatattattattaaatagagaannn

SEQ ID NO: 55653 - DNA, 2272 bp, Homo sapiens
ggcaccggaaagaacaagaaaaaagaacaccttatttttatcttcttcagtgagccaatgttcattcaaaagagagattaaagtgctttttgctgactagtcacagtcagagtcagaatcacaggtggattagtagggagtgttataaaagccttgaagtgaaagcccgcagttgtcttactaagaagagaagccttcaatggatccagctgtggctctggtgctctgtctctcctgtttgtttctcctttcactctggaggcagagctctggaagagggaggctcccgtctggccccactcctctcccgattattggaaatatcctgcagttagatgttaaggacatgagcaaatccttaaccaatttctcaaaagtctatggccctgtgttcactgtgtattttggcctgaagcccattgtggtgttgcatggatatgaagcagtgaaggaggccctgattgatcatggagaggagttttctggaagaggaagttttccagtggctgaaaaagttaacaaaggacttggaatccttttcagcaatggaaagagatggaaggagatccggcgtttctgcctcatgactctgcggaattttgggatggggaagaggagcatcgaggaccgtgttcaagaggaagcccgctgccttgtggaggagttgagaaaaaccaatgcctcaccctgtgatcccactttcatcctgggctgtgctccctgcaatgtgatctgctctgttattttccatgatcgatttgattataaagatcagaggtttcttaacttgatggaaaaattcaatgaaaacctcaggattctgagctctccatggatccaggtctgcaataatttccctgctctcatcgattatctcccaggaagtcataataaaatagctgaaaattttgcttacattaaaagttatgtattggagagaataaaagaacatcaagaatccctggacatgaacagtgctcgggactttattgattgtttcctgatcaaaatggaacaggaaaagcacaatcaacagtctgaatttactgttgaaagcttgatagccactgtaactgatatgtttggggctggaacagagacaacgagcaccactctgagatacattgacctcctccccaccaacctgccccatgcagtgacctgtgatgttaaattcaaaaactacctcatccccaagggcacgaccataataacatccctgacttctgtgctgcacaatgacaaagaattccccaacccagagatgtttgaccctggccactttctggataagagtggcaactttaagaaaagtgactacttcatgcctttctcagcaggaaaacggatgtgtatgggagagggcctggcccgcatggagctgtttttattcctgaccaccattttgcagaactttaacctgaaatctcaggttgacccaaaggatattgacatcacccccattgccaatgcatttggtcgtgtgccacccttgtaccagctctgcttcattcctgtctgaagaagggcagatagtttggctgctcctgtgctgtcacctgcaattctcccttatcagggccattggcctctcccttctctctgtgagggatattttctctgacttgtcaatccacatcttcccattccctcaagatccaatgaacatccaacctccattaaagagagtttcttgggtcacttcctaaatatatctgctattctccatactctgtatcacttgtattgaccaccacatatgctaatacctatctactgctgagttgtcagtatgttatcactagaaaacaaagaaaaatgattaataaatgacaattcagagccatttattctctgcatgctctagataaaaatgattattatttactgggtcagttcttagatttctttcttttgagtaaaatgaaagtaagaaatgaaagaaaatagaatgtgaagaggctgtgctggccctcatagtgttaagcacaaaaagggagaaaggtaagagggtaggaaagctgttttagctaaatgccacctagagttattggaggtctgaatttggaaaaaaaaactatgtccaggagcagctgtaacctgtagggaaatactggaacaatcatccataagagggatgaacattaagtgtttgaattcatgctctgcttttgtgttactgtaaacacaagatcaagatttggataatctttttcctttgtgtttccaacttagatcatgtctaaatatatgctttcatatggctaatcat

SEQ ID NO: 55654 - DNA, 2422 bp, Homo sapiens
ggcaccggaaagaacaagaaaaaagaacaccttatttttatcttcttcagtgagccaatgttcattcaaaagagagattaaagtgctttttgctgactagtcacagtcagagtcagaatcacaggtggattagtagggagtgttataaaagccttgaagtgaaagcccgcagttgtcttactaagaagagaagccttcaatggatccagctgtggctctggtgctctgtctctcctgtttgtttctcctttcactctggaggcagagctctggaagagggaggctcccgtctggccccactcctctcccgattattggaaatatcctgcagttagatgttaaggacatgagcaaatccttaaccaatttctcaaaagtctatggccctgtgttcactgtgtattttggcctgaagcccattgtggtgttgcatggatatgaagcagtgaaggaggccctgattgatcatggagaggagttttctggaagaggaagttttccagtggctgaaaaagttaacaaaggacttggaatccttttcagcaatggaaagagatggaaggagatccggcgtttctgcctcatgactctgcggaattttgggatggggaagaggagcatcgaggaccgtgttcaagaggaagcccgctgccttgtggaggagttgagaaaaaccaatgcctcaccctgtgatcccactttcatcctgggctgtgctccctgcaatgtgatctgctctgttattttccatgatcgatttgattataaagatcagaggtttcttaacttgatggaaaaattcaatgaaaacctcaggattctgagctctccatggatccaggtctgcaataatttccctgctctcatcgattatctcccaggaagtcataataaaatagctgaaaattttgcttacattaaaagttatgtattggagagaataaaagaacatcaagaatccctggacatgaacagtgctcgggactttattgattgtttcctgatcaaaatggaacaggaaaagcacaatcaacagtctgaatttactgttgaaagcttgatagccactgtaactgatatgtttggggctggaacagagacaacgagcaccactctgagatatggactcctgctcctgctgaagtacccagaggtcacagctaaagtccaggaagagattgaatgtgtagttggcagaaaccggagcccctgtatgcaggacaggagtcacatgccctacacagatgctgtggtgcacgagatccagagatacattgacctcctccccaccaacctgccccatgcagtgacctgtgatgttaaattcaaaaactacctcatccccaagggcacgaccataataacatccctgacttctgtgctgcacaatgacaaagaattccccaacccagagatgtttgaccctggccactttctggataagagtggcaactttaagaaaagtgactacttcatgcctttctcagcaggaaaacggatgtgtatgggagagggcctggcccgcatggagctgtttttattcctgaccaccattttgcagaactttaacctgaaatctcaggttgacccaaaggatattgacatcacccccattgccaatgcatttggtcgtgtgccacccttgtaccagctctgcttcattcctgtctgaagaagggcagatagtttggctgctcctgtgctgtcacctgcaattctcccttatcagggccattggcctctcccttctctctgtgagggatattttctctgacttgtcaatccacatcttcccattccctcaagatccaatgaacatccaacctccattaaagagagtttcttgggtcacttcctaaatatatctgctattctccatactctgtatcacttgtattgaccaccacatatgctaatacctatctactgctgagttgtcagtatgttatcactagaaaacaaagaaaaatgattaataaatgacaattcagagccatttattctctgcatgctctagataaaaatgattattatttactgggtcagttcttagatttctttcttttgagtaaaatgaaagtaagaaatgaaagaaaatagaatgtgaagaggctgtgctggccctcatagtgttaagcacaaaaagggagaaaggtaagagggtaggaaagctgttttagctaaatgccacctagagttattggaggtctgaatttggaaaaaaaaactatgtccaggagcagctgtaacctgtagggaaatactggaacaatcatccataagagggatgaacattaagtgtttgaattcatgctctgcttttgtgttactgtaaacacaagatcaagatttggataatctttttcctttgtgtttccaacttagatcatgtctaaatatatgctttcatatggctaatcat

SEQ ID NO: 55655 - DNA, 3069 bp, Homo sapiens
  misc_feature (3067)..(3069): n is a, c, g, or t
ggcaccggaaagaacaagaaaaaagaacaccttatttttatcttcttcagtgagccaatgttcattcaaaagagagattaaagtgctttttgctgactagtcacagtcagagtcagaatcacaggtggattagtagggagtgttataaaagccttgaagtgaaagcccgcagttgtcttactaagaagagaagccttcaatggatccagctgtggctctggtgctctgtctctcctgtttgtttctcctttcactctggaggcagagctctggaagagggaggctcccgtctggccccactcctctcccgattattggaaatatcctgcagttagatgttaaggacatgagcaaatccttaaccaatttctcaaaagtctatggccctgtgttcactgtgtattttggcctgaagcccattgtggtgttgcatggatatgaagcagtgaaggaggccctgattgatcatggagaggagttttctggaagaggaagttttccagtggctgaaaaagttaacaaaggacttggaatccttttcagcaatggaaagagatggaaggagatccggcgtttctgcctcatgactctgcggaattttgggatggggaagaggagcatcgaggaccgtgttcaagaggaagcccgctgccttgtggaggagttgagaaaaaccaatgcctcaccctgtgatcccactttcatcctgggctgtgctccctgcaatgtgatctgctctgttattttccatgatcgatttgattataaagatcagaggtttcttaacttgatggaaaaattcaatgaaaacctcaggattctgagctctccatggatccaggtctgcaataatttccctgctctcatcgattatctcccaggaagtcataataaaatagctgaaaattttgcttacattaaaagttatgtattggagagaataaaagaacatcaagaatccctggacatgaacagtgctcgggactttattgattgtttcctgatcaaaatggaacaggaaaagcacaatcaacagtctgaatttactgttgaaagcttgatagccactgtaactgatatgtttggggctggaacagagacaacgagcaccactctgagatatggactcctgctcctgctgaagtacccagaggtcacagctaaagtccaggaagagattgaatgtgtagttggcagaaaccggagcccctgtatgcaggacaggagtcacatgccctacacagatgctgtggtgcacgagatccagagatacattgacctcctccccaccaacctgccccatgcagtgacctgtgatgttaaattcaaaaactacctcatccccaagggcacgaccataataacatccctgacttctgtgctgcacaatgacaaagaattccccaacccagagatgtttgaccctggccactttctggataagagtggcaactttaagaaaagtgactacttcatgcctttctcagcagctctcaaaaatctatggccctgtgttcactctgtattttggcctggaacgcatggtggtgctgcatggatatgaagtggtgaaggaagccctgattgatcttggagaggagttttctggaagaggccatttcccactggctgaaagagctaacagaggatttggaatcgttttcagcaatggaaagagatggaaggagatccggcgtttctccctcatgacgctgcggaattttgggatggggaagaggagcattgaggaccgtgttcaagaggaagcccgctgccttgtggaggagttgagaaaaaccaaggcttcaccctgtgatcccactttcatcctgggctgtgctccctgcaatgtgatctgctccattattttccagaaacgtttcgattataaagatcagcaatttcttaacttgatggaaaaattgaatgaaaacatcaggattgtaagcaccccctggatccagatatgcaataattttcccactatcattgattatttcccgggaacccataacaaattacttaaaaaccttgcttttatggaaagtgatattttggagaaagtaaaagaacaccaagaatcgatggacatcaacaaccctcgggactttattgattgcttcctgatcaaaatggagaaggaaaagcaaaaccaacagtctgaattcactattgaaaacttggtaatcactgcagctgacttacttggagctgggacagagacaacaagcacaaccctgagatatgctctccttctcctgctgaagcacccagaggtcacagctaaagtccaggaagagattgaacgtgtcgttggcagaaaccggagcccctgcatgcaggacaggggccacatgccctacacagatgctgtggtgcacgaggtccagagatacatcgacctcatccccaccagcctgccccatgcagtgacctgtgacgttaaattcagaaactacctcattcccaagggcacaaccatattaacttccctcacttctgtgctacatgacaacaaagaatttcccaacccagagatgtttgaccctcgtcactttctggatgaaggtggaaattttaagaaaagtaactacttcatgcctttctcagcaggaaaacggatttgtgtgggagagggcctggcccgcatggagctgtttttattcctgaccttcattttacagaactttaacctgaaatctctgattgacccaaaggaccttgacacaactcctgttgtcaatggatttgcttctgtcccgcccttctatcagctgtgcttcattcctgtctgaagaagcacagatggtctggctgctcctgtgctgtccctgcagctctctttcctctggtccaaatttcactatctgtgatgcttcttctgacccgtcatctcacattttcccttcccccaagatctagtgaacattcagcctccattaaaaaagtttcactgtgcaaatatatctgctattccccatactctataatagttacattgagtgccacataatgctgatacttgtctaatgttgagttattaacatattattattaaatagagaannn

SEQ ID NO: 55656 - DNA, 562 bp, Homo sapiens
gcaaagaggggaaagacgcaggggtccccaaagcccttcttcactttgtgtccccttgctgcgatcatggagagttaaagaggcttccttgggagaagagctctgccaccagggcttccccagtgtctttgggggtctgtgaaaaagaggatcctctgaggtttactgggagggctcaaggctgagggaatggagaggaaaattttagcagttccatcccagtgtaaggaccaaccccaaaagttaaacttgcaccacagactaaaggtcaagggcatcctgtgtttctcccctttcttccccagagtgacaagggccagttcagactgacagaaatccaacagctttcctgagctggaaatttcagaacagtctgcaagttactcccaggtgactgaaggtcaaggtgaggcccccctgcctctgcctgcgagtctcccccggtttgcatttttcttgacaccggcatttcctgaggttgagctctctggggagttctagagaatggctagtaaggctttttgagcttgcacatctcacctgcctttcctgtcttttgcct

SEQ ID NO: 55657 - DNA, 319 bp, Homo sapiens
tctttttccctcctctgacttcctgtcaggaaaaaatgtattttttttaagttacaaatttatattagcagtcatcttgaataacttctttctaagttctacatctgctatttactggttgtttgaccaaaataaacagattaatctgagtctcagtttctttctcttaaaatggatttaaatacaacctaataaatatgttctatattaataagcatcagctatatgctaggcactaaactggtaacttatctactatctcattttgcccttaaagtaatcttatgaggtaggaattattatccccattttattgaga

SEQ ID NO: 55658 - DNA, 811 bp, Homo sapiens
  misc_feature (2)..(2): n is a, c, g, or t
  misc_feature (5)..(7): n is a, c, g, or t
  misc_feature (9)..(10): n is a, c, g, or t
  misc_feature (12)..(13): n is a, c, g, or t
  misc_feature (15)..(16): n is a, c, g, or t
cnaannncnncnngnnaaaaacatttcatagataaggacacttctcttagcgaataccagtcatttatttatagagaagccagtctcagcgttctggggagatcagctccagcgactggctttatttcccaggagtatctccattgtgctggggaggcatgaagagcaatttcactgcttagttcctctttcttctgaggaggattgaaatctctcatgctaattatggattattttctctcagctctgcaggttttgcttcttgtatttgagaatgttataaggtgcatgcacttttaggatttttacatcatatttgtaaatttgaccccctttatctccagtgacattctttgttgtgaagtcaccttggtctgactactctcctttcttctgatttggtgtttgcgtggtgtgtttgccaagtttagcttttttcactttcaacctttgtgtatgtgtaaagtgcatttctttcaggtatcatataattaggtcttgcttctttattcaccctggcaacctctgttttttatttggaatctttagactacttgggtttaaatctatcatctctggcgttttcagttacatctttcacttgtcactgcccactctcaaatggtattacactgcctgagctgcggggcagtgctctgactgtagcttcctgcttctgacatgttcttggttggcagtgttgctgtgtcatgtccaagtgaaacatggtataaaccccacaatatgatgtttttgtttttgctttaaataggcaattacattttttcccctcaaatttgaaaagagaaaa

SEQ ID NO: 55659 - DNA, 354 bp, Homo sapiens
tagaatgcaaattattttaattcagaatgtgtatttcttagtctcttctttcagtatttaccataatttattccatttacttaacaaacttttttgagggcctatttcctgagcactgtgccaagtgccagagatacagaaagaacaaaacaaccctgttgcaaaggattcatggtctaaataaatgaatgcatagaggtacatttccacttttgttcgtttcatgtggattgcacatatcctgtcaaacttatatcaactatagctaatagggaaattatgaagataatacaatacttattaagacaatttagaaaagaaagtcatctttattattcactttcaaaattttat

SEQ ID NO: 55660 - DNA, 297 bp, Homo sapiens
gtcatcacacttggcccctacaaatacctctcaatttcagcagtagagccagccccagggcctgtcccacaaccctggcccactttatctatcctaacgaactcaacaaccacgtctgtgtgtacatccatccacccatccactcactcattcattcattcaacacattttaaggagtgtctactgtctccatacttcctccccaggctcccccaaagctatggattcctacataccatgggttacttgatgtctccacctgggcctgccatgatgttgtaaaaggccaaaccagac

SEQ ID NO: 55661 - DNA, 253 bp, Homo sapiens
tccaggaaggtggatagtatgccagcagcggcatgctgagagaccatgcaattagggtgccagagccctatggggtgatgaggagggagtaccagcaccctcccagcagaggtaggaagaaccagcaacacgcaggcacaagtccatgtggcactgcactgggagatcctcggctcccagatggacccacccaagtgggcacccccggatcccagaagagggactggatggaacctgagggcagagggagtaa

SEQ ID NO: 55662 - DNA, 731 bp, Homo sapiens
acttgagggaggaaagtgcaggacaccgaggggacctgtgtcttgtgtttcagatggctggagtacagtggcacgatctcagctcactgaagccttacctactgggctcaagcgatcctcccacctcagcctcgcacatagctgggactacagtatagaaacttgatacctccctgcaagctgagggagcaggctccggccttggccagcccagaaaggggatcccacaatgcagcggtgggctgaagtgttcctcaagtgccgccaaagtgggagcccaggcagaggaggcgccgagagcgagtgagggctgtgaggactgccagcacgctgtcacctctcaacactgcggtgctgataatgacacttcctgataattaggaatgtggagccaagatggccgaataggaacagctccggtctacagctcccagcgtgagcgacgcagaagatgggtgatttctgcatttccatctgaggtttttcccatggtgttccctttccaatgtctttctggaagtcacacattgaccactaacaacaggagagaggacaaagaaaggcagcaaaagactatttccaatgcgaaatatgatcagttcctgcttcctggttgctgtgaggattcaatctaataatatatattagaatgttcctgaacctctaaaaggcttaaaaaatcttgacaggcttactgttattctaataaatgttccaaataatagaagttt

SEQ ID NO: 55663 - DNA, 245 bp, Homo sapiens
tatgctatatgtagattttgtaatttatttttattccacatgattcttataagattagtctatttggtttcttttgaaaaatgtttgtatacattttttatattgagaaaacatgtttgtatacaatattcataaaattatggataattttagttccttcttattaaatacaaaatggttaatattattctaactttgtctttgccttccatcaggttttgattttcctgattgaatttataact

SEQ ID NO: 55664 - DNA, 689 bp, Homo sapiens
atgacattttgtgttggtccttcctcttgagtgttgaccatttccctgtcttaatccctaacccaaggcctggtgctcttataacctgctgtgctcttccatgttctccctactaagatgagagactcatcaatttccctgacaggtccctgagatgccgtcaccaaagtctggtttcttaaatgatgacctggttaatacaaacaagaatgaaaaaagacccccacaactaacatatatcgggcacttacaaagatcaggtcctgagcagtgcttttaacttttgtacagtactcatcacaaacccatgaattaaatattattttggtatgaactgctagttgcctacccagtattcattctcccattcacagatgttaaagactacatttcccagctttccttgcaactaggagtagccaaagaatataaatagaagttgctgggtaagcttcagacaaagctctttaatgctgatagggtgccttttattgctgtgaaatattggctgcagtgtagacatgatagctggagggcaccttgtaaccatgaagtaactttaggatggaagccatatgcgaagaatggtggaacagaaacagagaaggagcctatgaccctgatggctgtggagctgctacagtgccttcctccagactttttataacaggcaaaataaatctctaact

SEQ ID NO: 55665 - DNA, 465 bp, Homo sapiens
acacatctgctcctgctctctctcctccagcgaccctagccatgagaaccctcaccatcctcactgctgttctcctcgtggccctccaggccaaggctgagccactccaagctgaggatgatccactgcaggcaaaagcttatgaggctgatgcccaggagcagcgtggggcaaatgaccaggactttgccgtctcctttgcagaggatgcaagctcaagtcttagagctttgggctcaacaagggctttcacttgccattgcagaaggtcctgttattcaacagaatattcctatgggacctgcactgtcatgggtattaaccacagattctgctgcctctgagggatgagaacagagagaaatatattcataatttactttatgacctagaaggaaactgtcgtgtgtcctatacattgccatcaactttgtttcctcatctcaaataaagtcctttcagcaa

SEQ ID NO: 55666 - DNA, 342 bp, Homo sapiens
aaggttttagtgatgattcagtgagaaacatatttgaagcaacaagcacagtaactggaagctgtaggtactcaataattgtcagtttccttcctcttctaaaagctgtgctttcaagtcaattgtatgtctagagtcgcactgtctggtacagtggccagtactagccacatatggctctcaagtactttaaagagggctagtctgaattgatatgtgtcatacatgtaaaatactttaaagagggctcatctgaattgatatatgccatacatgtaaaatacaaatcagatttctaaaactttgtaccaaaaaataccataaaataacttactaataatt

SEQ ID NO: 55667 - DNA, 205 bp, Homo sapiens
gagggcagagggcacgtgccagctatattgtaaggaggttttcctgaagctgctatacagcacttacaacttagtggccaaaaccgagtcacctaactacagctagctagctgcaaaggaggctgggaaatgtagtcctaattgtgagaggccgtgtttctgtttttaaggaaggagagggacatattcagtggaaactaacaaa

SEQ ID NO: 55668 - DNA, 451 bp, Homo sapiens
ttggtcccttggagttcacagtctaatggggaagacaggatataagcaagtagtttcagcatagctttggaattgcatgcagagaagtgagtgaagtgagtgagggccagccaaggctggagtaaagtggcatgatctcggctcactgcagcctccgcccccgccaggttcaagtgattgtcctgcctcagcctcccgagtagctgggattacaggcgcaggccaccatgcccaggtcacccgtacttcatttaccagtccttgctaaggattattcattaaaacactcaacagcaacaataaccacaaaagcaacaataaaaatacctttgaactcactcaatcttgaactattgaacatgctaagtccgtgtcattggcctacttaatcagccctcgattgtaacttgaagaagcttattgataagaaaataaacttctcataaagtat

SEQ ID NO: 55669 - DNA, 599 bp, Homo sapiens
gaagatcacatggcagagtgagctggagcgaggtaccagcagacctcttaggcggggcatgcaccccccgcagtgtcccatgtccccactgttccctgtggctatatccattccacttgacttacttttactccttgtccaggtccttgtggcattgttctttcttttttgagacagtctcactctgtcacccaggttggactgcagtggcacaatctcggctcactgcaacctccgcctcctgggttcaagcgattctcctgcctcagtctcctgagcagatgggattataggcgcctgccaccacgcccggataatttttgtatttttagtagatacggggtttcaccatgttggccaggctggtctcaaactcctgacctcaggtgatccacccacctcagtctcccagagtgttgggattacaggcgtgagccactgcgcctggctgacattgagttttcaactcttcatctacaccatatgtcagagcatttccttcttcttgcaatgacagcaaaaatactgaggcttcaattacttaccctcctctatttctgttttattatctctccctgtcgccatttccatgcactgat

SEQ ID NO: 55670 - DNA, 423 bp, Homo sapiens
atacacactagtttttacttttttggcattagaaattgctgatatagttttacaatttttacagaaaaatatactagtagaaaacaaaataaccagaaaaacataacacagtcactaaaaaatgtttatattactttaataattttaaatatatttaaatctcatatatttaaatattttatgtttcttgtagtactgaagtttcataggcaaacccgtcatctatatgttttttgtaatctagggaagattatgcacttcatgccccctgagagtcagatgttatgaaaattctgtgaattccgagaatggatctatttcggactggtaaaatttccttttctgctttagtttctcagcttgcccccactttttagttaagaactagtacttgttggttgccttttaaaaaataatgtattt

SEQ ID NO: 55671 - DNA, 751 bp, Homo sapiens
tgatgatgttacaatcctattggtgataagtggtttagaaatgaacccttactgaccccactggctaaggcaggaccacacatagaatccaggaacattatttcccttaaagactatttgttcttgtagttcccaaatctggctgatcatcagtgtttctggtcatttttaaaaggacacatatctgagtccctactccactcataacaaattggaatatgtggggagagtggcttgcaatatgtacttttctcaaactaccctcatgattttatgttcatctagattggaaaccttttatctagtcaaactagtcatatgctgcaccagagagcagccaaaaaactgcctgcccttgccagattttccacgggagtggtggttgtaaataagagaaaacaatataaatctaggtcaagatggaaaacaaaacatttaaaatggagatggattatgcatttcttcccatgttttgggtttaggacaatcacgtagcagcacaaacacaataattcaggaccaaggtcaacgccttttctctactcttatcccttgttcccatgataggctttgcttaggaatccattgctgtctttgtagaatcccagagagggaaaaccacttgcttaaatctgtgcagtaagtcagtggcttatctggcactataattgatacataaatgtcctatatatgtgtaaatatctgtcaaggatcattaaattaatagataatgactgcccccattagaatt

SEQ ID NO: 55672 - DNA, 680 bp, Homo sapiens
atatttattagtgacatagaatataccagttattactctaggtcatgagagtggtgataaataaaatgaatccgctcgccatcagtatatgccatgtaacagtttgcagtgactgtgtaccaggcctgtgaatttctgtatgcaatttcaataatgatcctgctgtatctgtggtatttaaaaacatatacatctctggaatctaaaattgagaggttataagtaaaacccagtattagaaatttagtgctggaaatcagattgcagtttaaatctgagcatatagaaagtccctttcttctatgtcagcagatgccttttatgtgaggtttaggtatactgcattatttgacataaaccagtgtttctgccctatgtcttcagaatgacaattctttatgaaactaatagaagaacagaagacaattgcaaaatcatgatgaagatactaattgctttagaattaaggaatacaaaaaataatgtgagctacagttatagggatcataaaagttaaaatgggaatgtatttgagtgtttattatgtgatcagtgctaagaagagtcatcatttaattttacacttaacagtaatcctgtgaggattatgctattattaaatgcatttgatatattacaaaaaggcttacggttggtaaaaattgacccaagtagaagag

SEQ ID NO: 55673 - DNA, 278 bp, Homo sapiens
gggccagccaaacctggggcgggggcccagtgtccccagggactggcatctgagacctccactgtttacacaacaccacacccgaggagtggattgcccagagtatgcgtgcgcgcacacactgcttccagcatacacacgatgcacacttgcatgagcacagggtacacacacatgttcacaccagcactcacacacaggcacacaccttcacacgtggagggcacacagcacactgccttgcatgacatgcacgcccattcacaccactgtgtaca

SEQ ID NO: 55674 - DNA, 1705 bp, Homo sapiens
agtgaggaaactaaggaagagagtagggtggatagataaaggcacagacctcgctcagttactggccaggaagcccagaacctaatggtaccctcattattcagaaactagccatgaagccactgtccccctagagctactcaagacaggacctaagtgaggttgaatgctgctttttctaatcatttaggggatatatactttctttctttctttctttctttttttgagacagagtctcactctgtcacccaggctggagtgcagtggtgcaatctctgccttccgggttcaagtgattctcctgcttcagcctcccgagtacctgggaccacaggtacatgccaccatgctcagctaatttttgtatttttagtagagacagggttttgctatgttggccagactggtctcgaactcctgacctcaggtgatcccacccgcctcagcctcccaaagtgctgggattacaggcatgagccaccacgcccagccgggggatatatactttcaatttcctcaaatagacaaattttgccttataggcacaaaatattggattgtggtgacataacccaataacatcttctcttctgggaaatacatatatcggttacaaagaaacaatgtatgtcagggaacaaagagaaggcttgaagtttccctgtatcttatataagacttaggaagatgacaggattgacctaaagttctgtgtccttgaaggtgagttgcctattaaccccatgatgctgactctgctttgaccctgaggagcctaatcaattaggacaggggtgttcaagcttttggctttcctgggtattggaagaagaattgtcttgggctacacataaaatacactaacactaacaatagctgatgagctaaaaaaaaaaaaaatcgcaaaaaaaaaaatctcataatgttttaagaaaaattataaatttgtgttgggcagcattaaaagccttcctgggctacatgtggcccacaggccacaggttggataagctcgagttaggattatcccagaatgtgagatggcctctgtttctcagcacttactcttgtgaccatagttcctaatcctctcctttactaaagcttctaaggaggaatgtctctctaggcagaaagtgtaaatgaattactgttatcttgctaatactagctactactatctttgcttaacctaacaagatgccagtagagactgccctttaatcatgaaagacaactagagactagtctcattatggcatattctctataagtatcactgactccagaaggactcaaactgataaaaggaacatgctcttatactacattttagttctgttaatgagtttcagtttaaataaatctttatctataaatacagtgatagaatctttggaatcttctagattagatattgaaggctctagtacaaagaatatactgttgtactacacagagtcttgtgcataagggcttctgttattatatgtgttgaatccaatgcaaaatttgcctccatcttcaaaaaagttctgaaaaagaatatctgcctcctctaggagttacacacaacctgaatacatctgtaaggctctttcaaatttccagagcaatgacctttcttgctttttaccagcgaagtaaattgctgaaaagctaggaagtctttctgggttccagcgtatccaagattaaaata

SEQ ID NO: 55675 - DNA, 175 bp, Homo sapiens
ctcctgaatgagatacaagggttccagagccttcgccaggcaccagctggtctgaatgaactagaagtttgacgactgtcatccctggcccacctgggcagagcacaaggggccgagtttgaatgtcatcagcaggttcagacatcagcgctgctcatgtctttagagactgttt

SEQ ID NO: 55676 - DNA, 161 bp, Homo sapiens
attagtatttttgtctgtatgtcctagcactgttcaacaacaaatttttctagttcttgttaatttttatttgttatacaatggaagcacaatgttataaggaaaggtaattttaagctaacaaccagtgcacagcctcaggttttaaattacaaccacag

SEQ ID NO: 55677 - DNA, 535 bp, Homo sapiens
tactgttatgatttttataaacacgctttaaaccaaactaggccataaatcaccttggtttcagaaaaagccaaaatactgacacaatcttttattttcctattaaagtcaagaatgtgttaagccgaattaattgaaaaggaattgaagctcatttcctaagacacttctattcataagtcaaacagcattacctaactcctagaatgagagaatttctgggcttggagatcgcctagtgcaattcactcctttgatggaaaatcgaaccccaggcaggcgacaggccaaggtcacagaggcaaagcagggatgggaaccagcctccctgaacctgtttctgacaaagggcgaggttctgggcccacacacaggcaggccgagctcagtatctgacggtgaatgaatgaagctaagtggtgctccccacagggcccggctcttgtaactgcttcacagacaagcgatttccaggttatggagacatcctagcacagaattaaacgcttcaaactcagactgttaactcctcaga

SEQ ID NO: 55678 - DNA, 794 bp, Homo sapiens
tagctgagcagccctggggcttggttctatgtccctgtggctatgtttccagtgtcctctgggtgtttccaagagcaacaagaaacgaataaatctctgacccttctcaggtgcagccagagagacactagcccactgatggatggacagacgtgggcagggtccgtgtcactaaaccacccaccactgccacagctgcctacaacagacacatcagatgacactccgggcaaataaatgattttcactgaggacttactggttttaataataggtcctggtgtagagaagtccctcaacctattgtgcaatgagttttgagaagcgggtaagctgtatgttttgtggttttgtttcataaatgcatctacaggaagaccaatattgactgaatgaagctttcatttaaagagctaaaatatgctttgtgtttttatatgtggatactactttaaacctaatgactattcattgtatcatagcttgtgatgtattctgctcacggcttttaaggtaaattgtgccatgatccactgccattctaattgctttaacaagtcattaccacactactgttacatcttaattatgcatacagacacggtagacttattttacatatgtgaactaactagttgtcaaagccaaatgccgattgtattctgcaggtaaagtctttgtctctctgaaatttctagggatgttcttaagggtgaactcatattgacacatgagaaatttaggtacaagaatggtggggaataaagcctggggaataaaacagggcaaacaca

SEQ ID NO: 55679 - DNA, 634 bp, Homo sapiens
  misc_feature (346)..(346): n is a, c, g, or t
  misc_feature (361)..(361): n is a, c, g, or t
  misc_feature (392)..(392): n is a, c, g, or t
  misc_feature (421)..(421): n is a, c, g, or t
  misc_feature (633)..(633): n is a, c, g, or t
aggccaagagaaggggatcactagtctaggtaaaagcactcctgtcttcctggcagcagttggacctcacaatgtggattgttacctcaccctgcaaagttgatgccctatcgccatggtgacgagattagggatctcctgctcttggtcctaagggccactgcctgtgctgtgtttttcaaagaaaatatgtatcttggctcaggcctgtaatcccagcacttttggaggccaaggcaagaggatcacaagctatgtttccagtgtcctctgggtgtttccaagagcaacaagaaacgaataaatctctgccataggagttttagccaattcagaggccttgctncccacaatttggaanattccttggattgaccaagtcaggaagagangggagaaaagtgaaacaacaacaataaanccccaagcataaacaaaaaaagagttaagcaaaacaacaaatgcacaattcatatgattactgagtgttctaatggtaaggagaaactaaaagcagaaattaaaagcagctggtgagtaatctttaaaattttaggtcattaaggaaaaattttaagacaaaactctaattcagctacttacctggaaacaaggctcaggctggggaatccng

SEQ ID NO: 55680 - DNA, 294 bp, Homo sapiens
  misc_feature (31)..(31): n is a, c, g, or t
  misc_feature (52)..(52): n is a, c, g, or t
ttccaacccggggggaaaaatgcggcctttnactgaagaggagacccgtgtnatgtttgagaagatagcgaaatacattggggagaatcttcaactgctggtggaccggcccgatggcacctactgtttccgtctgcacaacgaccgggtgtactataggaggaaaaaaggtcacagctatgtttccagtgtcctctgggtgtttccaagagcaacaagaaacgaataaatctctgccaccctccagggtgccccgacttcactttccctgcagattggaggctaaggaggctc

SEQ ID NO: 55681 - DNA, 504 bp, Homo sapiens
  misc_feature (95)..(96): n is a, c, g, or t
  misc_feature (216)..(216): n is a, c, g, or t
  misc_feature (231)..(231): n is a, c, g, or t
  misc_feature (262)..(262): n is a, c, g, or t
  misc_feature (291)..(291): n is a, c, g, or t
  misc_feature (503)..(503): n is a, c, g, or t
tgcgggtcggtgcaagggcgaagaggaacccgtgggcctcaggggatcccggggggcctggaccagatgtttcgccttagtttttgtgggaagcnnatgacgcgtgggcgcattgcgggcagctatgtttccagtgtcctctgggtgtttccaagagcaacaagaaacgaataaatctctgccataggagttttagccaattcagaggccttgctncccacaatttggaanattccttggattgaccaagtcaggaagagangggagaaaagtgaaacaacaacaataaanccccaagcataaacaaaaaaagagttaagcaaaacaacaaatgcacaattcatatgattactgagtgttctaatggtaaggagaaactaaaagcagaaattaaaagcagctggtgagtaatctttaaaattttaggtcattaaggaaaaattttaagacaaaactctaattcagctacttacctggaaacaaggctcaggctggggaatccng

SEQ ID NO: 55682 - DNA, 366 bp, Homo sapiens
caaagtcttgctcccaggctggagtgcagtggtgcaatcacaactcactgcagcttcgacctcctgcgctcaaccgatcctcccatctcatcctcctgagtagctaggactacatgcatgcaccactgtatctggctaacttttttattttttgtagagatggggtctcgttttgttgcccaggctggtctcaaaactcctgggtgcaagtgatcaatttgcctcagcctcttgggatttataggggtgagccaccaggcatagcataaaagcatctgataaggaaacatctacactgtttcaccgcaaactgttccccattgattttagcactttgattcttgattgaaacaattgttactacta

SEQ ID NO: 55683 - DNA, 727 bp, Homo sapiens
ggattttataaaaggagaaaatataatcgttctctcatcaactgtagtagaattggagagaaaagaaaaccttgaagaactaattgaataatataataaaattactgttagcaatcatactttagtagtgtgaagggaaaagctatttctgcacaggtaggaagcagtattaacaatcaaatacaacttttaggctcagaatataggttcagattatttgttgtgagaataatgagaatattcagaataaaggctaattcttggaaatggattttagaattttcaactgatttcatcagcaaaaacataaggctttcatttcataaaaactttaaaaaatgtaactatgtcatcctgttagtgattaattcaactgtctaaaaattacaaatattttactttattgaaggtttatagtaaaatacgtgtgtgtgtttcgaaggctgggggcttggtggatttattggtgcccttattcaactttgcaatagtcttccatagtttggacatgaatgtaaattgaactgttttaaaaatagtttacatcattgcttgtgcctatcttttgaaatatgtcaacttcctcactatcttgagaagataggctaacacattctatgtgatggaaaacttttcaaagctgtctttcacatcccaggatgtgtaaagccctgcccatagcttcattctctggcagaaatattataccatttacccacatagataa

SEQ ID NO: 55684 - DNA, 517 bp, Homo sapiens
cctcagaatatctacctgcttggggtctggttgggatttcctgggatgtgtttgcatatacgcattttgcaactgagagctgtcttcttactcaggggattgctcaccatgaccccagagctccctgcagaacctcctcccaaagcagacagaatttttgccatctccgtattttcctcaagatgagggatggtgatccagggaacaggaaactgaccggaaccaaagcagtagctgctgagggagctgctactgccagccaagctctcaggggatacaagagaaagaagacatgttccaggcttccagggcttaaacaaacaagataagaagaaactgatgaaaacttaatttcctctgaaatcttgtgtataagttcaaaataataatagaacttgtctggaatgatcttagagaatcttacctgctctgatttccacgagaaggtcatttgagggggcaggggtaggccacatttcatctcattagaataaactccagttacatctccagaaaa

SEQ ID NO: 55685 - DNA, 325 bp, Homo sapiens
cgctctaaacctcttaggtattccggaaatgaagacagtcatttcaggcctgtgttaaatctgcctccgcagtcttccaaggggtaagtagccctgccttttccatctctgttgttcttccctctccctcatgcactgaagggagagtctctactgccaggtcagtctgggcacaggtttggcatagagtgagcaggtctggttcacacacttctattctaacccatgttaccagacactctattccttccacttcagccacttcccacccagaggtgctgagcaggccatgctgtgggtgtgtggcgtgcaccccctcccaccc

SEQ ID NO: 55686 - DNA, 610 bp, Homo sapiens
atattactttcctagactctagtcatgaacaggatgttggaagtcagaggtacagagaagctgcctttttaggccgctcacatgaaagccagccatctgggcaacaagaaaggcttactacagttagataaatttaaccccttctctgacctggcaaggacaaagtacactggcttctgaagaaactttttcttgggagcaaggtagttatttcaaagcacagaaaaaggcggcggggggcacagagaagcacagagaagcgggggcagttgcacaggttgtttattctgttgatggatattggactggagtgatgagtgttctaggatgggtatttgatgatgccaggggactcaagtaatggctttgcatgaagattacacagtaaagctgcacattgattacctcatcttattagctgatggagatgtttgagaggacaagattgcagggctttcaagcctgtacagctaccaggatttgatcctaagagcttgatcattgtcattgcccatagggactgtgttaagaatagtggtggtttactacttaaacgcatgagagtgttataacagttccctatgtcttttgaattgtttagataaggtta

SEQ ID NO: 55687 - DNA, 7581 bp, Homo sapiens
acctctggtggtggctggctactcggatacgaattcggcacgagggcaggcgtcggctagtgtcgggagtcgcgcccgccgcccctcagctgcccggcccggagcccgagacgcgcgcaccatgagcggtggtgaagtggtctgctccggatggctccgcaagtcccccccggagaaaaagttgaagcgttatgcatggaagaggagatggttcgtgttacgcagtggccgtttaactggagatccagatgtttggaatattacaaaaatgatcatgccaagaagcctattcgtattattgatttaaatttatgtcaacaagtagatgctggattgacatttaacaaaaaagagtttgaaaacagctacatttttgatatcaacactattgaccggattttctacttggtagcagacagcgaggaggagatgaataagtgggttcgttgtatttgtgacatctgtgggtttaatccaacagaagaagatcctgtgaagccacctggcagctctttacaagcaccagctgatttacctttagctataaatacagcaccaccatccacccaggcagattcatcctctgctactctacctcctccatatcagctaatcaatgttccaccacacctggaaactcttggcattcaggaggatcctcaagactacctgttgctcatcaactgtcaaagcaagaagcccgaacccaccagaacgcatgctgattctgcaaaatccacctcttctgaaacagactgcaatgataacgtcccttctcataaaaatcctgcttcctcccagagcaaacatggaatgaatggcttttttcagcagcaaatgatatacgactctccaccttcacgtgccccatctgcttcagttgactccagcctttataacctgcccaggagttattcccatgatgttttaccaaaggtgtctccatcaagtactgaagcagatggagaactctatgtttttaataccccatctgggacatcgagtgtagagactcaaatgaggcatgtatctattagttatgacattcctccaacacctggtaatacttatcagattccacgaacatttccagaaggaaccttgggacagacatcaaagctagacactattccagatattcctccacctcggccaccgaaaccacatccagctcatgaccgatctcctgtggaaacgtgtagtatcccacgcaccgcctcagacactgacagtagttactgtatccctacagcagggatgtcgccttcacgtagtaataccatttccactgtggatttaaacaaattgcgaaaagatgctagttctcaagactgctatgatattccacgagcatttccaagtgatagatctagttcacttgaaggcttccataaccactttaaagtcaaaaatgtgttgacagtgggaagtgtttcaagtgaagaactggatgaaaattacgtcccaatgaatcccaattcaccaccacgacaacattccagcagttttacagaaccaattcaggaagcaaattatgtgccaatgactccaggaacatttgatttttcctcatttggaatgcaagttcctcctcctgctcatatgggcttcaggtccagcccaaaaacccctcccagaaggccagttcctgttgcagactgtgaaccaccccccgtggataggaacctcaagccagacagaaaagtcaagccagcgcctttagaaataaaacctttgccagaatgggaagaattacaagccccagttagatctcccatcactaggagttttgctcgagactcttccaggtttcccatgtccccccgaccagattcagtgcatagcacaacttcaagcagtgactcacacgacagtgaagagaattatgttcccatgaacccaaacctgtccagtgaagacccaaatctctttggcagtaacagtcttgatggaggaagcagccctatgatcaagcccaaaggagacaaacaggtggaatacttagatctcgacttagattctgggaaatccacaccaccacgtaagcaaaagagcagtggctcaggcagcagtgtagcagatgagagagtggattatgttgttgttgaccaacagaagaccttggctctaaagagtacccgggaagcctggacagatgggagacagtccacagaatcagaaacgccagcgaagagtgtgaaatgaaaatattgccttgccatttctgaacaaaagaaaactgaattgtaaagataaatcccttttgaagaatgacttgacacttccactctaggtagatcctcaaatgagtagagttgaagtcaaaggacctttctgacataatcaagcaatttagacttaagtggtgctttgtggtatctgaacaattcataacatgtaaataatgtgggaaaatagtattgtttagctcccagagaaacatttgttccacagttaacacactcgtagtattactgtatttatgcactttttcatctaaaacattgttctgggttttcccaatgtaccttaccataattcctttgggagttcttgttttttgtcacactactttatataacaatactaagtcaactaagctacttttagatttggaaattgctgtttacagtctaacaacattaaaatgagaggtagattcacaagttagctttctacctgaagcttcaggtgataaccattagcttatacttggactcatcatttgttgccttccaaaatgctgaggataatgtatgtactggtgtcaggacctagttctctggttaatgtacatttagtttttaatggtggaactttgttatattttgttaattacagtgtttttggttcattgagtgaagattctgccgggtgggatcttgcacctttgaaagactgaataattacactaccaagtaagcctgcaaatcattgatggcatgcagtgatgatgtgctcttacacttgttaacatgtattaagtgttatttgcaaaaggtagattatgtaaccaatcaggtacgtaccaggcagtgatgtgctaatacactgatcaggtttagacaatgagctttggttgtgttcttgttagtcctaatattggttttcagtttggaattaataaagcagttgacattcactgttagttacagcaacatactgtgatttttaattagatagtaattcagatttattactctatgaaattctgtcttttgacaccatagtgccctttctatgattttttttacttaatattcttcttggccttatatttaattccctatgcaattaatattttatatctgcattttttttaaaaaaatagatgttatataagtgattctcgtatgtagcacctgttgcttttccactgaaagaattacggattttgtactgtgatttatattcactgccccaattcaagaaatattggagccttgctacaatgtgaaatgttatagtcatggactccttccaaccagatttctgaaaacaccagagggatggtataattctgtctcacctataacatggtcctgtgacatagatattaagaccacaagttgtagtgaggctacaattatattcgtctgtcttggctttgcaacataatttagaaagcacgtatagttgttttttaaccaagttacatacaatctcatgtactgatttgagacttataacaatttttggagggggcatagagaaaggagtgcccacagttgaggcatgaccccctccattcagacctctaactgttgcctgagtacacagatgtgccctgatttctggcccattggccatagtactgtgcctaatcaatgtaataggtttattttcccaatcctcaaactaaaaatgttcataacaagatgaattgtagactagtaacatttgatgcttttaaatatttgcttctttttaaacaaaaactaaaacccagaagtgaatttttaggtggatttttaaataaaaaagattgattgagtttggtgtgcaagctgttttataatgaaacaacaaaatgaaatctaaaatcctgaaatgtgcctaaactatcaaaacacacgatacagctaatgtgtaaagatgctaaattctgttacttggaggatgaatatatttaagatttaaaacacaataataaatacatgattaattcaaaaataaaaatctttacagctgcctatcaagggtctaaagcacttaatgaatgtttttagtctaacttatcattaactttttacaagtcaccatatttgaagatctgtagcactctgattttcagaaaatttttcattctgaataatttaaaaatggtgatgtattagaaaggcagtttgctttagaaaactaaatcacattgaacattgtattagagaattaaattaaaagtttcttacagagcagtattttccaaacatttttagcactagaatctttttagatgaaattttatgtataaccccaatacataaagcctgaaaactcaattttatcaatataaatgtattttgggttcacatttatgcttattcattttggctcattactaagcataataagattctgagttatttctgaataacacaaatgtggagttatacatagttgatgaaaccagcagccaatttatagctatgccctgttttatttgtatactatcaagaaaattttgattcacacaaatgtaagcaaaaataataggttttaaacatacatctcaggaaattctttaattagagatagctaaagttattcaaggtctatacaaaaataagttatcctggtagtggaagttaatacataagcagtctccagtgtggtaaagtagggtatgtaacacatcagaatgtgcgtttttattaggttttaaaatatgcacgtataaaaactaaatttgaatcaaacccttttaactcacctccaagaagctagactttggccaggaatgggctaaaaaccactggttaacgatgtgacagttatgatcttggagattggaaatctttcttccacattagagttctttaccttaattccttattctgaaaaattgtaagattttatgaaggtttgaatactgaagcacagttctgctttcaaaaattaaaattcaaacttgaaaaagctgtttaacccatggaagatatcatttagtaagatgtaaaagattttttaaatctacacttcagtttatacatctttatcattatcaatactatataagttactgtgagcattttagagaattccataaaggtactatgagtgtgtctgtatgtgtgtgtatatatagcattgtatttaatcatagactaaatttaatttgatatagaaatactactttacttgtacattaaggtcataatttctgctggactcttttatatttaattaatggggattatagtcttccttcataaatgcatttaaacctgaaattgaacaccagtgtttttctttttctacttatgggaagttgtctgcttccccctttagagaaaacagtatttttatattttgttaaaatattaactactttatgcctacacactatgctgtagatactgatcataattcttgggtgttcacaaacactcctagtgcctcttttttggcccgttgaaagtgttggtattactactttcactacagagcctttggccctctaataatgctgaggtgggctgatccttcccatttctgtcttcgggtcattctggtaggtcttctcctccactgtcaagtaagcaatcaggtccgtgacagggattggacatatgaacaaattaagtggatacacacagtgagaaagatacatgcattctatggtaacaactactgtcaataacatctgatgttacatgcacatttatatatatataattttaaaaactgaactatgagaagccatggtataaatgaatattgtggacatcatggacttgatatgatagaaatcaattgtcagcttgagaaagttgtttttaatctgtctaaatagttcatgcattactacagttaaaaatagtttcatttgtcttctatagacttaattttattccggttcagtataatctctgttaacagagtttcagcaaactgattggtcaaggtattaacatagcttctacttcctttacttaaaaagatgtggttttatgtaagttcttgattactgatgatcatcccaaattttgacaacaaaatcatatgtataaatttatttctcccctcttgttcatcatcttttgtaaaggtcccattgtagatcttttctgctaccaaataaaacttttcaaacaatttggtttcaagaccttaaatagacaagttggatactaagattgtgaactgataaggacatataaatttatatttccagcccttccttagagtctttatctgcatcaaaaacccaattctgccattaactgtgcttcccagtcccacctctatatgtcactcattttctgcaacaaagatctcactaaatcatgttgaaacacaagtcatgatctctctaagtaaatagaaaaagctccctggaaaaactctgttgccacatgcacgtgccctgttactcctccagccagccagtgctgccagcattttattgtgtaaaagtccaaataaataagggcctgcatgcaacctttatcttcagaaactaggttttatatgtaaaatgtgacttgggaaatgattctgtttattaactggctgggatttttcatttctatgaaagtttcaaacatctccagtactttataaaatcccaacaattgctgtaagtcagcactttggtccactcagcccacccagcccacttgcaactctgactcttcactgaatcatatttgggaagtttgggtagggtgaggctatcttcttcaagattattttctcatatgtctgtctgtcaccttgtaaaccatgagactcctgggtatttgcatgtaacttctttgaggaagttaccaccatctctgatatagacacactttttgagttgcagtttctgttagaattttttggagactaacttgccaattctgtgaatgttattgaatatttaaaaagctgggtctgtaatgggaggcattttattagctgttgtgattgggtaacatgtccccttagatttcctgatttaaaattatacaaaattactatttttgataaaataaaggaacacctacagaaaattaagtttctaagatgtttctatacttcattagaaaagattttattactattacttatggttattggtgattaacacttaatgcgtctcctctgattttgtgttccatgaggtgcttggaacatttggagtgctctgtgcgagggacatacagtgatataggaaatttaaaaattaaaataatacccaaaacccactttatcagatatggtattgtgatggttaatattatgtgtcaacttggtgaggctatggcgcccatgtgtttggtcaaacactagcctagatgttgctgtgaatatattttgtagatgtgattaacatttacaatcagttgattttaagtaaagcagattctcatccat

SEQ ID NO: 55688 - DNA, 7789 bp, Homo sapiens
acctctggtggtggctggctactcggatacgaattcggcacgagggcaggcgtcggctagtgtcgggagtcgcgcccgccgcccctcagctgcccggcccggagcccgagacgcgcgcaccatgagcggtggtgaagtggtctgctccggatggctccgcaagtcccccccggagaaaaagttgaagcgttatgcatggaagaggagatggttcgtgttacgcagtggccgtttaactggagatccagatgtttggaatattacaaaaatgatcatgccaagaagcctattcgtattattgatttaaatttatgtcaacaagtagatgctggattgacatttaacaaaaaagagtttgaaaacagctacatttttgatatcaacactattgaccggattttctacttggtagcagacagcgaggaggagatgaataagtgggttcgttgtatttgtgacatctgtgggtttaatccaacagaagaaggatctcactttgtcgtctaggctggagtacagtggcatgatctctgctcactgcaacctctgcctcccgggttcaagcgattctcgtgcctcagccttctgagtagctggaattacagatcctgtgaagccacctggcagctctttacaagcaccagctgatttacctttagctataaatacagcaccaccatccacccaggcagattcatcctctgctactctacctcctccatatcagctaatcaatgttccaccacacctggaaactcttggcattcaggaggatcctcaagactacctgttgctcatcaactgtcaaagcaagaagcccgaacccaccagaacgcatgctgattctgcaaaatccacctcttctgaaacagactgcaatgataacgtcccttctcataaaaatcctgcttcctcccagagcaaacatggaatgaatggcttttttcagcagcaaatgatatacgactctccaccttcacgtgccccatctgcttcagttgactccagcctttataacctgcccaggagttattcccatgatgttttaccaaaggtgtctccatcaagtactgaagcagatggagaactctatgtttttaataccccatctgggacatcgagtgtagagactcaaatgaggcatgtatctattagttatgacattcctccaacacctggtaatacttatcagattccacgaacatttccagaaggaaccttgggacagacatcaaagctagacactattccagatattcctccacctcggccaccgaaaccacatccagctcatgaccgatctcctgtggaaacgtgtagtatcccacgcaccgcctcagacactgacagtagttactgtatccctacagcagggatgtcgccttcacgtagtaataccatttccactgtggatttaaacaaattgcgaaaagatgctagttctcaagactgctatgatattccacgagcatttccaagtgatagatctagttcacttgaaggcttccataaccactttaaagtcaaaaatgtgttgacagtgggaagtgtttcaagtgaagaactggatgaaaattacgtcccaatgaatcccaattcaccaccacgacaacattccagcagttttacagaaccaattcaggaagcaaattatgtgccaatgactccaggaacatttgatttttcctcatttggaatgcaagttcctcctcctgctcatatgggcttcaggtccagcccaaaaacccctcccagaaggccagttcctgttgcagactgtgaaccaccccccgtggataggaacctcaagccagacagaaaaggtcaaagtcctaaaattttaagactcaaaccccatggtttagagcgaactgattcacaaaccataggtgactttgctacaagaagaaaggtcaagccagcgcctttagaaataaaacctttgccagaatgggaagaattacaagccccagttagatctcccatcactaggagttttgctcgagactcttccaggtttcccatgtccccccgaccagattcagtgcatagcacaacttcaagcagtgactcacacgacagtgaagagaattatgttcccatgaacccaaacctgtccagtgaagacccaaatctctttggcagtaacagtcttgatggaggaagcagccctatgatcaagcccaaaggagacaaacaggtggaatacttagatctcgacttagattctgggaaatccacaccaccacgtaagcaaaagagcagtggctcaggcagcagtgtagcagatgagagagtggattatgttgttgttgaccaacagaagaccttggctctaaagagtacccgggaagcctggacagatgggagacagtccacagaatcagaaacgccagcgaagagtgtgaaatgaaaatattgccttgccatttctgaacaaaagaaaactgaattgtaaagataaatcccttttgaagaatgacttgacacttccactctaggtagatcctcaaatgagtagagttgaagtcaaaggacctttctgacataatcaagcaatttagacttaagtggtgctttgtggtatctgaacaattcataacatgtaaataatgtgggaaaatagtattgtttagctcccagagaaacatttgttccacagttaacacactcgtagtattactgtatttatgcactttttcatctaaaacattgttctgggttttcccaatgtaccttaccataattcctttgggagttcttgttttttgtcacactactttatataacaatactaagtcaactaagctacttttagatttggaaattgctgtttacagtctaacaacattaaaatgagaggtagattcacaagttagctttctacctgaagcttcaggtgataaccattagcttatacttggactcatcatttgttgccttccaaaatgctgaggataatgtatgtactggtgtcaggacctagttctctggttaatgtacatttagtttttaatggtggaactttgttatattttgttaattacagtgtttttggttcattgagtgaagattctgccgggtgggatcttgcacctttgaaagactgaataattacactaccaagtaagcctgcaaatcattgatggcatgcagtgatgatgtgctcttacacttgttaacatgtattaagtgttatttgcaaaaggtagattatgtaaccaatcaggtacgtaccaggcagtgatgtgctaatacactgatcaggtttagacaatgagctttggttgtgttcttgttagtcctaatattggttttcagtttggaattaataaagcagttgacattcactgttagttacagcaacatactgtgatttttaattagatagtaattcagatttattactctatgaaattctgtcttttgacaccatagtgccctttctatgattttttttacttaatattcttcttggccttatatttaattccctatgcaattaatattttatatctgcattttttttaaaaaaatagatgttatataagtgattctcgtatgtagcacctgttgcttttccactgaaagaattacggattttgtactgtgatttatattcactgccccaattcaagaaatattggagccttgctacaatgtgaaatgttatagtcatggactccttccaaccagatttctgaaaacaccagagggatggtataattctgtctcacctataacatggtcctgtgacatagatattaagaccacaagttgtagtgaggctacaattatattcgtctgtcttggctttgcaacataatttagaaagcacgtatagttgttttttaaccaagttacatacaatctcatgtactgatttgagacttataacaatttttggagggggcatagagaaaggagtgcccacagttgaggcatgaccccctccattcagacctctaactgttgcctgagtacacagatgtgccctgatttctggcccattggccatagtactgtgcctaatcaatgtaataggtttattttcccaatcctcaaactaaaaatgttcataacaagatgaattgtagactagtaacatttgatgcttttaaatatttgcttctttttaaacaaaaactaaaacccagaagtgaatttttaggtggatttttaaataaaaaagattgattgagtttggtgtgcaagctgttttataatgaaacaacaaaatgaaatctaaaatcctgaaatgtgcctaaactatcaaaacacacgatacagctaatgtgtaaagatgctaaattctgttacttggaggatgaatatatttaagatttaaaacacaataataaatacatgattaattcaaaaataaaaatctttacagctgcctatcaagggtctaaagcacttaatgaatgtttttagtctaacttatcattaactttttacaagtcaccatatttgaagatctgtagcactctgattttcagaaaatttttcattctgaataatttaaaaatggtgatgtattagaaaggcagtttgctttagaaaactaaatcacattgaacattgtattagagaattaaattaaaagtttcttacagagcagtattttccaaacatttttagcactagaatctttttagatgaaattttatgtataaccccaatacataaagcctgaaaactcaattttatcaatataaatgtattttgggttcacatttatgcttattcattttggctcattactaagcataataagattctgagttatttctgaataacacaaatgtggagttatacatagttgatgaaaccagcagccaatttatagctatgccctgttttatttgtatactatcaagaaaattttgattcacacaaatgtaagcaaaaataataggttttaaacatacatctcaggaaattctttaattagagatagctaaagttattcaaggtctatacaaaaataagttatcctggtagtggaagttaatacataagcagtctccagtgtggtaaagtagggtatgtaacacatcagaatgtgcgtttttattaggttttaaaatatgcacgtataaaaactaaatttgaatcaaacccttttaactcacctccaagaagctagactttggccaggaatgggctaaaaaccactggttaacgatgtgacagttatgatcttggagattggaaatctttcttccacattagagttctttaccttaattccttattctgaaaaattgtaagattttatgaaggtttgaatactgaagcacagttctgctttcaaaaattaaaattcaaacttgaaaaagctgtttaacccatggaagatatcatttagtaagatgtaaaagattttttaaatctacacttcagtttatacatctttatcattatcaatactatataagttactgtgagcattttagagaattccataaaggtactatgagtgtgtctgtatgtgtgtgtatatatagcattgtatttaatcatagactaaatttaatttgatatagaaatactactttacttgtacattaaggtcataatttctgctggactcttttatatttaattaatggggattatagtcttccttcataaatgcatttaaacctgaaattgaacaccagtgtttttctttttctacttatgggaagttgtctgcttccccctttagagaaaacagtatttttatattttgttaaaatattaactactttatgcctacacactatgctgtagatactgatcataattcttgggtgttcacaaacactcctagtgcctcttttttggcccgttgaaagtgttggtattactactttcactacagagcctttggccctctaataatgctgaggtgggctgatccttcccatttctgtcttcgggtcattctggtaggtcttctcctccactgtcaagtaagcaatcaggtccgtgacagggattggacatatgaacaaattaagtggatacacacagtgagaaagatacatgcattctatggtaacaactactgtcaataacatctgatgttacatgcacatttatatatatataattttaaaaactgaactatgagaagccatggtataaatgaatattgtggacatcatggacttgatatgatagaaatcaattgtcagcttgagaaagttgtttttaatctgtctaaatagttcatgcattactacagttaaaaatagtttcatttgtcttctatagacttaattttattccggttcagtataatctctgttaacagagtttcagcaaactgattggtcaaggtattaacatagcttctacttcctttacttaaaaagatgtggttttatgtaagttcttgattactgatgatcatcccaaattttgacaacaaaatcatatgtataaatttatttctcccctcttgttcatcatcttttgtaaaggtcccattgtagatcttttctgctaccaaataaaacttttcaaacaatttggtttcaagaccttaaatagacaagttggatactaagattgtgaactgataaggacatataaatttatatttccagcccttccttagagtctttatctgcatcaaaaacccaattctgccattaactgtgcttcccagtcccacctctatatgtcactcattttctgcaacaaagatctcactaaatcatgttgaaacacaagtcatgatctctctaagtaaatagaaaaagctccctggaaaaactctgttgccacatgcacgtgccctgttactcctccagccagccagtgctgccagcattttattgtgtaaaagtccaaataaataagggcctgcatgcaacctttatcttcagaaactaggttttatatgtaaaatgtgacttgggaaatgattctgtttattaactggctgggatttttcatttctatgaaagtttcaaacatctccagtactttataaaatcccaacaattgctgtaagtcagcactttggtccactcagcccacccagcccacttgcaactctgactcttcactgaatcatatttgggaagtttgggtagggtgaggctatcttcttcaagattattttctcatatgtctgtctgtcaccttgtaaaccatgagactcctgggtatttgcatgtaacttctttgaggaagttaccaccatctctgatatagacacactttttgagttgcagtttctgttagaattttttggagactaacttgccaattctgtgaatgttattgaatatttaaaaagctgggtctgtaatgggaggcattttattagctgttgtgattgggtaacatgtccccttagatttcctgatttaaaattatacaaaattactatttttgataaaataaaggaacacctacagaaaattaagtttctaagatgtttctatacttcattagaaaagattttattactattacttatggttattggtgattaacacttaatgcgtctcctctgattttgtgttccatgaggtgcttggaacatttggagtgctctgtgcgagggacatacagtgatataggaaatttaaaaattaaaataatacccaaaacccactttatcagatatggtattgtgatggttaatattatgtgtcaacttggtgaggctatggcgcccatgtgtttggtcaaacactagcctagatgttgctgtgaatatattttgtagatgtgattaacatttacaatcagttgattttaagtaaagcagattctcatccat

SEQ ID NO: 55689 - DNA, 7724 bp, Homo sapiens
ggctaggtagcgaggctgggtgttcaaggacaaagtacactggcttctgaagaaactttttcttgggagcaaggacttgggggtaacaaaatgaggagtaagtgaagaaagaagaaggcacagcttgtcgagattgatggaccgccccccgcccccgggagagcagcgtaggaaattgcaggatgaaatttgtgtgccagtcttgtcagcacccattcctgttgaaggagagggcatatggatgaggcatggaagaggagatggttcgtgttacgcagtggccgtttaactggagatccagatgtttggaatattacaaaaatgatcatgccaagaagcctattcgtattattgatttaaatttatgtcaacaagtagatgctggattgacatttaacaaaaaagagtttgaaaacagctacatttttgatatcaacactattgaccggattttctacttggtagcagacagcgaggaggagatgaataagtgggttcgttgtatttgtgacatctgtgggtttaatccaacagaagaagatcctgtgaagccacctggcagctctttacaagcaccagctgatttacctttagctataaatacagcaccaccatccacccaggcagattcatcctctgctactctacctcctccatatcagctaatcaatgttccaccacacctggaaactcttggcattcaggaggatcctcaagactacctgttgctcatcaactgtcaaagcaagaagcccgaacccaccagaacgcatgctgattctgcaaaatccacctcttctgaaacagactgcaatgataacgtcccttctcataaaaatcctgcttcctcccagagcaaacatggaatgaatggcttttttcagcagcaaatgatatacgactctccaccttcacgtgccccatctgcttcagttgactccagcctttataacctgcccaggagttattcccatgatgttttaccaaaggtgtctccatcaagtactgaagcagatggagaactctatgtttttaataccccatctgggacatcgagtgtagagactcaaatgaggcatgtatctattagttatgacattcctccaacacctggtaatacttatcagattccacgaacatttccagaaggaaccttgggacagacatcaaagctagacactattccagatattcctccacctcggccaccgaaaccacatccagctcatgaccgatctcctgtggaaacgtgtagtatcccacgcaccgcctcagacactgacagtagttactgtatccctacagcagggatgtcgccttcacgtagtaataccatttccactgtggatttaaacaaattgcgaaaagatgctagttctcaagactgctatgatattccacgagcatttccaagtgatagatctagttcacttgaaggcttccataaccactttaaagtcaaaaatgtgttgacagtgggaagtgtttcaagtgaagaactggatgaaaattacgtcccaatgaatcccaattcaccaccacgacaacattccagcagttttacagaaccaattcaggaagcaaattatgtgccaatgactccaggaacatttgatttttcctcatttggaatgcaagttcctcctcctgctcatatgggcttcaggtccagcccaaaaacccctcccagaaggccagttcctgttgcagactgtgaaccaccccccgtggataggaacctcaagccagacagaaaaggtcaaagtcctaaaattttaagactcaaaccccatggtttagagcgaactgattcacaaaccataggtgactttgctacaagaagaaaggtcaagccagcgcctttagaaataaaacctttgccagaatgggaagaattacaagccccagttagatctcccatcactaggagttttgctcgagactcttccaggtttcccatgtccccccgaccagattcagtgcatagcacaacttcaagcagtgactcacacgacagtgaagagaattatgttcccatgaacccaaacctgtccagtgaagacccaaatctctttggcagtaacagtcttgatggaggaagcagccctatgatcaagcccaaaggagacaaacaggtggaatacttagatctcgacttagattctgggaaatccacaccaccacgtaagcaaaagagcagtggctcaggcagcagtgtagcagatgagagagtggattatgttgttgttgaccaacagaagaccttggctctaaagagtacccgggaagcctggacagatgggagacagtccacagaatcagaaacgccagcgaagagtgtgaaatgaaaatattgccttgccatttctgaacaaaagaaaactgaattgtaaagataaatcccttttgaagaatgacttgacacttccactctaggtagatcctcaaatgagtagagttgaagtcaaaggacctttctgacataatcaagcaatttagacttaagtggtgctttgtggtatctgaacaattcataacatgtaaataatgtgggaaaatagtattgtttagctcccagagaaacatttgttccacagttaacacactcgtagtattactgtatttatgcactttttcatctaaaacattgttctgggttttcccaatgtaccttaccataattcctttgggagttcttgttttttgtcacactactttatataacaatactaagtcaactaagctacttttagatttggaaattgctgtttacagtctaacaacattaaaatgagaggtagattcacaagttagctttctacctgaagcttcaggtgataaccattagcttatacttggactcatcatttgttgccttccaaaatgctgaggataatgtatgtactggtgtcaggacctagttctctggttaatgtacatttagtttttaatggtggaactttgttatattttgttaattacagtgtttttggttcattgagtgaagattctgccgggtgggatcttgcacctttgaaagactgaataattacactaccaagtaagcctgcaaatcattgatggcatgcagtgatgatgtgctcttacacttgttaacatgtattaagtgttatttgcaaaaggtagattatgtaaccaatcaggtacgtaccaggcagtgatgtgctaatacactgatcaggtttagacaatgagctttggttgtgttcttgttagtcctaatattggttttcagtttggaattaataaagcagttgacattcactgttagttacagcaacatactgtgatttttaattagatagtaattcagatttattactctatgaaattctgtcttttgacaccatagtgccctttctatgattttttttacttaatattcttcttggccttatatttaattccctatgcaattaatattttatatctgcattttttttaaaaaaatagatgttatataagtgattctcgtatgtagcacctgttgcttttccactgaaagaattacggattttgtactgtgatttatattcactgccccaattcaagaaatattggagccttgctacaatgtgaaatgttatagtcatggactccttccaaccagatttctgaaaacaccagagggatggtataattctgtctcacctataacatggtcctgtgacatagatattaagaccacaagttgtagtgaggctacaattatattcgtctgtcttggctttgcaacataatttagaaagcacgtatagttgttttttaaccaagttacatacaatctcatgtactgatttgagacttataacaatttttggagggggcatagagaaaggagtgcccacagttgaggcatgaccccctccattcagacctctaactgttgcctgagtacacagatgtgccctgatttctggcccattggccatagtactgtgcctaatcaatgtaataggtttattttcccaatcctcaaactaaaaatgttcataacaagatgaattgtagactagtaacatttgatgcttttaaatatttgcttctttttaaacaaaaactaaaacccagaagtgaatttttaggtggatttttaaataaaaaagattgattgagtttggtgtgcaagctgttttataatgaaacaacaaaatgaaatctaaaatcctgaaatgtgcctaaactatcaaaacacacgatacagctaatgtgtaaagatgctaaattctgttacttggaggatgaatatatttaagatttaaaacacaataataaatacatgattaattcaaaaataaaaatctttacagctgcctatcaagggtctaaagcacttaatgaatgtttttagtctaacttatcattaactttttacaagtcaccatatttgaagatctgtagcactctgattttcagaaaatttttcattctgaataatttaaaaatggtgatgtattagaaaggcagtttgctttagaaaactaaatcacattgaacattgtattagagaattaaattaaaagtttcttacagagcagtattttccaaacatttttagcactagaatctttttagatgaaattttatgtataaccccaatacataaagcctgaaaactcaattttatcaatataaatgtattttgggttcacatttatgcttattcattttggctcattactaagcataataagattctgagttatttctgaataacacaaatgtggagttatacatagttgatgaaaccagcagccaatttatagctatgccctgttttatttgtatactatcaagaaaattttgattcacacaaatgtaagcaaaaataataggttttaaacatacatctcaggaaattctttaattagagatagctaaagttattcaaggtctatacaaaaataagttatcctggtagtggaagttaatacataagcagtctccagtgtggtaaagtagggtatgtaacacatcagaatgtgcgtttttattaggttttaaaatatgcacgtataaaaactaaatttgaatcaaacccttttaactcacctccaagaagctagactttggccaggaatgggctaaaaaccactggttaacgatgtgacagttatgatcttggagattggaaatctttcttccacattagagttctttaccttaattccttattctgaaaaattgtaagattttatgaaggtttgaatactgaagcacagttctgctttcaaaaattaaaattcaaacttgaaaaagctgtttaacccatggaagatatcatttagtaagatgtaaaagattttttaaatctacacttcagtttatacatctttatcattatcaatactatataagttactgtgagcattttagagaattccataaaggtactatgagtgtgtctgtatgtgtgtgtatatatagcattgtatttaatcatagactaaatttaatttgatatagaaatactactttacttgtacattaaggtcataatttctgctggactcttttatatttaattaatggggattatagtcttccttcataaatgcatttaaacctgaaattgaacaccagtgtttttctttttctacttatgggaagttgtctgcttccccctttagagaaaacagtatttttatattttgttaaaatattaactactttatgcctacacactatgctgtagatactgatcataattcttgggtgttcacaaacactcctagtgcctcttttttggcccgttgaaagtgttggtattactactttcactacagagcctttggccctctaataatgctgaggtgggctgatccttcccatttctgtcttcgggtcattctggtaggtcttctcctccactgtcaagtaagcaatcaggtccgtgacagggattggacatatgaacaaattaagtggatacacacagtgagaaagatacatgcattctatggtaacaactactgtcaataacatctgatgttacatgcacatttatatatatataattttaaaaactgaactatgagaagccatggtataaatgaatattgtggacatcatggacttgatatgatagaaatcaattgtcagcttgagaaagttgtttttaatctgtctaaatagttcatgcattactacagttaaaaatagtttcatttgtcttctatagacttaattttattccggttcagtataatctctgttaacagagtttcagcaaactgattggtcaaggtattaacatagcttctacttcctttacttaaaaagatgtggttttatgtaagttcttgattactgatgatcatcccaaattttgacaacaaaatcatatgtataaatttatttctcccctcttgttcatcatcttttgtaaaggtcccattgtagatcttttctgctaccaaataaaacttttcaaacaatttggtttcaagaccttaaatagacaagttggatactaagattgtgaactgataaggacatataaatttatatttccagcccttccttagagtctttatctgcatcaaaaacccaattctgccattaactgtgcttcccagtcccacctctatatgtcactcattttctgcaacaaagatctcactaaatcatgttgaaacacaagtcatgatctctctaagtaaatagaaaaagctccctggaaaaactctgttgccacatgcacgtgccctgttactcctccagccagccagtgctgccagcattttattgtgtaaaagtccaaataaataagggcctgcatgcaacctttatcttcagaaactaggttttatatgtaaaatgtgacttgggaaatgattctgtttattaactggctgggatttttcatttctatgaaagtttcaaacatctccagtactttataaaatcccaacaattgctgtaagtcagcactttggtccactcagcccacccagcccacttgcaactctgactcttcactgaatcatatttgggaagtttgggtagggtgaggctatcttcttcaagattattttctcatatgtctgtctgtcaccttgtaaaccatgagactcctgggtatttgcatgtaacttctttgaggaagttaccaccatctctgatatagacacactttttgagttgcagtttctgttagaattttttggagactaacttgccaattctgtgaatgttattgaatatttaaaaagctgggtctgtaatgggaggcattttattagctgttgtgattgggtaacatgtccccttagatttcctgatttaaaattatacaaaattactatttttgataaaataaaggaacacctacagaaaattaagtttctaagatgtttctatacttcattagaaaagattttattactattacttatggttattggtgattaacacttaatgcgtctcctctgattttgtgttccatgaggtgcttggaacatttggagtgctctgtgcgagggacatacagtgatataggaaatttaaaaattaaaataatacccaaaacccactttatcagatatggtattgtgatggttaatattatgtgtcaacttggtgaggctatggcgcccatgtgtttggtcaaacactagcctagatgttgctgtgaatatattttgtagatgtgattaacatttacaatcagttgattttaagtaaagcagattctcatccat

SEQ ID NO: 55690 - DNA, 7752 bp, Homo sapiens
acctctggtggtggctggctactcggatacgaattcggcacgagggcaggcgtcggctagtgtcgggagtcgcgcccgccgcccctcagctgcccggcccggagcccgagacgcgcgcaccatgagcggtggtgaagtggtctgctccggatggctccgcaagtcccccccggagaaaaagttgaagcgttatgcatggaagaggagatggttcgtgttacgcagtggccgtttaactggagatccagatgtttggaatattacaaaaatgatcatgccaagaagcctattcgtattattgatttaaatttatgtcaacaagtagatgctggattgacatttaacaaaaaagagtttgaaaacagctacatttttgatatcaacactattgaccggattttctacttggtagcagacagcgaggaggagatgaataagtgggttcgttgtatttgtgacatctgtgggtttaatccaacagaagaagatcctgtgaagccacctggcagctctttacaagcaccagctgatttacctttagctataaatacagcaccaccatccacccaggcagattcatcctctgctactctacctcctccatatcagctaatcaatgttccaccacacctggaaactcttggcattcaggaggatcctcaagactacctgttgctcatcaactgtcaaagcaagaagcccgaacccaccagccaagggtcatcttttgtttctgaagaaggagaggaataccttctactagaagattttgaaagcaaaacgattccattgcaaacgcatgctgattctgcaaaatccacctcttctgaaacagactgcaatgataacgtcccttctcataaaaatcctgcttcctcccagagcaaacatggaatgaatggcttttttcagcagcaaatgatatacgactctccaccttcacgtgccccatctgcttcagttgactccagcctttataacctgcccaggagttattcccatgatgttttaccaaaggtgtctccatcaagtactgaagcagatggagaactctatgtttttaataccccatctgggacatcgagtgtagagactcaaatgaggcatgtatctattagttatgacattcctccaacacctggtaatacttatcagattccacgaacatttccagaaggaaccttgggacagacatcaaagctagacactattccagatattcctccacctcggccaccgaaaccacatccagctcatgaccgatctcctgtggaaacgtgtagtatcccacgcaccgcctcagacactgacagtagttactgtatccctacagcagggatgtcgccttcacgtagtaataccatttccactgtggatttaaacaaattgcgaaaagatgctagttctcaagactgctatgatattccacgagcatttccaagtgatagatctagttcacttgaaggcttccataaccactttaaagtcaaaaatgtgttgacagtgggaagtgtttcaagtgaagaactggatgaaaattacgtcccaatgaatcccaattcaccaccacgacaacattccagcagttttacagaaccaattcaggaagcaaattatgtgccaatgactccaggaacatttgatttttcctcatttggaatgcaagttcctcctcctgctcatatgggcttcaggtccagcccaaaaacccctcccagaaggccagttcctgttgcagactgtgaaccaccccccgtggataggaacctcaagccagacagaaaaggtcaaagtcctaaaattttaagactcaaaccccatggtttagagcgaactgattcacaaaccataggtgactttgctacaagaagaaaggtcaagccagcgcctttagaaataaaacctttgccagaatgggaagaattacaagccccagttagatctcccatcactaggagttttgctcgagactcttccaggtttcccatgtccccccgaccagattcagtgcatagcacaacttcaagcagtgactcacacgacagtgaagagaattatgttcccatgaacccaaacctgtccagtgaagacccaaatctctttggcagtaacagtcttgatggaggaagcagccctatgatcaagcccaaaggagacaaacaggtggaatacttagatctcgacttagattctgggaaatccacaccaccacgtaagcaaaagagcagtggctcaggcagcagtgtagcagatgagagagtggattatgttgttgttgaccaacagaagaccttggctctaaagagtacccgggaagcctggacagatgggagacagtccacagaatcagaaacgccagcgaagagtgtgaaatgaaaatattgccttgccatttctgaacaaaagaaaactgaattgtaaagataaatcccttttgaagaatgacttgacacttccactctaggtagatcctcaaatgagtagagttgaagtcaaaggacctttctgacataatcaagcaatttagacttaagtggtgctttgtggtatctgaacaattcataacatgtaaataatgtgggaaaatagtattgtttagctcccagagaaacatttgttccacagttaacacactcgtagtattactgtatttatgcactttttcatctaaaacattgttctgggttttcccaatgtaccttaccataattcctttgggagttcttgttttttgtcacactactttatataacaatactaagtcaactaagctacttttagatttggaaattgctgtttacagtctaacaacattaaaatgagaggtagattcacaagttagctttctacctgaagcttcaggtgataaccattagcttatacttggactcatcatttgttgccttccaaaatgctgaggataatgtatgtactggtgtcaggacctagttctctggttaatgtacatttagtttttaatggtggaactttgttatattttgttaattacagtgtttttggttcattgagtgaagattctgccgggtgggatcttgcacctttgaaagactgaataattacactaccaagtaagcctgcaaatcattgatggcatgcagtgatgatgtgctcttacacttgttaacatgtattaagtgttatttgcaaaaggtagattatgtaaccaatcaggtacgtaccaggcagtgatgtgctaatacactgatcaggtttagacaatgagctttggttgtgttcttgttagtcctaatattggttttcagtttggaattaataaagcagttgacattcactgttagttacagcaacatactgtgatttttaattagatagtaattcagatttattactctatgaaattctgtcttttgacaccatagtgccctttctatgattttttttacttaatattcttcttggccttatatttaattccctatgcaattaatattttatatctgcattttttttaaaaaaatagatgttatataagtgattctcgtatgtagcacctgttgcttttccactgaaagaattacggattttgtactgtgatttatattcactgccccaattcaagaaatattggagccttgctacaatgtgaaatgttatagtcatggactccttccaaccagatttctgaaaacaccagagggatggtataattctgtctcacctataacatggtcctgtgacatagatattaagaccacaagttgtagtgaggctacaattatattcgtctgtcttggctttgcaacataatttagaaagcacgtatagttgttttttaaccaagttacatacaatctcatgtactgatttgagacttataacaatttttggagggggcatagagaaaggagtgcccacagttgaggcatgaccccctccattcagacctctaactgttgcctgagtacacagatgtgccctgatttctggcccattggccatagtactgtgcctaatcaatgtaataggtttattttcccaatcctcaaactaaaaatgttcataacaagatgaattgtagactagtaacatttgatgcttttaaatatttgcttctttttaaacaaaaactaaaacccagaagtgaatttttaggtggatttttaaataaaaaagattgattgagtttggtgtgcaagctgttttataatgaaacaacaaaatgaaatctaaaatcctgaaatgtgcctaaactatcaaaacacacgatacagctaatgtgtaaagatgctaaattctgttacttggaggatgaatatatttaagatttaaaacacaataataaatacatgattaattcaaaaataaaaatctttacagctgcctatcaagggtctaaagcacttaatgaatgtttttagtctaacttatcattaactttttacaagtcaccatatttgaagatctgtagcactctgattttcagaaaatttttcattctgaataatttaaaaatggtgatgtattagaaaggcagtttgctttagaaaactaaatcacattgaacattgtattagagaattaaattaaaagtttcttacagagcagtattttccaaacatttttagcactagaatctttttagatgaaattttatgtataaccccaatacataaagcctgaaaactcaattttatcaatataaatgtattttgggttcacatttatgcttattcattttggctcattactaagcataataagattctgagttatttctgaataacacaaatgtggagttatacatagttgatgaaaccagcagccaatttatagctatgccctgttttatttgtatactatcaagaaaattttgattcacacaaatgtaagcaaaaataataggttttaaacatacatctcaggaaattctttaattagagatagctaaagttattcaaggtctatacaaaaataagttatcctggtagtggaagttaatacataagcagtctccagtgtggtaaagtagggtatgtaacacatcagaatgtgcgtttttattaggttttaaaatatgcacgtataaaaactaaatttgaatcaaacccttttaactcacctccaagaagctagactttggccaggaatgggctaaaaaccactggttaacgatgtgacagttatgatcttggagattggaaatctttcttccacattagagttctttaccttaattccttattctgaaaaattgtaagattttatgaaggtttgaatactgaagcacagttctgctttcaaaaattaaaattcaaacttgaaaaagctgtttaacccatggaagatatcatttagtaagatgtaaaagattttttaaatctacacttcagtttatacatctttatcattatcaatactatataagttactgtgagcattttagagaattccataaaggtactatgagtgtgtctgtatgtgtgtgtatatatagcattgtatttaatcatagactaaatttaatttgatatagaaatactactttacttgtacattaaggtcataatttctgctggactcttttatatttaattaatggggattatagtcttccttcataaatgcatttaaacctgaaattgaacaccagtgtttttctttttctacttatgggaagttgtctgcttccccctttagagaaaacagtatttttatattttgttaaaatattaactactttatgcctacacactatgctgtagatactgatcataattcttgggtgttcacaaacactcctagtgcctcttttttggcccgttgaaagtgttggtattactactttcactacagagcctttggccctctaataatgctgaggtgggctgatccttcccatttctgtcttcgggtcattctggtaggtcttctcctccactgtcaagtaagcaatcaggtccgtgacagggattggacatatgaacaaattaagtggatacacacagtgagaaagatacatgcattctatggtaacaactactgtcaataacatctgatgttacatgcacatttatatatatataattttaaaaactgaactatgagaagccatggtataaatgaatattgtggacatcatggacttgatatgatagaaatcaattgtcagcttgagaaagttgtttttaatctgtctaaatagttcatgcattactacagttaaaaatagtttcatttgtcttctatagacttaattttattccggttcagtataatctctgttaacagagtttcagcaaactgattggtcaaggtattaacatagcttctacttcctttacttaaaaagatgtggttttatgtaagttcttgattactgatgatcatcccaaattttgacaacaaaatcatatgtataaatttatttctcccctcttgttcatcatcttttgtaaaggtcccattgtagatcttttctgctaccaaataaaacttttcaaacaatttggtttcaagaccttaaatagacaagttggatactaagattgtgaactgataaggacatataaatttatatttccagcccttccttagagtctttatctgcatcaaaaacccaattctgccattaactgtgcttcccagtcccacctctatatgtcactcattttctgcaacaaagatctcactaaatcatgttgaaacacaagtcatgatctctctaagtaaatagaaaaagctccctggaaaaactctgttgccacatgcacgtgccctgttactcctccagccagccagtgctgccagcattttattgtgtaaaagtccaaataaataagggcctgcatgcaacctttatcttcagaaactaggttttatatgtaaaatgtgacttgggaaatgattctgtttattaactggctgggatttttcatttctatgaaagtttcaaacatctccagtactttataaaatcccaacaattgctgtaagtcagcactttggtccactcagcccacccagcccacttgcaactctgactcttcactgaatcatatttgggaagtttgggtagggtgaggctatcttcttcaagattattttctcatatgtctgtctgtcaccttgtaaaccatgagactcctgggtatttgcatgtaacttctttgaggaagttaccaccatctctgatatagacacactttttgagttgcagtttctgttagaattttttggagactaacttgccaattctgtgaatgttattgaatatttaaaaagctgggtctgtaatgggaggcattttattagctgttgtgattgggtaacatgtccccttagatttcctgatttaaaattatacaaaattactatttttgataaaataaaggaacacctacagaaaattaagtttctaagatgtttctatacttcattagaaaagattttattactattacttatggttattggtgattaacacttaatgcgtctcctctgattttgtgttccatgaggtgcttggaacatttggagtgctctgtgcgagggacatacagtgatataggaaatttaaaaattaaaataatacccaaaacccactttatcagatatggtattgtgatggttaatattatgtgtcaacttggtgaggctatggcgcccatgtgtttggtcaaacactagcctagatgttgctgtgaatatattttgtagatgtgattaacatttacaatcagttgattttaagtaaagcagattctcatccat

SEQ ID NO: 55691 - DNA, 6827 bp, Homo sapiens
tacatgattagaatcgagctggtaccatggcatgtagtgaggacagcctttataacctgcccaggagttattcccatgatgttttaccaaaggtgtctccatcaagtactgaagcagatggagaactctatgtttttaataccccatctgggacatcgagtgtagagactcaaatgaggcatgtatctattagttatgacattcctccaacacctggtaatacttatcagattccacgaacatttccagaaggaaccttgggacagacatcaaagctagacactattccagatattcctccacctcggccaccgaaaccacatccagctcatgaccgatctcctgtggaaacgtgtagtatcccacgcaccgcctcagacactgacagtagttactgtatccctacagcagggatgtcgccttcacgtagtaataccatttccactgtggatttaaacaaattgcgaaaagatgctagttctcaagactgctatgatattccacgagcatttccaagtgatagatctagttcacttgaaggcttccataaccactttaaagtcaaaaatgtgttgacagtgggaagtgtttcaagtgaagaactggatgaaaattacgtcccaatgaatcccaattcaccaccacgacaacattccagcagttttacagaaccaattcaggaagcaaattatgtgccaatgactccaggaacatttgatttttcctcatttggaatgcaagttcctcctcctgctcatatgggcttcaggtccagcccaaaaacccctcccagaaggccagttcctgttgcagactgtgaaccaccccccgtggataggaacctcaagccagacagaaaaggtcaaagtcctaaaattttaagactcaaaccccatggtttagagcgaactgattcacaaaccataggtgactttgctacaagaagaaaggtcaagccagcgcctttagaaataaaacctttgccagaatgggaagaattacaagccccagttagatctcccatcactaggagttttgctcgagactcttccaggtttcccatgtccccccgaccagattcagtgcatagcacaacttcaagcagtgactcacacgacagtgaagagaattatgttcccatgaacccaaacctgtccagtgaagacccaaatctctttggcagtaacagtcttgatggaggaagcagccctatgatcaagcccaaaggagacaaacaggtggaatacttagatctcgacttagattctgggaaatccacaccaccacgtaagcaaaagagcagtggctcaggcagcagtgtagcagatgagagagtggattatgttgttgttgaccaacagaagaccttggctctaaagagtacccgggaagcctggacagatgggagacagtccacagaatcagaaacgccagcgaagagtgtgaaatgaaaatattgccttgccatttctgaacaaaagaaaactgaattgtaaagataaatcccttttgaagaatgacttgacacttccactctaggtagatcctcaaatgagtagagttgaagtcaaaggacctttctgacataatcaagcaatttagacttaagtggtgctttgtggtatctgaacaattcataacatgtaaataatgtgggaaaatagtattgtttagctcccagagaaacatttgttccacagttaacacactcgtagtattactgtatttatgcactttttcatctaaaacattgttctgggttttcccaatgtaccttaccataattcctttgggagttcttgttttttgtcacactactttatataacaatactaagtcaactaagctacttttagatttggaaattgctgtttacagtctaacaacattaaaatgagaggtagattcacaagttagctttctacctgaagcttcaggtgataaccattagcttatacttggactcatcatttgttgccttccaaaatgctgaggataatgtatgtactggtgtcaggacctagttctctggttaatgtacatttagtttttaatggtggaactttgttatattttgttaattacagtgtttttggttcattgagtgaagattctgccgggtgggatcttgcacctttgaaagactgaataattacactaccaagtaagcctgcaaatcattgatggcatgcagtgatgatgtgctcttacacttgttaacatgtattaagtgttatttgcaaaaggtagattatgtaaccaatcaggtacgtaccaggcagtgatgtgctaatacactgatcaggtttagacaatgagctttggttgtgttcttgttagtcctaatattggttttcagtttggaattaataaagcagttgacattcactgttagttacagcaacatactgtgatttttaattagatagtaattcagatttattactctatgaaattctgtcttttgacaccatagtgccctttctatgattttttttacttaatattcttcttggccttatatttaattccctatgcaattaatattttatatctgcattttttttaaaaaaatagatgttatataagtgattctcgtatgtagcacctgttgcttttccactgaaagaattacggattttgtactgtgatttatattcactgccccaattcaagaaatattggagccttgctacaatgtgaaatgttatagtcatggactccttccaaccagatttctgaaaacaccagagggatggtataattctgtctcacctataacatggtcctgtgacatagatattaagaccacaagttgtagtgaggctacaattatattcgtctgtcttggctttgcaacataatttagaaagcacgtatagttgttttttaaccaagttacatacaatctcatgtactgatttgagacttataacaatttttggagggggcatagagaaaggagtgcccacagttgaggcatgaccccctccattcagacctctaactgttgcctgagtacacagatgtgccctgatttctggcccattggccatagtactgtgcctaatcaatgtaataggtttattttcccaatcctcaaactaaaaatgttcataacaagatgaattgtagactagtaacatttgatgcttttaaatatttgcttctttttaaacaaaaactaaaacccagaagtgaatttttaggtggatttttaaataaaaaagattgattgagtttggtgtgcaagctgttttataatgaaacaacaaaatgaaatctaaaatcctgaaatgtgcctaaactatcaaaacacacgatacagctaatgtgtaaagatgctaaattctgttacttggaggatgaatatatttaagatttaaaacacaataataaatacatgattaattcaaaaataaaaatctttacagctgcctatcaagggtctaaagcacttaatgaatgtttttagtctaacttatcattaactttttacaagtcaccatatttgaagatctgtagcactctgattttcagaaaatttttcattctgaataatttaaaaatggtgatgtattagaaaggcagtttgctttagaaaactaaatcacattgaacattgtattagagaattaaattaaaagtttcttacagagcagtattttccaaacatttttagcactagaatctttttagatgaaattttatgtataaccccaatacataaagcctgaaaactcaattttatcaatataaatgtattttgggttcacatttatgcttattcattttggctcattactaagcataataagattctgagttatttctgaataacacaaatgtggagttatacatagttgatgaaaccagcagccaatttatagctatgccctgttttatttgtatactatcaagaaaattttgattcacacaaatgtaagcaaaaataataggttttaaacatacatctcaggaaattctttaattagagatagctaaagttattcaaggtctatacaaaaataagttatcctggtagtggaagttaatacataagcagtctccagtgtggtaaagtagggtatgtaacacatcagaatgtgcgtttttattaggttttaaaatatgcacgtataaaaactaaatttgaatcaaacccttttaactcacctccaagaagctagactttggccaggaatgggctaaaaaccactggttaacgatgtgacagttatgatcttggagattggaaatctttcttccacattagagttctttaccttaattccttattctgaaaaattgtaagattttatgaaggtttgaatactgaagcacagttctgctttcaaaaattaaaattcaaacttgaaaaagctgtttaacccatggaagatatcatttagtaagatgtaaaagattttttaaatctacacttcagtttatacatctttatcattatcaatactatataagttactgtgagcattttagagaattccataaaggtactatgagtgtgtctgtatgtgtgtgtatatatagcattgtatttaatcatagactaaatttaatttgatatagaaatactactttacttgtacattaaggtcataatttctgctggactcttttatatttaattaatggggattatagtcttccttcataaatgcatttaaacctgaaattgaacaccagtgtttttctttttctacttatgggaagttgtctgcttccccctttagagaaaacagtatttttatattttgttaaaatattaactactttatgcctacacactatgctgtagatactgatcataattcttgggtgttcacaaacactcctagtgcctcttttttggcccgttgaaagtgttggtattactactttcactacagagcctttggccctctaataatgctgaggtgggctgatccttcccatttctgtcttcgggtcattctggtaggtcttctcctccactgtcaagtaagcaatcaggtccgtgacagggattggacatatgaacaaattaagtggatacacacagtgagaaagatacatgcattctatggtaacaactactgtcaataacatctgatgttacatgcacatttatatatatataattttaaaaactgaactatgagaagccatggtataaatgaatattgtggacatcatggacttgatatgatagaaatcaattgtcagcttgagaaagttgtttttaatctgtctaaatagttcatgcattactacagttaaaaatagtttcatttgtcttctatagacttaattttattccggttcagtataatctctgttaacagagtttcagcaaactgattggtcaaggtattaacatagcttctacttcctttacttaaaaagatgtggttttatgtaagttcttgattactgatgatcatcccaaattttgacaacaaaatcatatgtataaatttatttctcccctcttgttcatcatcttttgtaaaggtcccattgtagatcttttctgctaccaaataaaacttttcaaacaatttggtttcaagaccttaaatagacaagttggatactaagattgtgaactgataaggacatataaatttatatttccagcccttccttagagtctttatctgcatcaaaaacccaattctgccattaactgtgcttcccagtcccacctctatatgtcactcattttctgcaacaaagatctcactaaatcatgttgaaacacaagtcatgatctctctaagtaaatagaaaaagctccctggaaaaactctgttgccacatgcacgtgccctgttactcctccagccagccagtgctgccagcattttattgtgtaaaagtccaaataaataagggcctgcatgcaacctttatcttcagaaactaggttttatatgtaaaatgtgacttgggaaatgattctgtttattaactggctgggatttttcatttctatgaaagtttcaaacatctccagtactttataaaatcccaacaattgctgtaagtcagcactttggtccactcagcccacccagcccacttgcaactctgactcttcactgaatcatatttgggaagtttgggtagggtgaggctatcttcttcaagattattttctcatatgtctgtctgtcaccttgtaaaccatgagactcctgggtatttgcatgtaacttctttgaggaagttaccaccatctctgatatagacacactttttgagttgcagtttctgttagaattttttggagactaacttgccaattctgtgaatgttattgaatatttaaaaagctgggtctgtaatgggaggcattttattagctgttgtgattgggtaacatgtccccttagatttcctgatttaaaattatacaaaattactatttttgataaaataaaggaacacctacagaaaattaagtttctaagatgtttctatacttcattagaaaagattttattactattacttatggttattggtgattaacacttaatgcgtctcctctgattttgtgttccatgaggtgcttggaacatttggagtgctctgtgcgagggacatacagtgatataggaaatttaaaaattaaaataatacccaaaacccactttatcagatatggtattgtgatggttaatattatgtgtcaacttggtgaggctatggcgcccatgtgtttggtcaaacactagcctagatgttgctgtgaatatattttgtagatgtgattaacatttacaatcagttgattttaagtaaagcagattctcatccat

SEQ ID NO: 55692 - DNA, 5939 bp, Homo sapiens
catatcgtcgaccaggccgtcggattcacaaggcgataggtgactttgctacaagaagaaaggtcaagccagcgcctttagaaataaaacctttgccagaatgggaagaattacaagccccagttagatctcccatcactaggagttttgctcgagactcttccaggtttcccatgtccccccgaccagattcagtgcatagcacaacttcaagcagtgactcacacgacagtgaagagaattatgttcccatgaacccaaacctgtccagtgaagacccaaatctctttggcagtaacagtcttgatggaggaagcagccctatgatcaagcccaaaggagacaaacaggtggaatacttagatctcgacttagattctgggaaatccacaccaccacgtaagcaaaagagcagtggctcaggcagcagtgtagcagatgagagagtggattatgttgttgttgaccaacagaagaccttggctctaaagagtacccgggaagcctggacagatgggagacagtccacagaatcagaaacgccagcgaagagtgtgaaatgaaaatattgccttgccatttctgaacaaaagaaaactgaattgtaaagataaatcccttttgaagaatgacttgacacttccactctaggtagatcctcaaatgagtagagttgaagtcaaaggacctttctgacataatcaagcaatttagacttaagtggtgctttgtggtatctgaacaattcataacatgtaaataatgtgggaaaatagtattgtttagctcccagagaaacatttgttccacagttaacacactcgtagtattactgtatttatgcactttttcatctaaaacattgttctgggttttcccaatgtaccttaccataattcctttgggagttcttgttttttgtcacactactttatataacaatactaagtcaactaagctacttttagatttggaaattgctgtttacagtctaacaacattaaaatgagaggtagattcacaagttagctttctacctgaagcttcaggtgataaccattagcttatacttggactcatcatttgttgccttccaaaatgctgaggataatgtatgtactggtgtcaggacctagttctctggttaatgtacatttagtttttaatggtggaactttgttatattttgttaattacagtgtttttggttcattgagtgaagattctgccgggtgggatcttgcacctttgaaagactgaataattacactaccaagtaagcctgcaaatcattgatggcatgcagtgatgatgtgctcttacacttgttaacatgtattaagtgttatttgcaaaaggtagattatgtaaccaatcaggtacgtaccaggcagtgatgtgctaatacactgatcaggtttagacaatgagctttggttgtgttcttgttagtcctaatattggttttcagtttggaattaataaagcagttgacattcactgttagttacagcaacatactgtgatttttaattagatagtaattcagatttattactctatgaaattctgtcttttgacaccatagtgccctttctatgattttttttacttaatattcttcttggccttatatttaattccctatgcaattaatattttatatctgcattttttttaaaaaaatagatgttatataagtgattctcgtatgtagcacctgttgcttttccactgaaagaattacggattttgtactgtgatttatattcactgccccaattcaagaaatattggagccttgctacaatgtgaaatgttatagtcatggactccttccaaccagatttctgaaaacaccagagggatggtataattctgtctcacctataacatggtcctgtgacatagatattaagaccacaagttgtagtgaggctacaattatattcgtctgtcttggctttgcaacataatttagaaagcacgtatagttgttttttaaccaagttacatacaatctcatgtactgatttgagacttataacaatttttggagggggcatagagaaaggagtgcccacagttgaggcatgaccccctccattcagacctctaactgttgcctgagtacacagatgtgccctgatttctggcccattggccatagtactgtgcctaatcaatgtaataggtttattttcccaatcctcaaactaaaaatgttcataacaagatgaattgtagactagtaacatttgatgcttttaaatatttgcttctttttaaacaaaaactaaaacccagaagtgaatttttaggtggatttttaaataaaaaagattgattgagtttggtgtgcaagctgttttataatgaaacaacaaaatgaaatctaaaatcctgaaatgtgcctaaactatcaaaacacacgatacagctaatgtgtaaagatgctaaattctgttacttggaggatgaatatatttaagatttaaaacacaataataaatacatgattaattcaaaaataaaaatctttacagctgcctatcaagggtctaaagcacttaatgaatgtttttagtctaacttatcattaactttttacaagtcaccatatttgaagatctgtagcactctgattttcagaaaatttttcattctgaataatttaaaaatggtgatgtattagaaaggcagtttgctttagaaaactaaatcacattgaacattgtattagagaattaaattaaaagtttcttacagagcagtattttccaaacatttttagcactagaatctttttagatgaaattttatgtataaccccaatacataaagcctgaaaactcaattttatcaatataaatgtattttgggttcacatttatgcttattcattttggctcattactaagcataataagattctgagttatttctgaataacacaaatgtggagttatacatagttgatgaaaccagcagccaatttatagctatgccctgttttatttgtatactatcaagaaaattttgattcacacaaatgtaagcaaaaataataggttttaaacatacatctcaggaaattctttaattagagatagctaaagttattcaaggtctatacaaaaataagttatcctggtagtggaagttaatacataagcagtctccagtgtggtaaagtagggtatgtaacacatcagaatgtgcgtttttattaggttttaaaatatgcacgtataaaaactaaatttgaatcaaacccttttaactcacctccaagaagctagactttggccaggaatgggctaaaaaccactggttaacgatgtgacagttatgatcttggagattggaaatctttcttccacattagagttctttaccttaattccttattctgaaaaattgtaagattttatgaaggtttgaatactgaagcacagttctgctttcaaaaattaaaattcaaacttgaaaaagctgtttaacccatggaagatatcatttagtaagatgtaaaagattttttaaatctacacttcagtttatacatctttatcattatcaatactatataagttactgtgagcattttagagaattccataaaggtactatgagtgtgtctgtatgtgtgtgtatatatagcattgtatttaatcatagactaaatttaatttgatatagaaatactactttacttgtacattaaggtcataatttctgctggactcttttatatttaattaatggggattatagtcttccttcataaatgcatttaaacctgaaattgaacaccagtgtttttctttttctacttatgggaagttgtctgcttccccctttagagaaaacagtatttttatattttgttaaaatattaactactttatgcctacacactatgctgtagatactgatcataattcttgggtgttcacaaacactcctagtgcctcttttttggcccgttgaaagtgttggtattactactttcactacagagcctttggccctctaataatgctgaggtgggctgatccttcccatttctgtcttcgggtcattctggtaggtcttctcctccactgtcaagtaagcaatcaggtccgtgacagggattggacatatgaacaaattaagtggatacacacagtgagaaagatacatgcattctatggtaacaactactgtcaataacatctgatgttacatgcacatttatatatatataattttaaaaactgaactatgagaagccatggtataaatgaatattgtggacatcatggacttgatatgatagaaatcaattgtcagcttgagaaagttgtttttaatctgtctaaatagttcatgcattactacagttaaaaatagtttcatttgtcttctatagacttaattttattccggttcagtataatctctgttaacagagtttcagcaaactgattggtcaaggtattaacatagcttctacttcctttacttaaaaagatgtggttttatgtaagttcttgattactgatgatcatcccaaattttgacaacaaaatcatatgtataaatttatttctcccctcttgttcatcatcttttgtaaaggtcccattgtagatcttttctgctaccaaataaaacttttcaaacaatttggtttcaagaccttaaatagacaagttggatactaagattgtgaactgataaggacatataaatttatatttccagcccttccttagagtctttatctgcatcaaaaacccaattctgccattaactgtgcttcccagtcccacctctatatgtcactcattttctgcaacaaagatctcactaaatcatgttgaaacacaagtcatgatctctctaagtaaatagaaaaagctccctggaaaaactctgttgccacatgcacgtgccctgttactcctccagccagccagtgctgccagcattttattgtgtaaaagtccaaataaataagggcctgcatgcaacctttatcttcagaaactaggttttatatgtaaaatgtgacttgggaaatgattctgtttattaactggctgggatttttcatttctatgaaagtttcaaacatctccagtactttataaaatcccaacaattgctgtaagtcagcactttggtccactcagcccacccagcccacttgcaactctgactcttcactgaatcatatttgggaagtttgggtagggtgaggctatcttcttcaagattattttctcatatgtctgtctgtcaccttgtaaaccatgagactcctgggtatttgcatgtaacttctttgaggaagttaccaccatctctgatatagacacactttttgagttgcagtttctgttagaattttttggagactaacttgccaattctgtgaatgttattgaatatttaaaaagctgggtctgtaatgggaggcattttattagctgttgtgattgggtaacatgtccccttagatttcctgatttaaaattatacaaaattactatttttgataaaataaaggaacacctacagaaaattaagtttctaagatgtttctatacttcattagaaaagattttattactattacttatggttattggtgattaacacttaatgcgtctcctctgattttgtgttccatgaggtgcttggaacatttggagtgctctgtgcgagggacatacagtgatataggaaatttaaaaattaaaataatacccaaaacccactttatcagatatggtattgtgatggttaatattatgtgtcaacttggtgaggctatggcgcccatgtgtttggtcaaacactagcctagatgttgctgtgaatatattttgtagatgtgattaacatttacaatcagttgattttaagtaaagcagattctcatccat

SEQ ID NO: 55693 - DNA, 533 bp, Homo sapiens
acctctggtggtggctggctactcggatacgaattcggcacgagggcaggcgtcggctagtgtcgggagtcgcgcccgccgcccctcagctgcccggcccggagcccgagacgcgcgcaccatgagcggtggtgaagtggtctgctccggatggctccgcaagtcccccccggagaaaaagttgaagcgttatgcatggaagaggagatggttcgtgttacgcagtggccgtttaactggagatccagatgtttggaatattacaaaaatgatcatgccaagaagcctattcgtattattgatttaaatttatgtcaacaagtagatgctggattgacatttaacaaaaaagagtttgaaaacagctacatttttgatatcaacactattgaccggattttctacttggtagcagacagcgaggaggagatgaataagtgggttcgttgtatttgtgacatctgtgggtttaatccaacagaagaagcatggaagaggagatggttcgtgttacgcagtggcgctcgtatgag

SEQ ID NO: 55694 - DNA, 452 bp, Homo sapiens
ctataaatacagcaccaccatccacccaggcagattcatcctctgctactctacctcctccatatcagctaatcaatgttccaccacacctggaaactcttggcattcaggaggatcctcaagactacctgttgctcatcaactgtcaaagcaagaagcccgaacccaccaggtaaattatatatgcccatgtgagagagagacagaggcgtgtgtatgtgtgtacacactgagattcttacctttaaactttttaaatttcgatttgcaggcttgaaagagaccatctgtataggcatatgtttcaggctttatatttcaggtttacattcccctattgatttccgatattcaggagattgtatcgaagagacacaatctctgccatctttggcaaagagcagttttccctacaaggctcttttggaaatctgtctcctattttgtagtct

SEQ ID NO: 55695 - DNA, 410 bp, Homo sapiens
gcatggaagaggagatggttcgtgttacgcagtggccgtttaactggagatccagatgtttggaatattacaaaaatgatcatgccaagaagcctattcgtattattgatttaaatttatgtcaacaagtagatgctggattgacatttaacaaaaaagagtttgaaaacagctacatttttgatatcaacactattgaccggattttctacttggtagcagacagcgaggaggagatgaataagtgggttcgttgtatttgtgacatctgtgggtttaatccaacagaagaaggtaagttcaagatattactattcaacttgaattcttcttttctgctacatttccagaaatgtcatacaattctttgttattttagttacacaatataatgttttatttttataata

SEQ ID NO: 55696 - DNA, 1563 bp, Homo sapiens
acctctggtggtggctggctactcggatacgaattcggcacgagggcaggcgtcggctagtgtcgggagtcgcgcccgccgcccctcagctgcccggcccggagcccgagacgcgcgcaccatgagcggtggtgaagtggtctgctccggatggctccgcaagtcccccccggagaaaaagttgaagcgttatgcatggaagaggagatggttcgtgttacgcagtggccgtttaactggagatccagatgtttggaatattacaaaaatgatcatgccaagaagcctattcgtattattgatttaaatttatgtcaacaagtagatgctggattgacatttaacaaaaaagagtttgaaaacagctacatttttgatatcaacactattgaccggattttctacttggtagcagacagcgaggaggagatgaataagtgggttcgttgtatttgtgacatctgtgggtttaatccaacagaagaaggatctcactttgtcgtctaggctggagtacagtggcatgatctctgctcactgcaacctctgcctcccgggttcaagcgattctcgtgcctcagccttctgagtagctggaattacagatcctgtgaagccacctggcagctctttacaagcaccagctgatttacctttagctataaatacagcaccaccatccacccaggcagattcatcctctgctactctacctcctccatatcagctaatcaatgttccaccacacctggaaactcttggcattcaggaggatcctcaagactacctgttgctcatcaactgtcaaagcaagaagcccgaacccaccagaacgcatgctgattctgcaaaatccacctcttctgaaacagactgcaatgataacgtcccttctcataaaaatcctgcttcctcccagagcaaacatggaatgaatggcttttttcagcagcaaatgatatacgactctccaccttcacgtgccccatctgcttcagttgactccagcctttataacctgcccaggagttattcccatgatgttttaccaaaggtgtctccatcaagtactgaagcagatggagaactctatgtttttaataccccatctgggacatcgagtgtagagactcaaatgaggcatgtatctattagttatgacattcctccaacacctggtaatacttatcagattccacgaacatttccagaaggaaccttgggacagacatcaaagctagacactattccagatattcctccacctcggccaccgaaaccacatccagctcatgaccgatctcctgtggaaacgtgtagtatcccacgcaccgcctcagacactgacagtagttactgtatccctacagcagggatgtcgccttcacgtagtaataccatttccactgtggatttaaacaaattgcgaaaagatgctagttctcaagactgctatgatattccacgagcatttccaagtgatagatctagttcacttgaaggcttccataaccactttgtaagtataattgaccttggcatcatcaagtgtatttcattgtc

SEQ ID NO: 55697 - DNA, 269 bp, Homo sapiens
gttaggtcattcacacatggtggagacaggaatctacagaccagggatcagccccaaggctatgatctttgtgctgcgccgctctacccctgagcagacaggccagaggtccagagagggctgtgctggcagagttcatactttgataactgaaccctagagtaagcctgccctggaaatgccagctcaagggactgacaggcataatgctctttgggagagaaatgccacatctgcagcgacacgcatcctaacactgtcccaggact

SEQ ID NO: 55698 - DNA, 532 bp, Homo sapiens
tctacaaacctagatttatccagaatgcaaccacttttctcaacattccctttaccaccactttggtcctagccaccatcatgttgggttagattattgtagtaaccttgcttggataattataatagtgtcctaactggtctcctggtttctgctcttgccccctgcagtctatgcccaacatatcaaccagaatgatcctttaaaacttaagtcaaagcatgtcagtcctctgctccagaccctttaaaggattttccagttgagcgcagtggcttacaccagcactttgggaaaccaaggcaggcagatcacttgaggttaggagttcaagaccagcctggccaacatggcgaaaccccatctctactaaaaatacaaaatttacccagatacggtggtgtgtgcctgtagtcccagctacaccagaggctggggtacaagaatcacttgaacctgggagttggagtttgcagtgagccaagatcactgcactccagcctgggtggcagagggagactctatctcaaaa

SEQ ID NO: 55699 - DNA, 573 bp, Homo sapiens
gtcatttgcatccagtagctattcagcaaatatacctatggcaaaaaggatataagttatgggtataactgaaataatcctgggtttaaagcaaagctctgataaatacagaagatgtttctccaggtgccagaagatatgttgaagtttgagctcagactgaccaaatgctagttatggggtatgtgatagctccaaggtagtaatataaaggctattttaattagaaacttttgagtaaatggccctcaggatagtgatttctgtttgaatgtcactaaccttttttagttacagatccctataataatgcttgagtctaggcagaacaactttgtgtttattctttgcaaagggtagggtagtgctaacaacctgctcttcatttgctttttctcccctttgccgattcagaatgctgctttgtcaatttgtgtgcctgctgtaggaactggtccgttttccaagtgtgacagtgcaggcagagaagggtggatgagctgtaaatgcagcctagaacacatttgattatagagaatgaagcactaatatcccaatataattggagtttaa

SEQ ID NO: 55700 - DNA, 257 bp, Homo sapiens
gagactgagtttcgctttttttgcccatgcaacaaaactcccaacctcagatgatctgcccaccttggcatgaaaataaatcatttacagttatgtgcatgagtttatattttttgagtttagaatatttatacataagaaataattcataatacttataattcaattcaactagtgtcatttaaagataacactggatttggaagtgctcttaagttatttactctgggccaaagattagtttcgtatagattctg

SEQ ID NO: 55701 - DNA, 1306 bp, Homo sapiens
ttcctcttctgcccattgagcagtcaaagaactgaaagtccttataagcctgtgcacctgggcctgggccctacagataaggtagctgctattgatgaatttgacaacgcccattttacactccttggggtccccaacaaacccctgcagtgtttggacatcaccgccacaggccagaagcttcgcaacaggtaccacgagggaaagctggcgcccatcgcgccaggcatcaaccgagtggactggccctgcttcacgcgcgccatcgaggactggtcccacttcgtgtcctcggccggggagttcaagctgccttgcctgaggaagcgagcggagggtctcagcggctacgcggtgcggtacttgaagcccgacgtgacccagacctggcggtactgcctcaaccagaaccccagcctggaccgctacggacagaagcccctgcctttcgactccctgaacactttccgaagcttcggctccagctacaggctagagtgcaatggcctgatctcagctcactgcaacctccgcctcccgggttcaagcaattctcctgcctcagctttctgagtagctgggattacagtcgtgtcaactacctgaccccctggcattaatctctggaaaggaggctgactcccaggctgccggacggtgccacctcaggtcccctggccagaccgaggacttatggtggcaccagccatctccccaggagttcagcctaactagaaataaacctaatgctcccttagagacacacgcaattgtctctgtctgtgtgtgttgcacagcctgggagagggtcagggccacaggatgacagtatcttacccttgcccgtccccggccaactcctggaggactggtggggggttggagaaaaatgtctggtgacctggtttgagagtcagggtgtaagccgcaaggtccagccagaattgagatccaagagcaagagatgtgctccggccccttgcctgcagccccacacccaagccccctccatttcagatcctgaatttgagccctaagaagaaagggagagggctagaaagctatttttaggtgcctttttgaagctcttgtcatactggtgtgctctggggggcttccctgtgcctggggtccccctgaaggtgtgggagcaggctggggcaaggggagctggccaggcctatggccttgattcctgtgacgcaacagaatgtagagtctaaacttgcatgagatgcatgaagccactcagagaagaaagttccccgctctccaaagcaccaccaataaacatgtcatttaagca

SEQ ID NO: 55702 - DNA, 1433 bp, Homo sapiens
ttcctcttctgcccattgagcagtcaaagaactgaaagtccttataagcctgtgcacctgggcctgggccctacagataaggtagctgctattgctatggcccgcatcattgacctggtgccctgggacgatggctccacacatgtgtatgcctccccggccatcctgcttcccatggagcggcagcgcaaccagctggcgggcgtgaagcagcagctctaccacccagccctgcccaccctgcgccacatggacagggacaccgtcaaggcctgccttcctgatgagcactgccagtccaccacctactgccgcaaagatgaatttgacaacgcccattttacactccttggggtccccaacaaacccctgcagtgtttggacatcaccgccacaggccagaagcttcgcaacaggtaccacgagggaaagctggcgcccatcgcgccaggcatcaaccgagtggactggccctgcttcacgcgcgccatcgaggactggtcccacttcgtgtcctcggccggggagttcaagctgccttgcctgaggaagcgagcggagggtctcagcggctacgcggtgcggtacttgaagcccgacgtgacccagacctggcggtactgcctcaaccagaaccccagcctggaccgctacggacagaagcccctgcctttcgactccctgaacactttccgaagcttcggctccagctacagtcgtgtcaactacctgaccccctggcattaatctctggaaaggaggctgactcccaggctgccggacggtgccacctcaggtcccctggccagaccgaggacttatggtggcaccagccatctccccaggagttcagcctaactagaaataaacctaatgctcccttagagacacacgcaattgtctctgtctgtgtgtgttgcacagcctgggagagggtcagggccacaggatgacagtatcttacccttgcccgtccccggccaactcctggaggactggtggggggttggagaaaaatgtctggtgacctggtttgagagtcagggtgtaagccgcaaggtccagccagaattgagatccaagagcaagagatgtgctccggccccttgcctgcagccccacacccaagccccctccatttcagatcctgaatttgagccctaagaagaaagggagagggctagaaagctatttttaggtgcctttttgaagctcttgtcatactggtgtgctctggggggcttccctgtgcctggggtccccctgaaggtgtgggagcaggctggggcaaggggagctggccaggcctatggccttgattcctgtgacgcaacagaatgtagagtctaaacttgcatgagatgcatgaagccactcagagaagaaagttccccgctctccaaagcaccaccaataaacatgtcatttaagca

SEQ ID NO: 55703 - DNA, 379 bp, Homo sapiens
aaaaagaaaaaaaagattctctccacctacattcattaccgtttctgggaagagttctgataaattcagtttttgcaaccttgctccatttccagtgatattcttgaatcccttatgattgtggtgacccagcccgcttcctagctgggatgctccttcatctggttctgcctaactcacccctcagcccccactgccttgggtaagtccttagaaagagaactgacaaattaaagtgagacattctttcattcattccatagctatttattgagcttcttagaagagcttcagctacctggctagcattcttagacatcaatgggcaaccaacttgtcattggcagttttacatgtgaagtcagcactccacaagcaa

SEQ ID NO: 55704 - DNA, 887 bp, Homo sapiens
  misc_feature (456)..(456): n is a, c, g, or t
gtaagtatcaggaatctattgtgaggtagataagttttcccctccaaagagtattctaagttggtcaattaaaaagaaacaaaacttctattagcaacctccaccttgtacaggctcagagggaagataaacctgcaaaaagtgtgagtctcagctgtaacctaccaactatgtgagcttgggaaagttacccagcttccctatgcctcaatctgttcatccataaaatgaggataacaccagtatctatctaaggaatatgaatatattatatgcgtatttatatatcaagaatacatatacaatgctcataacataaaaaatcaaacataacatcaaataaaatatatgattctgatattataagcctcttatgtattgtaatatagaaggatggctttgtaataaaaaataaattaagccacaaccaaagttttcatacaggactaagtagtncatagttacctcaaatcctccttagaaacagggtaaggcatgggagtaagaatgtatactacttcctttaaaagtgtaatttaatatgcattctgttaagaagatgtttatatttatacacatatgagtgcacatttttaaaaggcctccaaagccaagaatacagaggtttcttaacagttgaaaataattcataatgattgccatttgttgccattttatttaggcttatgggaacaaagtctaaaaggaaatcaggcaatgtgtcaggccccttgcacaggtaatttcttttaatccttagaagaaccctatcatatcccacaaaggaagttactgagctaaaaagtgaggaaaccaggttggcctcacttccaaacccaaattcagctgcaccatgatccatgggagtgagtcttcctttgttccag

SEQ ID NO: 55705 - DNA, 368 bp, Homo sapiens
tgattgaaactttaaacccttcccttaagttcccctaaaaacctccctgtgcctagtaaggttttgcatgtgtgaggagggtgaaggtatttggaccttggagaaactttgcaatttgaaatctgcctatgcagttgtacaccagaaatgaacatggtcaatgccatattgtgctctttgtctttttcttctaccaagattcctcacccctaggagacgttggttaatataggcatttcggtttggttaatctgatcatgagtgcccgtgagcatggcatgaggcatgattgaagcagttataaaaatttggctcagagttaagccctataatttgttttaaagaattacctcttcagtgacattaaa

SEQ ID NO: 55706 - DNA, 416 bp, Homo sapiens
ctgccaagccatgttttggccacttggctcacctcatcctgtccctgattttccatttccaatgtgagtctcaagcttcagttgccagctagcagcagccattcttaggagagcctattaggattgccttgcccatgaaggctcattttgtacttattttatatttttgctctttagcattttctgtaaatcttttgctacagttaaactgggacaacagaaacattttcatcctatgataatgaagcaataaagagaggagacatgtactgtcttcttggttttataagtaacttaagtgtactcagaatatcattctttagtattctcaaatgtttttgatgtgctactaatttatatttagtttctttctgttcttcagaaggtagctatgacctatggctagacaataaaaa

SEQ ID NO: 55707 - DNA, 511 bp, Homo sapiens
tctgtgacattttgtgacttcggtgaaggcatgcaggctaaggaacctgaggagaattaattcatcatgtacatatgctaaaacaacagcagcacaaatgttgaaacaacttatttatttattcctaaaaatgaaagtgatgcacaaattagagcaaagttataaaaaaaaatttctaagggagaggcatgatgatgttgtagaaagagcactagattgaaaccaagaacttagacttttagacaaatacttaagattttagtttccagctctacctattagctgacttcctacaagcaaaattccatatactccttcaaaatgtcaagttcagctaaccaactgaagtagctctttattctctaaatattacaggccctttaaaaaagaatatagttttggccaggcgtggtgtgtcacgccaatactttgggaggctaaggtgggcggatcaccttaggtcgggagttagagatcagcctggccaacatggagaaaccccgtctctact

SEQ ID NO: 55708 - DNA, 513 bp, Homo sapiens
ctagtctcatgaccctcgtgcactgggatatttgacctgcgggacctcggagatccccctgcttcccccctccccccttccagctctctcgtgttctctttgcctcctccaggtgttggttctctcttaagaatccccaggatgaatatgactaagcatttcctctcgagtaaaacgttctggcacctttcttctcccgggggtcatgtttcttaggacattgacctgatgcttgattctttccttgttccagcttaaatttaagtgactaggtaaaatagtagcatgtgaatcccgttgatctctggtggcagatagagtggttttttggctgtcttaattcttttaaaactgtcagtccctttactgaagcacctgctaaagatcagcctggtgtaatttctatgaagaggagcctctctgtaggcaagtatgacaactttaccaatggaaattgttaacattaggatgaggcatgctgccacatggatcaggtgacatttatgtatgaga

SEQ ID NO: 55709 - DNA, 973 bp, Homo sapiens
taaatagggaaatgtgtttggtgcagagccaatgtcattccaaaaagctctctcttttcctggtcagtcatgtgctgggacagagaagggatctggattaggcaacatcatagagttgctctgagctgctctttggtgataacccttccaaatcctaaactttttggaattcacaagctcaaaggaggaaacctactctctgatctaccacatgttctgcatttttctatcatggtctatggaaacttctcttagaaatccagtggcaagaagttctatgattaaagtgttctgagctcaggccaggcagtcatgaactacttctgagttatttactactgatttgtggggcagcctcagctatcggtttcttcacacctgcttatgagagtatccatatttatggtcgcaggccagtaatgctccccacgagatcagtttctgaactaacctggaattttttatgggtttttattatgccaactattaaatcaacattacagttcttccctctgtatttctcctgtaaaacattaggcctgcaaaaaaaaaaaatctttttaaaaataattgccataaagtatttgctctgggcctactgtatgcttcttttctttttctctcttttcaactaagtcaccgtcaatttattaagatggccataactattcaaaacctatgctaagttcctcaaggcagggtcgcatagtgatgaaggttgggatggggctacggaagaaaccagaacaactctagtttatttaaaacctgtatttactgcccacttccccttagacttgaccatatgacccctcgctcccattctaagcataggggcaggctttatttttacaatggtaatagatatcacttgaggttttatcaaagagttgcggcgggtggtgaaagttcacaaccagattcaggttttgtttgtgccagattctaattttacatgtttcttttgccaaag

SEQ ID NO: 55710 - DNA, 977 bp, Homo sapiens
ggggcctcttcatggcctctgcattcagctgctgtcaccctccgcacaggccatggccaaaatttaattttcatagtggactctagtttttgagccttacttgctattattgaaataattttcttgtttctttttaaagatcttcggattatgcttcactgaccactgtaataagtttaaagttgagaaaatatggcttgttaatgaatgataggtcaattttagtatgttggtcattttaatattttgccaccagttggtttggatttgatgccaggaggagacagcctcatttctaaggactagtcttgcctttgtgggataagggtggtgtgttctgtgtccttctacatgtccgagcgatctctgtgcagctcaaatgtggtcactgtcttattgcgctgatttcctctccttccatctcacaattgaggcaaaatattgttactgttgaagtgttgtccaataggacttccagcagagacaggatgtctgcactgtctaatttagttgcctttagccacatgtggtgttctgtacctgaaatgtggctggtctgattggatagcttaatttataattttatttaattttaattaacttaaatttaaacagctctgtgtggatagtggctcctgtatgagacagtgcaggtctgttgagaagcagctttactggtgggagtggagggcttggagagggcacgtgggtttcctgctggtatcttttgaccttatttaatctgcccaacatttgcaagtaagttgtgtgtgtgtgtatatataaatgtgtgtttctgtcttcttgtttcctttgactgcatttatttgaaagacactaggtggcagaattactgtatttgattggtttcaagataagagttgaaataattcatctcgtgtttttatataagtaaggtgtgtttagcatgtaaaattggtaatatgtattcacgtactgcttaaacaaaggctatg

SEQ ID NO: 55711 - DNA, 271 bp, Homo sapiens
gctggagtttggggtggcgtggcagtggtacagcagtgggacacagtggagggaaggggagagggaaacggaggtaaatgagggaggtggctggggcatgggattcagggaggacggggtcaggagcccagagacctgggtctccatcctggcctggctacacactcactgtgtgatctcgggcaaatcactcaccttccttgagcctcagtttccccacctgtagaccaaagattggactgatggtctcggcagccccttccagcccaga

SEQ ID NO: 55712 - DNA, 2897 bp, Homo sapiens
gcagacacacacggacacacagagacaccagacacacatatacacatgcacacacagatgcacacacatgcacacacatgcacagagacacacagatgcacacctcccaaatgcaggaaaaaatatgcactaactaacatccaggcggccatgggcctctcggatccagctgcacagcccctgctgggaaatggctctgccaacatcaagctggtgaaaaatggggagaaccagctccgtaaggctgcagagcaagggcagcaggaccccaacaaaaacctgagccccactgcagtcatcaacataacttctgagaagttagagggtaaagagccccacccacaggattcctcgagctgtgagattttaccctcccagcccaggagaactaagagcttcctaaattactatgcagatctggaaacctcagccagagaactagagcagaaccgaggcaatcaccatgggactgcggaagagaaatcccagccagtccagggccaggcctccaccatcattgggaatggcgatttgctgctgcagaaaccaaacagaccccagtccagccctgaagacggccaagtagccacagtgtcatccagcccagaaaccaagaaggatcatccgaaaacaggggccaaaaccgactgtgcactgcaccggatccagaacctggcaccgagcgatgaggagtccagctggacaacgttgtcccaagacagtgcctcacccagctccccggatgaaacagatatatggagtgatcactcatttcagactgatccagatttgccgcctggctggaaaagagtcagtgacattgccgggacctattattggcacatcccaacaggaacgactcagtgggaacggcccgtctccatcccagcagatctccagggttctaggaaagggtcacttagttctgtaacgccatctcccaccccagagaacgagaaacagccatggagtgattttgctgttctgaatgggggaaagattaatagtgacatttggaaggatttgcatgcagccactgttaacccggaccccagtttaaaagagtttgaaggagcaaccctacgctatgcatctttgaaactcagaaatgccccacaccctgatgatgatgattcttgtagtatcaacagtgacccagaagccaagtgttttgctgtgcgttctctgggatgggtagagatggcagaagaggacctcgcccccggtaaaagtagtgttgcggtcaacaactgcatcaggcaactttcctactgcaaaaatgacatccgagacacagtcgggatttggggagaggggaaagacatgtacctgatcctggagaatgacatgctcagcctggtggaccccatggaccgcagcgtgctgcactcgcagcccatcgtcagcatccgcgtgtggggcgtgggccgcgacaatggccgagggattttgcttatgtagcaagagataaagatacaagaattttgaaatgtcatgtatttcgatgtgacacaccagcaaaagccattgccacaagtctccacgagatctgctccaagattatggctgaacggaagaatgccaaagcgctggcctgcagctccttacaggaaagggccaatgtgaacctcgatgtccctttgcaagtagattttccaacaccaaagactgagctggtccagaagttccacgtgcagtacttgggcatgttacctgtagacaaaccagtcggaatggatattttgaacagtgccatagaaaatcttatgacctcatccaacaaggaggactggctgtcagtgaacatgaacgtggctgatgccactgtgactgtcatcagtgaaaagaatgaagaggaagtcttagtggaatgtcgtgtgcgattcctgtccttcatgggtgttgggaaggacgtccacacatttgccttcatcatggacacggggaaccagcgctttgagtgccacgttttctggtgcgagcctaatgctggtaacgtgtctgaggcggtgcaggccgcctgcatgttacgatatcagaagtgcttggtagccaggccgccttctcagaaagttcgaccacctccaccgccagcagattcagtaaccagaagagtcacaaccaatgtaaaacgaggggtcttatccctcattgacactttgaaacagaaacgccctgtcaccgaaatgccatagctgcacatgcaaaaggactcggctatttacctgaagattgactagctacactaaagaaaatgaactccgccatccgaccttccatccagttgctgatgctttgtcttcagagaatttacccttaaccaagcagtgttagacaagcatgttctctcgtcttgccaccatcatgtgatatgaaaagaagcatgaataattttttttgctgtaagttacatcatgcgcagtggaaggtctttttcttattgtaaatattgtgaacattacttaacttcacacacacacagagaagagtgtggccccacccctcctagtgaactaacgctgcgtccttggaatgaatgatgcgtgagttagtttcactgtcttcttggctggacctgtcacaagcaacctttaagtcctacagcactttgccctgttttcaacattggagtaggcactgcatagcagataccattgaattgctgtaaaaataggatggcgagtttgtgttttaatttttcataaaattgaacctgttggttgacaaaattggctgttggcatcagtatagaaaccaactggcagctttccctgacaagctctttgacacatggacaccatttcatgtctacagctgtttgtgggatgttggaaaaaaatgaaacttcaaaattgatgaaaaactaaattcgaggaattaaaatcgaacaaaacata

SEQ ID NO: 55713 - DNA, 8957 bp, Homo sapiens
tggagaagtggaatctcgtcagcgccgctccctgcgcgggactcgcggaacggcactgagcatgctcagttgccggagcccgttctggtctcaagtaggaagctagtgcgctgtaaccgcatctgatctgggcgctccgggaagggcgagactggagcagagccgctgggcgccggagccgaggcgagcgccgcgcgcaccactggttggagttgctgtgggtgagctgctgtggtctgtagccaagcatgctgtggtcggatctgcccagccgtggaacagaaacatttgctggatggaaaatccataaaagaaagctcctgtgaaaagctgaggctgacaataatttaagcaaaatcagatcgatctctttgggctgcctgacctccttgggtgcttgctattaattaacagactttgtggggaaaaaaaggagcttgccttctgagctttgtaccaaagacctgggaaaactaaccatctcagtctttcctgaggacttgggaactgccgaggcctctgccaatgtgttgactgtcgctatgggctcactgttgtccaggcagctcatatttcaaattataacctatttcctgcaccattgctgacgcctggtgatccatgtcagaagtacttccagctgactcaggtgttgacaccttggcagtgtttatggccagcagcggaactacagacgtcacaaatcggaacagcccagccacaccaccaaacacccttaacctccgatcctcccacaatgaactgttgaacgctgaaataaaacacacagaaaccaagaacagcacacctcccaaatgcaggaaaaaatatgcactaactaacatccaggcggccatgggcctctcggatccagctgcacagcccctgctgggaaatggctctgccaacatcaagctggtgaaaaatggggagaaccagctccgtaaggctgcagagcaagggcagcaggaccccaacaaaaacctgagccccactgcagtcatcaacataacttctgagaagttagagggtaaagagccccacccacaggattcctcgagctgtgagattttaccctcccagcccaggagaactaagagcttcctaaattactatgcagatctggaaacctcagccagagaactagagcagaaccgaggcaatcaccatgggactgcggaagagaaatcccagccagtccagggccaggcctccaccatcattgggaatggcgatttgctgctgcagaaaccaaacagaccccagtccagccctgaagacggccaagtagccacagtgtcatccagcccagaaaccaagaaggatcatccgaaaacaggggccaaaaccgactgtgcactgcaccggatccagaacctggcaccgagcgatgaggagtccagctggacaacgttgtcccaagacagtgcctcacccagctccccggatgaaacagatatatggagtgatcactcatttcagactgatccagatttgccgcctggctggaaaagagtcagtgacattgccgggacctattattggcacatcccaacaggaacgactcagtgggaacggcccgtctccatcccagcagatctccagggttctaggaaagggtcacttagttctgtaacgccatctcccaccccagagaacgagaaacagccatggagtgattttgctgttctgaatgggggaaagattaatagtgacatttggaaggatttgcatgcagccactgttaacccggaccccagtttaaaagagtttgaaggagcaaccctacgctatgcatctttgaaactcagaaatgccccacaccctgatgatgatgattcttgtagtatcaacagtgacccagaagccaagtgttttgctgtgcgttctctgggatgggtagagatggcagaagaggacctcgcccccggtaaaagtagtgttgcggtcaacaactgcatcaggcaactttcctactgcaaaaatgacatccgagacacagtcgggatttggggagaggggaaagacatgtacctgatcctggagaatgacatgctcagcctggtggaccccatggaccgcagcgtgctgcactcgcagcccatcgtcagcatccgcgtgtggggcgtgggccgcgacaatggccgagggattttgcttatgtagcaagagataaagatacaagaattttgaaatgtcatgtatttcgatgtgacacaccagcaaaagccattgccacaagtctccacgagatctgctccaagattatggctgaacggaagaatgccaaagcgctggcctgcagctccttacaggaaagggccaatgtgaacctcgatgtccctttgcaagtagattttccaacaccaaagactgagctggtccagaagttccacgtgcagtacttgggcatgttacctgtagacaaaccagtcggaatggatattttgaacagtgccatagaaaatcttatgacctcatccaacaaggaggactggctgtcagtgaacatgaacgtggctgatgccactgtgactgtcatcagtgaaaagaatgaagaggaagtcttagtggaatgtcgtgtgcgattcctgtccttcatgggtgttgggaaggacgtccacacatttgccttcatcatggacacggggaaccagcgctttgagtgccacgttttctggtgcgagcctaatgctggtaacgtgtctgaggcggtgcaggccgcctgcatgttacgatatcagaagtgcttggtagccaggccgccttctcagaaagttcgaccacctccaccgccagcagattcagtaaccagaagagtcacaaccaatgtaaaacgaggggtcttatccctcattgacactttgaaacagaaacgccctgtcaccgaaatgccatagctgcacatgcaaaaggactcggctatttacctgaagattgactagctacactaaagaaaatgaactccgccatccgaccttccatccagttgctgatgctttgtcttcagagaatttacccttaaccaagcagtgttagacaagcatgttctctcgtcttgccaccatcatgtgatatgaaaagaagcatgaataattttttttgctgtaagttacatcatgcgcagtggaaggtctttttcttattgtaaatattgtgaacattacttaacttcacacacacacagagaagagtgtggccccacccctcctagtgaactaacgctgcgtccttggaatgaatgatgcgtgagttagtttcactgtcttcttggctggacctgtcacaagcaacctttaagtcctacagcactttgccctgttttcaacattggagtaggcactgcatagcagataccattgaattgctgtaaaaataggatggcgagtttgtgttttaatttttcataaaattgaacctgttggttgacaaaattggctgttggcatcagtatagaaaccaactggcagctttccctgacaagctctttgacacatggacaccatttcatgtctacagctgtttgtgggatgttggaaaaaaatgaaacttcaaaattgatgaaaaactaaattcgaggaattaaaatcgaacaaaacatagcctttcttttccgatggttttcaaactgattatttttaaaagagattaataaaatcataatgcattttgggtgggacatatttcaaacttctgccttatattgtacggtgcagctagagaattatagttcactatggccattctctacataaacattaagatgaaatactcctcatcagcctttcatccttagtttgagaattagctgatatgcaatttgaagttgaggaaatatcattgatatttctatcatgcacgattattttagatttctaccaccgtgtgatttttgctagtccatgtgctagaggtaaacgttctgctggaattctgcatccagctctatccccctctgatgctttttgcccagaaagctgtctgtccatcatgtattgtccatggcaacaaattacattaggttgaacctttccttgattttatgtatttaatattagaatttgttggactcaactagatatattttttaatttatattttttccattttactttgaagatttgaaatgttcatacctgagcaaagtctacacaggagtaatggactgtttaacaagtttcccaaaacagcattttcctgctccttcgtatgtaggtgagaaacttagctggaaagacatacaaatttagactctcgttgacattgtcgttttaaaaggaagttgctaaggcgatcaatctcaatattagtcttgtttacttcttcttaatgtcaaaattaacatttacaacatccaattataaaagtaatgctttatgtttatacactgctatgtacttgtcaaaatggtttccacattcttatcacatctgagccttaccaggtagagaaggtactaaatacactttagaagtaaaaatatgaagtaccgagaggctaaacccactggcctaagatctcaccaaagttcatgaaaaccaggactaggacccacggctcccaaagcccgttcttgctgtgttgtgctgcctccatatccgtcaggaagagcctttccagaatgattctgggcatatactaagaagagcaggtatggaaagatctattgtcagggaatcttagaattccctacacgagtgggagaaagatgtccaaattccttacgcagtggtattcatgatggtgccctatctaagtccaggactgttttcctacagcgtgcctcaaaagtgttgtagagggcaggattctacattcacagcctgttccatctacgagattttccagatgctacttgtggtagacattcctaactcatggtacttagccaccagagatcatgatggaatgagtgggtggcttttctacctgccattccctcagaattcatgaggggtgggggacagggggaccggaattgtcttagcaccccaatgttatgacaaaactatgctactttagaaacgcagtctgtttttcaccaattgacatactactgatctgaagtaaccagtgccatcataagaaattactgcattaagaaaatccttgctgtgccctttgaaaagctgttcagaaatcatttacagtgatctttcatctcggtcgctgtagtgaaacattttagtgtgataaatttcaaaattctaaacaaattacccacttttatattggaaatctctaccagaactccctcttcattttttaaggcatacatttgcttgttttcaagatcaagaattctgagctagctttaagtagcaaactgatttatatgtgcaattataggatgcattaagatgaatgatagcctttacatattgaaaactttgcagacgttttgttttgaaaatggcattgtatagtaaatgcaaattaattttgtaaaattatgttaaagagtatgttcagacactttctgccatggccaaaaagtatgtatgaaagtatgtgtgtatttgtttgtaaaaggatgccaatgttttacctgatatcttagtgacacttcagttatctatgcattctttagatctgtgattcggtaaacaggcagccatgttcacgatgccttctatgtcttaccatatttttaattaacctgttaaatacagcttaaaatatttttattttatttattctatttttactgaaatatactgcattattgtgttaatgtattatctttcctggatattatctcccagtgtatccagatctaagtaatctcagtgaactatacattgcctaaaaagtggttttgtaatgatttgtagtcacatttctattgggatatgtagaagaaaaggcaaaatgcttaaagttccttttattttttaaaagcagctagatagacacagacttgccacctcatacatctgctccttggcaacatcaaggggaacgactagccaacatgcctatggctaaaaactttcctttgcagactaaagcactgcttggtgcttcgtttttctacccttcacaacatgtgtgatttcatctaagagatatatacatgtacacatgccctttgtttccacctggatacaagatcactcatagctaattaggaccattgttttttgttcatctgtcttgttgcatgaagggacattagacccatttccattaaaataagttcttggtgataaactgtggcactgctacttctttttaaatccactttatgatttcaagatggacacttgtaagatgactcgacacaaggccattgcctggaagccccagagctttcctctgtttgtatggcccgttcatgtcccaggcattgcaacacaaactcaagatttcaccacaacatgacaagcattttcctaactgatattagcacaatttaactaataagccccttcgctctctagttggccaggcttaacctaatacacatctaacgtgtgtgccacacggccagtagaaagtttaacttcagcttcagggcaaagatacccactcacaccgtgtcaacgcaagcagtagttcctggcctccagagcagcttacttcccctgaaagaacgctttgttttcctttatgcccttttcctgttgaccacttttacacatttaaatgtaatttgttgtgagaataaatttagctgcataaaacgttcggctcatttatctgacatcttagtcacatatacaaggaatagaaatagaaactcggtgtctctagttatttttaaattattcttacctcagacttcttagaaatcactttagtaatggagcattttgctttgattagttactacatatttctgcctggtaagaactaggaagtaacttcaaattttgagtaatcaccctgtacttatttggtgatcaggaaggccagctggccttccggacatagaagcctatttagtcaccaactcgagtcttttgtaagcggtcttgctaggattgtgatattttagcacgaagaagtttatcacttcctttaagaacctgacatcaaagaataaagaatagaggtgtacacacactaaatccaaaatgaaaggtaactagagaaatcagttgaatctggtttagcttaactgttaggcgcaggaaggcagataaacagaatttaaagtatgtccccgctttttgttcatcttgcacttccacagtggtttctctctagtcagtaacaaaatttcattatggtttcaggcattatatggtggtaaataatttcagattaaaaatgtgtttgctattggagtatctgaatactagtaatttcattatttagaattttgcagcacttttatctcaagaagaagtccaagaatgtaaaatgccaaatgaaacatgtcagtggaatcaatattctccttcattagaattccctcatattgctttttttttttttcttcagacagaggagtcttactctggagtgcagtggtgtaatttcagctcaccacaacctccacctcccaagttcaagcaattctcgcctcagcctcctgagtagctgggattacaggcatgcaccgccacgcctggccaatttgtatatttttagtagagacagggtttcgccacgttggccaggctggtctcgaactcctgacctcaggtgatccgcccgccccaacctcccaaagtatgtgagccaccacgtccggcctcatattgcttttatccaaaattcttttcccttttcactctaccaaagtatttaaataatcctgtccttcatagaagattctcaaagaagaaaactgcagtgtaattaatgaatggtttaattcagaatcttcatatacttctaaagagaaaaataatttagtgccaaatgcatgttaggagataatcaatgtaagtggcaacaaattgtgacttcacatgctactgtagagatcagaaaattatcctaaactattccataacaatgagacaacatcacagaaaatacacttgaaaataaaaatctcaagaccagctacttctggacaatggaatacttttcagtctggtatggtggagggcccgaaaaggataagggattcttatgatacacaatgggattctttactgaacaatatgttaaattaagctgcaccgccttccttgaggcatggactaccctaaccaaccagatagaaatctgggtgggataagaggatgagccacacgctataattttagggcaaggagatagtgtttgattttcaaaatcagcaaaataagctgagcactttatatctttctgtacaagagtgataacatgaagaattcttcttcagggatttaaaatacaataagcctggttcaactataaaaagtcttgtttcctttcttcattgacacttttttttttttttttttttgaggcaaggtctcactctgcttcccaggctggagtgcagtggggcaatattggctcactgcaacctgcacctcctggactcaagagatcctcgtacctcagcctcctaagtagctgggactacaggcgtgtcccaccacacccagctaatttttgtattttttgtagagatggggttttggggtttcgccatgttgtccaggctcgtctggaactccggtgctcaagtggcgtgcccacctcagcctcccaaactgctgagattacagatgtgagccactgcacccagcccactgacacgttttactgataaatgtaaatctaagctaaaataaaaataatgtattaccgctataatacaattcaccattctcttttctcacttcaagtaagaaagtaaaaatagaatatcagagctgaagtagacctaagtattcatcttgaagaagataatattctaaaaatcatgccacctgaattgagcatttaggaatttatgtaacatttctatacaactgaattgcaaaaataaaactttaaattcaaacttt

SEQ ID NO: 55714 - DNA, 8703 bp, Homo sapiens
tggagaagtggaatctcgtcagcgccgctccctgcgcgggactcgcggaacggcactgagcatgctcagttgccggagcccgttctggtctcaagtaggaagctagtgcgctgtaaccgcatctgatctgggcgctccgggaagggcgagactggagcagagccgctgggcgccggagccgaggcgagcgccgcgcgcaccactgatcgatctctttgggctgcctgacctccttgggtgcttgctattaattaacagactttgtggggaaaaaaaggagcttgccttctgagctttgtaccaaagacctgggaaaaatttcaaattataacctatttcctgcaccattgctgacgcctggtgatccatgtcagaagtacttccagctgactcaggtgttgacaccttggcagtgtttatggccagcagcggaactacagacgtcacaaatcggaacagcccagccacaccaccaaacacccttaacctccgatcctcccacaatgaactgttgaacgctgaaataaaacacacagaaaccaagaacagcacacctcccaaatgcaggaaaaaatatgcactaactaacatccaggcggccatgggcctctcggatccagctgcacagcccctgctgggaaatggctctgccaacatcaagctggtgaaaaatggggagaaccagctccgtaaggctgcagagcaagggcagcaggaccccaacaaaaacctgagccccactgcagtcatcaacataacttctgagaagttagagggtaaagagccccacccacaggattcctcgagctgtgagattttaccctcccagcccaggagaactaagagcttcctaaattactatgcagatctggaaacctcagccagagaactagagcagaaccgaggcaatcaccatgggactgcggaagagaaatcccagccagtccagggccaggcctccaccatcattgggaatggcgatttgctgctgcagaaaccaaacagaccccagtccagccctgaagacggccaagtagccacagtgtcatccagcccagaaaccaagaaggatcatccgaaaacaggggccaaaaccgactgtgcactgcaccggatccagaacctggcaccgagcgatgaggagtccagctggacaacgttgtcccaagacagtgcctcacccagctccccggatgaaacagatatatggagtgatcactcatttcagactgatccagatttgccgcctggctggaaaagagtcagtgacattgccgggacctattattggcacatcccaacaggaacgactcagtgggaacggcccgtctccatcccagcagatctccagggttctaggaaagggtcacttagttctgtaacgccatctcccaccccagagaacgagaaacagccatggagtgattttgctgttctgaatgggggaaagattaatagtgacatttggaaggatttgcatgcagccactgttaacccggaccccagtttaaaagagtttgaaggagcaaccctacgctatgcatctttgaaactcagaaatgccccacaccctgatgatgatgattcttgtagtatcaacagtgacccagaagccaagtgttttgctgtgcgttctctgggatgggtagagatggcagaagaggacctcgcccccggtaaaagtagtgttgcggtcaacaactgcatcaggcaactttcctactgcaaaaatgacatccgagacacagtcgggatttggggagaggggaaagacatgtacctgatcctggagaatgacatgctcagcctggtggaccccatggaccgcagcgtgctgcactcgcagcccatcgtcagcatccgcgtgtggggcgtgggccgcgacaatggccgagggattttgcttatgtagcaagagataaagatacaagaattttgaaatgtcatgtatttcgatgtgacacaccagcaaaagccattgccacaagtctccacgagatctgctccaagattatggctgaacggaagaatgccaaagcgctggcctgcagctccttacaggaaagggccaatgtgaacctcgatgtccctttgcaagtagattttccaacaccaaagactgagctggtccagaagttccacgtgcagtacttgggcatgttacctgtagacaaaccagtcggaatggatattttgaacagtgccatagaaaatcttatgacctcatccaacaaggaggactggctgtcagtgaacatgaacgtggctgatgccactgtgactgtcatcagtgaaaagaatgaagaggaagtcttagtggaatgtcgtgtgcgattcctgtccttcatgggtgttgggaaggacgtccacacatttgccttcatcatggacacggggaaccagcgctttgagtgccacgttttctggtgcgagcctaatgctggtaacgtgtctgaggcggtgcaggccgcctgcatgttacgatatcagaagtgcttggtagccaggccgccttctcagaaagttcgaccacctccaccgccagcagattcagtaaccagaagagtcacaaccaatgtaaaacgaggggtcttatccctcattgacactttgaaacagaaacgccctgtcaccgaaatgccatagctgcacatgcaaaaggactcggctatttacctgaagattgactagctacactaaagaaaatgaactccgccatccgaccttccatccagttgctgatgctttgtcttcagagaatttacccttaaccaagcagtgttagacaagcatgttctctcgtcttgccaccatcatgtgatatgaaaagaagcatgaataattttttttgctgtaagttacatcatgcgcagtggaaggtctttttcttattgtaaatattgtgaacattacttaacttcacacacacacagagaagagtgtggccccacccctcctagtgaactaacgctgcgtccttggaatgaatgatgcgtgagttagtttcactgtcttcttggctggacctgtcacaagcaacctttaagtcctacagcactttgccctgttttcaacattggagtaggcactgcatagcagataccattgaattgctgtaaaaataggatggcgagtttgtgttttaatttttcataaaattgaacctgttggttgacaaaattggctgttggcatcagtatagaaaccaactggcagctttccctgacaagctctttgacacatggacaccatttcatgtctacagctgtttgtgggatgttggaaaaaaatgaaacttcaaaattgatgaaaaactaaattcgaggaattaaaatcgaacaaaacatagcctttcttttccgatggttttcaaactgattatttttaaaagagattaataaaatcataatgcattttgggtgggacatatttcaaacttctgccttatattgtacggtgcagctagagaattatagttcactatggccattctctacataaacattaagatgaaatactcctcatcagcctttcatccttagtttgagaattagctgatatgcaatttgaagttgaggaaatatcattgatatttctatcatgcacgattattttagatttctaccaccgtgtgatttttgctagtccatgtgctagaggtaaacgttctgctggaattctgcatccagctctatccccctctgatgctttttgcccagaaagctgtctgtccatcatgtattgtccatggcaacaaattacattaggttgaacctttccttgattttatgtatttaatattagaatttgttggactcaactagatatattttttaatttatattttttccattttactttgaagatttgaaatgttcatacctgagcaaagtctacacaggagtaatggactgtttaacaagtttcccaaaacagcattttcctgctccttcgtatgtaggtgagaaacttagctggaaagacatacaaatttagactctcgttgacattgtcgttttaaaaggaagttgctaaggcgatcaatctcaatattagtcttgtttacttcttcttaatgtcaaaattaacatttacaacatccaattataaaagtaatgctttatgtttatacactgctatgtacttgtcaaaatggtttccacattcttatcacatctgagccttaccaggtagagaaggtactaaatacactttagaagtaaaaatatgaagtaccgagaggctaaacccactggcctaagatctcaccaaagttcatgaaaaccaggactaggacccacggctcccaaagcccgttcttgctgtgttgtgctgcctccatatccgtcaggaagagcctttccagaatgattctgggcatatactaagaagagcaggtatggaaagatctattgtcagggaatcttagaattccctacacgagtgggagaaagatgtccaaattccttacgcagtggtattcatgatggtgccctatctaagtccaggactgttttcctacagcgtgcctcaaaagtgttgtagagggcaggattctacattcacagcctgttccatctacgagattttccagatgctacttgtggtagacattcctaactcatggtacttagccaccagagatcatgatggaatgagtgggtggcttttctacctgccattccctcagaattcatgaggggtgggggacagggggaccggaattgtcttagcaccccaatgttatgacaaaactatgctactttagaaacgcagtctgtttttcaccaattgacatactactgatctgaagtaaccagtgccatcataagaaattactgcattaagaaaatccttgctgtgccctttgaaaagctgttcagaaatcatttacagtgatctttcatctcggtcgctgtagtgaaacattttagtgtgataaatttcaaaattctaaacaaattacccacttttatattggaaatctctaccagaactccctcttcattttttaaggcatacatttgcttgttttcaagatcaagaattctgagctagctttaagtagcaaactgatttatatgtgcaattataggatgcattaagatgaatgatagcctttacatattgaaaactttgcagacgttttgttttgaaaatggcattgtatagtaaatgcaaattaattttgtaaaattatgttaaagagtatgttcagacactttctgccatggccaaaaagtatgtatgaaagtatgtgtgtatttgtttgtaaaaggatgccaatgttttacctgatatcttagtgacacttcagttatctatgcattctttagatctgtgattcggtaaacaggcagccatgttcacgatgccttctatgtcttaccatatttttaattaacctgttaaatacagcttaaaatatttttattttatttattctatttttactgaaatatactgcattattgtgttaatgtattatctttcctggatattatctcccagtgtatccagatctaagtaatctcagtgaactatacattgcctaaaaagtggttttgtaatgatttgtagtcacatttctattgggatatgtagaagaaaaggcaaaatgcttaaagttccttttattttttaaaagcagctagatagacacagacttgccacctcatacatctgctccttggcaacatcaaggggaacgactagccaacatgcctatggctaaaaactttcctttgcagactaaagcactgcttggtgcttcgtttttctacccttcacaacatgtgtgatttcatctaagagatatatacatgtacacatgccctttgtttccacctggatacaagatcactcatagctaattaggaccattgttttttgttcatctgtcttgttgcatgaagggacattagacccatttccattaaaataagttcttggtgataaactgtggcactgctacttctttttaaatccactttatgatttcaagatggacacttgtaagatgactcgacacaaggccattgcctggaagccccagagctttcctctgtttgtatggcccgttcatgtcccaggcattgcaacacaaactcaagatttcaccacaacatgacaagcattttcctaactgatattagcacaatttaactaataagccccttcgctctctagttggccaggcttaacctaatacacatctaacgtgtgtgccacacggccagtagaaagtttaacttcagcttcagggcaaagatacccactcacaccgtgtcaacgcaagcagtagttcctggcctccagagcagcttacttcccctgaaagaacgctttgttttcctttatgcccttttcctgttgaccacttttacacatttaaatgtaatttgttgtgagaataaatttagctgcataaaacgttcggctcatttatctgacatcttagtcacatatacaaggaatagaaatagaaactcggtgtctctagttatttttaaattattcttacctcagacttcttagaaatcactttagtaatggagcattttgctttgattagttactacatatttctgcctggtaagaactaggaagtaacttcaaattttgagtaatcaccctgtacttatttggtgatcaggaaggccagctggccttccggacatagaagcctatttagtcaccaactcgagtcttttgtaagcggtcttgctaggattgtgatattttagcacgaagaagtttatcacttcctttaagaacctgacatcaaagaataaagaatagaggtgtacacacactaaatccaaaatgaaaggtaactagagaaatcagttgaatctggtttagcttaactgttaggcgcaggaaggcagataaacagaatttaaagtatgtccccgctttttgttcatcttgcacttccacagtggtttctctctagtcagtaacaaaatttcattatggtttcaggcattatatggtggtaaataatttcagattaaaaatgtgtttgctattggagtatctgaatactagtaatttcattatttagaattttgcagcacttttatctcaagaagaagtccaagaatgtaaaatgccaaatgaaacatgtcagtggaatcaatattctccttcattagaattccctcatattgctttttttttttttcttcagacagaggagtcttactctggagtgcagtggtgtaatttcagctcaccacaacctccacctcccaagttcaagcaattctcgcctcagcctcctgagtagctgggattacaggcatgcaccgccacgcctggccaatttgtatatttttagtagagacagggtttcgccacgttggccaggctggtctcgaactcctgacctcaggtgatccgcccgccccaacctcccaaagtatgtgagccaccacgtccggcctcatattgcttttatccaaaattcttttcccttttcactctaccaaagtatttaaataatcctgtccttcatagaagattctcaaagaagaaaactgcagtgtaattaatgaatggtttaattcagaatcttcatatacttctaaagagaaaaataatttagtgccaaatgcatgttaggagataatcaatgtaagtggcaacaaattgtgacttcacatgctactgtagagatcagaaaattatcctaaactattccataacaatgagacaacatcacagaaaatacacttgaaaataaaaatctcaagaccagctacttctggacaatggaatacttttcagtctggtatggtggagggcccgaaaaggataagggattcttatgatacacaatgggattctttactgaacaatatgttaaattaagctgcaccgccttccttgaggcatggactaccctaaccaaccagatagaaatctgggtgggataagaggatgagccacacgctataattttagggcaaggagatagtgtttgattttcaaaatcagcaaaataagctgagcactttatatctttctgtacaagagtgataacatgaagaattcttcttcagggatttaaaatacaataagcctggttcaactataaaaagtcttgtttcctttcttcattgacacttttttttttttttttttttgaggcaaggtctcactctgcttcccaggctggagtgcagtggggcaatattggctcactgcaacctgcacctcctggactcaagagatcctcgtacctcagcctcctaagtagctgggactacaggcgtgtcccaccacacccagctaatttttgtattttttgtagagatggggttttggggtttcgccatgttgtccaggctcgtctggaactccggtgctcaagtggcgtgcccacctcagcctcccaaactgctgagattacagatgtgagccactgcacccagcccactgacacgttttactgataaatgtaaatctaagctaaaataaaaataatgtattaccgctataatacaattcaccattctcttttctcacttcaagtaagaaagtaaaaatagaatatcagagctgaagtagacctaagtattcatcttgaagaagataatattctaaaaatcatgccacctgaattgagcatttaggaatttatgtaacatttctatacaactgaattgcaaaaataaaactttaaattcaaacttt

SEQ ID NO: 55715 - DNA, 8859 bp, Homo sapiens
tggagaagtggaatctcgtcagcgccgctccctgcgcgggactcgcggaacggcactgagcatgctcagttgccggagcccgttctggtctcaagtaggaagctagtgcgctgtaaccgcatctgatctgggcgctccgggaagggcgagactggagcagagccgctgggcgccggagccgaggcgagcgccgcgcgcaccactggttggagttgctgtgggtgagctgctgtggtctgtagccaagcatgctgtggtcggatctgcccagccgtggaacagaaacatttgctggatggaaaatccataaaagaaagctcctgtgaaaagctgaggctgacaataatttaagcaaaatcagatcgatctctttgggctgcctgacctccttgggtgcttgctattaattaacagactttgtggggaaaaaaaggagcttgccttctgagctttgtaccaaagacctgggaaaaatttcaaattataacctatttcctgcaccattgctgacgcctggtgatccatgtcagaagtacttccagctgactcaggtgttgacaccttggcagtgtttatggccagcagcggaactacagacgtcacaaatcggaacagcccagccacaccaccaaacacccttaacctccgatcctcccacaatgaactgttgaacgctgaaataaaacacacagaaaccaagaacagcacacctcccaaatgcaggaaaaaatatgcactaactaacatccaggcggccatgggcctctcggatccagctgcacagcccctgctgggaaatggctctgccaacatcaagctggtgaaaaatggggagaaccagctccgtaaggctgcagagcaagggcagcaggaccccaacaaaaacctgagccccactgcagtcatcaacataacttctgagaagttagagggtaaagagccccacccacaggattcctcgagctgtgagattttaccctcccagcccaggagaactaagagcttcctaaattactatgcagatctggaaacctcagccagagaactagagcagaaccgaggcaatcaccatgggactgcggaagagaaatcccagccagtccagggccaggcctccaccatcattgggaatggcgatttgctgctgcagaaaccaaacagaccccagtccagccctgaagacggccaagtagccacagtgtcatccagcccagaaaccaagaaggatcatccgaaaacaggggccaaaaccgactgtgcactgcaccggatccagaacctggcaccgagcgatgaggagtccagctggacaacgttgtcccaagacagtgcctcacccagctccccggatgaaacagatatatggagtgatcactcatttcagactgatccagatttgccgcctggctggaaaagagtcagtgacattgccgggacctattattggcacatcccaacaggaacgactcagtgggaacggcccgtctccatcccagcagatctccagggttctaggaaagggtcacttagttctgtaacgccatctcccaccccagagaacgagaaacagccatggagtgattttgctgttctgaatgggggaaagattaatagtgacatttggaaggatttgcatgcagccactgttaacccggaccccagtttaaaagagtttgaaggagcaaccctacgctatgcatctttgaaactcagaaatgccccacaccctgatgatgatgattcttgtagtatcaacagtgacccagaagccaagtgttttgctgtgcgttctctgggatgggtagagatggcagaagaggacctcgcccccggtaaaagtagtgttgcggtcaacaactgcatcaggcaactttcctactgcaaaaatgacatccgagacacagtcgggatttggggagaggggaaagacatgtacctgatcctggagaatgacatgctcagcctggtggaccccatggaccgcagcgtgctgcactcgcagcccatcgtcagcatccgcgtgtggggcgtgggccgcgacaatggccgagggattttgcttatgtagcaagagataaagatacaagaattttgaaatgtcatgtatttcgatgtgacacaccagcaaaagccattgccacaagtctccacgagatctgctccaagattatggctgaacggaagaatgccaaagcgctggcctgcagctccttacaggaaagggccaatgtgaacctcgatgtccctttgcaagtagattttccaacaccaaagactgagctggtccagaagttccacgtgcagtacttgggcatgttacctgtagacaaaccagtcggaatggatattttgaacagtgccatagaaaatcttatgacctcatccaacaaggaggactggctgtcagtgaacatgaacgtggctgatgccactgtgactgtcatcagtgaaaagaatgaagaggaagtcttagtggaatgtcgtgtgcgattcctgtccttcatgggtgttgggaaggacgtccacacatttgccttcatcatggacacggggaaccagcgctttgagtgccacgttttctggtgcgagcctaatgctggtaacgtgtctgaggcggtgcaggccgcctgcatgttacgatatcagaagtgcttggtagccaggccgccttctcagaaagttcgaccacctccaccgccagcagattcagtaaccagaagagtcacaaccaatgtaaaacgaggggtcttatccctcattgacactttgaaacagaaacgccctgtcaccgaaatgccatagctgcacatgcaaaaggactcggctatttacctgaagattgactagctacactaaagaaaatgaactccgccatccgaccttccatccagttgctgatgctttgtcttcagagaatttacccttaaccaagcagtgttagacaagcatgttctctcgtcttgccaccatcatgtgatatgaaaagaagcatgaataattttttttgctgtaagttacatcatgcgcagtggaaggtctttttcttattgtaaatattgtgaacattacttaacttcacacacacacagagaagagtgtggccccacccctcctagtgaactaacgctgcgtccttggaatgaatgatgcgtgagttagtttcactgtcttcttggctggacctgtcacaagcaacctttaagtcctacagcactttgccctgttttcaacattggagtaggcactgcatagcagataccattgaattgctgtaaaaataggatggcgagtttgtgttttaatttttcataaaattgaacctgttggttgacaaaattggctgttggcatcagtatagaaaccaactggcagctttccctgacaagctctttgacacatggacaccatttcatgtctacagctgtttgtgggatgttggaaaaaaatgaaacttcaaaattgatgaaaaactaaattcgaggaattaaaatcgaacaaaacatagcctttcttttccgatggttttcaaactgattatttttaaaagagattaataaaatcataatgcattttgggtgggacatatttcaaacttctgccttatattgtacggtgcagctagagaattatagttcactatggccattctctacataaacattaagatgaaatactcctcatcagcctttcatccttagtttgagaattagctgatatgcaatttgaagttgaggaaatatcattgatatttctatcatgcacgattattttagatttctaccaccgtgtgatttttgctagtccatgtgctagaggtaaacgttctgctggaattctgcatccagctctatccccctctgatgctttttgcccagaaagctgtctgtccatcatgtattgtccatggcaacaaattacattaggttgaacctttccttgattttatgtatttaatattagaatttgttggactcaactagatatattttttaatttatattttttccattttactttgaagatttgaaatgttcatacctgagcaaagtctacacaggagtaatggactgtttaacaagtttcccaaaacagcattttcctgctccttcgtatgtaggtgagaaacttagctggaaagacatacaaatttagactctcgttgacattgtcgttttaaaaggaagttgctaaggcgatcaatctcaatattagtcttgtttacttcttcttaatgtcaaaattaacatttacaacatccaattataaaagtaatgctttatgtttatacactgctatgtacttgtcaaaatggtttccacattcttatcacatctgagccttaccaggtagagaaggtactaaatacactttagaagtaaaaatatgaagtaccgagaggctaaacccactggcctaagatctcaccaaagttcatgaaaaccaggactaggacccacggctcccaaagcccgttcttgctgtgttgtgctgcctccatatccgtcaggaagagcctttccagaatgattctgggcatatactaagaagagcaggtatggaaagatctattgtcagggaatcttagaattccctacacgagtgggagaaagatgtccaaattccttacgcagtggtattcatgatggtgccctatctaagtccaggactgttttcctacagcgtgcctcaaaagtgttgtagagggcaggattctacattcacagcctgttccatctacgagattttccagatgctacttgtggtagacattcctaactcatggtacttagccaccagagatcatgatggaatgagtgggtggcttttctacctgccattccctcagaattcatgaggggtgggggacagggggaccggaattgtcttagcaccccaatgttatgacaaaactatgctactttagaaacgcagtctgtttttcaccaattgacatactactgatctgaagtaaccagtgccatcataagaaattactgcattaagaaaatccttgctgtgccctttgaaaagctgttcagaaatcatttacagtgatctttcatctcggtcgctgtagtgaaacattttagtgtgataaatttcaaaattctaaacaaattacccacttttatattggaaatctctaccagaactccctcttcattttttaaggcatacatttgcttgttttcaagatcaagaattctgagctagctttaagtagcaaactgatttatatgtgcaattataggatgcattaagatgaatgatagcctttacatattgaaaactttgcagacgttttgttttgaaaatggcattgtatagtaaatgcaaattaattttgtaaaattatgttaaagagtatgttcagacactttctgccatggccaaaaagtatgtatgaaagtatgtgtgtatttgtttgtaaaaggatgccaatgttttacctgatatcttagtgacacttcagttatctatgcattctttagatctgtgattcggtaaacaggcagccatgttcacgatgccttctatgtcttaccatatttttaattaacctgttaaatacagcttaaaatatttttattttatttattctatttttactgaaatatactgcattattgtgttaatgtattatctttcctggatattatctcccagtgtatccagatctaagtaatctcagtgaactatacattgcctaaaaagtggttttgtaatgatttgtagtcacatttctattgggatatgtagaagaaaaggcaaaatgcttaaagttccttttattttttaaaagcagctagatagacacagacttgccacctcatacatctgctccttggcaacatcaaggggaacgactagccaacatgcctatggctaaaaactttcctttgcagactaaagcactgcttggtgcttcgtttttctacccttcacaacatgtgtgatttcatctaagagatatatacatgtacacatgccctttgtttccacctggatacaagatcactcatagctaattaggaccattgttttttgttcatctgtcttgttgcatgaagggacattagacccatttccattaaaataagttcttggtgataaactgtggcactgctacttctttttaaatccactttatgatttcaagatggacacttgtaagatgactcgacacaaggccattgcctggaagccccagagctttcctctgtttgtatggcccgttcatgtcccaggcattgcaacacaaactcaagatttcaccacaacatgacaagcattttcctaactgatattagcacaatttaactaataagccccttcgctctctagttggccaggcttaacctaatacacatctaacgtgtgtgccacacggccagtagaaagtttaacttcagcttcagggcaaagatacccactcacaccgtgtcaacgcaagcagtagttcctggcctccagagcagcttacttcccctgaaagaacgctttgttttcctttatgcccttttcctgttgaccacttttacacatttaaatgtaatttgttgtgagaataaatttagctgcataaaacgttcggctcatttatctgacatcttagtcacatatacaaggaatagaaatagaaactcggtgtctctagttatttttaaattattcttacctcagacttcttagaaatcactttagtaatggagcattttgctttgattagttactacatatttctgcctggtaagaactaggaagtaacttcaaattttgagtaatcaccctgtacttatttggtgatcaggaaggccagctggccttccggacatagaagcctatttagtcaccaactcgagtcttttgtaagcggtcttgctaggattgtgatattttagcacgaagaagtttatcacttcctttaagaacctgacatcaaagaataaagaatagaggtgtacacacactaaatccaaaatgaaaggtaactagagaaatcagttgaatctggtttagcttaactgttaggcgcaggaaggcagataaacagaatttaaagtatgtccccgctttttgttcatcttgcacttccacagtggtttctctctagtcagtaacaaaatttcattatggtttcaggcattatatggtggtaaataatttcagattaaaaatgtgtttgctattggagtatctgaatactagtaatttcattatttagaattttgcagcacttttatctcaagaagaagtccaagaatgtaaaatgccaaatgaaacatgtcagtggaatcaatattctccttcattagaattccctcatattgctttttttttttttcttcagacagaggagtcttactctggagtgcagtggtgtaatttcagctcaccacaacctccacctcccaagttcaagcaattctcgcctcagcctcctgagtagctgggattacaggcatgcaccgccacgcctggccaatttgtatatttttagtagagacagggtttcgccacgttggccaggctggtctcgaactcctgacctcaggtgatccgcccgccccaacctcccaaagtatgtgagccaccacgtccggcctcatattgcttttatccaaaattcttttcccttttcactctaccaaagtatttaaataatcctgtccttcatagaagattctcaaagaagaaaactgcagtgtaattaatgaatggtttaattcagaatcttcatatacttctaaagagaaaaataatttagtgccaaatgcatgttaggagataatcaatgtaagtggcaacaaattgtgacttcacatgctactgtagagatcagaaaattatcctaaactattccataacaatgagacaacatcacagaaaatacacttgaaaataaaaatctcaagaccagctacttctggacaatggaatacttttcagtctggtatggtggagggcccgaaaaggataagggattcttatgatacacaatgggattctttactgaacaatatgttaaattaagctgcaccgccttccttgaggcatggactaccctaaccaaccagatagaaatctgggtgggataagaggatgagccacacgctataattttagggcaaggagatagtgtttgattttcaaaatcagcaaaataagctgagcactttatatctttctgtacaagagtgataacatgaagaattcttcttcagggatttaaaatacaataagcctggttcaactataaaaagtcttgtttcctttcttcattgacacttttttttttttttttttttgaggcaaggtctcactctgcttcccaggctggagtgcagtggggcaatattggctcactgcaacctgcacctcctggactcaagagatcctcgtacctcagcctcctaagtagctgggactacaggcgtgtcccaccacacccagctaatttttgtattttttgtagagatggggttttggggtttcgccatgttgtccaggctcgtctggaactccggtgctcaagtggcgtgcccacctcagcctcccaaactgctgagattacagatgtgagccactgcacccagcccactgacacgttttactgataaatgtaaatctaagctaaaataaaaataatgtattaccgctataatacaattcaccattctcttttctcacttcaagtaagaaagtaaaaatagaatatcagagctgaagtagacctaagtattcatcttgaagaagataatattctaaaaatcatgccacctgaattgagcatttaggaatttatgtaacatttctatacaactgaattgcaaaaataaaactttaaattcaaacttt

SEQ ID NO: 55716 - DNA, 6683 bp, Homo sapiens
tggagaagtggaatctcgtcagcgccgctccctgcgcgggactcgcggaacggcactgagcatgctcagttgccggagcccgttctggtctcaagtaggaagctagtgcgctgtaaccgcatctgatctgggcgctccgggaagggcgagactggagcagagccgctgggcgccggagccgaggcgagcgccgcgcgcaccactggttggagttgctgtgggtgagctgctgtggtctgtagccaagcatgctgtggtcggatctgcccagccgtggaacagaaacatttgctggatggaaaatccataaaagaaagctcctgtgaaaagctgaggctgacaataatttaagcaaaatcagatcgatctctttgggctgcctgacctccttgggtgcttgctattaattaacagactttgtggggaaaaaaaggagcttgccttctgagctttgtaccaaagacctgggaaaactaaccatctcagtctttcctgaggacttgggaactgccgaggcctctgccaatgtgttgactgtcgctatgggctcactgttgtccaggcagctcatatttcaaattataacctatttcctgcaccattgctgacgcctggtgatccatgtcagaagtacttccagctgactcaggtgttgacaccttggcagtgtttatggccagcagcggaactacagacgtcacaaatcggaacagcccagccacaccaccaaacacccttaacctccgatcctcccacaatgaactgttgaacgctgaaataaaacacacagaaaccaagaacagcacacctcccaaatgcaggaaaaaatatgcactaactaacatccaggcggccatgggcctctcggatccagctgcacagcccctgctgggaaatggctctgccaacatcaagctggtgaaaaatggggagaaccagctccgtaaggctgcagagcaagggcagcaggaccccaacaaaaacctgagccccactgcagtcatcaacataacttctgagaagttagagggtaaagagccccacccacaggattcctcgagctgtgagattttaccctcccagcccaggagaactaagagcttcctaaattactatgcagatctggaaacctcagccagagaactagagcagaaccgaggcaatcaccatgggactgcggaagagaaatcccagccagtccagggccaggcctccaccatcattgggaatggcgatttgctgctgcagaaaccaaacagaccccagtccagccctgaagacggccaagtagccacagtgtcatccagcccagaaaccaagaaggatcatccgaaaacaggggccaaaaccgactgtgcactgcaccggatccagaacctggcaccgagcgatgaggagtccagctggacaacgttgtcccaagacagtgcctcacccagctccccggatgaaacagatatatggagtgatcactcatttcagactgatccagatttgccgcctggctggaaaagagtcagtgacattgccgggacctattattggcacatcccaacaggaacgactcagtgggaacggcccgtctccatcccagcagatctccagggttctaggaaagggtcacttagttctgtaacgccatctcccaccccagagaacgagaaacagccatggagtgattttgctgttctgaatgggggaaagattaatagtgacatttggaaggatttgcatgcagccactgttaacccggaccccagtttaaaagagtttgaaggagcaaccctacgctatgcatctttgaaactcagaaatgccccacaccctgatgatgatgattcttgtagtatcaacagtgacccagaagccaagtgttttgctgtgcgttctctgggatgggtagagatggcagaagaggacctcgcccccggtaaaagtagtgttgcggtcaacaactgcatcaggcaactttcctactgcaaaaatgacatccgagacacagtcgggatttggggagaggggaaagacatgtacctgatcctggagaatgacatgctcagcctggtggaccccatggaccgcagcgtgctgcactcgcagcccatcgtcagcatccgcgtgtggggcgtgggccgcgacaatggccgagggattttgcttatgtagcaagagataaagatacaagaattttgaaatgtcatgtatttcgatgtgacacaccagcaaaagccattgccacaagtctccacgagatctgctccaagattatggctgaacggaagaatgccaaagcgctggcctgcagctccttacaggaaagggccaatgtgaacctcgatgtccctttgcaagtagattttccaacaccaaagactgagctggtccagaagttccacgtgcagtacttgggcatgttacctgtagacaaaccagtcggaatggatattttgaacagtgccatagaaaatcttatgacctcatccaacaaggaggactggctgtcagtgaacatgaacgtggctgatgccactgtgactgtcatcagtgaaaagaatgaagaggaagtcttagtggaatgtcgtgtgcgattcctgtccttcatgggtgttgggaaggacgtccacacatttgccttcatcatggacacggggaaccagcgctttgagtgccacgttttctggtgcgagcctaatgctggtaacgtgtctgaggcggtgcaggccgcctgcatgttacgatatcagaagtgcttggtagccaggccgccttctcagaaagttcgaccacctccaccgccagcagattcagtaaccagaagagtcacaaccaatgtaaaacgaggggtcttatccctcattgacactttgaaacagaaacgccctgtcaccgaaatgccatagctgcacatgcaaaaggactcggctatttacctgaagattgactagctacactaaagaaaatgaactccgccatccgaccttccatccagttgctgatgctttgtcttcagagaatttacccttaaccaagcagtgttagacaagcatgttctctcgtcttgccaccatcatgtgatatgaaaagaagcatgaataattttttttgctgtaagttacatcatgcgcagtggaaggtctttttcttattgtaaatattgtgaacattacttaacttcacacacacacagagaagagtgtggccccacccctcctagtgaactaacgctgcgtccttggaatgaatgatgcgtgagttagtttcactgtcttcttggctggacctgtcacaagcaacctttaagtcctacagcactttgccctgttttcaacattggagtaggcactgcatagcagataccattgaattgctgtaaaaataggatggcgagtttgtgttttaatttttcataaaattgaacctgttggttgacaaaattggctgttggcatcagtatagaaaccaactggcagctttccctgacaagctctttgacacatggacaccatttcatgtctacagctgtttgtgggatgttggaaaaaaatgaaacttcaaaattgatgaaaaactaaattcgaggaattaaaatcgaacaaaacatagcctttcttttccgatggttttcaaactgattatttttaaaagagattaataaaatcataatgcattttgggtgggacatatttcaaacttctgccttatattgtacggtgcagctagagaattatagttcactatggccattctctacataaacattaagatgaaatactcctcatcagcctttcatccttagtttgagaattagctgatatgcaatttgaagttgaggaaatatcattgatatttctatcatgcacgattattttagatttctaccaccgtgtgatttttgctagtccatgtgctagaggtaaacgttctgctggaattctgcatccagctctatccccctctgatgctttttgcccagaaagctgtctgtccatcatgtattgtccatggcaacaaattacattaggttgaacctttccttgattttatgtatttaatattagaatttgttggactcaactagatatattttttaatttatattttttccattttactttgaagatttgaaatgttcatacctgagcaaagtctacacaggagtaatggactgtttaacaagtttcccaaaacagcattttcctgctccttcgtatgtaggtgagaaacttagctggaaagacatacaaatttagactctcgttgacattgtcgttttaaaaggaagttgctaaggcgatcaatctcaatattagtcttgtttacttcttcttaatgtcaaaattaacatttacaacatccaattataaaagtaatgctttatgtttatacactgctatgtacttgtcaaaatggtttccacattcttatcacatctgagccttaccaggtagagaaggtactaaatacactttagaagtaaaaatatgaagtaccgagaggctaaacccactggcctaagatctcaccaaagttcatgaaaaccaggactaggacccacggctcccaaagcccgttcttgctgtgttgtgctgcctccatatccgtcaggaagagcctttccagaatgattctgggcatatactaagaagagcaggtatggaaagatctattgtcagggaatcttagaattccctacacgagtgggagaaagatgtccaaattccttacgcagtggtattcatgatggtgccctatctaagtccaggactgttttcctacagcgtgcctcaaaagtgttgtagagggcaggattctacattcacagcctgttccatctacgagattttccagatgctacttgtggtagacattcctaactcatggtacttagccaccagagatcatgatggaatgagtgggtggcttttctacctgccattccctcagaattcatgaggggtgggggacagggggaccggaattgtcttagcaccccaatgttatgacaaaactatgctactttagaaacgcagtctgtttttcaccaattgacatactactgatctgaagtaaccagtgccatcataagaaattactgcattaagaaaatccttgctgtgccctttgaaaagctgttcagaaatcatttacagtgatctttcatctcggtcgctgtagtgaaacattttagtgtgataaatttcaaaattctaaacaaattacccacttttatattggaaatctctaccagaactccctcttcattttttaaggcatacatttgcttgttttcaagatcaagaattctgagctagctttaagtagcaaactgatttatatgtgcaattataggatgcattaagatgaatgatagcctttacatattgaaaactttgcagacgttttgttttgaaaatggcattgtatagtaaatgcaaattaattttgtaaaattatgttaaagagtatgttcagacactttctgccatggccaaaaagtatgtatgaaagtatgtgtgtatttgtttgtaaaaggatgccaatgttttacctgatatcttagtgacacttcagttatctatgcattctttagatctgtgattcggtaaacaggcagccatgttcacgatgccttctatgtcttaccatatttttaattaacctgttaaatacagcttaaaatatttttattttatttattctatttttactgaaatatactgcattattgtgttaatgtattatctttcctggatattatctcccagtgtatccagatctaagtaatctcagtgaactatacattgcctaaaaagtggttttgtaatgatttgtagtcacatttctattgggatatgtagaagaaaaggcaaaatgcttaaagttccttttattttttaaaagcagctagatagacacagacttgccacctcatacatctgctccttggcaacatcaaggggaacgactagccaacatgcctatggctaaaaactttcctttgcagactaaagcactgcttggtgcttcgtttttctacccttcacaacatgtgtgatttcatctaagagatatatacatgtacacatgccctttgtttccacctggatacaagatcactcatagctaattaggaccattgttttttgttcatctgtcttgttgcatgaagggacattagacccatttccattaaaataagttcttggtgataaactgtggcactgctacttctttttaaatccactttatgatttcaagatggacacttgtaagatgactcgacacaaggccattgcctggaagccccagagctttcctctgtttgtatggcccgttcatgtcccaggcattgcaacacaaactcaagatttcaccacaacatgacaagcattttcctaactgatattagcacaatttaactaataagccccttcgctctctagttggccaggcttaacctaatacacatctaacgtgtgtgccacacggccagtagaaagtttaacttcagcttcagggcaaagatacccactcacaccgtgtcaacgcaagcagtagttcctggcctccagagcagcttacttcccctgaaagaacgctttgttttcctttatgcccttttcctgttgaccacttttacacatttaaatgtaatttgttgtgagaataaatttagctgcata

SEQ ID NO: 55717 - DNA, 5005 bp, Homo sapiens
tgtattgtccatggcatatatattacatgtaggttgaagctcgtgtctacgcgttcgaattctatgaatggtgaatatgtaaattattgatgaatgtatgctatgacgatctccaactaggagtagatatattttttaatttatattttttccattttactttgaagatttgaaatgttcatacctgagcaaagtctacacaggagtaatggactgtttaacaagtttcccaaaacagcattttcctgctccttcgtatgtaggtgagaaacttagctggaaagacatacaaatttagactctcgttgacattgtcgttttaaaaggaagttgctaaggcgatcaatctcaatattagtcttgtttacttcttcttaatgtcaaaattaacatttacaacatccaattataaaagtaatgctttatgtttatacactgctatgtacttgtcaaaatggtttccacattcttatcacatctgagccttaccaggtagagaaggtactaaatacactttagaagtaaaaatatgaagtaccgagaggctaaacccactggcctaagatctcaccaaagttcatgaaaaccaggactaggacccacggctcccaaagcccgttcttgctgtgttgtgctgcctccatatccgtcaggaagagcctttccagaatgattctgggcatatactaagaagagcaggtatggaaagatctattgtcagggaatcttagaattccctacacgagtgggagaaagatgtccaaattccttacgcagtggtattcatgatggtgccctatctaagtccaggactgttttcctacagcgtgcctcaaaagtgttgtagagggcaggattctacattcacagcctgttccatctacgagattttccagatgctacttgtggtagacattcctaactcatggtacttagccaccagagatcatgatggaatgagtgggtggcttttctacctgccattccctcagaattcatgaggggtgggggacagggggaccggaattgtcttagcaccccaatgttatgacaaaactatgctactttagaaacgcagtctgtttttcaccaattgacatactactgatctgaagtaaccagtgccatcataagaaattactgcattaagaaaatccttgctgtgccctttgaaaagctgttcagaaatcatttacagtgatctttcatctcggtcgctgtagtgaaacattttagtgtgataaatttcaaaattctaaacaaattacccacttttatattggaaatctctaccagaactccctcttcattttttaaggcatacatttgcttgttttcaagatcaagaattctgagctagctttaagtagcaaactgatttatatgtgcaattataggatgcattaagatgaatgatagcctttacatattgaaaactttgcagacgttttgttttgaaaatggcattgtatagtaaatgcaaattaattttgtaaaattatgttaaagagtatgttcagacactttctgccatggccaaaaagtatgtatgaaagtatgtgtgtatttgtttgtaaaaggatgccaatgttttacctgatatcttagtgacacttcagttatctatgcattctttagatctgtgattcggtaaacaggcagccatgttcacgatgccttctatgtcttaccatatttttaattaacctgttaaatacagcttaaaatatttttattttatttattctatttttactgaaatatactgcattattgtgttaatgtattatctttcctggatattatctcccagtgtatccagatctaagtaatctcagtgaactatacattgcctaaaaagtggttttgtaatgatttgtagtcacatttctattgggatatgtagaagaaaaggcaaaatgcttaaagttccttttattttttaaaagcagctagatagacacagacttgccacctcatacatctgctccttggcaacatcaaggggaacgactagccaacatgcctatggctaaaaactttcctttgcagactaaagcactgcttggtgcttcgtttttctacccttcacaacatgtgtgatttcatctaagagatatatacatgtacacatgccctttgtttccacctggatacaagatcactcatagctaattaggaccattgttttttgttcatctgtcttgttgcatgaagggacattagacccatttccattaaaataagttcttggtgataaactgtggcactgctacttctttttaaatccactttatgatttcaagatggacacttgtaagatgactcgacacaaggccattgcctggaagccccagagctttcctctgtttgtatggcccgttcatgtcccaggcattgcaacacaaactcaagatttcaccacaacatgacaagcattttcctaactgatattagcacaatttaactaataagccccttcgctctctagttggccaggcttaacctaatacacatctaacgtgtgtgccacacggccagtagaaagtttaacttcagcttcagggcaaagatacccactcacaccgtgtcaacgcaagcagtagttcctggcctccagagcagcttacttcccctgaaagaacgctttgttttcctttatgcccttttcctgttgaccacttttacacatttaaatgtaatttgttgtgagaataaatttagctgcataaaacgttcggctcatttatctgacatcttagtcacatatacaaggaatagaaatagaaactcggtgtctctagttatttttaaattattcttacctcagacttcttagaaatcactttagtaatggagcattttgctttgattagttactacatatttctgcctggtaagaactaggaagtaacttcaaattttgagtaatcaccctgtacttatttggtgatcaggaaggccagctggccttccggacatagaagcctatttagtcaccaactcgagtcttttgtaagcggtcttgctaggattgtgatattttagcacgaagaagtttatcacttcctttaagaacctgacatcaaagaataaagaatagaggtgtacacacactaaatccaaaatgaaaggtaactagagaaatcagttgaatctggtttagcttaactgttaggcgcaggaaggcagataaacagaatttaaagtatgtccccgctttttgttcatcttgcacttccacagtggtttctctctagtcagtaacaaaatttcattatggtttcaggcattatatggtggtaaataatttcagattaaaaatgtgtttgctattggagtatctgaatactagtaatttcattatttagaattttgcagcacttttatctcaagaagaagtccaagaatgtaaaatgccaaatgaaacatgtcagtggaatcaatattctccttcattagaattccctcatattgctttttttttttttcttcagacagaggagtcttactctggagtgcagtggtgtaatttcagctcaccacaacctccacctcccaagttcaagcaattctcgcctcagcctcctgagtagctgggattacaggcatgcaccgccacgcctggccaatttgtatatttttagtagagacagggtttcgccacgttggccaggctggtctcgaactcctgacctcaggtgatccgcccgccccaacctcccaaagtatgtgagccaccacgtccggcctcatattgcttttatccaaaattcttttcccttttcactctaccaaagtatttaaataatcctgtccttcatagaagattctcaaagaagaaaactgcagtgtaattaatgaatggtttaattcagaatcttcatatacttctaaagagaaaaataatttagtgccaaatgcatgttaggagataatcaatgtaagtggcaacaaattgtgacttcacatgctactgtagagatcagaaaattatcctaaactattccataacaatgagacaacatcacagaaaatacacttgaaaataaaaatctcaagaccagctacttctggacaatggaatacttttcagtctggtatggtggagggcccgaaaaggataagggattcttatgatacacaatgggattctttactgaacaatatgttaaattaagctgcaccgccttccttgaggcatggactaccctaaccaaccagatagaaatctgggtgggataagaggatgagccacacgctataattttagggcaaggagatagtgtttgattttcaaaatcagcaaaataagctgagcactttatatctttctgtacaagagtgataacatgaagaattcttcttcagggatttaaaatacaataagcctggttcaactataaaaagtcttgtttcctttcttcattgacacttttttttttttttttttttgaggcaaggtctcactctgcttcccaggctggagtgcagtggggcaatattggctcactgcaacctgcacctcctggactcaagagatcctcgtacctcagcctcctaagtagctgggactacaggcgtgtcccaccacacccagctaatttttgtattttttgtagagatggggttttggggtttcgccatgttgtccaggctcgtctggaactccggtgctcaagtggcgtgcccacctcagcctcccaaactgctgagattacagatgtgagccactgcacccagcccactgacacgttttactgataaatgtaaatctaagctaaaataaaaataatgtattaccgctataatacaattcaccattctcttttctcacttcaagtaagaaagtaaaaatagaatatcagagctgaagtagacctaagtattcatcttgaagaagataatattctaaaaatcatgccacctgaattgagcatttaggaatttatgtaacatttctatacaactgaattgcaaaaataaaactttaaattcaaacttt

SEQ ID NO: 55718 - DNA, 4870 bp, Homo sapiens
gggtcgtgtgtcctgcacttcagcctgggcaacagagcaagactgcgtctttctccctctctccatatatacacacacacacacatacacacacacacatatacattttcctgctccttcgtatgtaggtgagaaacttagctggaaagacatacaaatttagactctcgttgacattgtcgttttaaaaggaagttgctaaggcgatcaatctcaatattagtcttgtttacttcttcttaatgtcaaaattaacatttacaacatccaattataaaagtaatgctttatgtttatacactgctatgtacttgtcaaaatggtttccacattcttatcacatctgagccttaccaggtagagaaggtactaaatacactttagaagtaaaaatatgaagtaccgagaggctaaacccactggcctaagatctcaccaaagttcatgaaaaccaggactaggacccacggctcccaaagcccgttcttgctgtgttgtgctgcctccatatccgtcaggaagagcctttccagaatgattctgggcatatactaagaagagcaggtatggaaagatctattgtcagggaatcttagaattccctacacgagtgggagaaagatgtccaaattccttacgcagtggtattcatgatggtgccctatctaagtccaggactgttttcctacagcgtgcctcaaaagtgttgtagagggcaggattctacattcacagcctgttccatctacgagattttccagatgctacttgtggtagacattcctaactcatggtacttagccaccagagatcatgatggaatgagtgggtggcttttctacctgccattccctcagaattcatgaggggtgggggacagggggaccggaattgtcttagcaccccaatgttatgacaaaactatgctactttagaaacgcagtctgtttttcaccaattgacatactactgatctgaagtaaccagtgccatcataagaaattactgcattaagaaaatccttgctgtgccctttgaaaagctgttcagaaatcatttacagtgatctttcatctcggtcgctgtagtgaaacattttagtgtgataaatttcaaaattctaaacaaattacccacttttatattggaaatctctaccagaactccctcttcattttttaaggcatacatttgcttgttttcaagatcaagaattctgagctagctttaagtagcaaactgatttatatgtgcaattataggatgcattaagatgaatgatagcctttacatattgaaaactttgcagacgttttgttttgaaaatggcattgtatagtaaatgcaaattaattttgtaaaattatgttaaagagtatgttcagacactttctgccatggccaaaaagtatgtatgaaagtatgtgtgtatttgtttgtaaaaggatgccaatgttttacctgatatcttagtgacacttcagttatctatgcattctttagatctgtgattcggtaaacaggcagccatgttcacgatgccttctatgtcttaccatatttttaattaacctgttaaatacagcttaaaatatttttattttatttattctatttttactgaaatatactgcattattgtgttaatgtattatctttcctggatattatctcccagtgtatccagatctaagtaatctcagtgaactatacattgcctaaaaagtggttttgtaatgatttgtagtcacatttctattgggatatgtagaagaaaaggcaaaatgcttaaagttccttttattttttaaaagcagctagatagacacagacttgccacctcatacatctgctccttggcaacatcaaggggaacgactagccaacatgcctatggctaaaaactttcctttgcagactaaagcactgcttggtgcttcgtttttctacccttcacaacatgtgtgatttcatctaagagatatatacatgtacacatgccctttgtttccacctggatacaagatcactcatagctaattaggaccattgttttttgttcatctgtcttgttgcatgaagggacattagacccatttccattaaaataagttcttggtgataaactgtggcactgctacttctttttaaatccactttatgatttcaagatggacacttgtaagatgactcgacacaaggccattgcctggaagccccagagctttcctctgtttgtatggcccgttcatgtcccaggcattgcaacacaaactcaagatttcaccacaacatgacaagcattttcctaactgatattagcacaatttaactaataagccccttcgctctctagttggccaggcttaacctaatacacatctaacgtgtgtgccacacggccagtagaaagtttaacttcagcttcagggcaaagatacccactcacaccgtgtcaacgcaagcagtagttcctggcctccagagcagcttacttcccctgaaagaacgctttgttttcctttatgcccttttcctgttgaccacttttacacatttaaatgtaatttgttgtgagaataaatttagctgcataaaacgttcggctcatttatctgacatcttagtcacatatacaaggaatagaaatagaaactcggtgtctctagttatttttaaattattcttacctcagacttcttagaaatcactttagtaatggagcattttgctttgattagttactacatatttctgcctggtaagaactaggaagtaacttcaaattttgagtaatcaccctgtacttatttggtgatcaggaaggccagctggccttccggacatagaagcctatttagtcaccaactcgagtcttttgtaagcggtcttgctaggattgtgatattttagcacgaagaagtttatcacttcctttaagaacctgacatcaaagaataaagaatagaggtgtacacacactaaatccaaaatgaaaggtaactagagaaatcagttgaatctggtttagcttaactgttaggcgcaggaaggcagataaacagaatttaaagtatgtccccgctttttgttcatcttgcacttccacagtggtttctctctagtcagtaacaaaatttcattatggtttcaggcattatatggtggtaaataatttcagattaaaaatgtgtttgctattggagtatctgaatactagtaatttcattatttagaattttgcagcacttttatctcaagaagaagtccaagaatgtaaaatgccaaatgaaacatgtcagtggaatcaatattctccttcattagaattccctcatattgctttttttttttttcttcagacagaggagtcttactctggagtgcagtggtgtaatttcagctcaccacaacctccacctcccaagttcaagcaattctcgcctcagcctcctgagtagctgggattacaggcatgcaccgccacgcctggccaatttgtatatttttagtagagacagggtttcgccacgttggccaggctggtctcgaactcctgacctcaggtgatccgcccgccccaacctcccaaagtatgtgagccaccacgtccggcctcatattgcttttatccaaaattcttttcccttttcactctaccaaagtatttaaataatcctgtccttcatagaagattctcaaagaagaaaactgcagtgtaattaatgaatggtttaattcagaatcttcatatacttctaaagagaaaaataatttagtgccaaatgcatgttaggagataatcaatgtaagtggcaacaaattgtgacttcacatgctactgtagagatcagaaaattatcctaaactattccataacaatgagacaacatcacagaaaatacacttgaaaataaaaatctcaagaccagctacttctggacaatggaatacttttcagtctggtatggtggagggcccgaaaaggataagggattcttatgatacacaatgggattctttactgaacaatatgttaaattaagctgcaccgccttccttgaggcatggactaccctaaccaaccagatagaaatctgggtgggataagaggatgagccacacgctataattttagggcaaggagatagtgtttgattttcaaaatcagcaaaataagctgagcactttatatctttctgtacaagagtgataacatgaagaattcttcttcagggatttaaaatacaataagcctggttcaactataaaaagtcttgtttcctttcttcattgacacttttttttttttttttttttgaggcaaggtctcactctgcttcccaggctggagtgcagtggggcaatattggctcactgcaacctgcacctcctggactcaagagatcctcgtacctcagcctcctaagtagctgggactacaggcgtgtcccaccacacccagctaatttttgtattttttgtagagatggggttttggggtttcgccatgttgtccaggctcgtctggaactccggtgctcaagtggcgtgcccacctcagcctcccaaactgctgagattacagatgtgagccactgcacccagcccactgacacgttttactgataaatgtaaatctaagctaaaataaaaataatgtattaccgctataatacaattcaccattctcttttctcacttcaagtaagaaagtaaaaatagaatatcagagctgaagtagacctaagtattcatcttgaagaagataatattctaaaaatcatgccacctgaattgagcatttaggaatttatgtaacatttctatacaactgaattgcaaaaataaaactttaaattcaaacttt

SEQ ID NO: 55719 - DNA, 8128 bp, Homo sapiens
tggagaagtggaatctcgtcagcgccgctccctgcgcgggactcgcggaacggcactgagcatgctcagttgccggagcccgttctggtctcaagtaggaagctagtgcgctgtaaccgcatctgatctgggcgctccgggaagggcgagactggagcagagccgctgggcgccggagccgaggcgagcgccgcgcgcaccactggttggagttgctgtgggtgagctgctgtggtctgtagccaagcatgctgtggtcggatctgcccagccgtggaacagaaacatttgctggatggaaaatccataaaagaaagctcctgtgaaaagctgaggctgacaataatttaagcaaaatcagatcgatctctttgggctgcctgacctccttgggtgcttgctattaattaacagactttgtggggaaaaaaaggagcttgccttctgagctttgtaccaaagacctgggaaaactaaccatctcagtctttcctgaggacttgggaactgccgaggcctctgccaatgtgttgactgtcgctatgggctcactgttgtccaggcagctcatatttcaaattataacctatttcctgcaccattgctgacgcctggtgatccatgtcagaagtacttccagctgactcaggtgttgacaccttggcagtgtttatggccagcagcggaactacagacgtcacaaatcggaacagcccagccacaccaccaaacacccttaacctccgatcctcccacaatgaactgttgaacgctgaaataaaacacacagaaaccaagaacagcacacctcccaaatgcaggaaaaaatatgcactaactaacatccaggcggccatgggcctctcggatccagctgcacagcccctgctgggaaatggctctgccaacatcaagctggtgaaaaatggggagaaccagctccgtaaggctgcagagcaagggcagcaggaccccaacaaaaacctgagccccactgcagtcatcaacataacttctgagaagttagagggtaaagagccccacccacaggattcctcgagctgtgagattttaccctcccagcccaggagaactaagagcttcctaaattactatgcagatctggaaacctcagccagagaactagagcagaaccgaggcaatcaccatgggactgcggaagagaaatcccagccagtccagggccaggcctccaccatcattgggaatggcgatttgctgctgcagaaaccaaacagaccccagtccagccctgaagacggccaagtagccacagtgtcatccagcccagaaaccaagaaggatcatccgaaaacaggggccaaaaccgactgtgcactgcaccggatccagaacctggcaccgagcgatgaggagtccagctggacaacgttgtcccaagacagtgcctcacccagctccccggatgaaacagatatatggagtgatcactcatttcagactgatccagatttgccgcctggctggaaaagagtcagtgacattgccgggacctattattggcacatcccaacaggaacgactcagtgggaacggcccgtctccatcccagcagatctccagggttctaggaaagggtcacttagttctgtaacgccatctcccaccccagagaacgagaaacagccatggagtgattttgctgttctgaatgggggaaagattaatagtgacatttggaaggatttgcatgcagccactgttaacccggaccccagtttaaaagagtttgaaggagcaaccctacgctatgcatctttgaaactcagaaatgccccacaccctgatgatgatgattcttgtagtatcaacagtgacccagaagccaagtgttttgctgtgcgttctctgggatgggtagagatggcagaagaggacctcgcccccggtaaaagtagtgttgcggtcaacaactgcatcaggcaactttcctactgcaaaaatgacatccgagacacagtcgggatttggggagaggggaaagacatgtacctgatcctggagaatgacatgctcagcctggtggaccccatggaccgcagcgtgctgcactcgcagcccatcgtcagcatccgcgtgtggggcgtgggccgcgacaatggccgagggattttgcttatgtagcaagagataaagatacaagaattttgaaatgtcatgtatttcgatgtgacacaccagcaaaagccattgccacaagtctccacgagatctgctccaagattatggctgaacggaagaatgccaaagcgctggcctgcagctccttacaggaaagggccaatgtgaacctcgatgtccctttgcaagtagattttccaacaccaaagactgagctggtccagaagttccacgtgcagtacttgggcatgttacctgtagacaaaccagtcggaatggatattttgaacagtgccatagaaaatcttatgacctcatccaacaaggaggactggctgtcagtgaacatgaacgtggctgatgccactgtgactgtcatcagtgaaaagaatgaagaggaagtcttagtggaatgtcgtgtgcgattcctgtccttcatgggtgttgggaaggacgtccacacatttgccttcatcatggacacggggaaccagcgctttgagtgccacgttttctggtgcgagcctaatgctggtaacgtgtctgaggcggtgcaggccgcctgcatgttacgatatcagaagtgcttggtagccaggccgccttctcagaaagttcgaccacctccaccgccagcagattcagtaaccagaagagtcacaaccaatgtaaaacgaggggtcttatccctcattgacactttgaaacagaaacgccctgtcaccgaaatgccatagctgcacatgcaaaaggactcggctatttacctgaagattgactagctacactaaagaaaatgaactccgccatccgaccttccatccagttgctgatgctttgtcttcagagaatttacccttaaccaagcagtgttagacaagcatgttctctcgtcttgccaccatcatgtgatatgaaaagaagcatgaataattttttttgctgtaagttacatcatgcgcagtggaaggtctttttcttattgtaaatattgtgaacattacttaacttcacacacacacagagaagagtgtggccccacccctcctagtgaactaacgctgcgtccttggaatgaatgatgcgtgagttagtttcactgtcttcttggctggacctgtcacaagcaacctttaagtcctacagcactttgccctgttttcaacattggagtaggcactgcatagcagataccattgaattgctgtaaaaataggatggcgagtttgtgttttaatttttcataaaattgaacctgttggttgacaaaattggctgttggcatcagtatagaaaccaactggcagctttccctgacaagctctttgacacatggacaccatttcatgtctacagctgtttgtgggatgttggaaaaaaatgaaacttcaaaattgatgaaaaactaaattcgaggaattaaaatcgaacaaaacatagcctttcttttccgatggttttcaaactgattatttttaaaagagattaataaaatcataatgcattttgggtgggacatatttcaaacttctgccttatattgtacggtgcagctagagaattatagttcactatggccattctctacataaacattaagatgaaatactcctcatcagcctttcatccttagtttgagaattagctgatatgcaatttgaagttgaggaaatatcattgatatttctatcatgcacgattattttagatttctaccaccgtgtgatttttgctagtccatgtgctagaggtaaacgttctgctggaattctgcatccagctctatccccctctgatgctttttgcccagaaagctgtctgtccatcatgtattgtccatggcaacaaattacattaggttgaacctttccttgattttatgtatttaatattagaatttgttggactcaactagatatattttttaatttatattttttccattttactttgaagatttgaaatgttcatacctgagcaaagtctacacaggagtaatggactgtttaacaagtttcccaaaacagcattttcctgctccttcgtatgtaggtgagaaacttagctggaaagacatacaaatttagactctcgttgacattgtcgttttaaaaggaagttgctaaggcgatcaatctcaatattagtcttgtttacttcttcttaatgtcaaaattaacatttacaacatccaattataaaagtaatgctttatgtttatacactgctatgtacttgtcaaaatggtttccacattcttatcacatctgagccttaccaggtagagaaggtactaaatacactttagaagtaaaaatatgaagtaccgagaggctaaacccactggcctaagatctcaccaaagttcatgaaaaccaggactaggacccacggctcccaaagcccgttcttgctgtgttgtgctgcctccatatccgtcaggaagagcctttccagaatgattctgggcatatactaagaagagcaggtatggaaagatctattgtcagggaatcttagaattccctacacgagtgggagaaagatgtccaaattccttacgcagtggtattcatgatggtgccctatctaagtccaggactgttttcctacagcgtgcctcaaaagtgttgtagagggcaggattctacattcacagcctgttccatctacgagattttccagatgctacttgtggtagacattcctaactcatggtacttagccaccagagatcatgatggaatgagtgggtggcttttctacctgccattccctcagaattcatgaggggtgggggacagggggaccggaattgtcttagcaccccaatgttatgacaaaactatgctactttagaaacgcagtctgtttttcaccaattgacatactactgatctgaagtaaccagtgccatcataagaaattactgcattaagaaaatccttgctgtgccctttgaaaagctgttcagaaatcatttacagtgatctttcatctcggtcgctgtagtgaaacattttagtgtgataaatttcaaaattctaaacaaattacccacttttatattggaaatctctaccagaactccctcttcattttttaaggcatacatttgcttgttttcaagatcaagaattctgagctagctttaagtagcaaactgatttatatgtgcaattataggatgcattaagatgaatgatagcctttacatattgaaaactttgcagacgttttgttttgaaaatggcattgtatagtaaatgcaaattaattttgtaaaattatgttaaagagtatgttcagacactttctgccatggccaaaaagtatgtatgaaagtatgtgtgtatttgtttgtaaaaggatgccaatgttttacctgatatcttagtgacacttcagttatctatgcattctttagatctgtgattcggtaaacaggcagccatgttcacgatgccttctatgtcttaccatatttttaattaacctgttaaatacagcttaaaatatttttattttatttattctatttttactgaaatatactgcattattgtgttaatgtattatctttcctggatattatctcccagtgtatccagatctaagtaatctcagtgaactatacattgcctaaaaagtggttttgtaatgatttgtagtcacatttctattgggatatgtagaagaaaaggcaaaatgcttaaagttccttttattttttaaaagcagctagatagacacagacttgccacctcatacatctgctccttggcaacatcaaggggaacgactagccaacatgcctatggctaaaaactttcctttgcagactaaagcactgcttggtgcttcgtttttctacccttcacaacatgtgtgatttcatctaagagatatatacatgtacacatgccctttgtttccacctggatacaagatcactcatagctaattaggaccattgttttttgttcatctgtcttgttgcatgaagggacattagacccatttccattaaaataagttcttggtgataaactgtggcactgctacttctttttaaatccactttatgatttcaagatggacacttgtaagatgactcgacacaaggccattgcctggaagccccagagctttcctctgtttgtatggcccgttcatgtcccaggcattgcaacacaaactcaagatttcaccacaacatgacaagcattttcctaactgatattagcacaatttaactaataagccccttcgctctctagttggccaggcttaacctaatacacatctaacgtgtgtgccacacggccagtagaaagtttaacttcagcttcagggcaaagatacccactcacaccgtgtcaacgcaagcagtagttcctggcctccagagcagcttacttcccctgaaagaacgctttgttttcctttatgcccttttcctgttgaccacttttacacatttaaatgtaatttgttgtgagaataaatttagctgcataaaacgttcggctcatttatctgacatcttagtcacatatacaaggaatagaaatagaaactcggtgtctctagttatttttaaattattcttacctcagacttcttagaaatcactttagtaatggagcattttgctttgattagttactacatatttctgcctggtaagaactaggaagtaacttcaaattttgagtaatcaccctgtacttatttggtgatcaggaaggccagctggccttccggacatagaagcctatttagtcaccaactcgagtcttttgtaagcggtcttgctaggattgtgatattttagcacgaagaagtttatcacttcctttaagaacctgacatcaaagaataaagaatagaggtgtacacacactaaatccaaaatgaaaggtaactagagaaatcagttgaatctggtttagcttaactgttaggcgcaggaaggcagataaacagaatttaaagtatgtccccgctttttgttcatcttgcacttccacagtggtttctctctagtcagtaacaaaatttcattatggtttcaggcattatatggtggtaaataatttcagattaaaaatgtgtttgctattggagtatctgaatactagtaatttcattatttagaattttgcagcacttttatctcaagaagaagtccaagaatgtaaaatgccaaatgaaacatgtcagtggaatcaatattctccttcattagaattccctcatattgctttttttttttttcttcagacagaggagtcttactctggagtgcagtggtgtaatttcagctcaccacaacctccacctcccaagttcaagcaattctcgcctcagcctcctgagtagctgggattacaggcatgcaccgccacgcctggccaatttgtatatttttagtagagacagggtttcgccacgttggccaggctggtctcgaactcctgacctcaggtgatccgcccgccccaacctcccaaagtatgtgagccaccacgtccggcctcatattgcttttatccaaaattcttttcccttttcactctaccaaagtatttaaataatcctgtccttcatagaagattctcaaagaagaaaactgcagtgtaattaatgaatggtttaattcagaatcttcatatacttctaaagagaaaaataatttagtgccaaatgcatgttaggagataatcaatgtaagtggcaacaaattgtgacttcacatgctactgtagagatcagaaaattatcctaaactattccataacaatgagacaacatcacagaaaatacacttgaaaataaaaatctcaagaccagctacttctggacaatggaatacttttcagtctggtatggtggagggcccgaaaaggataagggattcttatgatacacaatgtcgacgccgcgaatttagtagtagtag

SEQ ID NO: 55720 - DNA, 6211 bp, Homo sapiens
tggagaagtggaatctcgtcagcgccgctccctgcgcgggactcgcggaacggcactgagcatgctcagttgccggagcccgttctggtctcaagtaggaagctagtgcgctgtaaccgcatctgatctgggcgctccgggaagggcgagactggagcagagccgctgggcgccggagccgaggcgagcgccgcgcgcaccactggttggagttgctgtgggtgagctgctgtggtctgtagccaagcatgctgtggtcggatctgcccagccgtggaacagaaacatttgctggatggaaaatccataaaagaaagctcctgtgaaaagctgaggctgacaataatttaagcaaaatcagatcgatctctttgggctgcctgacctccttgggtgcttgctattaattaacagactttgtggggaaaaaaaggagcttgccttctgagctttgtaccaaagacctgggaaaactaaccatctcagtctttcctgaggacttgggaactgccgaggcctctgccaatgtgttgactgtcgctatgggctcactgttgtccaggcagctcatatttcaaattataacctatttcctgcaccattgctgacgcctggtgatccatgtcagaagtacttccagctgactcaggtgttgacaccttggcagtgtttatggccagcagcggaactacagacgtcacaaatcggaacagcccagccacaccaccaaacacccttaacctccgatcctcccacaatgaactgttgaacgctgaaataaaacacacagaaaccaagaacagcacacctcccaaatgcaggaaaaaatatgcactaactaacatccaggcggccatgggcctctcggatccagctgcacagcccctgctgggaaatggctctgccaacatcaagctggtgaaaaatggggagaaccagctccgtaaggctgcagagcaagggcagcaggaccccaacaaaaacctgagccccactgcagtcatcaacataacttctgagaagttagagggtaaagagccccacccacaggattcctcgagctgtgagattttaccctcccagcccaggagaactaagagcttcctaaattactatgcagatctggaaacctcagccagagaactagagcagaaccgaggcaatcaccatgggactgcggaagagaaatcccagccagtccagggccaggcctccaccatcattgggaatggcgatttgctgctgcagaaaccaaacagaccccagtccagccctgaagacggccaagtagccacagtgtcatccagcccagaaaccaagaaggatcatccgaaaacaggggccaaaaccgactgtgcactgcaccggatccagaacctggcaccgagcgatgaggagtccagctggacaacgttgtcccaagacagtgcctcacccagctccccggatgaaacagatatatggagtgatcactcatttcagactgatccagatttgccgcctggctggaaaagagtcagtgacattgccgggacctattattggcacatcccaacaggaacgactcagtgggaacggcccgtctccatcccagcagatctccagggttctaggaaagggtcacttagttctgtaacgccatctcccaccccagagaacgagaaacagccatggagtgattttgctgttctgaatgggggaaagattaatagtgacatttggaaggatttgcatgcagccactgttaacccggaccccagtttaaaagagtttgaaggagcaaccctacgctatgcatctttgaaactcagaaatgccccacaccctgatgatgatgattcttgtagtatcaacagtgacccagaagccaagtgttttgctgtgcgttctctgggatgggtagagatggcagaagaggacctcgcccccggtaaaagtagtgttgcggtcaacaactgcatcaggcaactttcctactgcaaaaatgacatccgagacacagtcgggatttggggagaggggaaagacatgtacctgatcctggagaatgacatgctcagcctggtggaccccatggaccgcagcgtgctgcactcgcagcccatcgtcagcatccgcgtgtggggcgtgggccgcgacaatggccgagggattttgcttatgtagcaagagataaagatacaagaattttgaaatgtcatgtatttcgatgtgacacaccagcaaaagccattgccacaagtctccacgagatctgctccaagattatggctgaacggaagaatgccaaagcgctggcctgcagctccttacaggaaagggccaatgtgaacctcgatgtccctttgcaagtagattttccaacaccaaagactgagctggtccagaagttccacgtgcagtacttgggcatgttacctgtagacaaaccagtcggaatggatattttgaacagtgccatagaaaatcttatgacctcatccaacaaggaggactggctgtcagtgaacatgaacgtggctgatgccactgtgactgtcatcagtgaaaagaatgaagaggaagtcttagtggaatgtcgtgtgcgattcctgtccttcatgggtgttgggaaggacgtccacacatttgccttcatcatggacacggggaaccagcgctttgagtgccacgttttctggtgcgagcctaatgctggtaacgtgtctgaggcggtgcaggccgcctgcatgttacgatatcagaagtgcttggtagccaggccgccttctcagaaagttcgaccacctccaccgccagcagattcagtaaccagaagagtcacaaccaatgtaaaacgaggggtcttatccctcattgacactttgaaacagaaacgccctgtcaccgaaatgccatagctgcacatgcaaaaggactcggctatttacctgaagattgactagctacactaaagaaaatgaactccgccatccgaccttccatccagttgctgatgctttgtcttcagagaatttacccttaaccaagcagtgttagacaagcatgttctctcgtcttgccaccatcatgtgatatgaaaagaagcatgaataattttttttgctgtaagttacatcatgcgcagtggaaggtctttttcttattgtaaatattgtgaacattacttaacttcacacacacacagagaagagtgtggccccacccctcctagtgaactaacgctgcgtccttggaatgaatgatgcgtgagttagtttcactgtcttcttggctggacctgtcacaagcaacctttaagtcctacagcactttgccctgttttcaacattggagtaggcactgcatagcagataccattgaattgctgtaaaaataggatggcgagtttgtgttttaatttttcataaaattgaacctgttggttgacaaaattggctgttggcatcagtatagaaaccaactggcagctttccctgacaagctctttgacacatggacaccatttcatgtctacagctgtttgtgggatgttggaaaaaaatgaaacttcaaaattgatgaaaaactaaattcgaggaattaaaatcgaacaaaacatagcctttcttttccgatggttttcaaactgattatttttaaaagagattaataaaatcataatgcattttgggtgggacatatttcaaacttctgccttatattgtacggtgcagctagagaattatagttcactatggccattctctacataaacattaagatgaaatactcctcatcagcctttcatccttagtttgagaattagctgatatgcaatttgaagttgaggaaatatcattgatatttctatcatgcacgattattttagatttctaccaccgtgtgatttttgctagtccatgtgctagaggtaaacgttctgctggaattctgcatccagctctatccccctctgatgctttttgcccagaaagctgtctgtccatcatgtattgtccatggcaacaaattacattaggttgaacctttccttgattttatgtatttaatattagaatttgttggactcaactagatatattttttaatttatattttttccattttactttgaagatttgaaatgttcatacctgagcaaagtctacacaggagtaatggactgtttaacaagtttcccaaaacagcattttcctgctccttcgtatgtaggtgagaaacttagctggaaagacatacaaatttagactctcgttgacattgtcgttttaaaaggaagttgctaaggcgatcaatctcaatattagtcttgtttacttcttcttaatgtcaaaattaacatttacaacatccaattataaaagtaatgctttatgtttatacactgctatgtacttgtcaaaatggtttccacattcttatcacatctgagccttaccaggtagagaaggtactaaatacactttagaagtaaaaatatgaagtaccgagaggctaaacccactggcctaagatctcaccaaagttcatgaaaaccaggactaggacccacggctcccaaagcccgttcttgctgtgttgtgctgcctccatatccgtcaggaagagcctttccagaatgattctgggcatatactaagaagagcaggtatggaaagatctattgtcagggaatcttagaattccctacacgagtgggagaaagatgtccaaattccttacgcagtggtattcatgatggtgccctatctaagtccaggactgttttcctacagcgtgcctcaaaagtgttgtagagggcaggattctacattcacagcctgttccatctacgagattttccagatgctacttgtggtagacattcctaactcatggtacttagccaccagagatcatgatggaatgagtgggtggcttttctacctgccattccctcagaattcatgaggggtgggggacagggggaccggaattgtcttagcaccccaatgttatgacaaaactatgctactttagaaacgcagtctgtttttcaccaattgacatactactgatctgaagtaaccagtgccatcataagaaattactgcattaagaaaatccttgctgtgccctttgaaaagctgttcagaaatcatttacagtgatctttcatctcggtcgctgtagtgaaacattttagtgtgataaatttcaaaattctaaacaaattacccacttttatattggaaatctctaccagaactccctcttcattttttaaggcatacatttgcttgttttcaagatcaagaattctgagctagctttaagtagcaaactgatttatatgtgcaattataggatgcattaagatgaatgatagcctttacatattgaaaactttgcagacgttttgttttgaaaatggcattgtatagtaaatgcaaattaattttgtaaaattatgttaaagagtatgttcagacactttctgccatggccaaaaagtatgtatgaaagtatgtgtgtatttgtttgtaaaaggatgccaatgttttacctgatatcttagtgacacttcagttatctatgcattctttagatctgtgattcggtaaacaggcagccatgttcacgatgccttctatgtcttaccatatttttaattaacctgttaaatacagcttaaaatatttttattttatttattctatttttactgaaatatactgcattattgtgttaatgtattatctttcctggatattatctcccagtgtatccagatctaagtaatctcagtgaactatacattgcctaaaaagtggttttgtaatgatttgtagtcacatttctattgggatatgtagaagaaaaggcaaaatgcttaaagttccttttattttttaaaagcagctagatagacacagacttgccacctcatacatctgctccttggcaacatcaaggggaacgactagccaacatgcctatggctaaaaactttcctttgcagactaaagcactgcttggtgcttcgtttttctacccttcacaacatgtgtgatttcatctaagagatatatacatgtacacatgccctttgtttccacctggatacaagatcactcatagctaattaggaccattgttttttgttcatctgtcttgttgcatgaagggacattagacccatttccattaaaataagttcttggtgata

SEQ ID NO: 55721 - DNA, 947 bp, Homo sapiens
cagagccccaatatctggagtaatgctgctcttgtagaatagttgttacatttacatccagaaacatagggcgttatggcacagggcgtgtcctgagcattcagatgatgcagagccacggctgttgtgtacatgtgtgttggaaccactgagaaagatgtgttgcttttgttccctgtagtagattttccaacaccaaagactgagctggtccagaagttccacgtgcagtacttgggcatgttacctgtagacaaaccagtcggtatgtgaaatgtttattgtctttccactttgcaagtgtgcgggagctcacaggaggcgttcgccctccgaggagggtgaggtctgctgtttactctcacgccttgtcttgaatcaaactgtcacactgtcaccattgttttttgttcatctgtcttgttgcatgaagggacattagacccatttccattaaaataagttcttggtgataaactgtggcactgctacttctttttaaatccactttatgatttcaagatggacacttgtaagatgactcgacacaaggccattgcctggaagccccagagctttcctctgtttgtatggcccgttcatgtcccaggcattgcaacacaaactcaagatttcaccacaacatgacaagcattttcctaactgatattagcacaatttaactaataagccccttcgctctctagttggccaggcttaacctaatacacatctaacgtgtgtgccacacggccagtagaaagtttaacttcagcttcagggcaaagatacccactcacaccgtgtcaacgcaagcagtagttcctggcctccagagcagcttacttcccctgaaagaacgctttgttttcctttatgcccttttcctgttgaccacttttacacatttaaatgtaatttgttgtgagaataaatttagctgcata

SEQ ID NO: 55722 - DNA, 1650 bp, Homo sapiens
tggagaagtggaatctcgtcagcgccgctccctgcgcgggactcgcggaacggcactgagcatgctcagttgccggagcccgttctggtctcaagtaggaagctagtgcgctgtaaccgcatctgatctgggcgctccgggaagggcgagactggagcagagccgctgggcgccggagccgaggcgagcgccgcgcgcaccactggttggagttgctgtgggtgagctgctgtggtctgtagccaagcatgctgtggtcggatctgcccagccgtggaacagaaacatttgctggatggaaaatccataaaagaaagctcctgtgaaaagctgaggctgacaataatttaagcaaaatcagatcgatctctttgggctgcctgacctccttgggtgcttgctattaattaacagactttgtggggaaaaaaaggagcttgccttctgagctttgtaccaaagacctgggaaaactaaccatctcagtctttcctgaggacttgggaactgccgaggcctctgccaatgtgttgactgtcgctatgggctcactgttgtccaggcagctcatatttcaaattataacctatttcctgcaccattgctgacgcctggtgatccatgtcagaagtacttccagctgactcaggtgttgacaccttggcagtgtttatggccagcagcggaactacagacgtcacaaatcggaacagcccagccacaccaccaaacacccttaacctccgatcctcccacaatgaactgttgaacgctgaaataaaacacacagaaaccaagaacagcacacctcccaaatgcaggaaaaaatatgcactaactaacatccaggcggccatgggcctctcggatccagctgcacagcccctgctgggaaatggctctgccaacatcaagctggtgaaaaatggggagaaccagctccgtaaggctgcagagcaagggcagcaggaccccaacaaaaacctgagccccactgcagtcatcaacataacttctgagaagttagagggtaaagagccccacccacaggattcctcgagctgtgagattttaccctcccagcccaggagaactaagagcttcctaaattactatgcagatctggaaacctcagccagagaactagagcagaaccgaggcaatcaccatgggactgcggaagagaaatcccagccagtccagggccaggcctccaccatcattgggaatggcgatttgctgctgcagaaaccaaacagaccccagtccagccctgaagacggccaagtagccacagtgtcatccagcccagaaaccaagaaggatcatccgaaaacaggggccaaaaccgactgtgcactgcaccggatccagaacctggcaccgagcgatgaggagtccagctggacaacgttgtcccaagacagtgcctcacccagctccccggatgaaacaggtacccctggggaaggcgtagcctcagctggcacttttttttttttatcttttcaactattggagtaaatctctagactgaccaaaaatgtccattatgcagagaggaacgtgagcctcttgcggtaaaattgggcaatttatttgcaaaatattactgcattcctcaaccatattttaggtcagtttcatttt

SEQ ID NO: 55723 - DNA, 139 bp, Homo sapiens
tggccacacacacgattaggctttccagcctgcatgaagaagacagcgtgttttctcgttgtgtcccaggggaaagacatgtacctgatcctggagaatgacatgctcagcctggtggaccccatggaccgcagcgtgc

SEQ ID NO: 55724 - DNA, 564 bp, Homo sapiens
gttgatttggcagctttttgttttatatggttttagatggaaatgtgattcagtgtgctgtttagtttgggtaagaatcactggacgaagaaagataccgtgaatcccttttttctggtgctctgggggtttacttggccaaatgggttttgggccaccaggtgtcctgtatttgggctagatgtaagaagtatggacggcactgtccctccccacagtgaactcacagccacgtagcataatggagaatgggacccacatcacaccccatgacagcagtgtagttcagagcaagaatgacctccagaacagggtagccatgcagtgatggcctcttcagacatttgggcaaggttccgcctttcgagaaaaacacaggtcctttctgaattcggcctggctatactttctgaatgccagttcctatgtgctgccactcttaagcttgatcctgggatctcctgattggatgccgcataatgtctcttgcagaatgaagaggaagtcttagtggaatgtcgtgtgcgattcctgtccttcatgggtgttgggaaggacgtccac

SEQ ID NO: 55725 - DNA, 1774 bp, Homo sapiens
agatcttgaaaacacccgggccacacacgccgcgacctacagctctttctcagcgttggagtggagacggcgcccgcagcgccctgcgcgggtgaggtccgcgcagctgctggggaagagcccacctgtcaggctgcgctgggtcagcgcagcaagtggggctggccgctatctcgctgcacccggccgcgtcccgggctccgtgcgccctcgccccagctggtttggagttcaaccctcggctccgccgccggctccttgcgccttcggagtgtcccgcagcgacgccgggagccgacgcgccgcgcgggtacctagccatggctggggcgagcaggctgctctttctgtggctgggctgcttctgcgtgagcctggcgcagggagagagaccgaagccacctttcccggagctccgcaaagctgtgccaggtgaccgcacggcaggtggtggcccggactccgagctgcagccgcaagacaaggtctctgaacacatgctgcggctctatgacaggtacagcacggtccaggcggcccggacaccgggctccctggagggaggctcgcagccctggcgccctcggctcctgcgcgaaggcaacacggttcgcagctttcgggcggcagcagcagaaactcttgaaagaaaaggactgtatatcttcaatctgacatcgctaaccaagtctgaaaacattttgtctgccacactgtatttctgtattggagagctaggaaacatcagcctgagttgtccagtgtctggaggatgctcccatcatgctcagaggaaacacattcagattgatctttctgcatggaccctcaaattcagcagaaaccaaagtcaactccttggccatctgtcagtggatatggccaaatctcatcgagatattatgtcctggctgtctaaagatatcactcaattcttgaggaaggccaaagaaaatgaagagttcctcataggatttaacattacgtccaagggacgccagctgccaaagaggaggttaccttttccagagccttatatcttggtatatgccaatgatgccgccatttctgagccagaaagtgtggtatcaagcttacagggacaccggaattttcccactggaactgttcccaaatgggatagccacatcagagctgccctttccattgagcggaggaagaagcgctctactggggtcttgctgcctctgcagaacaacgagcttcctggggcagaataccagtataaaaaggatgaggtgtgggaggagagaaagccttacaagacccttcaggctcaggcccctgaaaagagtaagaataaaaagaaacagagaaaggggcctcatcggaagagccagacgctccaatttgatgagcagaccctgaaaaaggcaaggagaaagcagtggattgaacctcggaattgcgccaggagatacctcaaggtagactttgcagatattggctggagtgaatggattatctcccccaagtcctttgatgcctattattgctctggagcatgccagttccccatgccaaagtctttgaagccatcaaatcatgctaccatccagagtatagtgagagctgtgggggtcgttcctgggattcctgagccttgctgtgtaccagaaaagatgtcctcactcagtattttattctttgatgaaaataagaatgtagtgcttaaagtataccctaacatgacagtagagtcttgcgcttgcagataacctggcaaagaactcatttgaatgcttaattcaat

SEQ ID NO: 55726 - DNA, 702 bp, Homo sapiens
aaattgagtagtcatttcttaggataagcactgtctcaataacatcaggaatttggcagaaacttgatctgtaggagccagtgtatttgaccaaaggacattgagtcggggatgctgaccctagcccaaactctgtagtacctatagccgtgttgtacattatggtagccacatgtgactatttaattaaaattcagttcctcagttgcacttgacacatttcaagtacttcatagccacttgtggctagtggctaccatcttggatagcacacaggtagaatattgccatcttcacagatatttctattgggccgtgctgttctatagaattatttacaaagtgagtcaggtctaccacagtggagaaaagataatatttaggcagtacgtcatgtacctttaacacgccccacccaaggatcattacctggccatgagctgaccttgaaagccagaggcattcccaatggaaactgagaattttgatgaatgtataattgaacttaactgtcactatatttatctatttagcccatcatgttatctaagaacagataatgtatgcctaaccaaagtaaaatacctatgaagacatgattagcgtcactgtgagtctcagttatctttaaataataatcatattcaagttatagaagttacttatgttaaggtaggatttttgaattttaagaaatacaaa

SEQ ID NO: 55727 - DNA, 347 bp, Homo sapiens
gtcaaatccattaggttgacattcaagtcactggatttgtattagaaatgtattgttcattggggctggtggctcacacttgtaatcgtagcattttgggaggccaaatcaggaggactgtttgagcccaggtgtttgagaccagcctgggcaacacagtgagaccctgcctctacaaaaaaaataaaaataactagccaggcgtggtgacacatgcctgtagtcccagctacttggctgaggtgggaggattgcttgggcccagaaggtcaaggctgcattgagccttgattgtgccactgcaccccagcctgggtgacagagtgagactctgtcttaaaaaaaaa

SEQ ID NO: 55728 - DNA, 414 bp, Homo sapiens
catgttcttcttccttcagtctttcattctggttatgctttggtcccatttgttacatgtaggtagaattctgtcctaaaccttatctttgcccaagcattttaaaacatgagattttagaaaatccaggtgaggctgggtatggtagctcacacctatactcccagcacttagggaggccaaggtgggcagatcacttgaggccaggagtttgagaccagcctggcccgcatggcaaaacctcatctctacaaaaaaataaaaaattagccaggcatggtgggacacgcctgctgtactcccagctatgaggtaggaggatcacttgagctcaggagggcaaggcttcagtgagctgagatcatgccactgcactccagccggggcaacaaagggagaccctgtgtctcaaaa

SEQ ID NO: 55729 - DNA, 400 bp, Homo sapiens
tctgcactgaatctagggtaagacttcggtaggataggagaattaagttggtcttgaaattgaggcatgagaggggtccggcttgttggttgggagactgcctaaacaagttatagccacgccattctagacacttccatcctagaagggagggcccaggaagtctgtatataaccaactctagggcagaggctgccagctggtggcccgtgagccagacttgggccccagagatagatttgtttggtttgtggtgttgtaaataattttgaattagttgccaacatttgaaaatcaggacttgccttttctcttgaaaaatcaaaagttcaggcatcattggacccaaattcctgcccgataaaataagctggatttcagtagtcgtagcttctttaaa

SEQ ID NO: 55730 - DNA, 301 bp, Homo sapiens
tctagaccctaagagtttacatttgattcatttggcaatgacttactactgaaaggcactcaagtgccatgattgctgctgtgcttgtgtgagttttctcttttgtccctctcacccttggagcgttatgtgagtggacttggatgaggtctgtgggctagagatagtgactagattctgagggaagaactcgaatgtagtatcttgcctgagatagtctgaatctcagttgaatctaggaagagccctaggaataaattggagttgaaggtcttgagggagcaggtggtggctaaagggt

SEQ ID NO: 55731 - DNA, 1972 bp, Homo sapiens
ggccaggctggtattgaattcctgacctcctgatccacccgccttggcctcccaaagtgccaggactgcaggcatgagccaccgtgcctggcagattggaacgttttaacatgagaggagcacttccccaatttatcccttcatcctaagattgtgaaaaagtcccaaagagtgggaatggagacagactactgtattttaggtttaaaaagaaaaatccagaaagtgtcctgtgaagagctaggacccccagaggttctaatgcacatgacttgaaggtgatttgatgtgggagtgagggcagagggtggggtggctgtgcctgtggactcctgtggccctggggttgttagggcaggcagtccacagtcccagatccctgcccattttggctctttcttttacccactcatattttccttgaaaatgtttttgccagaacattaataactgtcagccttttagaatcaggagacttacgtacaaatctggattttcagcttttcttagaaaaactgtagtttctgacaacagtaggccccattcctcacagccagtcaccaccctcctcccattcctcacagccagtcaccaccctcctggaccatactcggccctgggccattcctcacagccagtcaccaccctcctcccattcctcacagccagtcaccaccctcctggaccacactcggccctgggccattcctcacagccagtcaccaccctcctggaccatactcagggccctggaggcctggcaacccaggccccaactcaaacttgtacattcagtctattcagtcggactcgcactggggcaagggtgacagacacgagaatggaaaattgagaaggctgcccgcaccagctgggtgggtgcagggggccccagctcatcatcagcactgtcgtggggtgggagtcgggggtaaaggttccgtctgaccctgaggggttgaggatattcaggtggtccagcctcccgcagaagacttccctgtcacccttggcagacaggtttcttctcacacggccctggcccatccactcgccatgaagccctctgtgctcagggtgatggagccccctccattctggcactgcactgtgggcatgagcttgccttaaaaagaaaggagaggccaggcacggtggctcgtgccctataatcccagcacactgggaggccaaggtgggaggattgctggagtccaggagtttctacatgggagactctgtctctacaaattttttttttttttttggagacagagtctcactttgtcacccaggctggagttcagtggcgtgatctcggctcacagcaacctccgcctccgtgggttcaagcgattctcctgcctcagcctcgtggagtagctgggattacaggcgcgcgccaccgggcctggctaatggtattcttagttgagacgggtttcgccatgttgatcgggccggtcaggctggaatttctgacctcaggtgatccaaccacctcagcctcccaaaatgctgggattataggcgtgagccactgcacctggcaaaaaattttttttaaaaaaggagaaagcagtttaaccacaaacagtgaaacagagctggcagacgcctgaaactccatggaaccatgcagctgtaccctagggctcctcccaggaaaagagagatgtcaacgtggcccaaggtgtcctgaagcactgggattggattaactcgagcgatggccttcccagccctccgtgctgcagagcctctgctcgctaggctgccttcatctcactctgtgtgctgtgcctgtgcacctgtcttgtcaataactgcatatattgtgttgcgttgcctgtcttgctggataactgcatatattgtgttcagttgtgtatttgttttgctttcagtctatatacagttgggtttccaacctctgattctggaataaacagttgcagcgtgtctgagtgaa

SEQ ID NO: 55732 - DNA, 1586 bp, Homo sapiens
ggtaccggccccgaaggatttaatcatattttccttgaaaatgtttttgccagaacattaataactgtcagccttttagaatcaggagacttacgtacaaatctggattttcagcttttcttagaaaaactgtagtttctgacaacagtaggccccattcctcacagccagtcaccaccctcctcccattcctcacagccagtcaccaccctcctggaccatactcggccctgggccattcctcacagccagtcaccaccctcctcccattcctcacagccagtcaccaccctcctggaccacactcggccctgggccattcctcacagccagtcaccaccctcctggaccatactcagggccctggaggcctggcaacccaggccccaactcaaacttgtacattcagtctattcagtcggactcgcactggggcaagggtgacagacacgagaatggaaaattgagaaggctgcccgcaccagctgggtgggtgcagggggccccagctcatcatcagcactgtcgtggggtgggagtcgggggtaaaggttccgtctgaccctgaggggttgaggatattcaggtggtccagcctcccgcagaagacttccctgtcacccttggcagacaggtttcttctcacacggccctggcccatccactcgccatgaagccctctgtgctcagggtgatggagccccctccattctggcactgcactgtgggcatgagcttgccttaaaaagaaaggagaggccaggcacggtggctcgtgccctataatcccagcacactgggaggccaaggtgggaggattgctggagtccaggagtttctacatgggagactctgtctctacaaattttttttttttttttggagacagagtctcactttgtcacccaggctggagttcagtggcgtgatctcggctcacagcaacctccgcctccgtgggttcaagcgattctcctgcctcagcctcgtggagtagctgggattacaggcgcgcgccaccgggcctggctaatggtattcttagttgagacgggtttcgccatgttgatcgggccggtcaggctggaatttctgacctcaggtgatccaaccacctcagcctcccaaaatgctgggattataggcgtgagccactgcacctggcaaaaaattttttttaaaaaaggagaaagcagtttaaccacaaacagtgaaacagagctggcagacgcctgaaactccatggaaccatgcagctgtaccctagggctcctcccaggaaaagagagatgtcaacgtggcccaaggtgtcctgaagcactgggattggattaactcgagcgatggccttcccagccctccgtgctgcagagcctctgctcgctaggctgccttcatctcactctgtgtgctgtgcctgtgcacctgtcttgtcaataactgcatatattgtgttgcgttgcctgtcttgctggataactgcatatattgtgttcagttgtgtatttgttttgctttcagtctatatacagttgggtttccaacctctgattctggaataaacagttgcagcgtgtctgagtgaa

SEQ ID NO: 55733 - DNA, 668 bp, Homo sapiens
tcatccacaggttataggaaaacttccacaattattttaaactaccctactttgcaccataacatttaaattttctattccttatttccctgaatcatggattttggagaaatattgtttaattttatcagtagagtttccccatctttggggggttgtgaactacatatatgcatttaaaaacaaaatgtgagagaagctacctgatttacctattatatgtgaaaaccagtggaaaaaacacaaaaactagaattttagtcattcttcacaatcacgacttctatgcacgttattttcaaccagtagtgaaaatgcaagtgtatgtaatgtatggttgacccagcattatttaggaatacaaatcttaagtattactttcttcctccaaacaagtttttaaaaaataggataaattttttttctataaaatataaaacatggaaaatagggaatgctgtttttgaggtaatattaataatacacagaattttcattagtgtcgaaggatctaaaaagacaaagtatatcatgggaataaaaaaagatagaaaaggaaacagtttaggaatttgccttaacaaatgaaaatgcctttttaaaatggcatcagtcaagcaagttgctgtgcattattatatgtccaaataaaatgctaattcataaaa

SEQ ID NO: 55734 - DNA, 273 bp, Homo sapiens
gttttcctgatgtcttcgttggaatgtaagctttgtgaaagccaggggccctatgtgtcatctttaccactatgtcttagatcttagagcagcccatcataagttctaataagtaattgtggaattggatgagaaaatgaatatgagtcagttttacaatgctgcatgcttcccagattattttaacagtctaggggatgtggaaagattttgttttaaaaacgtttaaaagtccacgttttgtttgatattgttcagaggaagtgaaaatgt

SEQ ID NO: 55735 - DNA, 395 bp, Homo sapiens
ctcacctattcccttagctctaaatgtcacctatatgttgatgattcctgagtttatgtcttctgagatccacgtggatgtctagtagacatctcacacctaacacgtctacaaccaaactcccagttccatctcccctgttcccatcccaaccccacttatcctctttgacctgcaccttctgcatctcaacaaatggcaccacaaccaatgctcaagccagcacctaggagtcatccttgattcctctgagccccgcttccttccctggctacacacagaatcattatcttgcgccgttgactctgtgccctgaaatatcccaaatctgttcacttctctgaatgtccacttttagtaccttcagctctcgcctggacacctgcagtggtttt

SEQ ID NO: 55736 - DNA, 120 bp, Homo sapiens
ctaacaccaaatgtggtgttccatcaccacatttatagaaaaatatatattacaattattggtttctatgtctgtttccagttctcctcaacttgctcctcaaggtacagtatccatgtc

SEQ ID NO: 55737 - DNA, 262 bp, Homo sapiens
cctttttattttgtaatcttatctgttattataaagcagttttaaacagagaactaatttcttccctaatttcatgttaataagatgatccattgaccccacattctagtaaatttcattaaaatatctctactgaattggactaaaaattcatttatgaaaagtttatgagagtcttccatgaggctttaactcaaagttagtaaatatgaagttatcactcctcactcaggtgaaaatcaatgtgtatgtatagctgtgg

SEQ ID NO: 55738 - DNA, 168 bp, Homo sapiens
tgggagggcagccgtgtgagatgcggggttgcgagcgtggaaacactcgcagtcgccagtgctgaggcatgtttcagccggggcggaatcacatgcattaattattgtacagagatgtctttagtagaaaatgattttgaaattcagtttaatttcattgtaatgtgc

SEQ ID NO: 55739 - DNA, 105 bp, Homo sapiens
tagctagggaacttttaaaaatgcagatctgattattaactcccctgaataaaaagtggtttcccatttctctcagggtaaagacaaaagtcctgaacataaccc

SEQ ID NO: 55740 - DNA, 662 bp, Homo sapiens
atcagtgaggggcagggaaagaggatggagttttagtccttagtgtccaagttgtgtatatttaggggtcggtgacaaggagagaagggagtaaagtgtttgactcttttccctccattattcctcaaggtacctaagggctcatgacagtgttttgtttaatgtgctattcgttctaatatactaagaacccacaaaaaggcaatataaatattaagccagagaaatatcttgaacttcatttattttaaatgtgtactgttatggcaaacaaaagcagctccattggccgggaatctaagacaacgttgtaatatgggcatgtgtaaaatcttgaattgttttctaatttgtgttcggcttcaaatatttcattacatactttgatcctgatcctgacataaatgaaattaagtgtcttatggttgaataaactagatgaaacaaagaagccgtgatttttctcctaggcaggtataaatatacaggtgaccattgaaaaacacaagggttaggggagctgacccctgggcagttgaaaaatctacctgtaagttttgactcccccaaaacttaacttacttaactaccaataacctgttgaccagaagccttaccaataacataaacaattaacatatatatgtgtatatatatatatg

SEQ ID NO: 55741 - DNA, 247 bp, Homo sapiens
tctgcaggatggagaggtttgaaaattgctaagtgctttgtacaacttataaaaatccacgttgcccagtttccaagcagtctcatgttcagtagacaaaaggcaattttcaaactgaaattctttacttgcatttctatttctattttccttccttcctttcttccttccttccttccttctttcctttcctttcctttcctttcctttcctttcctttcctttcctttcctttcctttcctttcc

SEQ ID NO: 55742 - DNA, 479 bp, Homo sapiens
tgattaagtcacatcaggtaggccctaggcctgggtctgacccacgcagttaccccctcaggattctgagaaggtgagaaaggaggacgtgaaggaggctctgtggagccagactgcctacttccgccacccacaccatctgtgactcagcaagttactcaacctttctagacctcagtttccttatgggcaaaatgagactaatgtaacatctctctcataggattgttatgatgattaaagcaggtaatgcccagggcttgacatctcatgttccatattttgcatgggagaaaattgagttcagagaaaagaacttgtcaaaagtaacacatgcagtcactatttgaatccaggtctttcttgagccaagtccacgttcactgtactgggaagctcagtatatataggagaaggtactggaacattgttggaaacctacagctgagtatagaggtgagaggctttatcctggaggc

SEQ ID NO: 55743 - DNA, 268 bp, Homo sapiens
tcaagccttaatgaaatcttacatccacaggtagggaaacccactagactagcatattcgagagtttaaattttgctttatagctctcttaataaagatatgtatttctcagatttgccatgcactttcagtggatgtaagatttcattaaggcttgagtactagcatgaggtcttagtggcacgcactcacacccaattctgttccccctatatgggcaggggacattgctgacagctttgcattgtccctctgttcttatgtagac

SEQ ID NO: 55744 - DNA, 405 bp, Homo sapiens
ccgaggcaggcagatcacctcaggtcaggagttcaacaccagcctggccaacatggtgaaaccctgtctctgctaaaaatacaaaaattagtcaagtgcgatggaacacacctgtgatcccagctacttgggagactgaggcaggagaatcacttaaacccaggaggcagaggttacagtgagctgagactgcaccactgcactccagcctgggcaactaagactccgcctcaattaaaataaaataaaataaaataaaataaaataaaataaaataaaaagcttgcttcgtggttaaatctaagtcaaggtcataacttcagagatgaaaagccttcttggctacttttagaacacttgattattttcagcatattaaggtactaattttgttggctttaaaat

SEQ ID NO: 55745 - DNA, 1035 bp, Homo sapiens
ccatccttgtatcacaggcaatatgtctttctggaaatctaatgaaccataccaaatctgcatgatgaagattgtgtaatgatggtgatatcatgccagttatcctcaaagtgggaatatgaccattagctggcattttttaagatttccttagaagggtttaatcaacactgccattacacatggatttaacaaaagacttttgaaaattttttacatactgattttagaataatcctcaaggttctatagtcatttttagtggaagacttaaaaagaaaggaacaatttttactgtgacttcaatttcatagtattttaaacatattttgtaattcagaatgtttagcaatccctatgtcctgtttcacatgcatggtaactgatggtgggttgcctacaggctggaagatttggagagagccattttgtttcataaatcagtttttattgcacagaagcagctggttgtatttcaagttgggaaaaagaaaagtaaatgccagaaaaggcaaaggataaacttagtaagccatttattttgttttagaattgtttttgcaaagcaaatttttttaaaaaaaggtcaacaaagtgaatcagcactagcattttcttgatggttgactcaatgtataattaacaaatatacatagcagagtcaattaatcatagtgccattatgtcacttatttgtcattgcaaagtattcagtcatgttgtctagatttactttagatggtgcaaaatttccagatagtaacctatgtaaaaggatttgtaatttccttgtaattcctgcctattagtccatattctgatttccttatgttcatcactgatatgttcctgatcagggtcattgctagtagttgagcatttactggttgaacattgtttaatggttagatgttatgtgtgtctgcatttaaaaaaattgtgtacatgttatttcactattggtattacaatattcataaccacatgataaacagaaatgtacccaataatttcctataaaatttttcaaagtcc

SEQ ID NO: 55746 - DNA, 355 bp, Homo sapiens
caccacagcaccatcatgtgttagtagttgtttttcccagaaagagcagctctgtgccatatagctaggtagctacatgccaggttggtcaccttgttgcatgtgtttcacgtttacccaaagaagtaccctattgcttatgagactatgctttgaatagtcccaagatattttcccacccttcctctttcaagttatctattcctgcattaaaaaccactgcagggctaggcatggtgacttatgcctgtacccaacactttgagaggctgaggtgggaggatcacttgagcccaggagtctgagaccagcctaggcaacagtgacaccccatctctacttacagaaaaaaaaa

SEQ ID NO: 55747 - DNA, 450 bp, Homo sapiens
aagaagggcaagaaagaggctcaaattacctagctggtctcagaggggacctcaaaagtgcagctcctctccacccccatggcaagatgacaccttaaggcagctgtttctgttggccctgggcccacctctctgtgcccctgggctctgccgggtttggtttcctgtggggtggagagatggcaggggatcctctggcccttggggagtgtgggatactggaaggaggtagggaagagacaatagttctgtctttctcccgctccctgtcccgggcctgggcaagcagcagcttagctgggcagcacctgagcaggggcaaggctctccacacggtctgacctgccgtgtggagggagaaggaggacagcagagaagactgctgtcagaggggagttcagtagtacctaatgagctggattcttacttacagggttataaagtgtgaag

SEQ ID NO: 55748 - DNA, 321 bp, Homo sapiens
gaagcacattgcgggccgttggatgccaagccacgatggagctgagatgctttatcattaatatagttcagaaaaaactaggtaatctttcttacttcctttttaaaaatctgtgcccatcaagacaaattaaatgcttaaaaagttacaagtaatatttcacacatgtatatacataaacagagtgagaaaggaagagatatttacagaaaaaggtatacttgaaaaataaagctttaaatagtctttctgaatttaatgaatacaagcatcgtgttagaaaaaaaaaaaagttgcatcgactgaccagatgacatacaa

SEQ ID NO: 55749 - DNA, 343 bp, Homo sapiens
cctcagggcaaacattgcctgttagagaagtcctatgtgaagtagcaatggcccagctctgatacccccactatgccagacattggctgggagcatgtccgggagagtacgaactccataagaatcaaaaagtgttacagtcagtggctctcagtgagttaatagtctttgcagcaggctattttttggagggagaactgagcagcctgctcacaggcctgccacaaagtcaaacaaagggtgtccatcatctagtccttgctaacatcccataacccaccttttacaactcaatggcatagaccctaggtctggctatgcatcaactggtgtgtgctctatc

SEQ ID NO: 55750 - DNA, 483 bp, Homo sapiens
gacttcatcccagcaactcggaatgcttggcccgggcggcactcggcctctccgcagcagttctcgaactggcctccttgaacgtccgcttcgccttcgcttctgcaacctggatctgggggactgcgggccaggcgcggcgtgacccctggtgaacggtggccgccttttcccacccctgccctcccatcctcccttcccgtttcaccccgccccctctctcctccccaagcctgacagcccgcgagctgccaagcagggcgcagccatgggaagaggaggagggctagggagcggcggcggcggcggcagcggcagcagcggctgctacagtggcggtggcggcggcggctgctgctgagcccgggcggcggcggggaccccgggctggggccacgccggaggccccggcaccattggccccagcgcagacggaacccgcgctctctgatcagaggcgaagctcggaggtctacaggtatg

SEQ ID NO: 55751 - DNA, 379 bp, Homo sapiens
ggattctaatcaggagaccagtgctcatgtgcacagctttgagtgtgaagatctaaaaattttagttggtaggatgattacagattattttcatcttcctctttacagattattttcatcttcctctttaaacttttgtatatttttcacattttctagaaggaagttttagaaacagaagtgggaaaaaaaacaacttaaaaaaagccccgggccaggcgcacggcgtcacacctgtaatcccagcactttgggaggctgaggtgggcggatcacgaggtcaggaaatcgagactatcctggccaacacagtgaaaccccgtctctactaaaatgcaaaaaattagccgggcatggtggcgggcgcctgtagtcccag

SEQ ID NO: 55752 - DNA, 690 bp, Homo sapiens
catcttttcacagaagagactccttaaccactggttctgttgggtggagtgactcaggtcctgtgttttcaaggctgccattggctatgagccagaggtgggtgctcatttaggctgtggccgtggtggccacaggccatggcaccatttcttgccatgatgcacatcccaagtgaagtggggtaggactctttgaggttccctttctgtgtgaacagttctgagaacagggcttcctggatgtcccctcccaccctgacacgggccacaacagttagggactgcacaagcagagtggaagccaaaccacaagcggagcggaagccaaatccagaatgggccaagtgacatgtcaccaagttaaggtgaaggagggagagcccaggtgtggctggggcaggcctgagagtgggggtgagatgacaatagagaaagcagagctttctccccagcgttgcaggatttcggtatgctgtcccctctggcttatggtgttgccccttctttcttcttcaaatacccctgacaaagggatcaatcttagagagtttattaaaaaaaaatcttcttctaaatagtatttgggcaggagatgatgtatacaggagcgagggccagggaggctgtagccagtcctagaataaacactctgtgcatctctatttcttgtgatccttccatcactcagac

SEQ ID NO: 55753 - DNA, 494 bp, Homo sapiens
cccgggctgttggaattcggcactagcctcaaaggccctgccctgctattatcgtcaccttggtgactagatttcagcctatgaattctggaggcggacacaaaaattcagattaaactactctgcttctgtttctctaaaatctacatccttctcatatacaaaatacatgcatttctccccagtagccccaaatatcaactcattttagcatcaactttaaaattgtagtccaaagtgtgatttaaatgttatctgagtcaaacatgggtaagactcaaggtacaatttatcctgagtccaactgttcttgctgcgaacctaggaaatcaaacatgttatgtgcttccaaaatacagtggttggagaggcataggataaacattcccattccagaaaggagaaacaggaaagaagaaaggagtaacaagtttcaagcaacttccaaaattgaatgtgacaaacagtattaaaccttaagcctcaagaataat

SEQ ID NO: 55754 - DNA, 3540 bp, Homo sapiens
cattggaatggcactcagggcaaaggcagaggtgtgcatggcagtgccctggctgtccctgcaaagggcacaggcactgggcacgagagccgcccgggtccccaggacagtgctgccctttgaagccatgccccagcgtccaggcaacaggtggctgaggctgctgcagatctggagggagcagggttatgaggacctgcacctggaagtacaccagaccttccaggaactggggcccattttcaggtacgacttgggaggagcaggcatggtgtgtgtgatgctgccggaggacgtggagaagctgcaacaggtggacagcctgcatccccacaggatgagcctggagccctgggtggcctacagacaacatcgtgggcacaaatgtggcgtgttcttgctgaatgggcctgaatggcgcttcaaccgattgcggctgaatccagaagtgctgtcgcccaacgctgtgcagaggttcctcccgatggtggatgcagtggccagggacttctcccaggccctgaagaagaaggtgctgcagaacgcccgggggagcctgaccctggacgtccagcccagcatcttccactacaccatagaagccagcaacttggctctttttggagagcggctgggcctggttggccacagccccagttctgccagcctgaacttcctccatgccctggaggtcatgttcaaatccaccgtccagctcatgttcatgcccaggagcctgtctcgctggaccagccccaaggtgtggaaggagcactttgaggcctgggactgcatcttccagtacggcgacaactgtatccagaaaatctatcaggaactggccttcagccgccctcaacagtacaccagcatcgtggcggagctcctgttgaatgcggaactgtcgccagatgccatcaaggccaactctatggaactcactgcagggagcgtggacacgacggtgtttcccttgctgatgacgctctttgagctggctcggaaccccaacgtgcagcaggccctgcgccaggagagcctggccgccgcagccagcatcagtgaacatccccagaaggcaaccaccgagctgcccttgctgcgtgcggccctcaaggagaccttgcggctctaccctgtgggtctgtttctggagcgagtggtgagctcagacttggtgcttcagaactaccacatcccagctgggacattggtgcgcgtgttcctctactctctgggtcgcaaccccgccttgttcccgaggcctgagcgctataacccccagcgctggctagacatcaggggctccggcaggaacttctaccacgtgccctttggctttggcatgcgccagtgccttgggcggcgcctggcagaggcagagatgctgctgctgctgcaccatgtgctgaaacacctccaggtggagacactaacccaagaggacataaagatggtctacagcttcatattgaggcccagcatgttccccctcctcaccttcagagccatcaactaatcacgtctctgcacccagggtcccagcctggccaccagcctccctttctgcctgaccccaggccacccctcttctctcccacatgcacagcttcctgagtcacccctctgtctaaccagccccagcacaaatggaactcccgagggcctctaggaccagggtttgccaggctaagcagcaatgccagggcacagctggggaagatcttgctgaccttgtccccagccccacctggccctttctccagcaagcactgtcctctgggcagtttgcccccatccctcccagtgctggctccaggctcctcgtgtggccatgcaagggtgctgtggttttgtcccttgccttcctgcctagtctcacatgtccctgttcctcttcccctggccagggcccctgcgcagactgtcagagtcattaagcgggatcccagcatctcagagtccagtcaagttccctcctgcagcctgccccctaggcagctcgagcatgccctgagctctctgaaagttgtcgccctggaatagggtcctgcagggtagaataaaaaggcccctgtggtcacttgtcctgacatccccattttcaagtgatacaactgagtctcgagggacgtgtgttccccagctgatcgtgtcagcctcatgccccaggcctcatctttcatggaccaggccttgttccaggagtgggcgttgggtcctctgcttcctgtgctgtcccctggggaaggtcccaaggatgctgtcaggagatggaagagtcatgtggggtgggaacctggggtgtggttccagaaatgtttttggcaacaggagagacaggattgggccaacaaggactcagacgagttttattgactcatttctctggttgatacggagccatgtcatgtgccacgacctggggtgggcacagggaggctgcagtttcctgcgtgaacctgccttgggcctcatctgctcctagcccagcagagagagttgacccctcctgaactggccactccccagtgctcctgtgcagggagaggaagcacccggtttgagagtgtacccagccagactgtctttatctccatggattttcatcagggcaaagatcacagcagccagctcctggtggctgatgaggatcagagcatttgttcccccatgaaaggggaaatccctatggcatcattccagtggtggtcagtagatccaggacgccctgcaggactcagcctgtacagggagatgaagtgccccaggttgggagcacacctagctagagttatttgtgttaatctattcaggatgctctaagaaaacgccatagactgggttgctgacaaacatcagaattctatttctcatggttctgaaggcttagaaggctaagatcaaggtgtcagcaggttctgtgtctggtgaggacccacctcttgtttcatagataaaaccttcttgctgtgtcctcacatggtggaaaagggcaagacagctcacagagaccttttttataaggacgccagttccattcaagagggcactgcctgcattcccttcccccctcaaaggccctgccctgctattatcgtcaccttggtgactagatttcagcctatgaattctggaggcggacacaaaaattcagattaaactactctgcttctgtttctctaaaatctacatccttctcatatacaaaatacatgcatttctccccagtagccccaaatatcaactcattttagcatcaactttaaaattgtagtccaaagtgtgatttaaatgttatctgagtcaaacatgggtaagactcaaggtacaatttatcctgagtccaactgttcttgctgcgaacctaggaaatcaaacatgttatgtgcttccaaaatacagtggttggagaggcataggataaacattcccattccagaaaggagaaacaggaaagaagaaaggagtaacaagtttcaagcaacttccaaaattgaatgtgacaaacagtattaaaccttaagcctcaagaataat

SEQ ID NO: 55755 - DNA, 3572 bp, Homo sapiens
  misc_feature (3553)..(3553): n is a, c, g, or t
cattggaatggcactcagggcaaaggcagaggtgtgcatggcagtgccctggctgtccctgcaaagggcacaggcactgggcacgagagccgcccgggtccccaggacagtgctgccctttgaagccatgccccagcgtccaggcaacaggtggctgaggctgctgcagatctggagggagcagggttatgaggacctgcacctggaagtacaccagaccttccaggaactggggcccattttcaggtacgacttgggaggagcaggcatggtgtgtgtgatgctgccggaggacgtggagaagctgcaacaggtggacagcctgcatccccacaggatgagcctggagccctgggtggcctacagacaacatcgtgggcacaaatgtggcgtgttcttgctgaatgggcctgaatggcgcttcaaccgattgcggctgaatccagaagtgctgtcgcccaacgctgtgcagaggttcctcccgatggtggatgcagtggccagggacttctcccaggccctgaagaagaaggtgctgcagaacgcccgggggagcctgaccctggacgtccagcccagcatcttccactacaccatagaagccagcaacttggctctttttggagagcggctgggcctggttggccacagccccagttctgccagcctgaacttcctccatgccctggaggtcatgttcaaatccaccgtccagctcatgttcatgcccaggagcctgtctcgctggaccagccccaaggtgtggaaggagcactttgaggcctgggactgcatcttccagtacggcgacaactgtatccagaaaatctatcaggaactggccttcagccgccctcaacagtacaccagcatcgtggcggagctcctgttgaatgcggaactgtcgccagatgccatcaaggccaactctatggaactcactgcagggagcgtggacacgacggtgtttcccttgctgatgacgctctttgagctggctcggaaccccaacgtgcagcaggccctgcgccaggagagcctggccgccgcagccagcatcagtgaacatccccagaaggcaaccaccgagctgcccttgctgcgtgcggccctcaaggagaccttgcggctctaccctgtgggtctgtttctggagcgagtggtgagctcagacttggtgcttcagaactaccacatcccagctgggacattggtgcgcgtgttcctctactctctgggtcgcaaccccgccttgttcccgaggcctgagcgctataacccccagcgctggctagacatcaggggctccggcaggaacttctaccacgtgccctttggctttggcatgcgccagtgccttgggcggcgcctggcagaggcagagatgctgctgctgctgcaccatgtgctgaaacacctccaggtggagacactaacccaagaggacataaagatggtctacagcttcatattgaggcccagcatgttccccctcctcaccttcagagccatcaactaatcacgtctctgcacccagggtcccagcctggccaccagcctccctttctgcctgaccccaggccacccctcttctctcccacatgcacagcttcctgagtcacccctctgtctaaccagccccagcacaaatggaactcccgagggcctctaggaccagggtttgccaggctaagcagcaatgccagggcacagctggggaagatcttgctgaccttgtccccagccccacctggccctttctccagcaagcactgtcctctgggcagtttgcccccatccctcccagtgctggctccaggctcctcgtgtggccatgcaagggtgctgtggttttgtcccttgccttcctgcctagtctcacatgtccctgttcctcttcccctggccagggcccctgcgcagactgtcagagtcattaagcgggatcccagcatctcagagtccagtcaagttccctcctgcagcctgccccctaggcagctcgagcatgccctgagctctctgaaagttgtcgccctggaatagggtcctgcagggtagaataaaaaggcccctgtggtcacttgtcctgacatccccattttcaagtgatacaactgagtctcgagggacgtgtgttccccagctgatcgtgtcagcctcatgccccaggcctcatctttcatggaccaggccttgttccaggagtgggcgttgggtcctctgcttcctgtgctgtcccctggggaaggtcccaaggatgctgtcaggagatggaagagtcatgtggggtgggaacctggggtgtggttccagaaatgtttttggcaacaggagagacaggattgggccaacaaggactcagacgagttttattgactcatttctctggttgatacggagccatgtcatgtgccacgacctggggtgggcacagggaggctgcagtttcctgcgtgaacctgccttgggcctcatctgctcctagcccagcagagagagttgacccctcctgaactggccactccccagtgctcctgtgcagggagaggaagcacccggtttgagagtgtacccagccagactgtctttatctccatggattttcatcagggcaaagatcacagcagccagctcctggtggctgatgaggatcagagcatttgttcccccatgaaaggggaaatccctatggcatcattccagtggtggtcagtagatccaggacgccctgcaggactcagcctgtacagggagatgaagtgccccaggttgggagcacacctagctagagttatttgtgttaatctattcaggatgctctaagaaaacgccatagactgggttgctgacaaacatcagaattctatttctcatggttctgaaggcttagaaggctaagatcaaggtgtcagcaggttctgtgtctggtgaggacccacctcttgtttcatagataaaaccttcttgctgtgtcctcacatggtggaaaagggcaagacagctcacagagaccttttttataaggacgccagttccattcaagagggcactgcctgcattcccttcccccctcaaaggccctgccctgctattatcgtcaccttggtgactagatttcagcctatgaattctggaggcggacacaaaaattcagattaaactactctgcttctgtttctctaaaatctacatccttctcatatacaaaatacatgcatttctccccagtagccccaaatatcaactcattttagcatcaactttaaaattgtagtccaaagtgtgatttaaatgttatctgagtcaaacatgggtaagactcaaggtacaatttatcctgagtccaactgttcttgctgcgaacctaggaaatcaaacatgttatgtgcttccaaaatacagtggttggagaggcataggataaacattcccattccagaaaggagaaacaggaaagaagaaaggagtaacaagtttcaagcaacttccaaaattgaatgtgacaaacagtattaaaccttaagcctcaagaataataaaaaaaaaacantcattggccgccgtttaca

SEQ ID NO: 55756 - DNA, 3516 bp, Homo sapiens
  misc_feature (3497)..(3497): n is a, c, g, or t
cattggaatggcactcagggcaaaggcagaggtgtgcatggcagtgccctggctgtccctgcaaagggcacaggcactgggcacgagagccgcccgggtccccaggacagtgctgccctttgaagccatgccccagcgtccaggcaacaggtggctgaggctgctgcagatctggagggagcagggttatgaggacctgcacctggaagtacaccagaccttccaggaactggggcccattttcaggtacgacttgggaggagcaggcatggtgtgtgtgatgctgccggaggacgtggagaagctgcaacaggtggacagcctgcatccccacaggatgagcctggagccctgggtggcctacagacaacatcgtgggcacaaatgtggcgtgttcttgctgaatgggcctgaatggcgcttcaaccgattgcggctgaatccagaagtgctgtcgcccaacgctgtgcagaggttcctcccgatggtggatgcagtggccagggacttctcccaggccctgaagaagaaggtgctgcagaacgcccgggggagcctgaccctggacgtccagcccagcatcttccactacaccatagaagccagcaacttggctctttttggagagcggctgggcctggttggccacagccccagttctgccagcctgaacttcctccatgccctggaggtcatgttcaaatccaccgtccagctcatgttcatgcccaggagcctgtctcgctggaccagccccaaggtgtggaaggagcactttgaggcctgggactgcatcttccagtacggcgacaactgtatccagaaaatctatcaggaactggccttcagccgccctcaacagtacaccagcatcgtggcggagctcctgttgaatgcggaactgtcgccagatgccatcaaggccaactctatggaactcactgcagggagcgtggacacgacggtgtttcccttgctgatgacgctctttgagctggctcggaaccccaacgtgcagcaggccctgcgccaggagagcctggccgccgcagccagcatcagtgaacatccccagaaggcaaccaccgagctgcccttgctgcgtgcggccctcaaggagaccttgcggctctaccctgtgggtctgtttctggagcgagtggtgagctcagacttggtgcttcagaactaccacatcccagctgggacattggtgcgcgtgttcctctactctctgggtcgcaaccccgccttgttcccgaggcctgagcgctataacccccagcgctggctagacatcaggggctccggcaggaacttctaccacgtgccctttggctttggcatgcgccagtgccttgggcggcgcctggcagaggcagagatgctgctgctgctgcaccatgtgctgaaacacctccaggtggagacactaacccaagaggacataaagatggtctacagcttcatattgaggcccagcatgttccccctcctcaccttcagagccatcaactaatcacgtctctgcacccagggtcccagcctggccaccagcctccctttctgcctgaccccaggccacccctcttctctcccacatgcacagcttcctgagtcacccctctgtctaaccagccccagcacaaatggaactcccgagggcctctaggaccagggtttgccaggctaagcagcaatgccagggcacagctggggaagatcttgctgaccttgtccccagccccacctggccctttctccagcaagcactgtcctctgggcagtttgcccccatccctcccagtgctggctccaggctcctcgtgtggccatgcaagggtgctgtggttttgtcccttgccttcctgcctagtctcacatgtccctgttcctcttcccctggccagggcccctgcgcagactgtcagagtcattaagcgggatcccagcatctcagagtccagtcaagttccctcctgcagcctgccccctaggcagctcgagcatgccctgagctctctgaaagttgtcgccctggaatagggtcctgcagggtagaataaaaaggcccctgtggtcacttgtcctgacatccccattttcaagtgatacaactgagtctcgagggacgtgtgttccccagctgatcgtgtcagcctcatgccccaggcctcatctttcatggaccaggccttgttccaggagtgggcgttgggtcctctgcttcctgtgctgtcccctggggaaggtcccaaggatgctgtcaggagatggaagagtcatgtggggtgggaacctggggtgtggttccagaaatgtttttggcaacaggagagacaggattgggccaacaaggactcagacgagttttattgactcatttctctggttgatacggagccatgtcatgtgccacgacctggggtgggcacagggaggctgcagtttcctgcgtgaacctgccttgggcctcatctgctcctagcccagcagagagagttgacccctcctgaactggccactccccagtgctcctgtgcagggagaggaagcacccggtttgagagtgtacccagccagactgtctttatctccatggattttcatcagggcaaagatcacagcagccagctcctggtggctgatgaggatcagagcatttgttcccccatgaaaggggaaatccctatggcatcattccagtggtggtcagtagatccaggacgccctgcaggactcagcctgtacagggagatgaagtgccccaggttgggagcacacctagctagagttatttgtgttaatctattcaggatgctctaagaaaacgccatagactgggttgctgacaaacatcagaattctatttctcatggttctgaaggcttagaaggctaagatcaaggtgtcagcaggttctgtgtctggtgaggacccacctcttgtttcatagataaaaccttcttgctgtgtcctcacatggtggaaaagggcaagacagctcacagagaccttttttataaggacgccagttccattcaagagggcactgcctgcattcccttcccccctcaaaggccctgccctgctattatcgtcaccttggtgactagatttcagcctatgaattctggaggcggacacaaaaattcagattaaactactctgcttctgtttctctaaaatctacatccttctcatatacaaaatacatgcatttctccccagtagccccaaatatcaactcattttagcatcaactactcaaggtacaatttatcctgagtccaactgttcttgctgcgaacctaggaaatcaaacatgttatgtgcttccaaaatacagtggttggagaggcataggataaacattcccattccagaaaggagaaacaggaaagaagaaaggagtaacaagtttcaagcaacttccaaaattgaatgtgacaaacagtattaaaccttaagcctcaagaataataaaaaaaaaacantcattggccgccgtttaca

SEQ ID NO: 55757 - DNA, 3810 bp, Homo sapiens
  misc_feature (3592)..(3593): n is a, c, g, or t
  misc_feature (3596)..(3596): n is a, c, g, or t
  misc_feature (3604)..(3604): n is a, c, g, or t
  misc_feature (3609)..(3610): n is a, c, g, or t
  misc_feature (3616)..(3616): n is a, c, g, or t
  misc_feature (3627)..(3627): n is a, c, g, or t
  misc_feature (3675)..(3675): n is a, c, g, or t
  misc_feature (3727)..(3727): n is a, c, g, or t
cattggaatggcactcagggcaaaggcagaggtgtgcatggcagtgccctggctgtccctgcaaagggcacaggcactgggcacgagagccgcccgggtccccaggacagtgctgccctttgaagccatgccccagcgtccaggcaacaggtggctgaggctgctgcagatctggagggagcagggttatgaggacctgcacctggaagtacaccagaccttccaggaactggggcccattttcaggtacgacttgggaggagcaggcatggtgtgtgtgatgctgccggaggacgtggagaagctgcaacaggtggacagcctgcatccccacaggatgagcctggagccctgggtggcctacagacaacatcgtgggcacaaatgtggcgtgttcttgctgaatgggcctgaatggcgcttcaaccgattgcggctgaatccagaagtgctgtcgcccaacgctgtgcagaggttcctcccgatggtggatgcagtggccagggacttctcccaggccctgaagaagaaggtgctgcagaacgcccgggggagcctgaccctggacgtccagcccagcatcttccactacaccatagaagccagcaacttggctctttttggagagcggctgggcctggttggccacagccccagttctgccagcctgaacttcctccatgccctggaggtcatgttcaaatccaccgtccagctcatgttcatgcccaggagcctgtctcgctggaccagccccaaggtgtggaaggagcactttgaggcctgggactgcatcttccagtacggcgacaactgtatccagaaaatctatcaggaactggccttcagccgccctcaacagtacaccagcatcgtggcggagctcctgttgaatgcggaactgtcgccagatgccatcaaggccaactctatggaactcactgcagggagcgtggacacgacggtgtttcccttgctgatgacgctctttgagctggctcggaaccccaacgtgcagcaggccctgcgccaggagagcctggccgccgcagccagcatcagtgaacatccccagaaggcaaccaccgagctgcccttgctgcgtgcggccctcaaggagaccttgcggctctaccctgtgggtctgtttctggagcgagtggtgagctcagacttggtgcttcagaactaccacatcccagctgggacattggtgcgcgtgttcctctactctctgggtcgcaaccccgccttgttcccgaggcctgagcgctataacccccagcgctggctagacatcaggggctccggcaggaacttctaccacgtgccctttggctttggcatgcgccagtgccttgggcggcgcctggcagaggcagagatgctgctgctgctgcaccatgtgctgaaacacctccaggtggagacactaacccaagaggacataaagatggtctacagcttcatattgaggcccagcatgttccccctcctcaccttcagagccatcaactaatcacgtctctgcacccagggtcccagcctggccaccagcctccctttctgcctgaccccaggccacccctcttctctcccacatgcacagcttcctgagtcacccctctgtctaaccagccccagcacaaatggaactcccgagggcctctaggaccagggtttgccaggctaagcagcaatgccagggcacagctggggaagatcttgctgaccttgtccccagccccacctggccctttctccagcaagcactgtcctctgggcagtttgcccccatccctcccagtgctggctccaggctcctcgtgtggccatgcaagggtgctgtggttttgtcccttgccttcctgcctagtctcacatgtccctgttcctcttcccctggccagggcccctgcgcagactgtcagagtcattaagcgggatcccagcatctcagagtccagtcaagttccctcctgcagcctgccccctaggcagctcgagcatgccctgagctctctgaaagttgtcgccctggaatagggtcctgcagggtagaataaaaaggcccctgtggtcacttgtcctgacatccccattttcaagtgatacaactgagtctcgagggacgtgtgttccccagctgatcgtgtcagcctcatgccccaggcctcatctttcatggaccaggccttgttccaggagtgggcgttgggtcctctgcttcctgtgctgtcccctggggaaggtcccaaggatgctgtcaggagatggaagagtcatgtggggtgggaacctggggtgtggttccagaaatgtttttggcaacaggagagacaggattgggccaacaaggactcagacgagttttattgactcatttctctggttgatacggagccatgtcatgtgccacgacctggggtgggcacagggaggctgcagtttcctgcgtgaacctgccttgggcctcatctgctcctagcccagcagagagagttgacccctcctgaactggccactccccagtgctcctgtgcagggagaggaagcacccggtttgagagtgtacccagccagactgtctttatctccatggattttcatcagggcaaagatcacagcagccagctcctggtggctgatgaggatcagagcatttgttcccccatgaaaggggaaatccctatggcatcattccagtggtggtcagtagatccaggacgccctgcaggactcagcctgtacagggagatgaagtgccccaggttgggagcacacctagctagagttatttgtgttaatctattcaggatgctctaagaaaacgccatagactgggttgctgacaaacatcagaattctatttctcatggttctgaaggcttagaaggctaagatcaaggtgtcagcaggttctgtgtctggtgaggacccacctcttgtttcatagataaaaccttcttgctgtgtcctcacatggtggaaaagggcaagacagctcacagagaccttttttataaggacgccagttccattcaagagggcactgcctgcattcccttcccccctcaaaggccctgccctgctattatcgtcaccttggtgactagatttcagcctatgaattctggaggcggacacaaaaattcagattaaactactctgcttctgtttctctaaaatctacatccttctcatatacaaaatacatgcatttctccccagtagccccaaatatcaactcattttagcatcaactttaaaattgtagtccaaagtgtgatttaaatgttatctgagtcaaacatgggtaagactcaaggtacaatttatcctgagtccaactgttcttgctgcgaacctaggaaatcaaacatgttatgtgcttccaaaatacagtggttggagaggcataggataaacattcccattccagaaaggagaaacaggaaagaagaaaggagtaacaagtttcaagcaacttccaaaattgaatgtgacaaacagtattaaaccttaagcctcaagaataataaaaaaaaaaaaaaaaaaaaaaaaaaaaaaaaaaaaaaaaaaaaaaaaaaannaanaaaaaaanaaaannaaaaanaaaaaaaaaanaaaaaaaaaaaaaaaaaaaaacctcggggggggcccgggacccaattngccccttaggggagccgttttacaatcacatggccggcctttatcaaccgcnggaactggagaaacctcttgggttccccaatttatatgcgtttggagcataatccccttttgcacggttgcctgaaaagcgaa

SEQ ID NO: 55758 - DNA, 3599 bp, Homo sapiens
cattggaatggcactcagggcaaaggcagaggtgtgcatggcagtgccctggctgtccctgcaaagggcacaggcactgggcacgagagccgcccgggtccccaggacagtgctgccctttgaagccatgccccagcgtccaggcaacaggtggctgaggctgctgcagatctggagggagcagggttatgaggacctgcacctggaagtacaccagaccttccaggaactggggcccattttcaggtacgacttgggaggagcaggcatggtgtgtgtgatgctgccggaggacgtggagaagctgcaacaggtggacagcctgcatccccacaggatgagcctggagccctgggtggcctacagacaacatcgtgggcacaaatgtggcgtgttcttgctgaatgggcctgaatggcgcttcaaccgattgcggctgaatccagaagtgctgtcgcccaacgctgtgcagaggttcctcccgatggtggatgcagtggccagggacttctcccaggccctgaagaagaaggtgctgcagaacgcccgggggagcctgaccctggacgtccagcccagcatcttccactacaccatagaagccagcaacttggctctttttggagagcggctgggcctggttggccacagccccagttctgccagcctgaacttcctccatgccctggaggtcatgttcaaatccaccgtccagctcatgttcatgcccaggagcctgtctcgctggaccagccccaaggtgtggaaggagcactttgaggcctgggactgcatcttccagtacggcgacaactgtatccagaaaatctatcaggaactggccttcagccgccctcaacagtacaccagcatcgtggcggagctcctgttgaatgcggaactgtcgccagatgccatcaaggccaactctatggaactcactgcagggagcgtggacacgacggtgtttcccttgctgatgacgctctttgagctggctcggaaccccaacgtgcagcaggccctgcgccaggagagcctggccgccgcagccagcatcagtgaacatccccagaaggcaaccaccgagctgcccttgctgcgtgcggccctcaaggagaccttgcggctctaccctgtgggtctgtttctggagcgagtggtgagctcagacttggtgcttcagaactaccacatcccagctgggacattggtgcgcgtgttcctctactctctgggtcgcaaccccgccttgttcccgaggcctgagcgctataacccccagcgctggctagacatcaggggctccggcaggaacttctaccacgtgccctttggctttggcatgcgccagtgccttgggcggcgcctggcagaggcagagatgctgctgctgctgcaccatgtgctgaaacacctccaggtggagacactaacccaagaggacataaagatggtctacagcttcatattgaggcccagcatgttccccctcctcaccttcagagccatcaactaatcacgtctctgcacccagggtcccagcctggccaccagcctccctttctgcctgaccccaggccacccctcttctctcccacatgcacagcttcctgagtcacccctctgtctaaccagccccagcacaaatggaactcccgagggcctctaggaccagggtttgccaggctaagcagcaatgccagggcacagctggggaagatcttgctgaccttgtccccagccccacctggccctttctccagcaagcactgtcctctgggcagtttgcccccatccctcccagtgctggctccaggctcctcgtgtggccatgcaagggtgctgtggttttgtcccttgccttcctgcctagtctcacatgtccctgttcctcttcccctggccagggcccctgcgcagactgtcagagtcattaagcgggatcccagcatctcagagtccagtcaagttccctcctgcagcctgccccctaggcagctcgagcatgccctgagctctctgaaagttgtcgccctggaatagggtcctgcagggtagaataaaaaggcccctgtggtcacttgtcctgacatccccattttcaagtgatacaactgagtctcgagggacgtgtgttccccagctgatcgtgtcagcctcatgccccaggcctcatctttcatggaccaggccttgttccaggagtgggcgttgggtcctctgcttcctgtgctgtcccctggggaaggtcccaaggatgctgtcaggagatggaagagtcatgtggggtgggaacctggggtgtggttccagaaatgtttttggcaacaggagagacaggattgggccaacaaggactcagacgagttttattgactcatttctctggttgatacggagccatgtcatgtgccacgacctggggtgggcacagggaggctgcagtttcctgcgtgaacctgccttgggcctcatctgctcctagcccagcagagagagttgacccctcctgaactggccactccccagtgctcctgtgcagggagaggaagcacccggtttgagagtgtacccagccagactgtctttatctccatggattttcatcagggcaaagatcacagcagccagctcctggtggctgatgaggatcagagcatttgttcccccatgaaaggggaaatccctatggcatcattccagtggtggtcagtagatccaggacgccctgcaggactcagcctgtacagggagatgaagtgccccaggttgggagcacacctagctagagttatttgtgttaatctattcaggatgctctaagaaaacgccatagactgggttgctgacaaacatcagaattctatttctcatggttctgaaggcttagaaggctaagatcaaggtgtcagcaggttctgtgtctggtgaggacccacctcttgtttcatagataaaaccttcttgctgtgtcctcacatggtggaaaagggcaagacagctcacagagaccttttttataaggacgccagttccattcaagagggcactgcctgcattcccttcccccctcaaaggccctgccctgctattatcgtcaccttggtgactagatttcagcctatgaattctggaggcggacacaaaaattcagattaaactactctgcttctgtttctctaaaatctacatccttctcatatacaaaatacatgcatttctccccagtagccccaaatatcaactcattttagcatcaactttaaaattgtagtccaaagtgtgatttaaatgttatctgagtcaaacatgggtaagactcaaggtacaatttatcctgagtccaactgttcttgctgcgaacctaggaaatcaaacatgttatgtgcttccaaaatacagtggttggagaggcataggataaacattcccattccagaaaggagaaacaggaaagaagaaaggagtaacaagtttcaagcaacttccaaaattgaatgtgacaaacagtattaaaccttaagcctcaagaataataaaaaaaactcatacatctcgaacatcctaattctcttctactaatcaaaaaaaaaaaa

SEQ ID NO: 55759 - DNA, 3471 bp, Homo sapiens
cattggaatggcactcagggcaaaggcagaggtgtgcatggcagtgccctggctgtccctgcaaagggcacaggcactgggcacgagagccgcccgggtccccaggacagtgctgccctttgaagccatgccccagcgtccaggcaacaggtggctgaggctgctgcagatctggagggagcagggttatgaggacctgcacctggaagtacaccagaccttccaggaactggggcccattttcaggtacgacttgggaggagcaggcatggtgtgtgtgatgctgccggaggacgtggagaagctgcaacaggtggacagcctgcatccccacaggatgagcctggagccctgggtggcctacagacaacatcgtgggcacaaatgtggcgtgttcttgctgaatgggcctgaatggcgcttcaaccgattgcggctgaatccagaagtgctgtcgcccaacgctgtgcagaggttcctcccgatggtggatgcagtggccagggacttctcccaggccctgaagaagaaggtgctgcagaacgcccgggggagcctgaccctggacgtccagcccagcatcttccactacaccatagaagccagcaacttggctctttttggagagcggctgggcctggttggccacagccccagttctgccagcctgaacttcctccatgccctggaggtcatgttcaaatccaccgtccagctcatgttcatgcccaggagcctgtctcgctggaccagccccaaggtgtggaaggagcactttgaggcctgggactgcatcttccagtacggcgacaactgtatccagaaaatctatcaggaactggccttcagccgccctcaacagtacaccagcatcgtggcggagctcctgttgaatgcggaactgtcgccagatgccatcaaggccaactctatggaactcactgcagggagcgtggacacgacggtgtttcccttgctgatgacgctctttgagctggctcggaaccccaacgtgcagcaggccctgcgccaggagagcctggccgccgcagccagcatcagtgaacatccccagaaggcaaccaccgagctgcccttgctgcgtgcggccctcaaggagaccttgcggctctaccctgtgggtctgtttctggagcgagtggtgagctcagacttggtgcttcagaactaccacatcccagctgggacattggtgcgcgtgttcctctactctctgggtcgcaaccccgccttgttcccgaggcctgagcgctataacccccagcgctggctagacatcaggggctccggcaggaacttctaccacgtgccctttggctttggcatgcgccagtgccttgggcggcgcctggcagaggcagagatgctgctgctgctgcaccatgtgctgaaacacctccaggtggagacactaacccaagaggacataaagatggtctacagcttcatattgaggcccagcatgttccccctcctcaccttcagagccatcaactaatcacgtctctgcacccagggtcccagcctggccaccagcctccctttctgcctgaccccaggccacccctcttctctcccacatgcacagcttcctgagtcacccctctgtctaaccagccccagcacaaatggaactcccgagggcctctaggaccagggtttgccaggctaagcagcaatgccagggcacagctggggaagatcttgctgaccttgtccccagccccacctggccctttctccagcaagcactgtcctctgggcagtttgcccccatccctcccagtgctggctccaggctcctcgtgtggccatgcaagggtgctgtggttttgtcccttgccttcctgcctagtctcacatgtccctgttcctcttcccctggccagggcccctgcgcagactgtcagagtcattaagcgggatcccagcatctcagagtccagtcaagttccctcctgcagcctgccccctaggcagctcgagcatgccctgagctctctgaaagttgtcgccctggaatagggtcctgcagggtagaataaaaaggcccctgtggtcacttgtcctgacatccccattttcaagtgatacaactgagtctcgagggacgtgtgttccccagctgatcgtgtcagcctcatgccccaggcctcatctttcatggaccaggccttgttccaggagtgggcgttgggtcctctgcttcctgtgctgtcccctggggaaggtcccaaggatgctgtcaggagatggaagagtcatgtggggtgggaacctggggtgtggttccagaaatgtttttggcaacaggagagacaggattgggccaacaaggactcagacgagttttattgactcatttctctggttgatacggagccatgtcatgtgccacgacctggggtgggcacagggaggctgcagtttcctgcgtgaacctgccttgggcctcatctgctcctagcccagcagagagagttgacccctcctgaactggccactccccagtgctcctgtgcagggagaggaagcacccggtttgagagtgtacccagccagactgtctttatctccatggattttcatcagggcaaagatcacagcagccagctcctggtggctgatgaggatcagagcatttgttcccccatgaaaggggaaatccctatggcatcattccagtggtggtcagtagatccaggacgccctgcaggactcagcctgtacagggagatgaagtgccccaggttgggagcacacctagctagagttatttgtgttaatctattcaggatgctctaagaaaacgccatagactgggttgctgacaaacatcagaattctatttctcatggttctgaaggcttagaaggctaagatcaaggtgtcagcaggttctgtgtctggtgaggacccacctcttgtttcatagataaaaccttcttgctgtgtcctcacatggtggaaaagggcaagacagctcacagagaccttttttataaggacgccagttccattcaagagggcactgcctgcattcccttcccccctcaaaggccctgccctgctattatcgtcaccttggtgactagatttcagcctatgaattctggaggcggacacaaaaattcagattaaactactctgcttctgtttctctaaaatctacatccttctcatatacaaaatacatgcatttctccccagtagccccaaatatcaactcattttagcatcaactttaaaattgtagtccaaagtgtgatttaaatgttatctgagtcaaacatgggtaagactcaaggtacaatttatcctgagtccaactgttcttgctgcgaacctaggaaatcaaacatgttatgtgcttccaaaatacagtggttggagaggcataggataaacattcccattcagtgtgacaacagtattaaccttagccctaaa

SEQ ID NO: 55760 - DNA, 3210 bp, Homo sapiens
cattggaatggcactcagggcaaaggcagaggtgtgcatggcagtgccctggctgtccctgcaaagggcacaggcactgggcacgagagccgcccgggtccccaggacagtgctgccctttgaagccatgccccagcgtccaggcaacaggtggctgaggctgctgcagatctggagggagcagggttatgaggacctgcacctggaagtacaccagaccttccaggaactggggcccattttcaggtacgacttgggaggagcaggcatggtgtgtgtgatgctgccggaggacgtggagaagctgcaacaggtggacagcctgcatccccacaggatgagcctggagccctgggtggcctacagacaacatcgtgggcacaaatgtggcgtgttcttgctgaatgggcctgaatggcgcttcaaccgattgcggctgaatccagaagtgctgtcgcccaacgctgtgcagaggttcctcccgatggtggatgcagtggccagggacttctcccaggccctgaagaagaaggtgctgcagaacgcccgggggagcctgaccctggacgtccagcccagcatcttccactacaccatagaagccagcaacttggctctttttggagagcggctgggcctggttggccacagccccagttctgccagcctgaacttcctccatgccctggaggtcatgttcaaatccaccgtccagctcatgttcatgcccaggagcctgtctcgctggaccagccccaaggtgtggaaggagcactttgaggcctgggactgcatcttccagtacggcgacaactgtatccagaaaatctatcaggaactggccttcagccgccctcaacagtacaccagcatcgtggcggagctcctgttgaatgcggaactgtcgccagatgccatcaaggccaactctatggaactcactgcagggagcgtggacacgacggtgtttcccttgctgatgacgctctttgagctggctcggaaccccaacgtgcagcaggccctgcgccaggagagcctggccgccgcagccagcatcagtgaacatccccagaaggcaaccaccgagctgcccttgctgcgtgcggccctcaaggagaccttgcggctctaccctgtgggtctgtttctggagcgagtggtgagctcagacttggtgcttcagaactaccacatcccagctgggacattggtgcgcgtgttcctctactctctgggtcgcaaccccgccttgttcccgaggcctgagcgctataacccccagcgctggctagacatcaggggctccggcaggaacttctaccacgtgccctttggctttggcatgcgccagtgccttgggcggcgcctggcagaggcagagatgctgctgctgctgcaccatgtgctgaaacacctccaggtggagacactaacccaagaggacataaagatggtctacagcttcatattgaggcccagcatgttccccctcctcaccttcagagccatcaactaatcacgtctctgcacccagggtcccagcctggccaccagcctccctttctgcctgaccccaggccacccctcttctctcccacatgcacagcttcctgagtcacccctctgtctaaccagccccagcacaaatggaactcccgagggcctctaggaccagggtttgccaggctaagcagcaatgccagggcacagctggggaagatcttgctgaccttgtccccagccccacctggccctttctccagcaagcactgtcctctgggcagtttgcccccatccctcccagtgctggctccaggctcctcgtgtggccatgcaagggtgctgtggttttgtcccttgccttcctgcctagtctcacatgtccctgttcctcttcccctggccagggcccctgcgcagactgtcagagtcattaagcgggatcccagcatctcagagtccagtcaagttccctcctgcagcctgccccctaggcagctcgagcatgccctgagctctctgaaagttgtcgccctggaatagggtcctgcagggtagaataaaaaggcccctgtggtcacttgtcctgacatccccattttcaagtgatacaactgagtctcgagggacgtgtgttccccagctgatcgtgtcagcctcatgccccaggcctcatctttcatggaccaggccttgttccaggagtgggcgttgggtcctctgcttcctgtgctgtcccctggggaaggtcccaaggatgctgtcaggagatggaagagtcatgtggggtgggaacctggggtgtggttccagaaatgtttttggcaacaggagagacaggattgggccaacaaggactcagacgagttttattgactcatttctctggttgatacggagccatgtcatgtgccacgacctggggtgggcacagggaggctgcagtttcctgcgtgaacctgccttgggcctcatctgctcctagcccagcagagagagttgacccctcctgaactggccactccccagtgctcctgtgcagggagaggaagcacccggtttgagagtgtacccagccagactgtctttatctccatggattttcatcagggcaaagatcacagcagccagctcctggtggctgatgaggatcagagcatttgttcccccatgaaaggggaaatccctatggcatcattccagtggtggtcagtagatccaggacgccctgcaggactcagcctgtacagggagatgaagtgccccaggttgggagcacacctagctagagttatttgtgttaatctattcaggatgctctaagaaaacgccatagactgggttgctgacaaacatcagaattctatttctcatggttctgaaggcttagaaggctaagatcaaggtgtcagcaggttctgtgtctggtgaggacccacctcttgtttcatagataaaaccttcttgctgtgtcctcacatggtggaaaagggcaagacagctcacagagaccttttttataaggacgccagttccattcaagagggcactgcctgcattcccttcccccctcaaaggccctgccctgctattatcgtcaccttggtgactagatttcagcctatgaattctggaggcggacacaaaaattcagattaaactactctgcttctgtttctctaaaatctacatccttctcatatacaa

SEQ ID NO: 55761 - DNA, 3487 bp, Homo sapiens
cattggaatggcactcagggcaaaggcagaggtgtgcatggcagtgccctggctgtccctgcaaagggcacaggcactgggcacgagagccgcccgggtccccaggacagtgctgccctttgaagccatgccccagcgtccaggcaacaggtggctgaggctgctgcagatctggagggagcagggttatgaggacctgcacctggaagtacaccagaccttccaggaactggggcccattttcaggtacgacttgggaggagcaggcatggtgtgtgtgatgctgccggaggacgtggagaagctgcaacaggtggacagcctgcatccccacaggatgagcctggagccctgggtggcctacagacaacatcgtgggcacaaatgtggcgtgttcttgctgaatgggcctgaatggcgcttcaaccgattgcggctgaatccagaagtgctgtcgcccaacgctgtgcagaggttcctcccgatggtggatgcagtggccagggacttctcccaggccctgaagaagaaggtgctgcagaacgcccgggggagcctgaccctggacgtccagcccagcatcttccactacaccatagaagccagcaacttggctctttttggagagcggctgggcctggttggccacagccccagttctgccagcctgaacttcctccatgccctggaggtcatgttcaaatccaccgtccagctcatgttcatgcccaggagcctgtctcgctggaccagccccaaggtgtggaaggagcactttgaggcctgggactgcatcttccagtacggcgacaactgtatccagaaaatctatcaggaactggccttcagccgccctcaacagtacaccagcatcgtggcggagctcctgttgaatgcggaactgtcgccagatgccatcaaggccaactctatggaactcactgcagggagcgtggacacgacggtgtttcccttgctgatgacgctctttgagctggctcggaaccccaacgtgcagcaggccctgcgccaggagagcctggccgccgcagccagcatcagtgaacatccccagaaggcaaccaccgagctgcccttgctgcgtgcggccctcaaggagaccttgcggctctaccctgtgggtctgtttctggagcgagtggtgagctcagacttggtgcttcagaactaccacatcccagctgggacattggtgcgcgtgttcctctactctctgggtcgcaaccccgccttgttcccgaggcctgagcgctataacccccagcgctggctagacatcaggggctccggcaggaacttctaccacgtgccctttggctttggcatgcgccagtgccttgggcggcgcctggcagaggcagagatgctgctgctgctgcaccatgtgctgaaacacctccaggtggagacactaacccaagaggacataaagatggtctacagcttcatattgaggcccagcatgttccccctcctcaccttcagagccatcaactaatcacgtctctgcacccagggtcccagcctggccaccagcctccctttctgcctgaccccaggccacccctcttctctcccacatgcacagcttcctgagtcacccctctgtctaaccagccccagcacaaatggaactcccgagggcctctaggaccagggtttgccaggctaagcagcaatgccagggcacagctggggaagatcttgctgaccttgtccccagccccacctggccctttctccagcaagcactgtcctctgggcagtttgcccccatccctcccagtgctggctccaggctcctcgtgtggccatgcaagggtgctgtggttttgtcccttgccttcctgcctagtctcacatgtccctgttcctcttcccctggccagggcccctgcgcagactgtcagagtcattaagcgggatcccagcatctcagagtccagtcaagttccctcctgcagcctgccccctaggcagctcgagcatgccctgagctctctgaaagttgtcgccctggaatagggtcctgcagggtagaataaaaaggcccctgtggtcacttgtcctgacatccccattttcaagtgatacaactgagtctcgagggacgtgtgttccccagctgatcgtgtcagcctcatgccccaggcctcatctttcatggaccaggccttgttccaggagtgggcgttgggtcctctgcttcctgtgctgtcccctggggaaggtcccaaggatgctgtcaggagatggaagagtcatgtggggtgggaacctggggtgtggttccagaaatgtttttggcaacaggagagacaggattgggccaacaaggactcagacgagttttattgactcatttctctggttgatacggagccatgtcatgtgccacgacctggggtgggcacagggaggctgcagtttcctgcgtgaacctgccttgggcctcatctgctcctagcccagcagagagagttgacccctcctgaactggccactccccagtgctcctgtgcagggagaggaagcacccggtttgagagtgtacccagccagactgtctttatctccatggattttcatcagggcaaagatcacagcagccagctcctggtggctgatgaggatcagagcatttgttcccccatgaaaggggaaatccctatggcatcattccagtggtggtcagtagatccaggacgccctgcaggactcagcctgtacagggagatgaagtgccccaggttgggagcacacctagctagagttatttgtgttaatctattcaggatgctctaagaaaacgccatagactgggttgctgacaaacatcagaattctatttctcatggttctgaaggcttagaaggctaagatcaaggtgtcagcaggttctgtgtctggtgaggacccacctcttgtttcatagataaaaccttcttgctgtgtcctcacatggtggaaaaggggcactgcctgcattcccttcccccctcaaaggccctgccctgctattatcgtcaccttggtgactagatttcagcctatgaattctggaggcggacacaaaaattcagattaaactactctgcttctgtttctctaaaatctacatccttctcatatacaaaatacatgcatttctccccagtagccccaaatatcaactcattttagcatcaactttaaaattgtagtccaaagtgtgatttaaatgttatctgagtcaaacatgggtaagactcaaggtacaatttatcctgagtccaactgttcttgctgcgaacctaggaaatcaaacatgttatgtgcttccaaaatacagtggttggagaggcataggataaacattcccattccagaaaggagaaacaggaaagaagaaaggagtaacaagtttcaagcaacttccaaaattgaatgtgacaaacagtattaaaccttaagcctcaagaataat

SEQ ID NO: 55762 - DNA, 3485 bp, Homo sapiens
cattggaatggcactcagggcaaaggcagaggtgtgcatggcagtgccctggctgtccctgcaaagggcacaggcactgggcacgagagccgcccgggtccccaggacagtgctgccctttgaagccatgccccagcgtccaggcaacaggtggctgaggctgctgcagatctggagggagcagggttatgaggacctgcacctggaagtacaccagaccttccaggaactggggcccattttcaggtacgacttgggaggagcaggcatggtgtgtgtgatgctgccggaggacgtggagaagctgcaacaggtggacagcctgcatccccacaggatgagcctggagccctgggtggcctacagacaacatcgtgggcacaaatgtggcgtgttcttgctgaatgggcctgaatggcgcttcaaccgattgcggctgaatccagaagtgctgtcgcccaacgctgtgcagaggttcctcccgatggtggatgcagtggccagggacttctcccaggccctgaagaagaaggtgctgcagaacgcccgggggagcctgaccctggacgtccagcccagcatcttccactacaccatagaagccagcaacttggctctttttggagagcggctgggcctggttggccacagccccagttctgccagcctgaacttcctccatgccctggaggtcatgttcaaatccaccgtccagctcatgttcatgcccaggagcctgtctcgctggaccagccccaaggtgtggaaggagcactttgaggcctgggactgcatcttccagtacggcgacaactgtatccagaaaatctatcaggaactggccttcagccgccctcaacagtacaccagcatcgtggcggagctcctgttgaatgcggaactgtcgccagatgccatcaaggccaactctatggaactcactgcagggagcgtggacacgacggtgtttcccttgctgatgacgctctttgagctggctcggaaccccaacgtgcagcaggccctgcgccaggagagcctggccgccgcagccagcatcagtgaacatccccagaaggcaaccaccgagctgcccttgctgcgtgcggccctcaaggagaccttgcggctctaccctgtgggtctgtttctggagcgagtggtgagctcagacttggtgcttcagaactaccacatcccagctgggacattggtgcgcgtgttcctctactctctgggtcgcaaccccgccttgttcccgaggcctgagcgctataacccccagcgctggctagacatcaggggctccggcaggaacttctaccacgtgccctttggctttggcatgcgccagtgccttgggcggcgcctggcagaggcagagatgctgctgctgctgcaccatgtgctgaaacacctccaggtggagacactaacccaagaggacataaagatggtctacagcttcatattgaggcccagcatgttccccctcctcaccttcagagccatcaactaatcacgtctctgcacccagggtcccagcctggccaccagcctccctttctgcctgaccccaggccacccctcttctctcccacatgcacagcttcctgagtcacccctctgtctaaccagccccagcacaaatggaactcccgagggcctctaggaccagggtttgccaggctaagcagcaatgccagggcacagctggggaagatcttgctgaccttgtccccagccccacctggccctttctccagcaagcactgtcctctgggcagtttgcccccatccctcccagtgctggctccaggctcctcgtgtggccatgcaagggtgctgtggttttgtcccttgccttcctgcctagtctcacatgtccctgttcctcttcccctggccagggcccctgcgcagactgtcagagtcattaagcgggatcccagcatctcagagtccagtcaagttccctcctgcagcctgccccctaggcagctcgagcatgccctgagctctctgaaagttgtcgccctggaatagggtcctgcagggtagaataaaaaggcccctgtggtcacttgtcctgacatccccattttcaagtgatacaactgagtctcgagggacgtgtgttccccagctgatcgtgtcagcctcatgccccaggcctcatctttcatggaccaggccttgttccaggagtgggcgttgggtcctctgcttcctgtgctgtcccctggggaaggtcccaaggatgctgtcaggagatggaagagtcatgtggggtgggaacctggggtgtggttccagaaatgtttttggcaacaggagagacaggattgggccaacaaggactcagacgagttttattgactcatttctctggttgatacggagccatgtcatgtgccacgacctggggtgggcacagggaggctgcagtttcctgcgtgaacctgccttgggcctcatctgctcctagcccagcagagagagttgacccctcctgaactggccactccccagtgctcctgtgcagggagaggaagcacccggtttgagagtgtacccagccagactgtctttatctccatggattttcatcagggcaaagatcacagcagccagctcctggtggctgatgaggatcagagcatttgttcccccatgaaaggggaaatccctatggcatcattccagtggtggtcagtagatccaggacgccctgcaggactcagcctgtacagggagatgaagtgccccaggttgggagcacacctagctagagttatttgtgttaatctattcaggatgctctaagaaaacgccatagactgggttgctgacaaacatcagaattctatttctcatggttctgaaggcttagaaggctaagatcaaggtgtcagcaggttctgtgtctggtgaggacccacctcttgtttcatagataaaaccttcttgctgtgtcctcacatggtggaaaagggcaagacagctcacagagaccttttttataaggacgccagttccattcaagagggcactgcctgcattcccttcccccctcaaaggccctgccctgctattatcgtcaccttggtgactagatttcagcctatgaattctggaggcggacacaaaaattcagattaaactactctgcttctgtttctctaaaatctacatccttctcatatacaattaaaattgtagtccaaagtgtgatttaaatgttatctgagtcaaacatgggtaagactcaaggtacaatttatcctgagtccaactgttcttgctgcgaacctaggaaatcaaacatgttatgtgcttccaaaatacagtggttggagaggcataggataaacattcccattccagaaaggagaaacaggaaagaagaaaggagtaacaagtttcaagcaacttccaaaattgaatgtgacaaacagtattaaaccttaagcctcaagaataat

SEQ ID NO: 55763 - DNA, 2999 bp, Homo sapiens
cattggaatggcactcagggcaaaggcagaggtgtgcatggcagtgccctggctgtccctgcaaagggcacaggcactgggcacgagagccgcccgggtccccaggacagtgctgccctttgaagccatgccccagcgtccaggcaacaggtggctgaggctgctgcagatctggagggagcagggttatgaggacctgcacctggaagtacaccagaccttccaggaactggggcccattttcaggtacgacttgggaggagcaggcatggtgtgtgtgatgctgccggaggacgtggagaagctgcaacaggtggacagcctgcatccccacaggatgagcctggagccctgggtggcctacagacaacatcgtgggcacaaatgtggcgtgttcttgctgaatgggcctgaatggcgcttcaaccgattgcggctgaatccagaagtgctgtcgcccaacgctgtgcagaggttcctcccgatggtggatgcagtggccagggacttctcccaggccctgaagaagaaggtgctgcagaacgcccgggggagcctgaccctggacgtccagcccagcatcttccactacaccatagaagccagcaacttggctctttttggagagcggctgggcctggttggccacagccccagttctgccagcctgaacttcctccatgccctggaggtcatgttcaaatccaccgtccagctcatgttcatgcccaggagcctgtctcgctggaccagccccaaggtgtggaaggagcactttgaggcctgggactgcatcttccagtacggcgacaactgtatccagaaaatctatcaggaactggccttcagccgccctcaacagtacaccagcatcgtggcggagctcctgttgaatgcggaactgtcgccagatgccatcaaggccaactctatggaactcactgcagggagcgtggacacgacggtgtttcccttgctgatgacgctctttgagctggctcggaaccccaacgtgcagcaggccctgcgccaggagagcctggccgccgcagccagcatcagtgaacatccccagaaggcaaccaccgagctgcccttgctgcgtgcggccctcaaggagaccttgcggctctaccctgtgggtctgtttctggagcgagtggtgagctcagacttggtgcttcagaactaccacatcccagctgggacattggtgcgcgtgttcctctactctctgggtcgcaaccccgccttgttcccgaggcctgagcgctataacccccagcgctggctagacatcaggggctccggcaggaacttctaccacgtgccctttggctttggcatgcgccagtgccttgggcggcgcctggcagaggcagagatgctgctgctgctgcaccatgtgctgaaacacctccaggtggagacactaacccaagaggacataaagatggtctacagcttcatattgaggcccagcatgttccccctcctcaccttcagagccatcaactaatcacgtctctgcacccagggtcccagcctggccaccagcctccctttctgcctgaccccaggccacccctcttctctcccacatgcacagcttcctgagtcacccctctgtctaaccagccccagcacaaatggaactcccgagggcctctaggaccagggtttgccaggctaagcagcaatgccagggcacagctggggaagatcttgctgaccttgtccccagccccacctggccctttctccagcaagcactgtcctctgggcagtttgcccccatccctcccagtgctggctccaggctcctcgtgtggccatgcaagggtgctgtggttttgtcccttgccttcctgcctagtctcacatgtccctgttcctcttcccctggccagggcccctgcgcagactgtcagagtcattaagcgggatcccagcatctcagagtccagtcaagttccctcctgcagcctgccccctaggcagctcgagcatgccctgagctctctgaaagttgtcgccctggaatagggtcctgcagggtagaataaaaaggcccctgtggtcacttgtcctgacatccccattttcaagtgatacaactgagtctcgagggacgtgtgttccccagctgatcgtgtcagcctcatgccccaggcctcatctttcatggaccaggccttgttccaggagtgggcgttgggtcctctgcttcctgtgctgtcccctggggaaggtcccaaggatgctgtcaggagatggaagagtcatgtggggtgggaacctggggtgtggttccagaaatgtttttggcaacaggagagacaggattgggccaacaaggactcagacgagttttattgactcatttctctggttgatacggagccatgtcatgtgccacgacctggggtgggcacagggaggctgcagtttcctgcgtgaacctgccttgggcctcatctgctcctagcccagcagagagagttgacccctcctgaactggccactccccagtgctcctgtgcagggagaggaagcacccggtttgagagtgtacccagccagactgtctttatctccatggattttcatcagggcaaagatcacagcagccagctcctggtggctgatgaggatcagagcatttgttcccccatgaaaggggaaatccctatggcatcattccagtggtggtcagtagatccaggacgccctgcaggactcagcctgtacagggagatgaagtgccccaggttgggagcacacctagctagagttatttgtgttaatctattcaggatgctctaagaaaacgccatagactgggttgctgacaaacatcagaattctatttctcatggttctgaaggcttagaaggctaagatcaaggtgtcagcaggttctgtgtctggtgaggacccacctcttgtttcatagatgaccttttttataatgcccccagttcatttcagagggcctt

SEQ ID NO: 55764 - DNA, 3486 bp, Homo sapiens
cattggaatggcactcagggcaaaggcagaggtgtgcatggcagtgccctggctgtccctgcaaagggcacaggcactgggcacgagagccgcccgggtccccaggacagtgctgccctttgaagccatgccccagcgtccaggcaacaggtggctgaggctgctgcagatctggagggagcagggttatgaggacctgcacctggaagtacaccagaccttccaggaactggggcccattttcaggtacgacttgggaggagcaggcatggtgtgtgtgatgctgccggaggacgtggagaagctgcaacaggtggacagcctgcatccccacaggatgagcctggagccctgggtggcctacagacaacatcgtgggcacaaatgtggcgtgttcttgctgaatgggcctgaatggcgcttcaaccgattgcggctgaatccagaagtgctgtcgcccaacgctgtgcagaggttcctcccgatggtggatgcagtggccagggacttctcccaggccctgaagaagaaggtgctgcagaacgcccgggggagcctgaccctggacgtccagcccagcatcttccactacaccatagaagccagcaacttggctctttttggagagcggctgggcctggttggccacagccccagttctgccagcctgaacttcctccatgccctggaggtcatgttcaaatccaccgtccagctcatgttcatgcccaggagcctgtctcgctggaccagccccaaggtgtggaaggagcactttgaggcctgggactgcatcttccagtacggcgacaactgtatccagaaaatctatcaggaactggccttcagccgccctcaacagtacaccagcatcgtggcggagctcctgttgaatgcggaactgtcgccagatgccatcaaggccaactctatggaactcactgcagggagcgtggacacgacggtgtttcccttgctgatgacgctctttgagctggctcggaaccccaacgtgcagcaggccctgcgccaggagagcctggccgccgcagccagcatcagtgaacatccccagaaggcaaccaccgagctgcccttgctgcgtgcggccctcaaggagaccttgcggctctaccctgtgggtctgtttctggagcgagtggtgagctcagacttggtgcttcagaactaccacatcccagctgggacattggtgcgcgtgttcctctactctctgggtcgcaaccccgccttgttcccgaggcctgagcgctataacccccagcgctggctagacatcaggggctccggcaggaacttctaccacgtgccctttggctttggcatgcgccagtgccttgggcggcgcctggcagaggcagagatgctgctgctgctgcaccatgtgctgaaacacctccaggtggagacactaacccaagaggacataaagatggtctacagcttcatattgaggcccagcatgttccccctcctcaccttcagagccatcaactaatcacgtctctgcacccagggtcccagcctggccaccagcctccctttctgcctgaccccaggccacccctcttctctcccacatgcacagcttcctgagtcacccctctgtctaaccagccccagcacaaatggaactcccgagggcctctaggaccagggtttgccaggctaagcagcaatgccagggcacagctggggaagatcttgctgaccttgtccccagccccacctggccctttctccagcaagcactgtcctctgggcagtttgcccccatccctcccagtgctggctccaggctcctcgtgtggccatgcaagggtgctgtggttttgtcccttgccttcctgcctagtctcacatgtccctgttcctcttcccctggccagggcccctgcgcagactgtcagagtcattaagcgggatcccagcatctcagagtccagtcaagttccctcctgcagcctgccccctaggcagctcgagcatgccctgagctctctgaaagttgtcgccctggaatagggtcctgcagggtagaatagagtctcgagggacgtgtgttccccagctgatcgtgtcagcctcatgccccaggcctcatctttcatggaccaggccttgttccaggagtgggcgttgggtcctctgcttcctgtgctgtcccctggggaaggtcccaaggatgctgtcaggagatggaagagtcatgtggggtgggaacctggggtgtggttccagaaatgtttttggcaacaggagagacaggattgggccaacaaggactcagacgagttttattgactcatttctctggttgatacggagccatgtcatgtgccacgacctggggtgggcacagggaggctgcagtttcctgcgtgaacctgccttgggcctcatctgctcctagcccagcagagagagttgacccctcctgaactggccactccccagtgctcctgtgcagggagaggaagcacccggtttgagagtgtacccagccagactgtctttatctccatggattttcatcagggcaaagatcacagcagccagctcctggtggctgatgaggatcagagcatttgttcccccatgaaaggggaaatccctatggcatcattccagtggtggtcagtagatccaggacgccctgcaggactcagcctgtacagggagatgaagtgccccaggttgggagcacacctagctagagttatttgtgttaatctattcaggatgctctaagaaaacgccatagactgggttgctgacaaacatcagaattctatttctcatggttctgaaggcttagaaggctaagatcaaggtgtcagcaggttctgtgtctggtgaggacccacctcttgtttcatagataaaaccttcttgctgtgtcctcacatggtggaaaagggcaagacagctcacagagaccttttttataaggacgccagttccattcaagagggcactgcctgcattcccttcccccctcaaaggccctgccctgctattatcgtcaccttggtgactagatttcagcctatgaattctggaggcggacacaaaaattcagattaaactactctgcttctgtttctctaaaatctacatccttctcatatacaaaatacatgcatttctccccagtagccccaaatatcaactcattttagcatcaactttaaaattgtagtccaaagtgtgatttaaatgttatctgagtcaaacatgggtaagactcaaggtacaatttatcctgagtccaactgttcttgctgcgaacctaggaaatcaaacatgttatgtgcttccaaaatacagtggttggagaggcataggataaacattcccattccagaaaggagaaacaggaaagaagaaaggagtaacaagtttcaagcaacttccaaaattgaatgtgacaaacagtattaaaccttaagcctcaagaataat

SEQ ID NO: 55765 - DNA, 2636 bp, Homo sapiens
cattggaatggcactcagggcaaaggcagaggtgtgcatggcagtgccctggctgtccctgcaaagggcacaggcactgggcacgagagccgcccgggtccccaggacagtgctgccctttgaagccatgccccagcgtccaggcaacaggtggctgaggctgctgcagatctggagggagcagggttatgaggacctgcacctggaagtacaccagaccttccaggaactggggcccattttcaggtacgacttgggaggagcaggcatggtgtgtgtgatgctgccggaggacgtggagaagctgcaacaggtggacagcctgcatccccacaggatgagcctggagccctgggtggcctacagacaacatcgtgggcacaaatgtggcgtgttcttgctgaatgggcctgaatggcgcttcaaccgattgcggctgaatccagaagtgctgtcgcccaacgctgtgcagaggttcctcccgatggtggatgcagtggccagggacttctcccaggccctgaagaagaaggtgctgcagaacgcccgggggagcctgaccctggacgtccagcccagcatcttccactacaccatagaagccagcaacttggctctttttggagagcggctgggcctggttggccacagccccagttctgccagcctgaacttcctccatgccctggaggtcatgttcaaatccaccgtccagctcatgttcatgcccaggagcctgtctcgctggaccagccccaaggtgtggaaggagcactttgaggcctgggactgcatcttccagtacggcgacaactgtatccagaaaatctatcaggaactggccttcagccgccctcaacagtacaccagcatcgtggcggagctcctgttgaatgcggaactgtcgccagatgccatcaaggccaactctatggaactcactgcagggagcgtggacacgacggtgtttcccttgctgatgacgctctttgagctggctcggaaccccaacgtgcagcaggccctgcgccaggagagcctggccgccgcagccagcatcagtgaacatccccagaaggcaaccaccgagctgcccttgctgcgtgcggccctcaaggagaccttgcggctctaccctgtgggtctgtttctggagcgagtggtgagctcagacttggtgcttcagaactaccacatcccagctgggacattggtgcgcgtgttcctctactctctgggtcgcaaccccgccttgttcccgaggcctgagcgctataacccccagcgctggctagacatcaggggctccggcaggaacttctaccacgtgccctttggctttggcatgcgccagtgccttgggcggcgcctggcagaggcagagatgctgctgctgctgcaccatgtgctgaaacacctccaggtggagacactaacccaagaggacataaagatggtctacagcttcatattgaggcccagcatgttccccctcctcaccttcagagccatcaactaatcacgtctctgcacccagggtcccagcctggccaccagcctccctttctgcctgaccccaggccacccctcttctctcccacatgcacagcttcctgagtcacccctctgtctaaccagccccagcacaaatggaactcccgagggcctctaggaccagggtttgccaggctaagcagcaatgccagggcacagctggggaagatcttgctgaccttgtccccagccccacctggccctttctccagcaagcactgtcctctgggcagtttgcccccatccctcccagtgctggctccaggctcctcgtgtggccatgcaagggtgctgtggttttgtcccttgccttcctgcctagtctcacatgtccctgttcctcttcccctggccagggcccctgcgcagactgtcagagtcattaagcgggatcccagcatctcagagtccagtcaagttccctcctgcagcctgccccctaggcagctcgagcatgccctgagctctctgaaagttgtcgccctggaatagggtcctgcagggtagaataaaaaggcccctgtggtcacttgtcctgacatccccattttcaagtgatacaactgagtctcgagggacgtgtgttccccagctgatcgtgtcagcctcatgccccaggcctcatctttcatggaccaggccttgttccaggagtgggcgttgggtcctctgcttcctgtgctgtcccctggggaaggtcccaaggatgctgtcaggagatggaagagtcatgtggggtgggaacctggggtgtggttccagaaatgtttttggcaacaggagagacaggattgggccaaaaaagaaatatcattgtcattaaattctgcataaacccattgtcattagctccaaaaaaaaactttagggggggcccagggcccaattaggcctatagtgggtcttttaacaattaattggccgcagtttacaacggtttgacttggaaaaccttgcgtttcccaacttaatctgcttgagaacatcccctttcccggttggtttataaccaagagccctcctgttggcccttccaacagtggccacctgaatggaaatggaaattgagccttaatttttgt

SEQ ID NO: 55766 - DNA, 2580 bp, Homo sapiens
  misc_feature (2406)..(2407): n is a, c, g, or t
  misc_feature (2410)..(2410): n is a, c, g, or t
  misc_feature (2418)..(2418): n is a, c, g, or t
  misc_feature (2423)..(2424): n is a, c, g, or t
  misc_feature (2443)..(2443): n is a, c, g, or t
  misc_feature (2481)..(2481): n is a, c, g, or t
cattggaatggcactcagggcaaaggcagaggtgtgcatggcagtgccctggctgtccctgcaaagggcacaggcactgggcacgagagccgcccgggtccccaggacagtgctgccctttgaagccatgccccagcgtccaggcaacaggtggctgaggctgctgcagatctggagggagcagggttatgaggacctgcacctggaagtacaccagaccttccaggaactggggcccattttcaggtacgacttgggaggagcaggcatggtgtgtgtgatgctgccggaggacgtggagaagctgcaacaggtggacagcctgcatccccacaggatgagcctggagccctgggtggcctacagacaacatcgtgggcacaaatgtggcgtgttcttgctgaatgggcctgaatggcgcttcaaccgattgcggctgaatccagaagtgctgtcgcccaacgctgtgcagaggttcctcccgatggtggatgcagtggccagggacttctcccaggccctgaagaagaaggtgctgcagaacgcccgggggagcctgaccctggacgtccagcccagcatcttccactacaccatagaagccagcaacttggctctttttggagagcggctgggcctggttggccacagccccagttctgccagcctgaacttcctccatgccctggaggtcatgttcaaatccaccgtccagctcatgttcatgcccaggagcctgtctcgctggaccagccccaaggtgtggaaggagcactttgaggcctgggactgcatcttccagtacggcgacaactgtatccagaaaatctatcaggaactggccttcagccgccctcaacagtacaccagcatcgtggcggagctcctgttgaatgcggaactgtcgccagatgccatcaaggccaactctatggaactcactgcagggagcgtggacacgacggtgtttcccttgctgatgacgctctttgagctggctcggaaccccaacgtgcagcaggccctgcgccaggagagcctggccgccgcagccagcatcagtgaacatccccagaaggcaaccaccgagctgcccttgctgcgtgcggccctcaaggagaccttgcggctctaccctgtgggtctgtttctggagcgagtggtgagctcagacttggtgcttcagaactaccacatcccagctgggacattggtgcgcgtgttcctctactctctgggtcgcaaccccgccttgttcccgaggcctgagcgctataacccccagcgctggctagacatcaggggctccggcaggaacttctaccacgtgccctttggctttggcatgcgccagtgccttgggcggcgcctggcagaggcagagatgctgctgctgctgcaccatgtgctgaaacacctccaggtggagacactaacccaagaggacataaagatggtctacagcttcatattgaggcccagcatgttccccctcctcaccttcagagccatcaactaatcacgtctctgcacccagggtcccagcctggccaccagcctccctttctgcctgaccccaggccacccctcttctctcccacatgcacagcttcctgagtcacccctctgtctaaccagccccagcacaaatggaactcccgagggcctctaggaccagggtttgccaggctaagcagcaatgccagggcacagctggggaagatcttgctgaccttgtccccagccccacctggccctttctccagcaagcactgtcctctgggcagtttgcccccatccctcccagtgctggctccaggctcctcgtgtggccatgcaagggtgctgtggttttgtcccttgccttcctgcctagtctcacatgtccctgttcctcttcccctggccagggcccctgcgcagactgtcagagtcattaagcgggatcccagcatctcagagtccagtcaagttccctcctgcagcctgccccctaggcagctcgagcatgccctgagctctctgaaagttgtcgccctggaatagggtcctgcagggtagaataaaaaggcccctgtggtcacttgtcctgacatccccattttcaagtgatacaactgagtctcgagggacgtgtgttccccagctgatcgtgtcagcctcatgccccaggcctcatctttcatggaccaggccttgttccaggagtgggcgttgggtcctctgcttcctgtgctgtcccctggggaaggtcccaaggatgctgtcaggagatggaagagtcatgtggggtgggaacctggggtgtggttccagaaatgtttttggcaacaggagagacaggattgggccaaaaaaaaaaaaaaaaaaaaaaaaaaaaaaaaaaaaaaaaaaaaaaaaaaaaannaanaaaaaaanaaaannaaaaaatttatatattaantaaataatataaatatattttatttttaaaatttattnttattgatcaaaaatttttatataatcaaggggggggccttgtcacaagggtttacctagcagaaaccttctgcttaactcgcatatttgtcctgttcg

SEQ ID NO: 55767 - DNA, 3583 bp, Homo sapiens
cattggaatggcactcagggcaaaggcagaggtgtgcatggcagtgccctggctgtccctgcaaagggcacaggcactgggcacgagagccgcccgggtccccaggacagtgctgccctttgaagccatgccccagcgtccaggcaacaggtggctgaggctgctgcagatctggagggagcagggttatgaggacctgcacctggaagtacaccagaccttccaggaactggggcccattttcaggtacgacttgggaggagcaggcatggtgtgtgtgatgctgccggaggacgtggagaagctgcaacaggtggacagcctgcatccccacaggatgagcctggagccctgggtggcctacagacaacatcgtgggcacaaatgtggcgtgttcttgctgaatgggcctgaatggcgcttcaaccgattgcggctgaatccagaagtgctgtcgcccaacgctgtgcagaggttcctcccgatggtggatgcagtggccagggacttctcccaggccctgaagaagaaggtgctgcagaacgcccgggggagcctgaccctggacgtccagcccagcatcttccactacaccatagaagccagcaacttggctctttttggagagcggctgggcctggttggccacagccccagttctgccagcctgaacttcctccatgccctggaggtcatgttcaaatccaccgtccagctcatgttcatgcccaggagcctgtctcgctggaccagccccaaggtgtggaaggagcactttgaggcctgggactgcatcttccagtacgaccagcatcgtggcggagctcctgttgaatgcggaactgtcgccagatgccatcaaggccaactctatggaactcactgcagggagcgtggacacggtcaggccggcaaccagccccacccagagagggtgatgccaagcctgcctcccaggcactgcctgccaatgtcacacggcgcccacgtgtcccatccccaggctatgggccccacatttcttacttgggattgtgatgtgataaacacgtttgcagacggtgtttcccttgctgatgacgctctttgagctggctcggaaccccaacgtgcagcaggccctgcgccaggagagcctggccgccgcagccagcatcagtgaacatccccagaaggcaaccaccgagctgcccttgctgcgtgcggccctcaaggagaccttgcggctctaccctgtgggtctgtttctggagcgagtggtgagctcagacttggtgcttcagaactaccacatcccagctgggacattggtgcgcgtgttcctctactctctgggtcgcaaccccgccttgttcccgaggcctgagcgctataacccccagcgctggctagacatcaggggctccggcaggaacttctaccacgtgccctttggctttggcatgcgccagtgccttgggcggcgcctggcagaggcagagatgctgctgctgctgcaccatgtgctgaaacacctccaggtggagacactaacccaagaggacataaagatggtctacagcttcatattgaggcccagcatgttccccctcctcaccttcagagccatcaactaatcacgtctctgcacccagggtcccagcctggccaccagcctccctttctgcctgaccccaggccacccctcttctctcccacatgcacagcttcctgagtcacccctctgtctaaccagccccagcacaaatggaactcccgagggcctctaggaccagggtttgccaggctaagcagcaatgccagggcacagctggggaagatcttgctgaccttgtccccagccccacctggccctttctccagcaagcactgtcctctgggcagtttgcccccatccctcccagtgctggctccaggctcctcgtgtggccatgcaagggtgctgtggttttgtcccttgccttcctgcctagtctcacatgtccctgttcctcttcccctggccagggcccctgcgcagactgtcagagtcattaagcgggatcccagcatctcagagtccagtcaagttccctcctgcagcctgccccctaggcagctcgagcatgccctgagctctctgaaagttgtcgccctggaatagggtcctgcagggtagaatagagtctcgagggacgtgtgttccccagctgatcgtgtcagcctcatgccccaggcctcatctttcatggaccaggccttgttccaggagtgggcgttgggtcctctgcttcctgtgctgtcccctggggaaggtcccaaggatgctgtcaggagatggaagagtcatgtggggtgggaacctggggtgtggttccagaaatgtttttggcaacaggagagacaggattgggccaacaaggactcagacgagttttattgactcatttctctggttgatacggagccatgtcatgtgccacgacctggggtgggcacagggaggctgcagtttcctgcgtgaacctgccttgggcctcatctgctcctagcccagcagagagagttgacccctcctgaactggccactccccagtgctcctgtgcagggagaggaagcacccggtttgagagtgtacccagccagactgtctttatctccatggattttcatcagggcaaagatcacagcagccagctcctggtggctgatgaggatcagagcatttgttcccccatgaaaggggaaatccctatggcatcattccagtggtggtcagtagatccaggacgccctgcaggactcagcctgtacagggagatgaagtgccccaggttgggagcacacctagctagagttatttgtgttaatctattcaggatgctctaagaaaacgccatagactgggttgctgacaaacatcagaattctatttctcatggttctgaaggcttagaaggctaagatcaaggtgtcagcaggttctgtgtctggtgaggacccacctcttgtttcatagataaaaccttcttgctgtgtcctcacatggtggaaaagggcaagacagctcacagagaccttttttataaggacgccagttccattcaagagggcactgcctgcattcccttcccccctcaaaggccctgccctgctattatcgtcaccttggtgactagatttcagcctatgaattctggaggcggacacaaaaattcagattaaactactctgcttctgtttctctaaaatctacatccttctcatatacaaaatacatgcatttctccccagtagccccaaatatcaactcattttagcatcaactttaaaattgtagtccaaagtgtgatttaaatgttatctgagtcaaacatgggtaagactcaaggtacaatttatcctgagtccaactgttcttgctgcgaacctaggaaatcaaacatgttatgtgcttccaaaatacagtggttggagaggcataggataaacattcccattccagaaaggagaaacaggaaagaagaaaggagtaacaagtttcaagcaacttccaaaattgaatgtgacaaacagtattaaaccttaagcctcaagaataat

SEQ ID NO: 55768 - DNA, 3385 bp, Homo sapiens
cattggaatggcactcagggcaaaggcagaggtgtgcatggcagtgccctggctgtccctgcaaagggcacaggcactgggcacgagagccgcccgggtccccaggacagtgctgccctttgaagccatgccccagcgtccaggcaacaggtggctgaggctgctgcagatctggagggagcagggttatgaggacctgcacctggaagtacaccagaccttccaggaactggggcccattttcaggtacgacttgggaggagcaggcatggtgtgtgtgatgctgccggaggacgtggagaagctgcaacaggtggacagcctgcatccccacaggatgagcctggagccctgggtggcctacagacaacatcgtgggcacaaatgtggcgtgttcttgctgaatgggcctgaatggcgcttcaaccgattgcggctgaatccagaagtgctgtcgcccaacgctgtgcagaggttcctcccgatggtggatgcagtggccagggacttctcccaggccctgaagaagaaggtgctgcagaacgcccgggggagcctgaccctggacgtccagcccagcatcttccactacaccatagaagccagcaacttggctctttttggagagcggctgggcctggttggccacagccccagttctgccagcctgaacttcctccatgccctggaggtcatgttcaaatccaccgtccagctcatgttcatgcccaggagcctgtctcgctggaccagccccaaggtgtggaaggagcactttgaggcctgggactgcatcttccagtacgaccagcatcgtggcggagctcctgttgaatgcggaactgtcgccagatgccatcaaggccaactctatggaactcactgcagggagcgtggacacggtcaggccggcaaccagccccacccagagagggtgatgccaagcctgcctcccaggcactgcctgccaatgtcacacggcgcccacgtgtcccatccccaggctatgggccccacatttcttacttgggattgtgatgtgataaacacgtttgcagacggtgtttcccttgctgatgacgctctttgagctggctcggaaccccaacgtgcagcaggccctgcgccaggagagcctggccgccgcagccagcatcagtgaacatccccagaaggcaaccaccgagctgcccttgctgcgtgcggccctcaaggagaccttgcggctctaccctgtgggtctgtttctggagcgagtggtgagctcagacttggtgcttcagaactaccacatcccagctggggtgctgaaacacctccaggtggagacactaacccaagaggacataaagatggtctacagcttcatattgaggcccagcatgttccccctcctcaccttcagagccatcaactaatcacgtctctgcacccagggtcccagcctggccaccagcctccctttctgcctgaccccaggccacccctcttctctcccacatgcacagcttcctgagtcacccctctgtctaaccagccccagcacaaatggaactcccgagggcctctaggaccagggtttgccaggctaagcagcaatgccagggcacagctggggaagatcttgctgaccttgtccccagccccacctggccctttctccagcaagcactgtcctctgggcagtttgcccccatccctcccagtgctggctccaggctcctcgtgtggccatgcaagggtgctgtggttttgtcccttgccttcctgcctagtctcacatgtccctgttcctcttcccctggccagggcccctgcgcagactgtcagagtcattaagcgggatcccagcatctcagagtccagtcaagttccctcctgcagcctgccccctaggcagctcgagcatgccctgagctctctgaaagttgtcgccctggaatagggtcctgcagggtagaatagagtctcgagggacgtgtgttccccagctgatcgtgtcagcctcatgccccaggcctcatctttcatggaccaggccttgttccaggagtgggcgttgggtcctctgcttcctgtgctgtcccctggggaaggtcccaaggatgctgtcaggagatggaagagtcatgtggggtgggaacctggggtgtggttccagaaatgtttttggcaacaggagagacaggattgggccaacaaggactcagacgagttttattgactcatttctctggttgatacggagccatgtcatgtgccacgacctggggtgggcacagggaggctgcagtttcctgcgtgaacctgccttgggcctcatctgctcctagcccagcagagagagttgacccctcctgaactggccactccccagtgctcctgtgcagggagaggaagcacccggtttgagagtgtacccagccagactgtctttatctccatggattttcatcagggcaaagatcacagcagccagctcctggtggctgatgaggatcagagcatttgttcccccatgaaaggggaaatccctatggcatcattccagtggtggtcagtagatccaggacgccctgcaggactcagcctgtacagggagatgaagtgccccaggttgggagcacacctagctagagttatttgtgttaatctattcaggatgctctaagaaaacgccatagactgggttgctgacaaacatcagaattctatttctcatggttctgaaggcttagaaggctaagatcaaggtgtcagcaggttctgtgtctggtgaggacccacctcttgtttcatagataaaaccttcttgctgtgtcctcacatggtggaaaagggcaagacagctcacagagaccttttttataaggacgccagttccattcaagagggcactgcctgcattcccttcccccctcaaaggccctgccctgctattatcgtcaccttggtgactagatttcagcctatgaattctggaggcggacacaaaaattcagattaaactactctgcttctgtttctctaaaatctacatccttctcatatacaaaatacatgcatttctccccagtagccccaaatatcaactcattttagcatcaactttaaaattgtagtccaaagtgtgatttaaatgttatctgagtcaaacatgggtaagactcaaggtacaatttatcctgagtccaactgttcttgctgcgaacctaggaaatcaaacatgttatgtgcttccaaaatacagtggttggagaggcataggataaacattcccattccagaaaggagaaacaggaaagaagaaaggagtaacaagtttcaagcaacttccaaaattgaatgtgacaaacagtattaaaccttaagcctcaagaataat

SEQ ID NO: 55769 - DNA, 1971 bp, Homo sapiens
attttgctcttaccatcaacttccctttggggccccgctccccgacccaccgccacatacccaattcttttacatatgaaattacacagatagaaggaaatatcagcttagggtgctagtttcactatttggtataaaagtgttgaaactggcctgtatgtaagcttcatagaaatctgaccgtttacatggagggaaacaagggaagaggacggttgcctcccccactcaaaggttggaattgtagtacagatactcgtggaaatcatcaatggtcgtatttgggtaaagtctgggattcccaaagctgaatgtttttggtaaaagagaagtgaggaactatgaacgatctgagtatgcagataagttggggaaggagaaatggcagcaacagagaaaaaaaaaaaaaaaaaactcgtgccgaattcggcacgaggcatctcagagtccagtcaagttccctcctgcagcctgccccctaggcagctcgagcatgccctgagctctctgaaagttgtcgccctggaatagggtcctgcagggtagaatagagtctcgagggacgtgtgttccccagctgatcgtgtcagcctcatgccccaggcctcatctttcatggaccaggccttgttccaggagtgggcgttgggtcctctgcttcctgtgctgtcccctggggaaggtcccaaggatgctgtcaggagatggaagagtcatgtggggtgggaacctggggtgtggttccagaaatgtttttggcaacaggagagacaggattgggccaacaaggactcagacgagttttattgactcatttctctggttgatacggagccatgtcatgtgccacgacctggggtgggcacagggaggctgcagtttcctgcgtgaacctgccttgggcctcatctgctcctagcccagcagagagagttgacccctcctgaactggccactccccagtgctcctgtgcagggagaggaagcacccggtttgagagtgtacccagccagactgtctttatctccatggattttcatcagggcaaagatcacagcagccagctcctggtggctgatgaggatcagagcatttgttcccccatgaaaggggaaatccctatggcatcattccagtggtggtcagtagatccaggacgccctgcaggactcagcctgtacagggagatgaagtgccccaggttgggagcacacctagctagagttatttgtgttaatctattcaggatgctctaagaaaacgccatagactgggttgctgacaaacatcagaattctatttctcatggttctgaaggcttagaaggctaagatcaaggtgtcagcaggttctgtgtctggtgaggacccacctcttgtttcatagataaaaccttcttgctgtgtcctcacatggtggaaaagggcaagacagctcacagagaccttttttataaggacgccagttccattcaagagggcactgcctgcattcccttcccccctcaaaggccctgccctgctattatcgtcaccttggtgactagatttcagcctatgaattctggaggcggacacaaaaattcagattaaactactctgcttctgtttctctaaaatctacatccttctcatatacaaaatacatgcatttctccccagtagccccaaatatcaactcattttagcatcaactttaaaattgtagtccaaagtgtgatttaaatgttatctgagtcaaacatgggtaagactcaaggtacaatttatcctgagtccaactgttcttgctgcgaacctaggaaatcaaacatgttatgtgcttccaaaatacagtggttggagaggcataggataaacattcccattccagaaaggagaaacaggaaagaagaaaggagtaacaagtttcaagcaacttccaaaattgaatgtgacaaacagtattaaaccttaagcctcaagaataat

SEQ ID NO: 55770 - DNA, 2325 bp, Homo sapiens
cattggaatggcactcagggcaaaggcagaggtgtgcatggcagtgccctggctgtccctgcaaagggcacaggcactgggcacgagagccgcccgggtccccaggacagtgctgccctttgaagccatgccccagcgtccaggcaacaggtggctgaggctgctgcagatctggagggagcagggttatgaggacctgcacctggaagtacaccagaccttccaggaactggggcccattttcaggtacgacttgggaggagcaggcatggtgtgtgtgatgctgccggaggacgtggagaagctgcaacaggtggacagcctgcatccccacaggatgagcctggagccctgggtggcctacagacaacatcgtgggcacaaatgtggcgtgttcttgctgaatgggcctgaatggcgcttcaaccgattgcggctgaatccagaagtgctgtcgcccaacgctgtgcagaggttcctcccgatggtggatgcagtggccagggacttctcccaggccctgaagaagaaggtgctgcagaacgcccgggggagcctgaccctggacgtccagcccagcatcttccactacaccatagaagccagcaacttggctctttttggagagcggctgggcctggttggccacagccccagttctgccagcctgaacttcctccatgccctggaggtcatgttcaaatccaccgtccagctcatgttcatgcccaggagcctgtctcgctggaccagccccaaggtgtggaaggagcactttgaggcctgggactgcatcttccagtacggcgacaactgtatccagaaaatctatcaggaactggccttcagccgccctcaacagtacaccagcatcgtggcggagctcctgttgaatgcggaactgtcgccagatgccatcaaggccaactctatggaactcactgcagggagcgtggacacgacggtgtttcccttgctgatgacgctctttgagctggctcggaaccccaacgtgcagcaggccctgcgccaggagagcctggccgccgcagccagcatcagtgaacatccccagaaggcaaccaccgagctgcccttgctgcgtgcggccctcaaggagaccttgcggctctaccctgtgggtctgtttctggagcgagtggtgagctcagacttggtgcttcagaactaccacatcccagctgggacattggtgcgcgtgttcctctactctctgggtcgcaaccccgccttgttcccgaggcctgagcgctataacccccagcgctggctagacatcaggggctccggcaggaacttctaccacgtgccctttggctttggcatgcgccagtgccttgggcggcgcctggcagaggcagagatgctgctgctgctgcaccatgtgctgaaacacctccaggtggagacactaacccaagaggacataaagatggtctacagcttcatattgaggcccagcatgttccccctcctcaccttcagagccatcaactaatcacgtctctgcacccagggtcccagcctggccaccagcctccctttctgcctgaccccaggccacccctcttctctcccacatgcacagcttcctgagtcacccctctgtctaaccagccccagcacaaatggaactcccgagggcctctaggaccagggtttgccaggctaagcagcaatgccagggcacagctggggaagatcttgctgaccttgtccccagccccacctggccctttctccagcaagcactgtcctctgggcagtttgcccccatccctcccagtgctggctccaggctcctcgtgtggccatgcaagggtgctgtggttttgtcccttgccttcctgccctgctattatcgtcaccttggtgactagatttcagcctatgaattctggaggcggacacaaaaattcagattaaactactctgcttctgtttctctaaaatctacatccttctcatatacaaaatacatgcatttctccccagtagccccaaatatcaactcattttagcatcaactttaaaattgtagtccaaagtgtgatttaaatgttatctgagtcaaacatgggtaagactcaaggtacaatttatcctgagtccaactgttcttgctgcgaacctaggaaatcaaacatgttatgtgcttccaaaatacagtggttggagaggcataggataaacattcccattccagaaaggagaaacaggaaagaagaaaggagtaacaagtttcaagcaacttccaaaattgaatgtgacaaacagtattaaaccttaagcctcaagaataat

SEQ ID NO: 55771 - DNA, 2013 bp, Homo sapiens
  misc_feature (1962)..(1962): n is a, c, g, or t
  misc_feature (1973)..(1973): n is a, c, g, or t
  misc_feature (2010)..(2010): n is a, c, g, or t
cattggaatggcactcagggcaaaggcagaggtgtgcatggcagtgccctggctgtccctgcaaagggcacaggcactgggcacgagagccgcccgggtccccaggacagtgctgccctttgaagccatgccccagcgtccaggcaacaggtggctgaggctgctgcagatctggagggagcagggttatgaggacctgcacctggaagtacaccagaccttccaggaactggggcccattttcaggtacgacttgggaggagcaggcatggtgtgtgtgatgctgccggaggacgtggagaagctgcaacaggtggacagcctgcatccccacaggatgagcctggagccctgggtggcctacagacaacatcgtgggcacaaatgtggcgtgttcttgctgaatgggcctgaatggcgcttcaaccgattgcggctgaatccagaagtgctgtcgcccaacgctgtgcagaggttcctcccgatggtggatgcagtggccagggacttctcccaggccctgaagaagaaggtgctgcagaacgcccgggggagcctgaccctggacgtccagcccagcatcttccactacaccatagaagccagcaacttggctctttttggagagcggctgggcctggttggccacagccccagttctgccagcctgaacttcctccatgccctggaggtcatgttcaaatccaccgtccagctcatgttcatgcccaggagcctgtctcgctggaccagccccaaggtgtggaaggagcactttgaggcctgggactgcatcttccagtacggcgacaactgtatccagaaaatctatcaggaactggccttcagccgccctcaacagtacaccagcatcgtggcggagctcctgttgaatgcggaactgtcgccagatgccatcaaggccaactctatggaactcactgcagggagcgtggacacgacggtgtttcccttgctgatgacgctctttgagctggctcggaaccccaacgtgcagcaggccctgcgccaggagagcctggccgccgcagccagcatcagtgaacatccccagaaggcaaccaccgagctgcccttgctgcgtgcggccctcaaggagaccttgcggctctaccctgtgggtctgtttctggagcgagtggtgagctcagacttggtgcttcagaactaccacatcccagctgggacattggtgcgcgtgttcctctactctctgggtcgcaaccccgccttgttcccgaggcctgagcgctataacccccagcgctggctagacatcaggggctccggcaggaacttctaccacgtgccctttggctttggcatgcgccagtgccttgggcggcgcctggcagaggcagagatgctgctgctgctgcaccatgtgctgaaacacctccaggtggagacactaacccaagaggacataaagatggtctacagcttcatattgaggcccagcatgttccccctcctcaccttcagagccatcaactaatcacgtctctgcacccagggtcccagcctggccaccagcctccctttctgcctgaccccaggccacccctcttctctcccacatgcacagcttcctgagtcacccctctgtctaaccagccccagcacaaatggaactcccgagggcctctaggaccagggtttgccaggctaagcagcaatgccagggcacagctggggaagatcttgctgaccttgtccccagccccacctggccctttctccagcaagcactgtcctctgggcagtttgcccccatccctccctggagccctgggtggcctacagacaacatcgtgggcacaaatgtggcgtgttcttgctgaatgggcctgaatggcgcttcaaccgattgcggctgaatccagaagttgctgtcgccaacgctgtgcagaggttccttccgatggtggatgcagtggnccaggacttcntccaagcccttgagaaagaggtgctgcagaacgcccnggg

SEQ ID NO: 55772 - DNA, 1473 bp, Homo sapiens
cattggaatggcactcagggcaaaggcagaggtgtgcatggcagtgccctggctgtccctgcaaagggcacaggcactgggcacgagagccgcccgggtccccaggacagtgctgccctttgaagccatgccccagcgtccaggcaacaggtggctgaggctgctgcagatctggagggagcagggttatgaggacctgcacctggaagtacaccagaccttccaggaactggggcccattttcaggtacgacttgggaggagcaggcatggtgtgtgtgatgctgccggaggacgtggagaagctgcaacaggtggacagcctgcatccccacaggatgagcctggagccctgggtggcctacagacaacatcgtgggcacaaatgtggcgtgttcttgctgaatgggcctgaatggcgcttcaaccgattgcggctgaatccagaagtgctgtcgcccaacgctgtgcagaggttcctcccgatggtggatgcagtggccagggacttctcccaggccctgaagaagaaggtgctgcagaacgcccgggggagcctgaccctggacgtccagcccagcatcttccactacaccatagaagccagcaacttggctctttttggagagcggctgggcctggttggccacagccccagttctgccagcctgaacttcctccatgccctggaggtcatgttcaaatccaccgtccagctcatgttcatgcccaggagcctgtctcgctggaccagccccaaggtgtggaaggagcactttgaggcctgggactgcatcttccagtacgaccagcatcgtggcggagctcctgttgaatgcggaactgtcgccagatgccatcaaggccaactctatggaactcactgcagggagcgtggacacggtcaggccggcaaccagccccacccagagagggtgatgccaagcctgcctcccaggcactgcctgccaatgtcacacggcgcccacgtgtcccatccccaggctatgggccccacatttcttacttgggattgtgatgtgataaacacgtttgcagacggtgtttcccttgctgatgacgctctttgagctggctcggaaccccaacgtgcagcaggccctgcgccaggagagcctggccgccgcagccagcatcagtgaacatccccagaaggcaaccaccgagctgcccttgctgcgtgcggccctcaaggagaccttgcggctctaccctgtgggtctgtttctggagcgagtggtgagctcagacttggtgcttcagaactaccacatcccagctggggaaatcaaacatgttatgtgcttccaaaatacagtggttggagaggcataggataaacattcccattccagaaaggagaaacaggaaagaagaaaggagtaacaagtttcaagcaacttccaaaattgaatgtgacaaacagtattaaaccttaagcctcaagaataat

SEQ ID NO: 55773 - DNA, 1261 bp, Homo sapiens
cattggaatggcactcagggcaaaggcagaggtgtgcatggcagtgccctggctgtccctgcaaagggcacaggcactgggcacgagagccgcccgggtccccaggacagtgctgccctttgaagccatgccccagcgtccaggcaacaggtggctgaggctgctgcagatctggagggagcagggttatgaggacctgcacctggaagtacaccagaccttccaggaactggggcccattttcaggtacgacttgggaggagcaggcatggtgtgtgtgatgctgccggaggacgtggagaagctgcaacaggtggacagcctgcatccccacaggatgagcctggagccctgggtggcctacagacaacatcgtgggcacaaatgtggcgtgttcttgctgaatgggcctgaatggcgcttcaaccgattgcggctgaatccagaagtgctgtcgcccaacgctgtgcagaggttcctcccgatggtggatgcagtggccagggacttctcccaggccctgaagaagaaggtgctgcagaacgcccgggggagcctgaccctggacgtccagcccagcatcttccactacaccatagaagccagcaacttggctctttttggagagcggctgggcctggttggccacagccccagttctgccagcctgaacttcctccatgccctggaggtcatgttcaaatccaccgtccagctcatgttcatgcccaggagcctgtctcgctggaccagccccaaggtgtggaaggagcactttgaggcctgggactgcatcttccagtacggcgacaactgtatccagaaaatctatcaggaactggccttcagccgccctcaacagtacaccagcatcgtggcggagctcctgttgaatgcggaactgtcgccagatgccatcaaggccaactctatggaactcactgcagggagcgtggacacggtcaggccggcaaccagccccacccagagagggtgatgccaagcctgcctcccaggcactgcctgccaatgtcacacggcgcccacgtgtcccatccccaggctatgggccccacatttcttacttgggattgtgatgtgataaacacgtttgcaggttgccatggttggaatggggggttcctttctgtggaggactcagggaaaggggtttggatgggcattaggatttgaagctgagcttctgaagtgtcgccttgataggtcctcaggtagaataaaggccctgggcactgtctgc

SEQ ID NO: 55774 - DNA, 825 bp, Homo sapiens
gcagctagtcttccctattgacaggtgaaaaagcaggtccacagctgttgagtgactttcccaaggccacacagaccacaaatcctggctccaagtccagggcgtttccagtaagcactgtccaaatcagtcatggaggtccctgagtgacaaaaatatgcaggaccccttctttccccctcccagttcccgcagctaggctgagtgttaagaggaaggtgccatacaggttcagcaccctggtcagcgcccagcctccctaaagccgctggaggaggcctttggagccagctcaggtcagtgtctgctgcttccttacccaggatggcccactcttggggacagacaggcatcctgagaggagggggcctggacctaggtgtcttgccacccaatacagagccctgccctctccctctccttcagaaggaagtatgggagcagttccatcctcaaggtttcttggttcccaggacagaaatttgagtgagaagcatgtgaagagagggatgcccaggggcccttggccatggtggccttggacaagtttggctttccccatctgtaaaatgtagataaggatggacccacctccccaagatcctgcctatctgtgagagtccatgactaagtgggccatgggctggactgagttcagtgctcccccaacctgccctcctcctctcccccacagagcttcccaatttacatgtaaaccttgggcatcaaagtgacagctgatagcccaggtttgcccacaaatgtgctctgactggcgtgcatgttattaaatttgataagatgcatgatggcagctattagagt

SEQ ID NO: 55775 - DNA, 339 bp, Homo sapiens
gggcactgacttcctgggagtgtaagtgactcacctggaccccacagccagtgagcattagtgcttatattccatcctccaaagctctttcttcataccagaccacacatgtggcccaaggagggatatttactctgcacttttagagttctagaaaacattgtttagtggtctggcatcatctatatttacttggcttgatttgggatagagtataatcctagtcctcgatgaaaggattttgatgagttaaccttatggggtgatgggatttatgggattatttccacacttaaaatgatttgtgggaaaaaaaagtgtactaatccctaatttagg

SEQ ID NO: 55776 - DNA, 2696 bp, Homo sapiens
ctcgtgcaattcggcacgaggctggacgggcacaccatgaggctgctgaccctcctgggccttctgtgtggctcggtggccacccccttaggcccgaagtggcctgaacctgtgttcgggcgcctggcatcccccggctttccaggggagtatgccaatgaccaggagcggcgctggaccctgactgcaccccccggctaccgcctgcgcctctacttcacccacttcgacctggagctctcccacctctgcgagtacgacttcgtcaagctgagctcgggggccaaggtgctggccacgctgtgcgggcaggagagcacagacacggagcgggcccctggcaaggacactttctactcgctgggctccagcctggacattaccttccgctccgactactccaacgagaagccgttcacggggttcgaggccttctatgcagccgaggacattgacgagtgccaggtggccccgggagaggcgcccacctgcgaccaccactgccacaaccacctgggcggtttctactgctcctgccgcgcaggctacgtcctgcaccgtaacaagcgcacctgctcagccctgtgctccggccaggtcttcacccagaggtctggggagctcagcagccctgaatacccacggccgtatcccaaactctccagttgcacttacagcatcagcctggaggaggggttcagtgtcattctggactttgtggagtccttcgatgtggagacacaccctgaaaccctgtgtccctacgactttctcaagattcaaacagacagagaagaacatggcccattctgtgggaagacattgccccacaggattgaaacaaaaagcaacacggtgaccatcacctttgtcacagatgaatcaggagaccacacaggctggaagatccactacacgagcacagcgcacgcttgcccttatccgatggcgccacctaatggccacgtttcacctgtgcaagccaaatacatcctgaaagacagcttctccatcttttgcgagactggctatgagcttctgcaaggtcacttgcccctgaaatcctttactgcagtttgtcagaaagatggatcttgggaccggccaatgcccgcgtgcagcattgttgactgtggccctcctgatgatctacccagtggccgagtggagtacatcacaggtcctggagtgaccacctacaaagctgtgattcagtacagctgtgaagagaccttctacacaatgaaagtgaatgatggtaaatatgtgtgtgaggctgatggattctggacgagctccaaaggagaaaaatcactcccagtctgtgagcctgtttgtggactatcagcccgcacaacaggagggcgtatatatggagggcaaaaggcaaaacctggtgattttccttggcaagtcctgatattaggtggaaccacagcagcaggtgcacttttatatgacaactgggtcctaacagctgctcatgccgtctatgagcaaaaacatgatgcatccgccctggacattcgaatgggcaccctgaaaagactatcacctcattatacacaagcctggtctgaagctgtttttatacatgaaggttatactcatgatgctggctttgacaatgacatagcactgattaaattgaataacaaagttgtaatcaatagcaacatcacgcctatttgtctgccaagaaaagaagctgaatcctttatgaggacagatgacattggaactgcatctggatggggattaacccaaaggggttttcttgctagaaatctaatgtatgtcgacataccgattgttgaccatcaaaaatgtactgctgcatatgaaaagccaccctatccaaggggaagtgtaactgctaacatgctttgtgctggcttagaaagtgggggcaaggacagctgcagaggtgacagcggaggggcactggtgtttctagatagtgaaacagagaggtggtttgtgggaggaatagtgtcctggggttccatgaattgtggggaagcaggtcagtatggagtctacacaaaagttattaactatattccctggatcgagaacataattagtgatttttaacttgcgtgtctgcagtcaaggattcttcatttttagaaatgcctgtgaagaccttggcagcgacgtggctcgagaagcattcatcattactgtggacatggcagttgttgctccacccaaaaaaacagactccaggtgaggctgctgtcatttctccacttgccagtttaattccagccttacccattgactcaaggggacataaaccacgagagtgacagtcatctttgcccacccagtgtaatgtcactgctcaaattacatttcattaccttaaaaagccagtctcttttcatactggctgttggcatttctgtaaactgcctgtccatgctctttgtttttaaacttgttcttattgatctctgtaagtgctttatatattatggcagtactgattgaggaataaccttgaatcctttttttgggtaggtaggttggaaacactgatacttcagcccaggtattgactaaaatttccatgttaaaaaccaatactacagaatggtgggatacaattattcacttatcaaattgtcagacaaaaggaacgtgaatagtagtactatttcacattgttaaagacaacataaacttcc

SEQ ID NO: 55777 - DNA, 726 bp, Homo sapiens
ggccaggccagctggacgggcacaccatgaggctgctgaccctcctgggccttctgtgtggctcggtggccacccccttaggcccgaagtggcctgaacctgtgttcgggcgcctggcatcccccggctttccaggggagtatgccaatgaccaggagcggcgctggaccctgactgcaccccccggctaccgcctgcgcctctacttcacccacttcgacctggagctctcccacctctgcgagtacgacttcgtcaagctgagctcgggggccaaggtgctggccacgctgtgcgggcaggagagcacagacacggagcgggcccctggcaaggacactttctactcgctgggctccagcctggacattaccttccgctccgactactccaacgagaagccgttcacggggttcgaggccttctatgcagccgaggacattgacgagtgccaggtggccccgggagaggcgcccacctgcgaccaccactgccacaaccacctgggcggtttctactgctcctgccgcgcaggctacgtcctgcaccgtaacaagcgcacctgctcagagcagagcctctagcctcccctggagctccggcctgcccagcaggtcagaagccagagccagcctgctggcctcagctccgggttgggctgagatggctgtgccccaactcccattcacccaccatggacccaataataaacctggccccacccca

SEQ ID NO: 55778 - DNA, 1158 bp, Homo sapiens
  misc_feature (5)..(5): n is a, c, g, or t
  misc_feature (9)..(9): n is a, c, g, or t
  misc_feature (11)..(12): n is a, c, g, or t
  misc_feature (893)..(893): n is a, c, g, or t
  misc_feature (909)..(909): n is a, c, g, or t
cgccnctgncnngcccataggctgctgaccctcctgggccttctgtgtggctcggtggccacccccttaggcccgaagtggcctgaacctgtgttcgggcgcctggcatcccccggctttccaggggagtatgccaatgaccaggagcggcgctggaccctgactgcaccccccggctaccgcctgcgcctctacttcacccacttcgacctggagctctcccacctctgcgagtacgacttcgtcaagctgagctcgggggccaaggtgctggccacgctgtgcgggcaggagagcacagacacggagcgggcccctggcaaggacactttctactcgctgggctccagcctggacattaccttccgctccgactactccaacgagaagccgttcacggggttcgaggccttctatgcagccgaggacattgacgagtgccaggtggccccgggagaggcgcccacctgcgaccaccactgccacaaccacctgggcggtttctactgctcctgccgcgcaggctacgtcctgcaccgtaacaagcgcacctgctcaggtgagggaggctgcctgggccccaacgcaccctctcctgggatacccggggctcctcagggccattgctgctctgcccaggggtgcggagggcctgggcctggacactgggtgcttctaggccctgctgcctccagctccccttctcagccctgcttcccctctcagcagccaggctcatcagtgccaccctgccctagcactgagactaattctaacatcccactgtgtacctggttccacctgggctctgggaacccctcatgtagccacgggagagtcggggtatctagcctcgttccttggactgttcctgttccctgcactgtgggacnggccagtgctctgggncgtgggcagccccacctgtggcgctgaccctgcctcccccgactcggtttctcctctcggtgtctctccttgcctctctgatctctcttccagagcagagcctctagcctcccctggagctccggcctgcccagcaggtcagaagccagagccagcctgctggcctcagctccgggttgggctgagatggctgtgccccaactcccattcacccaccatggacccaataataaacctggccccacccca

SEQ ID NO: 55779 - DNA, 2095 bp, Homo sapiens
aaggctggggccttcgagtacaagtgtgggaggcagagtggggaggggcaccccaatccatggcctgggttggcctcattggctgtccctgaaatgctgaggaggtgggttacttccctccggcccaggccagacccaggcagctgctccccagctttcatgagcttctttctcagattcaaacagacagagaagaacatggcccattctgtgggaagacattgccccacaggattgaaacaaaaagcaacacggtgaccatcacctttgtcacagatgaatcaggagaccacacaggctggaagatccactacacgagcacagcgcacgcttgcccttatccgatggcgccacctaatggccacgtttcacctgtgcaagccaaatacatcctgaaagacagcttctccatcttttgcgagactggctatgagcttctgcaaggtcacttgcccctgaaatcctttactgcagtttgtcagaaagatggatcttgggaccggccaatgcccgcgtgcagcattgttgactgtggccctcctgatgatctacccagtggccgagtggagtacatcacaggtcctggagtgaccacctacaaagctgtgattcagtacagctgtgaagagaccttctacacaatgaaagtgaatgatggtaaatatgtgtgtgaggctgatggattctggacgagctccaaaggagaaaaatcactcccagtctgtgagcctgtttgtggactatcagcccgcacaacaggagggcgtatatatggagggcaaaaggcaaaacctggtgattttccttggcaagtcctgatattaggtggaaccacagcagcaggtgcacttttatatgacaactgggtcctaacagctgctcatgccgtctatgagcaaaaacatgatgcatccgccctggacattcgaatgggcaccctgaaaagactatcacctcattatacacaagcctggtctgaagctgtttttatacatgaaggttatactcatgatgctggctttgacaatgacatagcactgattaaattgaataacaaagttgtaatcaatagcaacatcacgcctatttgtctgccaagaaaagaagctgaatcctttatgaggacagatgacattggaactgcatctggatggggattaacccaaaggggttttcttgctagaaatctaatgtatgtcgacataccgattgttgaccatcaaaaatgtactgctgcatatgaaaagccaccctatccaaggggaagtgtaactgctaacatgctttgtgctggcttagaaagtgggggcaaggacagctgcagaggtgacagcggaggggcactggtgtttctagatagtgaaacagagaggtggtttgtgggaggaatagtgtcctggggttccatgaattgtggggaagcaggtcagtatggagtctacacaaaagttattaactatattccctggatcgagaacataattagtgatttttaacttgcgtgtctgcagtcaaggattcttcatttttagaaatgcctgtgaagaccttggcagcgacgtggctcgagaagcattcatcattactgtggacatggcagttgttgctccacccaaaaaaacagactccaggtgaggctgctgtcatttctccacttgccagtttaattccagccttacccattgactcaaggggacataaaccacgagagtgacagtcatctttgcccacccagtgtaatgtcactgctcaaattacatttcattaccttaaaaagccagtctcttttcatactggctgttggcatttctgtaaactgcctgtccatgctctttgtttttaaacttgttcttattgatctctgtaagtgctttatatattatggcagtactgattgaggaataaccttgaatcctttttttgggtaggtaggttggaaacactgatacttcagcccaggtattgactaaaatttccatgttaaaaaccaatactacagaatggtgggatacaattattcacttatcaaattgtcagacaaaaggaacgtgaatagtagtactatttcacattgttaaagacaacataaacttcc

SEQ ID NO: 55780 - DNA, 741 bp, Homo sapiens
ctcgtgcaattcggcacgaggctggacgggcacaccatgaggctgctgaccctcctgggccttctgtgtggctcggtggccacccccttaggcccgaagtggcctgaacctgtgttcgggcgcctggcatcccccggctttccaggggagtatgccaatgaccaggagcggcgctggaccctgactgcaccccccggctaccgcctgcgcctctacttcacccacttcgacctggagctctcccacctctgcgagtacgacttcgtcaagctgagctcgggggccaaggtgctggccacgctgtgcgggcaggagagcacagacacggagcgggcccctggcaaggacactttctactcgctgggctccagcctggacattaccttccgctccgactactccaacgagaagccgttcacggggttcgaggccttctatgcagccgaggacattgacgagtgccaggtggccccgggagaggcgcccacctgcgaccaccactgccacaaccaccaaacacatacaacacacacacacacccgacaaacaaaaaaacccaaacacaacaagaccacaaacacacaacaaacaaaccaccaaaacccctgaagctccggcctgcccagcaggtcagaagccagagccagcctgctggcctcagctccgggttgggctgagatggctgtgccccaactcccattcacccaccatggacccaataataaacctggccccacccca

SEQ ID NO: 55781 - DNA, 864 bp, Homo sapiens
tccccatgcctctttgctgtttgtggaaaataaagcattctataggcggagctagtgaacgcctcttttaaaacacgagtctccacacttccctgttcactttggttccagcatcctgtccagcaaagaagcatatcagccaaaatgatacctggaggcttatctgaggccaaacccgccactccagaaatccaggagattgttgataaggttaaaccacagcttgaagaaaaaacaaatgagacttacggaaaattggaagctgtgcagtataaaactcaagttgttgctggaacaaattactacattaaggtacgagcaggtgataataaatatatgcacttgaaagtattcaaaagtcttcccggacaaaatgaggacttggtacttactggataccaggttgacaaaaacaaggatgacgagctgacgggcttttagcagcatgtacccaaagtgttctgattccttcaactggctactgagtcatgatccttgctgataaatataaccatcaataaagaagcattcttttccaaagaaattatttcttcaattatttctcatttattgtattaagcagaaattaccttttctttctcaaaatcagtgttattgctttagagtataaactccatataaattgatggcaattggaaatcttataaaaactagtcaagcctaatgcaactggctaaaggatagtaccaccctcacccccaccataggcaggctggatcgtggactatcaattcaccagcctccttgttccctgtggctgctgataacccaacattccatctctaccctcatacttcaaaattaaatcaagtatttaccagaaaaaaatatataaaataaaaa

SEQ ID NO: 55782 - DNA, 774 bp, Homo sapiens
tccccatgcctctttgctgtttgtggaaaataaagcattctataggcggagctagtgaacgcctcttttaaaacacgagtctccacacttccctgttcactttggttccagcatcctgtccagcaaagaagcatatcagccaaaatgatacctggaggcttatctgaggccaaacccgccactccagaaatccaggagattgttgataaggttaaaccacagcttgaagaaaaaacaaatgagacttacggaaaattggaagctgtgcagtataaaactcaagttgttgctggaacaaattactacattaaggtacgagcaggtgataataaatatatgcacttgaaagtattcaaaagtcttcccggacaaaatgaggacttggtacttactggataccaggttgacaaaaacaaggatgacgagctgacgggcttttagcagcatgtacccaaagtgttctgattccttcaactggctactgagtcatgatccttgctgataaatataaccatcaaaaaaaaaaaaaagaaaaaaaaaaaccaactccgtggcgggagcgcctctggggacccctgagagaaaaagattcttcaggaaccacaccggtagtaggagccccggggcaccccatgtgagacagtccggacccggtggagcacgacgggttccccacagggagaacgcgcgggcgacgtcaatcagcgggcgggaattccgacgcccattaaaaacgccccggggaaacccggaggccctctgaaacaccccgag

SEQ ID NO: 55783 - DNA, 558 bp, Homo sapiens
tccccatgcctctttgctgtttgtggaaaataaagcattctataggcggagctagtgaacgcctcttttaaaacacgagtctccacacttccctgttcactttggttccagcatcctgtccagcaaagaagcatatcagccaaaatgatacctggaggcttatctgaggccaaacccgccactccagaaatccaggagattgttgataaggttaaaccacagcttgaagaaaaaacaaatgagacttacggaaaattggaagctgtgcagtataaaactcaagttgttgctggaacaaattactacattaaggtacgagcaggtgataataaatatatgcacttgaaagtattcaaaagtcttcccggacaaaatgaggacttggtacttactggataccaggttgacaaaaacaaggatgacgagctgacgggcttttagcagcatgtacccaaagtgttctgattccttcaactggctactgagtcatgatccttgctgataaatataaccatcttaaaaaaaaacttaagcaagcttatgcatgccgccccaaat

SEQ ID NO: 55784 - DNA, 542 bp, Homo sapiens
tccccatgcctctttgctgtttgtggaaaataaagcattctataggcggagctagtgaacgcctcttttaaaacacgagtctccacacttccctgttcactttggttccagcatcctgtccagcaaagaagcatatcagccaaaatgatacctggaggcttatctgaggccaaacccgccactccagaaatccaggagattgttgataaggttaaaccacagcttgaagaaaaaacaaatgagacttacggaaaattggaagctgtgcagtataaaactcaagttgttgctggaacaaattactacattaaggtacgagcaggtgataataaatatatgcacttgaaagtattcaaaagtcttcccggacaaaatgaggacttggtacttactggataccaggttgacaaaaacaaggatgacgagctgacgggcttttagcagcatgtacccaaagtgttctgattccttcaactggctactgagtcatgatccttgctgataaatataaccatcccctgtaccgagctcgattcactgcc

SEQ ID NO: 55785 - DNA, 390 bp, Homo sapiens
ccctttcccccgtatttccctttccgcacgccccccctttcacctcagttaaaccacagcttgaagaaaaaacaaatgagacttacggaaaattggaagctgtgcagtataaaactcaagttgttgctggaacaaattactacattaaggtacgagcaggtgataataaatatatgcacttgaaagtattcaaaagtcttcccggacaaaatgaggacttggtacttactggataccaggttgacaaaaacaaggatgacgagctgacgggcttttagcagcatgtacccaaagtgttctgattccttcaactggctactgagtcatgatccttgctgataaatataaccatcaataaaaattacaaacttggcccttcttggctctcaa

SEQ ID NO: 55786 - DNA, 308 bp, Homo sapiens
gaaagaggaccctgctgtatcctcagaaaacaatggccccctttcctccattctcaatctgctttcttcataggaggttgacaaaaacaaggatgacgagctgacgggcttttagcagcatgtacccaaagtgttctgattccttcaactggctactgagtcatgatccttgctgataaatataaccatcgtgtggtggtatgcaccgtgtagctacttgtgaggctgaggcaggaggattgcttgagcacaggattttgaggttgcagtgagctatgactgcaccactgcactccagcctgagtaga

SEQ ID NO: 55787 - DNA, 837 bp, Homo sapiens
tccccatgcctctttgctgtttgtggaaaataaagcattctataggcggagctagtgaacgcctcttttaaaacacgagtctccacacttccctgttcactttggttccagcatcctgtccagcaaagaagcatatcagccaaaatgatacctggaggcttatctgaggccaaacccgccactccagaaatccaggagattgttgataaggttaaaccacagcttgaagaaaaaacaaatgagacttacggaaaattggaagctgtgcagtataaaactcaagttgttgctggaacaaattactacattaaggtacgagcaggtgataataaatatatgcacttgaaagtattcaaaagtcttcccggacaaaatgaggacttggtacttactggataccaggttgacaaaaacaaggatgacgagctgacgggcttttagcagcatgtacccaaagtgttctgattccttcaactggctactgagtcatgatccttgctgataaatataaccatcaataaagaagcattcttttccaaagaaattatttcttcaattatttctcatttattgtattaagcagaaattaccttttctttctcaaaatcagtgttattgctttagagtataaactccatataaattgatggcaattggaaatcttataaaaactagtcaagcctaatgcaactggctaaaggatagtaccaccctcacccccaccataggcaggctggatcgtggactatcaattcaccagcctccttgttccctgtggctgctgataacccaacattccatctctaccctcatacttcaaaattaaatcaagtattt

SEQ ID NO: 55788 - DNA, 776 bp, Homo sapiens
gcaccaataggatcctcccgaatcaaccctgacttcctgatatgccattcttgctgcagcaagaatggagcatatcagccaaaatgatacctggaggcttatctgaggccaaacccgccactccagaaatccaggagattgttgataaggttaaaccacagcttgaagaaaaaacaaatgagacttacggaaaattggaagctgtgcagtataaaactcaagttgttgctggaacaaattactacattaaggtacgagcaggtgataataaatatatgcacttgaaagtattcaaaagtcttcccggacaaaatgaggacttggtacttactggataccaggttgacaaaaacaaggatgacgagctgacgggcttttagcagcatgtacccaaagtgttctgattccttcaactggctactgagtcatgatccttgctgataaatataaccatcaataaagaagcattcttttccaaagaaattatttcttcaattatttctcatttattgtattaagcagaaattaccttttctttctcaaaatcagtgttattgctttagagtataaactccatataaattgatggcaattggaaatcttataaaaactagtcaagcctaatgcaactggctaaaggatagtaccaccctcacccccaccataggcaggctggatcgtggactatcaattcaccagcctccttgttccctgtggctgctgataacccaacattccatctctaccctcatacttcaaaattaaatcaagtattt

SEQ ID NO: 55789 - DNA, 862 bp, Homo sapiens
gcaccatcagaatggcatatcagcgcaagtaggtctacaagacgctacttcccctatcatagaagagcttatcacctttcatgatcacgccctcataatcattttccttatctgcttccttcctgatatgccattcttgctgcagcaagaatggagcatatcagccaaaatgatacctggaggcttatctgaggccaaacccgccactccagaaatccaggagattgttgataaggttaaaccacagcttgaagaaaaaacaaatgagacttacggaaaattggaagctgtgcagtataaaactcaagttgttgctggaacaaattactacattaaggtacgagcaggtgataataaatatatgcacttgaaagtattcaaaagtcttcccggacaaaatgaggacttggtacttactggataccaggttgacaaaaacaaggatgacgagctgacgggcttttagcagcatgtacccaaagtgttctgattccttcaactggctactgagtcatgatccttgctgataaatataaccatcaataaagaagcattcttttccaaagaaattatttcttcaattatttctcatttattgtattaagcagaaattaccttttctttctcaaaatcagtgttattgctttagagtataaactccatataaattgatggcaattggaaatcttataaaaactagtcaagcctaatgcaactggctaaaggatagtaccaccctcacccccaccataggcaggctggatcgtggactatcaattcaccagcctccttgttccctgtggctgctgataacccaacattccatctctaccctcatacttcaaaattaaatcaagtattt

SEQ ID NO: 55790 - DNA, 923 bp, Homo sapiens
tcggcacctaaaatgcgcgttgggggtactgctaacgtcaccctcacagggatgccacggggcctgttattcgcaagctggttttctagacctgttcgctggaagcctggtgagcaccatttctggacgctcaggccgtgtcgggcttcagtcatctccaccacacaggtacagcagcgcttcctgatatgccattcttgctgcagcaagaatggagcatatcagccaaaatgatacctggaggcttatctgaggccaaacccgccactccagaaatccaggagattgttgataaggttaaaccacagcttgaagaaaaaacaaatgagacttacggaaaattggaagctgtgcagtataaaactcaagttgttgctggaacaaattactacattaaggtacgagcaggtgataataaatatatgcacttgaaagtattcaaaagtcttcccggacaaaatgaggacttggtacttactggataccaggttgacaaaaacaaggatgacgagctgacgggcttttagcagcatgtacccaaagtgttctgattccttcaactggctactgagtcatgatccttgctgataaatataaccatcaataaagaagcattcttttccaaagaaattatttcttcaattatttctcatttattgtattaagcagaaattaccttttctttctcaaaatcagtgttattgctttagagtataaactccatataaattgatggcaattggaaatcttataaaaactagtcaagcctaatgcaactggctaaaggatagtaccaccctcacccccaccataggcaggctggatcgtggactatcaattcaccagcctccttgttccctgtggctgctgataacccaacattccatctctaccctcatacttcaaaattaaatcaagtattt

SEQ ID NO: 55791 - DNA, 850 bp, Homo sapiens
cctcaggctttgcaattgatgttcagagggtcactggagtgagagggaggaggggggcgtcttggaaatttccatttctcttttcaaacccaaaataggaatgactcttcctgatatgccattcttgctgcagcaagaatggagcatatcagccaaaatgatacctggaggcttatctgaggccaaacccgccactccagaaatccaggagattgttgataaggttaaaccacagcttgaagaaaaaacaaatgagacttacggaaaattggaagctgtgcagtataaaactcaagttgttgctggaacaaattactacattaaggtacgagcaggtgataataaatatatgcacttgaaagtattcaaaagtcttcccggacaaaatgaggacttggtacttactggataccaggttgacaaaaacaaggatgacgagctgacgggcttttagcagcatgtacccaaagtgttctgattccttcaactggctactgagtcatgatccttgctgataaatataaccatcaataaagaagcattcttttccaaagaaattatttcttcaattatttctcatttattgtattaagcagaaattaccttttctttctcaaaatcagtgttattgctttagagtataaactccatataaattgatggcaattggaaatcttataaaaactagtcaagcctaatgcaactggctaaaggatagtaccaccctcacccccaccataggcaggctggatcgtggactatcaattcaccagcctccttgttccctgtggctgctgataacccaacattccatctctaccctcatacttcaaaattaaatcaagtattt

SEQ ID NO: 55792 - DNA, 873 bp, Homo sapiens
cctggtatccagtaagtaccaagtcctcattttgtccgggaagacttttgaatactttcaagtgcatatatttattatcacctgctcgtaccttaatgtagtaatttgttccagcaacaacttgagttttatactgcacagcttccaattttccgtaagtctcatttgtttttttcttcaagctgtggtttaagcttatctgaggccaaacccgccactccagaaatccaggagattgttgataaggttaaaccacagcttgaagaaaaaacaaatgagacttacggaaaattggaagctgtgcagtataaaactcaagttgttgctggaacaaattactacattaaggtacgagcaggtgataataaatatatgcacttgaaagtattcaaaagtcttcccggacaaaatgaggacttggtacttactggataccaggttgacaaaaacaaggatgacgagctgacgggcttttagcagcatgtacccaaagtgttctgattccttcaactggctactgagtcatgatccttgctgataaatataaccatcaataaagaagcattcttttccaaagaaattatttcttcaattatttctcatttattgtattaagcagaaattaccttttctttctcaaaatcagtgttattgctttagagtataaactccatataaattgatggcaattggaaatcttataaaaactagtcaagcctaatgcaactggctaaaggatagtaccaccctcacccccaccataggcaggctggatcgtggactatcaattcaccagcctccttgttccctgtggctgctgataacccaacattccatctctaccctcatacttcaaaattaaatcaagtattt

SEQ ID NO: 55793 - DNA, 496 bp, Homo sapiens
gcaccaataggatcctcccgaatcaaccctgacttcctgatatgccattcttgctgcagcaagaatggagcatatcagccaaaatgatacctggaggcttatctgaggccaaacccgccactccagaaatccaggagattgttgataaggttaaaccacagcttgaagaaaaaacaaatgagacttacggaaaattggaagctgtgcagtataaaactcaagttgttgctggaacaaattactacattaaggtacgagcaggtgataataaatatatgcacttgaaagtattcaaaagtcttcccggacaaaatgaggacttggtacttactggataccaggttgacaaaaacaaggatgacgagctgacgggcttttagcagcatgtacccaaagtgttctgattccttcaactggctactgagtcatgatccttgctgataaatataaccatctatgccattcttgctgggggatcctgctatgagatcgatct

SEQ ID NO: 55794 - DNA, 669 bp, Homo sapiens
  misc_feature (36)..(36): n is a, c, g, or t
tcacacataatttccgctttttattaattacgggangctggggttaaaccacagcttgaagaaaaaacaaatgagacttacggaaaattggaagctgtgcagtataaaactcaagttgttgctggaacaaattactacattaaggtacgagcaggtgataataaatatatgcacttgaaagtattcaaaagtcttcccggacaaaatgaggacttggtacttactggataccaggttgacaaaaacaaggatgacgagctgacgggcttttagcagcatgtacccaaagtgttctgattccttcaactggctactgagtcatgatccttgctgataaatataaccatcaataaagaagcattcttttccaaagaaattatttcttcaattatttctcatttattgtattaagcagaaattaccttttctttctcaaaatcagtgttattgctttagagtataaactccatataaattgatggcaattggaaatcttataaaaactagtcaagcctaatgcaactggctaaaggatagtaccaccctcacccccaccataggcaggctggatcgtggactatcaattcaccagcctccttgttccctgtggctgctgataacccaacattccatctctaccctcatacttcaaaattaaatcaagtattt

SEQ ID NO: 55795 - DNA, 673 bp, Homo sapiens
tttcctccccatcttacactaatgccaattatttaacggcttttcagttaaaccacagcttgaagaaaaaacaaatgagacttacggaaaattggaagctgtgcagtataaaactcaagttgttgctggaacaaattactacattaaggtacgagcaggtgataataaatatatgcacttgaaagtattcaaaagtcttcccggacaaaatgaggacttggtacttactggataccaggttgacaaaaacaaggatgacgagctgacgggcttttagcagcatgtacccaaagtgttctgattccttcaactggctactgagtcatgatccttgctgataaatataaccatcaataaagaagcattcttttccaaagaaattatttcttcaattatttctcatttattgtattaagcagaaattaccttttctttctcaaaatcagtgttattgctttagagtataaactccatataaattgatggcaattggaaatcttataaaaactagtcaagcctaatgcaactggctaaaggatagtaccaccctcacccccaccataggcaggctggatcgtggactatcaattcaccagcctccttgttccctgtggctgctgataacccaacattccatctctaccctcatacttcaaaattaaatcaagtattt

SEQ ID NO: 55796 - DNA, 616 bp, Homo sapiens
gcaccaataggatcctcccgaatcaaccctgacttcctgatatgccattcttgctgcagcaagaatggagcatatcagccaaaatgatacctggaggcttatctgaggccaaacccgccactccagaaatccaggagattgttgataaggttaaaccacagcttgaagaaaaaacaaatgagacttacggaaaattggaagctgtgcagtataaaactcaagttgttgctggaacaaattactacattaaggtacgagcaggtgataataaatatatgcacttgaaagtattcaaaagtcttcccggacaaaatgaggacttggtacttactggataccaggttgacaaaaacaaggatgacgagctgacgggcttttagcagcatgtacccaaagtgttctgattccttcaactggctactgagtcatgatccttgctgataaatataaccatctatgccattcttgctgcagcaagaatggcatatcagaccttgtgaaggtgactctgacttctgaggaagaggcccgtttgaagaagagtgcggatacactttgggggatcccaaaggagctgcaattataaagtcttctgatgtcatataatttcactgta

SEQ ID NO: 55797 - DNA, 650 bp, Homo sapiens
gcaccatcagaatggcatatcagcgcaagtaggtctacaagacgctacttcccctatcatagaagagcttatcacctttcatgatcacgccctcataatcattttccttatctgcttccttcctgatatgccattcttgctgcagcaagaatggagcatatcagccaaaatgatacctggaggcttatctgaggccaaacccgccactccagaaatccaggagattgttgataaggttaaaccacagcttgaagaaaaaacaaatgagacttacggaaaattggaagctgtgcagtataaaactcaagttgttgctggaacaaattactacattaaggtacgagcaggtgataataaatatatgcacttgaaagtattcaaaagtcttcccggacaaaatgaggacttggtacttactggataccaggttgacaaaaacaaggatgacgagctgacgggcttttagcagcatgtacccaaagtgttctgtatgccattcttgctgcagcaagaatggcatatcagaccttgtgaaggtgactctgacttctgaggaagaggcccgtttgaagaagagtgcggatacactttgggggatcccaaaggagctgcaattataaagtcttctgatgtcatataatttcactgta

SEQ ID NO: 55798 - DNA, 800 bp, Homo sapiens
tccccatgcctctttgctgtttgtggaaaataaagcattctataggcggagctagtgaacgcctcttttaaaacacgagtctccacacttccctgttcactttggttccagcatcctgtccagcaaagaagcatatcagccaaaatgatacctggaggcttatctgaggccaaacccgccactccagaaatccaggagattgttgataaggttaaaccacagcttgaagaaaaaacaaatgagacttacggaaaattggaagctgtgcagtataaaactcaagttgttgctggaacaaattactacattaaggtacgagcaggtgataataaatatatgcacttgaaagtattcaaaagtcttcccggacaaaatgaggacttggtacttactggataccattccttcaactggctactgagtcatgatccttgctgataaatataaccatcaataaagaagcattcttttccaaagaaattatttcttcaattatttctcatttattgtattaagcagaaattaccttttctttctcaaaatcagtgttattgctttagagtataaactccatataaattgatggcaattggaaatcttataaaaactagtcaagcctaatgcaactggctaaaggatagtaccaccctcacccccaccataggcaggctggatcgtggactatcaattcaccagcctccttgttccctgtggctgctgataacccaacattccatctctaccctcatacttcaaaattaaatcaagtatttaccagaaaaaaatatataaaataaaaa

SEQ ID NO: 55799 - DNA, 1021 bp, Homo sapiens
tcggcacctaaaatgcgcgttgggggtactgctaacgtcaccctcacagggatgccacggggcctgttattcgcaagctggttttctagacctgttcgctggaagcctggtgagcaccatttctggacgctcaggccgtgtcgggcttcagtcatctccaccacacaggtacagcagcgcttcctgatatgccattcttgctgcagcaagaatggagcatatcagccaaaatgatacctggaggcttatctgaggccaaacccgccactccagaaatccaggagattgttgataaggttaaaccacagcttgaagaaaaaacaaatgagacttacggaaaattggaagctgtgcagtataaaactcaagttgttgctggaacaaattactacattaaggttagagttcagcacctactttagcgccaaaagatgtatttctcattttatgtaaaatattccctgatttccctaccacataattccttccttacggttgtcctaaattaagatgcccagcatgattccttccaagtggtggactctcaaatttggtagatgatgtgacaccattttttttcttgtgaattcagaaagttttattacattgattcttgatttctggaaattgtatagaaaaagatttcataacagttcagggcatgctggatttgtggctgtgctgctgcttaggtaaggagggaggatcacgtctcatctgcctgaaggtgtggggctggaccacatggtatcttgaagctgattctacctcaaagctgtatgattctctatgtctaaattaaataaattaaagtaacgactcaaatcattagctgggaaaataatttaaaccttttttgcccttcaattaatataatgtaaatactattttgtaactcaaattagatttaacttgtggcactctaggcatagtttaaaagagtggagtatttaaaatagtttaaaagttaattttatagctctgtcaaaaaattacacaatgcattgatcgagttctaatt

SEQ ID NO: 55800 - DNA, 424 bp, Homo sapiens
ctagtctgctctttttctcctaaaataaggtggtggatttatgaatacaaagagtctaagaatggtggactaggtctagcaatgctgttcctcagcagctttttggacagaagtctttgtagacctgtggctctctcacttgatgtagacccatttgaatgaatctccttttgctttctctttctttaatatttttcaggtacgagcaggtgataataaatatatgcacttgaaagtattcaaaagtcttcccggacaaaatgaggacttggtacttactggataccaggttgacaaaaacaaggatgacgagctgacgggcttttagcagcatgtacccaaagtgttctgattccttcaactggctactgagtcatgatccttgctgataaatataaccatcaataaagaagcattcttttcc

SEQ ID NO: 55801 - DNA, 479 bp, Homo sapiens
caagcgattctcctgcctcagcctcccaagcagctgggattacagacatgcaccaccacacctggctaattttgtatttttaatagagatgtggtttctctatgttggtcaggctggtctctaactcccaacctcaggtgatccgcctgccttggcctcccaaagtgctggaattagaggggtgagcctccgtgcctggccttatataaatatttttatatatctcattattgcatcaggataaattcctatacgtggaataattgggttagattatgtaagtattttgaagcctcatggtatatattggtaaatccctatctggaagtttatactgtttgacgcaggagttaaggaactaattttatagaagaaaatattcgccagacgtggtggcccacacctgtaattgtaacactttgggaggccgaggcgagaggatcactggagcctaggagtttgaaaccagcaatctctta

SEQ ID NO: 55802 - DNA, 310 bp, Homo sapiens
aacaggagcaaccagagccttgaggggtcgtggcctgttctgggcaccagcagtggatcaatgtggccagagccagggatactagcagaagccagagcagcagggccttccttgtccagcaaaggcatttgtctctttgtaggccacagcgacccacagagggctttttaggccagaaaaaagccattaaggccgggcgcggtggctcacgcctgtaatcccagcactttgggaggccgaggcgggtggatcacgaggtcaggagatcgagaccatcctggctaacaaggtgaaaccccgtctctactaa

SEQ ID NO: 55803 - DNA, 194 bp, Homo sapiens
tcacatggctagcaagcaggccaggcaggatgagagctcaggccttgtgacttcccgttcagtgctctccactgttcctctcagttgataagtggtcctgagaccacctgtgctccttgcagcctagtaaacccccttctctcttatttatttatttttgagacactctcactctgttgcccaggctggagtgc

SEQ ID NO: 55804 - DNA, 496 bp, Homo sapiens
gaaatctgggagtgtagagtactcattaaaactcaaaacatttgatttcagacttggccgaatttactaattttgtcatgtttttcctgaagatcttgtgtccattgtcaaacagttttgtcttctgattagacttcattttttaacctcataggctaatggctgaattttgatttactgttgtcagtgtaagcactatactatgttatctattataagaataaggccaggtggtgtggctcctgtaattccagcactttgggaggccaaggcgggaggatcacttgaggccaggagttcgagaccagtctggtcaacacagtgagatgccatctctacaaaagaaaaattaaaaaattagctgagcatagtggcatgcacctctcgtaccacctactaggaaggctgaggcaaggggattgcttgagcccaggagttcgaggctgcagtgagccatgatctcgtcactgcattccagcctgggtgacaaaaaaaa

SEQ ID NO: 55805 - DNA, 372 bp, Homo sapiens
ggcacgagggagctccaccttgatggttctggactcccttgtatctaagtgtgaccatgtggctggttcttgtcaatggctatgatgtgagccgttatggagaagcaagctcttctttttctttgtgacctggacgtcaacacccaaggcagtcttggaaatagcatgtattgaagatgtcagagcctctgtggacccacgtttgtgagtgactgcctgtggccaaggacctcatcatctgccctaccaccatcatcatggggcttcgcaaaaacaagaaacaagcttttattgggttaaaccactgatatgtcaacagatgtttcaacagttggtgctgtcataattaatacatgtatccatccttttaat

SEQ ID NO: 55806 - DNA, 322 bp, Homo sapiens
gtcttttctttttctttggaaagtttgtttactaatggagtgatttcttcctaaatatttggtagaacttggtaatgaagccttctggacctgaaatttactttgtgggaggatttttcagtattgatttttgtttttatgggttttgttttttttgtttgttttaatgcatagtgtcactgtcactcaggctggagtggcagtgatgtgatcataactcactgtaaccttaaactcctaagctcaagtgatctcctgcctcaccttcctgagcagctaagactgcaggcatgcaccaccatacctgcctacttttcttttt

SEQ ID NO: 55807 - DNA, 908 bp, Homo sapiens
gaacgtccagtttctttttcaccacctcccacctgcccaccgaaagtagccatttcccagcggcgtaagagcacctccttcctggaagcccaaactcaccacttccaacccctgctgaggactgttggccaaagtcttcttccacctggtggcagcccaactaactggacaccagaggccgtagttatgttgggtactacagccagtagagtaactggagagtcatgtgagatacaggtccatcctatgtttgaaccatctcaagtttacagtgactatagacctggactagtacttccagaagaagctcactattttattcctcaggaagcagtgtatgtagctggggtacattaccaggcccgggtggcagaacagtatgagggcattccatacaactcatcagtactgtcaagtcctatgaaacagatacctgaacagaagccagtacaagggggccctacttcaagttctgtctttgaatttccatctggacaggctttcctggtaggacaccttcagaatctaagattagattctggattgggtccgggatctcccctctctagtatttctgcacctatcagtacagatgctacacgtttgaaatttcaccctgtctttgttcctcattctgcgcctgctgtgttaactcataacaatgagagcagaagcaactgtgtatttgaatttcatgttcacacaccaagctcctcttcaggagaaggaggtggaattttacctcagcgtgtttaccgaaatcggcaggttgcagtggacttgaatcaagaagaactgcctcctcaatcagttggattacatggctacttgcagcctgtgactgaagaaaagcataattaccatgccccagaattgaccgtttctgtggtagagcctatcggacagaa

SEQ ID NO: 55808 - DNA, 600 bp, Homo sapiens
  misc_feature (18)..(18): n is a, c, g, or t
cagcatcaaacaaacttnacctacaccctccagtaccgtaaacatcacaaggtgatatgtggcagaacagtatgagggcattccatacaactcatcagtactgtcaagtcctatgaaacagatacctgaacagaagccagtacaagggggccctacttcaagttctgtctttgaatttccatctggacaggctttcctggtaggacaccttcagaatctaagattagattctggattgggtccgggatctcccctctctagtatttctgcacctatcagtacagatgctacacgtttgaaatttcaccctgtctttgttcctcattctgcgcctgctgtgttaactcataacaatgagagcagaagcaactgtgtatttgaatttcatgttcacacaccaagctcctcttcaggagaaggaggtggaattttacctcagcgtgtttaccgaaatcggcaggttgcagtggacttgaatcaagaagaactgcctcctcaatcagttggattacatggctacttgcagcctgtgactgaagaaaagcataattaccatgccccagaattgaccgtttctgtggtagagcctatcggacagaa

SEQ ID NO: 55809 - DNA, 441 bp, Homo sapiens
aaagcaattgctgttaagaaaaatggcctgaagaacaggtcatacgactgctacagaactgcaaggtgtttcagggacaattggattgtttggccatatcaaccattcaggctttgaccgcagtaatgaacaaatctccagctgctaaggaagtatttaaagaaagaattggttatacacatatgcttgaagtattaaaatccctgggtcagccaccactggaattacttaaagaacttatgaatatggctgtagagggtgaccacacttcagttgggattttgggcattagtaatgtccaacctctcttgcttcttatccagtggcttccagaactacaatcccatgacctgcaatcttcatctctgattggctgaaaagaatttgttgtattaatagacagagtcgaactacttgtgtcaatgcaaacatggggattag

SEQ ID NO: 55810 - DNA, 302 bp, Homo sapiens
tttctttccaaggtgatttccatattccctaatagtgccaccaccttctcggttttcttcccctaaggtatcttcgatttttctcatctccatatctgctagccatgaagacctacttatttctttgatcttcatctctataattgttcttcatcttctgtcgaagtgaagactctcatctctctcgggctgtaattgtggccccttctacctctagtcttaactaccagtctatctccactgctgccagagtgaaatttgtaagatggaaatccgaacttgttacggagaactcttcattg

SEQ ID NO: 55811 - DNA, 480 bp, Homo sapiens
atctgtaacataaggataatcatagtgcccacaattgttgggaggatttgttgagttaatccttgttatgcacctagtctagtgccaagttatcattattactattgtcattatttttaataatccacgagtttataacttcagagtgttggaatcataaccagttcacacaatacttttgtacaagttataaaaggcatttttcctcaggacaatttattatttgtctttcaaagtaattataataatataatgattttgttagaataagacaattttctatcaaattccataaaattattgaaataaatatacaaatccatagtatctacaatgttaacacctccctttaaggttggaatgtgcacagtcttgtggtatgtggcagttttgtgtgacaatatatgaccttgcagagtgcactaaaatcattcttctttccaacaagaataaaataaaggaaattattgatctagaaaa

SEQ ID NO: 55812 - DNA, 292 bp, Homo sapiens
tgctaagcactttgcattcatgatagacgttagcttcctgagatactgtaaggttggcatcgttattgccatgtcagatggtggagtagggcttagagacagataaggttgcccaagaccaaacagataatacatgtgctagccagattttggtcaaaattgattttgaattttatcaagttagtgtacaaacacagttgaaataatcaaaaagtcccaaaagatttatggtttaaaaagaaaacaggccaggtgcagtggctcacacctgtaatctcagcactttgggagg

SEQ ID NO: 55813 - DNA, 258 bp, Homo sapiens
ttaactgaaaagacacttaaggaaaacctaaagggacagaactggggcataataatgccaggctgcctagatgctgaggctggagatgaggctgctcccagagtagctctgggccaccagcattactgtgtcacgttctgcatatttgcttttctctcagcccaccacctcttgctgcccagtttctgcttcccagacacatgcgtcatcgtgacatctctaaccctgatgatatcatttactcttcacctgctgtgt

SEQ ID NO: 55814 - DNA, 994 bp, Homo sapiens
caaaaaaattgttttaattatttttggcttcatgtttttaaatttaatcaccattaggttaatgtggagttatgctaaaaattatccacctgaaaatgtccactctttctgatcatcttaatgaaagctctctcattccgcagagaaagatagaaactaagtttgctgcctattacaaggaaggaagaaatagtttatttttatggataaatgtaataaatcttatgatggattatataaagggaaccaggaggagttaaaatatacaaggcaaattgtagcatagtgactttgaatggtagctacgtgggttaaattaacaacaaattattaatattgagaccctaacctgcctggtcttaagttacaaccacactcttctacttgaagaaattatatattgctaattaaaacttcatttctcaatatatggtggtttccttagaacttttactaaatctcattacataaaaagccattcagaggctttgtgtttagttattagctactttaatagacactaggttggagggcatatgtacaaatgatagtctgattcattggcagaatttatgtgaaattggccctgccacagttaacttggttttatcaaagcaataaatttaatttttatcaaatctgtgcttcacaccatttatgagtcccgtactgttctgaaacaatgaatcctttatgatgatgactaagatgcatgtcatgaagctaaatgctcttacattagcctactgagtcacacatccctgaggttgcttagtcatcttgatcattgcctggctggctctcacatttacaagggaatatttccatcagtcttttctacctcattgttcattatttcatccctacaagtaagattaaattttcttaagtagattcaaaacccaaggataaggttgcatgcacataacttcctatagtaaatattatatgggtagattgtaagttttagttgtatgaggttgttcccctcacc

SEQ ID NO: 55815 - DNA, 336 bp, Homo sapiens
tggcttcaggtggggggatgaagttaggattgctttaagtcagtgtcccagcgtccctgtgtggtggaggtgtgaggtgggagagggtgccaccaggctaattatgttgtgcttgtctctcacttttcttatctcacttttctccgtttagccccgtttagtcattgtgtactttttgccgacctgggccaattgaacgcatatttactaaatatgggtgggttttttcagtttataaaaagcaggttcaaagattttcatttaattatctcattgattgagactgcttttgcagcttgttaactagaccatctaagtgataaccagtaaagatag

SEQ ID NO: 55816 - DNA, 2730 bp, Homo sapiens
acggtaggttctggaacgcagccgctgaggggtctggcgccatgttggggctgaggggaaggaggagaagctcctgaagcggcgggcgcgcagcgggagtgggagtggggtcggaccaggcagctagaagccctgcccttccgcctcagcggatcatgacccgggcggcggccgcgaaggtcgcggtggtgggggacgtgccctggcggggcgggcgctgaaagatgatgccgtttccggtgacaacccagggaccaccgcagccggcgccgccgccgaatcgctacggcgtctcctcgcctatcagtctagcggtccccaaggagacggactgcctcctcacccagaggctaatagaaaccctcaggcccttcggggtcttcgaagaggaagaggaactgcagcgcaggattttagttttggaaaaattaaataatctggtaaaggaatggatacgcgaaatcagtgaaagcaagagtcttccccagtctgtaattgaaaacgttggaggaaagatttttacgtttggctcttacagattaggagtacatacgaaaggcgcagatattgacgccttgtgcgttgcaccaagtcatgtggatcgaagcgactttttcacctcattctatgctaaactgaaactacaggaggaagtgaaagatttaagggctgtcgaggaggcatttgtgccagttatcaaactgtgttttgatgggatagagattgatattttatttgcaagattagcactacagactattccagaagatttggacttaagagatgacagtctacttaaaaatttagacattagatgcataagaagccttaatggttgccgggtaaccgatgaaattttacatctagtgccaaacattgacaacttcaggctgactctgagagccatcaaactgtgggccaagtgccacaatatctattccaatatattaggtttcctcggaggtgtttcctgggccatgctagtagcaagaacttgtcagctttatccaaatgcagtagcgtcaactcttgtacggaaattcttcttggtattttcagaatgggaatggccaaacccagtgttactgaaggagcctgaagaacggaatcttaatttgcctgtatgggacccaagagtaaatcccagtgataggtaccatcttatgcctatcatcacaccagcatacccacagcagaactccacatacaacgtgtctatttcaaccaggatggtcatgattgaggagtttaaacaggggcttgctatcacacacgagattttgctaagtaaggcagagtggtccaaactctttgaagctccaagcttctttcaaaagtacaagcattatattgtacttctggcaagtgcatcaacagaaaaacaacatttagaatgggtgggcttggtggaatcaaagatccgaatcctggttgggagcttggagaagaatgaatttattacactggcacatgtgaatccacagtcatttccagcacccaaagaaaatcctgatatggaagaatttcgtacaatgtgggtgattgggttagggctaaaaaagccagataattctgaaattctcagcattgatctcacctatgatatccagtctttcacagatactgtttataggcaagcagtgaatagtaagatgtttgagatgggtatgaaaattactgcaatgcatttaagaagaaaggaacttcaccagctgctgcctcatcatgtgcttcaggacaagaaagcacactcaacagaaggtagaagattgacagatttgaacgacagcagctttgacttgtctgcaggctgtgaaaacagcatgtctgtgccttcatctactagcactatgaagacaggcccattgattagcagttctcagggtagaaacagtcctgccttggctgtaatgacagcatctgtggctaacatacaggctactgaattttccttgcaacaggtgaataccaatgaaagttcaggggttgcattaaacgaaagtattcctcacgctgtctctcagcctgccatttctccatcaccaaaggccatggtcgccagagttgtttcttcaacatgtctcataagccatccagaccttcaggaaactcagcaacaaacatatctaatcctatagttggagtctagaggatattcttgcctcataaagaagaaaggaccaagaaaaccaaaacggaagaggagaaactcaatacaaagacaagtacaactccattagaaaaattcagacagcatcttctctattggcctctcagggaacatcagtatagatctttccggtatccctgttctccctgcaaatccaattcctgttatcaagaattcagtaaaacaggttgaatggttaaaaacaacctcaagggtccatgaacaatatctgccaactgaacctgttgtcttcaaatactaaggaaggagaatgaggggtacgggactagatatgacttgaaatagattgaggctcatttggtaacttcctttactgagccagtcttgatcagaagtccacattagtatgtgacagctagaggtactgttattaatgtatcagcaacagttacattaactatttcaaaggactactgcccttaaaatgaaaaaacctttcagctatgtttgtacccgtgactgacatctggactggatttatgcttgatgcattgttgggaaaatatgcaatacaaactggtatcagaattccttatact

SEQ ID NO: 55817 - DNA, 320 bp, Homo sapiens
tgtgtgccttgggcggcctgtggtttctgagaatttgccatgaaaattgtactcagctgctgtgcgaagagcagcagagattcatgtagtaatctcccgccctgccacctcccaggatcccagagccccccaggaaccgcccctaggatgggagaaggaaaggcagggggagaggaagactcccacttgatattgagccacctggctttgtgatcagatcctttgaaagaccacgccgggattccccaggtccttcagagcagaatgtctttagaaatgaaccccaaaggtgtccgttccggaaaagccaacgttgctca

SEQ ID NO: 55818 - DNA, 547 bp, Homo sapiens
gatcacaccacgaccctccagcctggacaacagttgcaatcctcctgcctcaatcccccaagtagctgggactacaggcacccaccactacagccggctaagtttttgtatttgtggtagagacggggtttcgccacattgcccagactagtctcgaactcctgagctcatgcgatccacctgccttgggatcccaaagtgctagaattacaggagtgagccacggtgcctggcctattatcaaatttttatggatgagtaccttatcttctcaactagactgcaaatattctatagacttcccatctactggtagtggctctgagaaccctgcacactgctatctatgtatgctcatattagaaactcaatacgtgctgcattaaatttgaatatttaaatactagataagacaggaagagaaaaaccacacctacctattgccaaacatttaataactcaagaggagagagatttttcccaaattattcaatgacaatcgaatgaagtagttaaatgatgcaaatattcactaccttggtgacag

SEQ ID NO: 55819 - DNA, 305 bp, Homo sapiens
ggtgggagtgggggcatgtacgctccctcagtgtctctcgcccattctgcagttttgataaggtggtgggagtgggggcatgtacgctccctcagtgtctcttcctgcctgcatctttgggataagtctgtgacctctgggaacagaagagtcctgcagtgaatggcttaagatggtcctggccacatggagaaatggtctcttccttgatgacctcttgggttgggtttatctctccctgttcttttgtaccattagaatagtaacatcttaaggactgagaatcagatatcagcttagaggga

SEQ ID NO: 55820 - DNA, 528 bp, Homo sapiens
cagtctggttggattacacacaaagccctgcagatctgctgcttttcctgattctcctgtcctgagtgagtgcaaggggctcccctgtcgccgatgtgttctttgaagcagatgctgtgcctgatacctgctggagagtcccaccgccttgagcttctgggtcgagaaaggccaagttgcacactactgagagactgccatgcaccccctggaggcctcagaacattcgacatgctccagtcatggccacggcagtgactgctgattgcctaaccccacatgtgttctcccccttccctgataatcaagcccctgattttcagctgggcacaaaataattcttcctagaacaactccacgtgtgttatcgcccttgcagctgggggtggccaccactggggagaggcagggtgaagaggtcgaaggagcctgagttagcagggatgagcagtggccaggtaaccccagacccattatcctctggatttcttttatgtgaaacaataaaatgtcttgtattcgaaactt

SEQ ID NO: 55821 - DNA, 260 bp, Homo sapiens
ctccagaagggggactgatggcactggttctcctagaaagggcaccaggggactggggacggggtctggacccaggactcgatatctttgtggactttctgatttttgaaccatgcaaatgaattacctgttcagacacacatggagcaatgagaattgcaccaagagctacacatcctttaaagcaattggaggaggaacaggactttcttccaaaggctggggccaggcaatggtgttgggtccctcaacaagcgtgt

SEQ ID NO: 55822 - DNA, 327 bp, Homo sapiens
atatacaaaatatcataaaaccaaaagaagtagaccccaaagagtatatactgtgttgtttcatttatatgagattctagaacaggaaaactaatgcacagcaacagaaaccatatccatcgttgcctgtgtgggccaaggactaagagaaagtgaaaatgagaagactttcaagtgtgatggaagtattttacatcttgattttaagtggtagaaatagagagcacacattcattaaaactcattgagttgtacacttaggatatgtgcacttcactgtatgtaaattttacctcagttaagagaggatacaggagacaagtgact

SEQ ID NO: 55823 - DNA, 291 bp, Homo sapiens
caaggcctagtagcttaatgtgcaaatcacaaggctggggctctggaggaaatcctagcctttgaggagtggcagctgtgtaaaaactcaacagaggaaggacaaactgtgttctctccttctcaccattgccctctgtcttcctcttcttcactctcagcctatgtgaaaaaatcagatccaggctgggcacagtggctcatgcctgtaatcccagcactttgggagcccaaggcgggcggatcacgaggtcaggagttcgagaccagcctggccaatatggtgaaatgc

SEQ ID NO: 55824 - DNA, 253 bp, Homo sapiens
tcaacatttggaagatctgtgtaagtcagtgaaaactgttttccaaatggccagtgcatgacagaaaaattatgcctggttaaaagatccattaaaaatgcaaagtaggctgggcgtggtgcctcacgcctgtaatcccagcattttgggaggctgaggcgggaggatcacctaagtgtaggagtttgagggtccagtgagctaagatcatgccactgcactcatgcctgggcaacagagcaagactctctta

SEQ ID NO: 55825 - DNA, 310 bp, Homo sapiens
attaatgttaatgccctcaagtccccaaggatgggtacatttgtgtgatgtgaaataatccaagaactttataaaaccaaggagggatacttgcttatttgtaagcctagagacccaagtatctagctactttggatccctgaatgactgcatgccctcagaggttacatttattttagtaaacctatggatatggataaatacaacatttcctaatgtagcactttgataaataactaccaatgtctggattttttacttcctctgagctaaggaagccaatatggtcttaacaaaagcttcaaagata

SEQ ID NO: 55826 - DNA, 5142 bp, Homo sapiens
  misc_feature (4740)..(4740): n is a, c, g, or t
  misc_feature (5096)..(5096): n is a, c, g, or t
caactccgagcacacggccgtcatcagcctctgctcaggaatgctgggcacattccggtctcatgatggggattattttattgaaccactacagtctatggatgaacaagaagatgaagaggaacaaaacaaaccccacatcatttataggcgcagcgccccccagagagagccctcaacaggaaggcatgcatgtgacacctcagaacacaaaaataggcacagtaaagacaagaagaaaaccagagcaagaaaatggggagaaaggattaacctggctggtgacgtagcagcattaaacagcggcttagcaacagaggcattttctgcttatggtaataagacggacaacacaagagaaaagaggacccacagaaggacaaaacgttttttatcctatccacggtttgtagaagtcttggtggtggcagacaacagaatggtttcataccatggagaaaaccttcaacactatattttaactttaatgtcaattgtagcctctatctataaagacccaagtattggaaatttaattaatattgttattgtgaacttaattgtgattcataatgaacaggatgggccttccatatcttttaatgctcagacaacattaaaaaacttttgccagtggcagcattcgaagaacagtccaggtggaatccatcatgatactgctgttctcttaacaagacaggatatctgcagagctcacgacaaatgtgataccttaggcctggctgaactgggaaccatttgtgatccctatagaagctgttctattagtgaagatagtggattgagtacagcttttacgatcgcccatgagctgggccatgtgtttaacatgcctcatgatgacaacaacaaatgtaaagaagaaggagttaagagtccccagcatgtcatggctccaacactgaacttctacaccaacccctggatgtggtcaaagtgtagtcgaaaatatatcactgagtttttagacactggttatggcgagtgtttgcttaacgaacctgaatccagaccctaccctttgcctgtccaactgccaggcatcctttacaacgtgaataaacaatgtgaattgatttttggaccaggttctcaggtgtgcccatatatgatgcagtgcagacggctctggtgcaataacgtcaatggagtacacaaaggctgccggactcagcacacaccctgggccgatgggacggagtgcgagcctggaaagcactgcaagtatggattttgtgttcccaaagaaatggatgtccccgtgacagatggatcctggggaagttggagtccctttggaacctgctccagaacatgtggagggggcatcaaaacagccattcgagagtgcaacagaccagaaccaaaaaatggtggaaaatactgtgtaggacgtagaatgaaatttaagtcctgcaacacggagccatgtctcaagcagaagcgagacttccgagatgaacagtgtgctcactttgacgggaagcattttaacatcaacggtctgcttcccaatgtgcgctgggtccctaaatacagtggaattctgatgaaggaccggtgcaagttgttctgcagagtggcagggaacacagcctactatcagcttcgagacagagtgatagatggaactccttgtggccaggacacaaatgatatctgtgtccagggcctttgccggcaagctggatgcgatcatgttttaaactcaaaagcccggagagataaatgtggggtttgtggtggcgataattcttcatgcaaaacagtggcaggaacatttaatacagtacattatggttacaatactgtggtccgaattccagctggtgctaccaatattgatgtgcggcagcacagtttctcaggggaaacagacgatgacaactacttagctttatcaagcagtaaaggtgaattcttgctaaatggaaactttgttgtcacaatggccaaaagggaaattcgcattgggaatgctgtggtagagtacagtgggtccgagactgccgtagaaagaattaactcaacagatcgcattgagcaagaacttttgcttcaggttttgtcggtgggaaagttgtacaaccccgatgtacgctattctttcaatattccaattgaagataaacctcagcagttttactggaacagtcatgggccatggcaagcatgcagtaaaccctgccaaggggaacggaaacgaaaacttgtttgcaccagggaatctgatcagcttactgtttctgatcaaagatgcgatcggctgccccagcctggacacattactgaaccctgtggtacagactgtgacctgaggtggcatgttgccagcaggagtgaatgtagtgcccagtgtggcttgggttaccgcacattggacatctactgtgccaaatatagcaggctggatgggaagactgagaaggttgatgatggtttttgcagcagccatcccaaaccaagcaaccgtgaaaaatgctcaggggaatgtaacacgggtggctggcgctattctgcctggactgaatgttcaaaaagctgtgacggtgggacccagaggagaagggctatttgtgtcaatacccgaaatgatgtactggatgacagcaaatgcacacatcaagagaaagttaccattcagaggtgcagtgagttcccttgtccacagtggaaatctggagactggtcagagtgcttggtcacctgtggaaaagggcataagcaccgccaggtctggtgtcagtttggtgaagatcgattaaatgatagaatgtgtgaccctgagaccaagccaacatctatgcagacttgtcagcagccggaatgtgcatcctggcaggcgggtccctggggacagtgcagtgtcacttgtggacagggataccagctaagagcagtgaaatgcatcattgggacttatatgtcagtggtagatgacaatgactgtaatgcagcaactagaccaactgatacccaggactgtgaattaccatcatgtcatcctcccccagctgccccggaaacgaggagaagcacatacagtgcaccaagaacccagtggcgatttgggtcttggaccccatgctcagccacttgtgggaaaggtacccggatgagatacgtcagctgccgagatgagaatggctctgtggctgacgagagtgcctgtgctaccctgcctagaccagtggcaaaggaagaatgttctgtgacaccctgtgggcaatggaaggccttggactggagctcttgctctgtgacctgtgggcaaggtagggcaacccggcaagtgatgtgtgtcaactacagtgaccacgtgatcgatcggagtgagtgtgaccaggattatatcccagaaactgaccaggactgttccatgtcaccatgccctcaaaggaccccagacagtggcttagctcagcaccccttccaaaatgaggactatcgtccccggagcgccagccccagccgcacccatgtgctcggtggaaaccagtggagaactggcccctggggagcatgttccagtacctgtgctggcggatcccagcggcgtgttgttgtatgtcaggatgaaaatggatacaccgcaaacgactgtgtggagagaataaaacctgatgagcaaagagcctgtgaatccggcccttgtcctcagtgggcttatggcaactggggagagtgcactaagctgtgtggtggaggcataagaacaagactggtggtctgtcagcggtccaacggtgaacggtttccagatttgagctgtgaaattcttgataaacctcccgatcgtgagcagtgtaacacacatgcttgtccacacgacgctgcatggagtactggcccttggagctcgtgttctgtctcttgtggtcgagggcataaacaacgaaatgtttactgcatggcaaaagatggaagccatttagaaagtgattactgtaagcacctggctaagccacatgggcacagaaagtgccgaggaggaagatgccccaaatggaaagctggtgctctgtcttcttagtgctctgtgtcctgtggccgaggcgtacagcagaggcatgtgggctgtcagatcggaacacacaaaatagccagagagaccgagtgcaacccatacaccagaccggagtcggaacgcgactgccaaggcccacggtgtcccctctacacttggagggcagaggaatggcaagaatgcaccaagacctgcggcgaaggctccaggtaccgcaaggtggtgtgtgtggatgacaacaaaaacgaggtgcatggggcacgctgtgacgtgagcaagcggccggtggaccgtgaaagctgtagtttgcaaccctgcgagtatgtctggatcacaggagaatggtcagaggtaccgtcctgggaactgtaaccatcgtcagctcagccatggcctgagagtggcagagggatgagtggagggatgagtgcaggaatgtgggagacttgaggctacccgcccgatttgccactgtgaactgtgtgttttctgacaagtcctcagctttcccaagctagaattccttgtatgcaaagcgggagagatgtaagagatggtctctaagtcccttcaggtctacattctgtgattcaccttgatgtcctattggcataaagaagaaattattacaggggctgcaaactcataggatgctgtgaggtgcctgaagacagttaagtataagaaaatantgtagtgccagggatacaacaaggagagatggcaactgtgacaaactagcacatgctgtgtgaagggagcagaatctctttcactccagctgtggccatgcagaaatgtggtctagcgttaccagacctgatttttcaagagaggctaaaaatctggactagtatgtgagatttcctaacttgaaaatgggggctgaaatttttggttttaaaacattgtaaggggcaaacaaacccctttcatgaaccagatgtgttgtgcctgtttaacaaacagcttcagaggaagaaaataattttctataatatccgaagtatctcaagtaccattttttcatatatcttcctgtgcacantgcttatctagaccctttttaatggtaataaaccagtagtaatcat

SEQ ID NO: 55827 - DNA, 1062 bp, Homo sapiens
gtcaaaagactttttggttgttgtttattgatgatgataatatttgaacatgtccatcatttatggggtaactctatcatgttacagtacattcttttccagtgtaatcaatgggaaatattattcatgtagctctaatgagcattaaatggccattctctatagatagggtcatcacttgtgttcaggaatcctcccattacacccaggacataatgactttaaaagtctggtttcttgtgggtcacaaactcattcaatccaattaatacaattgagcccaaacaatagtagctatgttgatccaaaatattttcttctgttcagctagctttgatgtgaacatatggttctcctctctggcatagatttatgtgctctgtcttcttagtgctctgtgtcctgtggccgaggcgtacagcagaggcatgtgggctgtcagatcggaacacacaaaatagccagagagaccgagtgcaacccatacaccagaccggagtcggaacgcgactgccaaggcccacggtgtcccctctacacttggagggcagaggaatggcaagaagtaagtagagccacaaaggggtacctgccaggcatttcacgtgtgcgccccttgctatcctcacatctgttccctataaagccagagaagtcaccgagcacggttacaatgctggctctttcccaaaaggttcactgtcagactcgcgcattcgctccaacaagggtgggagaacttcttgtttttaagcaattcctacgtctgtctgtattcctgagtgttccaagtctggccgcctcaaaaaaaaaaaaaaaaactttaacaggctgtgggccgaatgcattcagatatctttcacagaaggagggggagatagaaggaatattttaaatacgtgtctccagatttggtcattctgtatctgtttaaatagccgcagggcagactttaggtagaacctactctgtatttttcctctttctatgactttggctgtcaggtagaagataggcattcatgtgaaaccttgattaattagtgaaagatttctaacattt

SEQ ID NO: 55828 - DNA, 627 bp, Homo sapiens
gctgagaagatgccagtggaagcaccagatcccagaggcaccctgtagggttgcctgtctcctgtgcgctcagggcctgccacttgaaatgaataaataagctaatgaagtgggagctttctgcagcatagtcacacggtcagcgcttggtgtggaggtcaggggcctattgtgggctgcccccaggaactgctcgaacctctcctctcaatcctcctctcaatccctgtctttgcagtgctcagtgacctgtggagaattatgaatacagctaccaaaccaccatcaactgcccaggcacgcagccccccagtgttcacccctgttacctgagggactgccctgtctcggccacctggagagttggcaactgggggagcgtaagtagaagactgagcactcaaatctgaaagcccttggatctcaaccccgtcttaaacatgtcctgcctaacccgctctccttagtaactctacttccaggagaaaccctggagttagcaacttgaaatgggctaacagggatcaaagggacttctttctgtttaccaaagtggcttcgtgcttagaacatgggctctgaagccagacagtctggatctgccctggttctgccacttcccaggtg

SEQ ID NO: 55829 - DNA, 938 bp, Homo sapiens
aagtgacaaggaaactgcatttaatgaattttaaggactctaatagctacctgtcgctggtggctaccatatcggacagggcaacctcaggcaacaggacatctctaacaattaataacaaactagcaaagaaatcaataaatttataaaaaaaaattggggagaaaaaccgtattccacatgtaaggggttcccccataggatgcccatgcatctggtgattagcattctcttgcctttcttgtgtttcgtgctctgtcttcttagtgctctgtgtcctgtggccgaggcgtacagcagaggcatgtgggctgtcagatcggaacacacaaaatagccagagagaccgagtgcaacccatacaccagaccggagtcggaacgcgactgccaaggcccacggtgtcccctctacacttggagggcagaggaatggcaagaagtaagtagagccacaaaggggtacctgccaggcatttcacgtgtgcgccccttgctatcctcacatctgttccctataaagccagagaagtcaccgagcacggttacaatgctggctctttcccaaaaggttcactgtcagactcgcgcattcgctccaacaagggtgggagaacttcttgtttttaagcaattcctacgtctgtctgtattcctgagtgttccaagtctggccgcctcaaaaaaaaaaaaaaaaactttaacaggctgtgggccgaatgcattcagatatctttcacagaaggagggggagatagaaggaatattttaaatacgtgtctccagatttggtcattctgtatctgtttaaatagccgcagggcagactttaggtagaacctactctgtatttttcctctttctatgactttggctgtcaggtagaagataggcattcatgtgaaaccttgattaattagtgaaagatttctaacattt

SEQ ID NO: 55830 - DNA, 6825 bp, Homo sapiens
caactccgagcacacggccgtcatcagcctctgctcaggaatgctgggcacattccggtctcatgatggggattattttattgaaccactacagtctatggatgaacaagaagatgaagaggaacaaaacaaaccccacatcatttataggcgcagcgccccccagagagagccctcaacaggaaggcatgcatgtgacacctcagaacacaaaaataggcacagtaaagacaagaagaaaaccagagcaagaaaatggggagaaaggattaacctggctggtgacgtagcagcattaaacagcggcttagcaacagaggcattttctgcttatggtaataagacggacaacacaagagaaaagaggacccacagaaggacaaaacgttttttatcctatccacggtttgtagaagtcttggtggtggcagacaacagaatggtttcataccatggagaaaaccttcaacactatattttaactttaatgtcaattgtagcctctatctataaagacccaagtattggaaatttaattaatattgttattgtgaacttaattgtgattcataatgaacaggatgggccttccatatcttttaatgctcagacaacattaaaaaacttttgccagtggcagcattcgaagaacagtccaggtggaatccatcatgatactgctgttctcttaacaagacaggatatctgcagagctcacgacaaatgtgataccttaggcctggctgaactgggaaccatttgtgatccctatagaagctgttctattagtgaagatagtggattgagtacagcttttacgatcgcccatgagctgggccatgtgtttaacatgcctcatgatgacaacaacaaatgtaaagaagaaggagttaagagtccccagcatgtcatggctccaacactgaacttctacaccaacccctggatgtggtcaaagtgtagtcgaaaatatatcactgagtttttagacactggttatggcgagtgtttgcttaacgaacctgaatccagaccctaccctttgcctgtccaactgccaggcatcctttacaacgtgaataaacaatgtgaattgatttttggaccaggttctcaggtgtgcccatatatgatgcagtgcagacggctctggtgcaataacgtcaatggagtacacaaaggctgccggactcagcacacaccctgggccgatgggacggagtgcgagcctggaaagcactgcaagtatggattttgtgttcccaaagaaatggatgtccccgtgacagatggatcctggggaagttggagtccctttggaacctgctccagaacatgtggagggggcatcaaaacagccattcgagagtgcaacagaccagaaccaaaaaatggtggaaaatactgtgtaggacgtagaatgaaatttaagtcctgcaacacggagccatgtctcaagcagaagcgagacttccgagatgaacagtgtgctcactttgacgggaagcattttaacatcaacggtctgcttcccaatgtgcgctgggtccctaaatacagtggaattctgatgaaggaccggtgcaagttgttctgcagagtggcagggaacacagcctactatcagcttcgagacagagtgatagatggaactccttgtggccaggacacaaatgatatctgtgtccagggcctttgccggcaagctggatgcgatcatgttttaaactcaaaagcccggagagataaatgtggggtttgtggtggcgataattcttcatgcaaaacagtggcaggaacatttaatacagtacattatggttacaatactgtggtccgaattccagctggtgctaccaatattgatgtgcggcagcacagtttctcaggggaaacagacgatgacaactacttagctttatcaagcagtaaaggtgaattcttgctaaatggaaactttgttgtcacaatggccaaaagggaaattcgcattgggaatgctgtggtagagtacagtgggtccgagactgccgtagaaagaattaactcaacagatcgcattgagcaagaacttttgcttcaggttttgtcggtgggaaagttgtacaaccccgatgtacgctattctttcaatattccaattgaagataaacctcagcagttttactggaacagtcatgggccatggcaagcatgcagtaaaccctgccaaggggaacggaaacgaaaacttgtttgcaccagggaatctgatcagcttactgtttctgatcaaagatgcgatcggctgccccagcctggacacattactgaaccctgtggtacagactgtgacctgaggtggcatgttgccagcaggagtgaatgtagtgcccagtgtggcttgggttaccgcacattggacatctactgtgccaaatatagcaggctggatgggaagactgagaaggttgatgatggtttttgcagcagccatcccaaaccaagcaaccgtgaaaaatgctcaggggaatgtaacacgggtggctggcgctattctgcctggactgaatgttcaaaaagctgtgacggtgggacccagaggagaagggctatttgtgtcaatacccgaaatgatgtactggatgacagcaaatgcacacatcaagagaaagttaccattcagaggtgcagtgagttcccttgtccacagtggaaatctggagactggtcagagtgcttggtcacctgtggaaaagggcataagcaccgccaggtctggtgtcagtttggtgaagatcgattaaatgatagaatgtgtgaccctgagaccaagccaacatctatgcagacttgtcagcagccggaatgtgcatcctggcaggcgggtccctggggacagtgcagtgtcacttgtggacagggataccagctaagagcagtgaaatgcatcattgggacttatatgtcagtggtagatgacaatgactgtaatgcagcaactagaccaactgatacccaggactgtgaattaccatcatgtcatcctcccccagctgccccggaaacgaggagaagcacatacagtgcaccaagaacccagtggcgatttgggtcttggaccccatgctcagccacttgtgggaaaggtacccggatgagatacgtcagctgccgagatgagaatggctctgtggctgacgagagtgcctgtgctaccctgcctagaccagtggcaaaggaagaatgttctgtgacaccctgtgggcaatggaaggccttggactggagctcttgctctgtgacctgtgggcaaggtagggcaacccggcaagtgatgtgtgtcaactacagtgaccacgtgatcgatcggagtgagtgtgaccaggattatatcccagaaactgaccaggactgttccatgtcaccatgccctcaaaggaccccagacagtggcttagctcagcaccccttccaaaatgaggactatcgtccccggagcgccagccccagccgcacccatgtgctcggtggaaaccagtggagaactggcccctggggagcatgttccagtacctgtgctggcggatcccagcggcgtgttgttgtatgtcaggatgaaaatggatacaccgcaaacgactgtgtggagagaataaaacctgatgagcaaagagcctgtgaatccggcccttgtcctcagtgggcttatggcaactggggagagtgcactaagctgtgtggtggaggcataagaacaagactggtggtctgtcagcggtccaacggtgaacggtttccagatttgagctgtgaaattcttgataaacctcccgatcgtgagcagtgtaacacacatgcttgtccacacgacgctgcatggagtactggcccttggagctcgtgttctgtctcttgtggtcgagggcataaacaacgaaatgtttactgcatggcaaaagatggaagccatttagaaagtgattactgtaagcacctggctaagccacatgggcacagaaagtgccgaggaggaagatgccccaaatggaaagctggtgctctgtcttcttagtgctctgtgtcctgtggccgaggcgtacagcagaggcatgtgggctgtcagatcggaacacacaaaatagccagagagaccgagtgcaacccatacaccagaccggagtcggaacgcgactgccaaggcccacggtgtcccctctacacttggagggcagaggaatggcaagaatgcaccaagacctgcggcgaaggctccaggtaccgcaaggtggtgtgtgtggatgacaacaaaaacgaggtgcatggggcacgctgtgacgtgagcaagcggccggtggaccgtgaaagctgtagtttgcaaccctgcgagtatgtctggatcacaggagaatggtcagagtgctcagtgacctgtggaaaaggctacaaacaaaggcttgtctcgtgcagcgagatttacaccgggaaggagaattatgaatacagctaccaaaccaccatcaactgcccaggcacgcagccccccagtgttcacccctgttacctgagggactgccctgtctcggccacctggagagttggcaactgggggagctgctcagtgtcttgtggtgttggagtgatgcagagatctgtgcaatgtttaaccaatgaggaccaacccagccacttatgccacactgatctgaagccagaagaacgaaaaacctgccgtaatgtctataactgtgagttaccccagaattgcaaggaggtaaaaagacttaaaggtgccagtgaagatggtgaatatttcctgatgattagaggaaagcttctgaagatattctgtgcggggatgcactctgaccaccccaaagagtacgtgacactggtgcatggagactctgagaatttctccgaggtttatgggcacaggttacacaacccaacagaatgtccctataacgggagccggcgcgatgactgccaatgtcggaaggattacacggccgctgggttttccagttttcagaaaatcagaatagacctgaccagcatgcagataatcaccactgacttacagtttgcaaggacaagcgaaggacatcccgtcccttttgccacagccggggattgctacagcgctgccaagtgcccacagggtcgttttagcatcaacctttatggaaccggcttgtctttaactgaatctgccagatggatatcacaagggaattatgctgtctctgacatcaagaagtcgccggatggtacccgagtcgtagggaaatgcggtggttactgtggaaaatgcactccatcctctggtactggcctggaggtgcgagttttatagctaaggtgctttgaagaggaagccattatggatggatgaaggatagtaatgcaatacctccaccttaatttgggtgcatgtgtatgtgtgtgtgtgtttgtgtgtgacttgtatgcttgtgtgtgtaaatgtgtgtacatatacatatatacatatctacacatacatatatacacatatatgtgtgtatgtagatatgtagactatcctaatgatgtaaagtttaatatttatgtttgaaattatttattgtgatgtaatatttttgtacgtaaaatgattctattatgactgcctttgcatgtagtaatatgacaaagtgatccttcattatcaccggtacactattgtttacttttcatctgtaaatgttttattgttacttttttaaaatgaatttttttaaaacaatctagccatcatcaaggtgctataagagttgtataaaagatatttttggcatttctaggcaagtatcagccaataagtatgttagtgatatcacagattgtaccaactattaactatgttaaataagtattcagtttcatgtgatctctgggaaaaaaatatgctgccttgggtgctaatattgtatgtatttaaatgatcatccgactcagaaatataaacacttttaatgaaagggaggaacggaaggacaatttccagtgcacagaatcacttggatgaaataagaccagctctttacccttatttttggatatgccttttttggaagagacttagactttatccttattgttgttagtgttgttaatattcgttgcttcagcccacggtgccttggtctctccacaatcaaatggaggatcccccaagcagcttcattacagagtgatattgggaaagtgagatcctctcaccattttgccaagatactctaaaatgacatccaagtttaccagtagaaagacacaggatgcacagaatgggcatgaccttcagctcacgagcacacctggagaaattcagaaccaggttctgaatcatcacgattgccttttgcatgaaaacatcggctggtgatgtgacttctcttcaggccatgagcctaacaccctgccggttttcatgcccgctgcagtaatggacgtttgtgtgaagaaatgaactgtggagtacaaaatgctttgagtctttccgattgctcattaattcacttttttgttacttctttccaaaatggaagtgctgaagccatggtctttctgcccctccaagctgatgaagggaagcctttgccaatggcccatggaagacacttggtttgagaaaccctgcccacttccaaagaccaaagagattaggaaaagcctggcagtattctccaactccaaacaagctctagagtgctccaggaaaagttatattcagtatatgaataagtgttattctccattattaatgtgttctgaaaatatattatgaataaatacatcaccacacccaaaaaaaaaaagttt

SEQ ID NO: 55831 - DNA, 7027 bp, Homo sapiens
caactccgagcacacggccgtcatcagcctctgctcaggaatgctgggcacattccggtctcatgatggggattattttattgaaccactacagtctatggatgaacaagaagatgaagaggaacaaaacaaaccccacatcatttataggcgcagcgccccccagagagagccctcaacaggaaggcatgcatgtgacacctcagaacacaaaaataggcacagtaaagacaagaagaaaaccagagcaagaaaatggggagaaaggattaacctggctggtgacgtagcagcattaaacagcggcttagcaacagaggcattttctgcttatggtaataagacggacaacacaagagaaaagaggacccacagaaggacaaaacgttttttatcctatccacggtttgtagaagtcttggtggtggcagacaacagaatggtttcataccatggagaaaaccttcaacactatattttaactttaatgtcaattgtagcctctatctataaagacccaagtattggaaatttaattaatattgttattgtgaacttaattgtgattcataatgaacaggatgggccttccatatcttttaatgctcagacaacattaaaaaacttttgccagtggcagcattcgaagaacagtccaggtggaatccatcatgatactgctgttctcttaacaagacaggatatctgcagagctcacgacaaatgtgataccttaggcctggctgaactgggaaccatttgtgatccctatagaagctgttctattagtgaagatagtggattgagtacagcttttacgatcgcccatgagctgggccatgtgtttaacatgcctcatgatgacaacaacaaatgtaaagaagaaggagttaagagtccccagcatgtcatggctccaacactgaacttctacaccaacccctggatgtggtcaaagtgtagtcgaaaatatatcactgagtttttagacactggttatggcgagtgtttgcttaacgaacctgaatccagaccctaccctttgcctgtccaactgccaggcatcctttacaacgtgaataaacaatgtgaattgatttttggaccaggttctcaggtgtgcccatatatgatgcagtgcagacggctctggtgcaataacgtcaatggagtacacaaaggctgccggactcagcacacaccctgggccgatgggacggagtgcgagcctggaaagcactgcaagtatggattttgtgttcccaaagaaatggatgtccccgtgacagatggatcctggggaagttggagtccctttggaacctgctccagaacatgtggagggggcatcaaaacagccattcgagagtgcaacagaccagaaccaaaaaatggtggaaaatactgtgtaggacgtagaatgaaatttaagtcctgcaacacggagccatgtctcaagcagaagcgagacttccgagatgaacagtgtgctcactttgacgggaagcattttaacatcaacggtctgcttcccaatgtgcgctgggtccctaaatacagtggaattctgatgaaggaccggtgcaagttgttctgcagagtggcagggaacacagcctactatcagcttcgagacagagtgatagatggaactccttgtggccaggacacaaatgatatctgtgtccagggcctttgccggcaagctggatgcgatcatgttttaaactcaaaagcccggagagataaatgtggggtttgtggtggcgataattcttcatgcaaaacagtggcaggaacatttaatacagtacattatggttacaatactgtggtccgaattccagctggtgctaccaatattgatgtgcggcagcacagtttctcaggggaaacagacgatgacaactacttagctttatcaagcagtaaaggtgaattcttgctaaatggaaactttgttgtcacaatggccaaaagggaaattcgcattgggaatgctgtggtagagtacagtgggtccgagactgccgtagaaagaattaactcaacagatcgcattgagcaagaacttttgcttcaggttttgtcggtgggaaagttgtacaaccccgatgtacgctattctttcaatattccaattgaagataaacctcagcagttttactggaacagtcatgggccatggcaagcatgcagtaaaccctgccaaggggaacggaaacgaaaacttgtttgcaccagggaatctgatcagcttactgtttctgatcaaagatgcgatcggctgccccagcctggacacattactgaaccctgtggtacagactgtgacctgaggtggcatgttgccagcaggagtgaatgtagtgcccagtgtggcttgggttaccgcacattggacatctactgtgccaaatatagcaggctggatgggaagactgagaaggttgatgatggtttttgcagcagccatcccaaaccaagcaaccgtgaaaaatgctcaggggaatgtaacacgggtggctggcgctattctgcctggactgaatgttcaaaaagctgtgacggtgggacccagaggagaagggctatttgtgtcaatacccgaaatgatgtactggatgacagcaaatgcacacatcaagagaaagttaccattcagaggtgcagtgagttcccttgtccacagtggaaatctggagactggtcagagtgcttggtcacctgtggaaaagggcataagcaccgccaggtctggtgtcagtttggtgaagatcgattaaatgatagaatgtgtgaccctgagaccaagccaacatctatgcagacttgtcagcagccggaatgtgcatcctggcaggcgggtccctggggacagtgcagtgtcacttgtggacagggataccagctaagagcagtgaaatgcatcattgggacttatatgtcagtggtagatgacaatgactgtaatgcagcaactagaccaactgatacccaggactgtgaattaccatcatgtcatcctcccccagctgccccggaaacgaggagaagcacatacagtgcaccaagaacccagtggcgatttgggtcttggaccccatgctcagccacttgtgggaaaggtacccggatgagatacgtcagctgccgagatgagaatggctctgtggctgacgagagtgcctgtgctaccctgcctagaccagtggcaaaggaagaatgttctgtgacaccctgtgggcaatggaaggccttggactggagctcttgctctgtgacctgtgggcaaggtagggcaacccggcaagtgatgtgtgtcaactacagtgaccacgtgatcgatcggagtgagtgtgaccaggattatatcccagaaactgaccaggactgttccatgtcaccatgccctcaaaggaccccagacagtggcttagctcagcaccccttccaaaatgaggactatcgtccccggagcgccagccccagccgcacccatgtgctcggtggaaaccagtggagaactggcccctggggagcatgttccagtacctgtgctggcggatcccagcggcgtgttgttgtatgtcaggatgaaaatggatacaccgcaaacgactgtgtggagagaataaaacctgatgagcaaagagcctgtgaatccggcccttgtcctcagtgggcttatggcaactggggagagtgcactaagctgtgtggtggaggcataagaacaagactggtggtctgtcagcggtccaacggtgaacggtttccagatttgagctgtgaaattcttgataaacctcccgatcgtgagcagtgtaacacacatgcttgtccacacgacgctgcatggagtactggcccttggagctcgtgttctgtctcttgtggtcgagggcataaacaacgaaatgtttactgcatggcaaaagatggaagccatttagaaagtgattactgtaagcacctggctaagccacatgggcacagaaagtgccgaggaggaagatgccccaaatggaaagctggtgctctgtcttcttagtgctctgtgtcctgtggccgaggcgtacagcagaggcatgtgggctgtcagatcggaacacacaaaatagccagagagaccgagtgcaacccatacaccagaccggagtcggaacgcgactgccaaggcccacggtgtcccctctacacttggagggcagaggaatggcaagaatgcaccaagacctgcggcgaaggctccaggtaccgcaaggtggtgtgtgtggatgacaacaaaaacgaggtgcatggggcacgctgtgacgtgagcaagcggccggtggaccgtgaaagctgtagtttgcaaccctgcgagtatgtctggatcacaggagaatggtcagagtgctcagtgacctgtggaaaaggctacaaacaaaggcttgtctcgtgcagcgagatttacaccgggaaggagaattatgaatacagctaccaaaccaccatcaactgcccaggcacgcagccccccagtgttcacccctgttacctgagggactgccctgtctcggccacctggagagttggcaactgggggagctgctcagtgtcttgtggtgttggagtgatgcagagatctgtgcaatgtttaaccaatgaggaccaacccagccacttatgccacactgatctgaagccagaagaacgaaaaacctgccgtaatgtctataactgtgagttaccccagaattgcaaggaggtaaaaagacttaaaggtgccagtgaagatggtgaatatttcctgatgattagaggaaagcttctgaaggtgaatgtcagacaccagtcattatttcaagaatgtttttagagtgagtgatcaccgctctcattacctcatttctgagccactcttcatgggttatttatggtctttcagatattctgtgcggggatgcactctgaccaccccaaagagtacgtgacactggtgcatggagactctgagaatttctccgaggtttatgggcacaggtaggagagccaggctcagaagatctcagaggcctggagatccctggaaatgctttcccatccttaccagaacattctctgtataatttaggttacacaacccaacagaatgtccctataacgggagccggcgcgatgactgccaatgtcggaaggattacacggccgctgggttttccagttttcagaaaatcagaatagacctgaccagcatgcagataatcaccactgacttacagtttgcaaggacaagcgaaggacatcccgtcccttttgccacagccggggattgctacagcgctgccaagtgcccacagggtcgttttagcatcaacctttatggaaccggcttgtctttaactgaatctgccagatggatatcacaagggaattatgctgtctctgacatcaagaagtcgccggatggtacccgagtcgtagggaaatgcggtggttactgtggaaaatgcactccatcctctggtactggcctggaggtgcgagttttatagctaaggtgctttgaagaggaagccattatggatggatgaaggatagtaatgcaatacctccaccttaatttgggtgcatgtgtatgtgtgtgtgtgtttgtgtgtgacttgtatgcttgtgtgtgtaaatgtgtgtacatatacatatatacatatctacacatacatatatacacatatatgtgtgtatgtagatatgtagactatcctaatgatgtaaagtttaatatttatgtttgaaattatttattgtgatgtaatatttttgtacgtaaaatgattctattatgactgcctttgcatgtagtaatatgacaaagtgatccttcattatcaccggtacactattgtttacttttcatctgtaaatgttttattgttacttttttaaaatgaatttttttaaaacaatctagccatcatcaaggtgctataagagttgtataaaagatatttttggcatttctaggcaagtatcagccaataagtatgttagtgatatcacagattgtaccaactattaactatgttaaataagtattcagtttcatgtgatctctgggaaaaaaatatgctgccttgggtgctaatattgtatgtatttaaatgatcatccgactcagaaatataaacacttttaatgaaagggaggaacggaaggacaatttccagtgcacagaatcacttggatgaaataagaccagctctttacccttatttttggatatgccttttttggaagagacttagactttatccttattgttgttagtgttgttaatattcgttgcttcagcccacggtgccttggtctctccacaatcaaatggaggatcccccaagcagcttcattacagagtgatattgggaaagtgagatcctctcaccattttgccaagatactctaaaatgacatccaagtttaccagtagaaagacacaggatgcacagaatgggcatgaccttcagctcacgagcacacctggagaaattcagaaccaggttctgaatcatcacgattgccttttgcatgaaaacatcggctggtgatgtgacttctcttcaggccatgagcctaacaccctgccggttttcatgcccgctgcagtaatggacgtttgtgtgaagaaatgaactgtggagtacaaaatgctttgagtctttccgattgctcattaattcacttttttgttacttctttccaaaatggaagtgctgaagccatggtctttctgcccctccaagctgatgaagggaagcctttgccaatggcccatggaagacacttggtttgagaaaccctgcccacttccaaagaccaaagagattaggaaaagcctggcagtattctccaactccaaacaagctctagagtgctccaggaaaagttatattcagtatatgaataagtgttattctccattattaatgtgttctgaaaatatattatgaataaatacatcaccacacccaaaaaaaaaaagttt

SEQ ID NO: 55832 - DNA, 5532 bp, Homo sapiens
caactccgagcacacggccgtcatcagcctctgctcaggaatgctgggcacattccggtctcatgatggggattattttattgaaccactacagtctatggatgaacaagaagatgaagaggaacaaaacaaaccccacatcatttataggcgcagcgccccccagagagagccctcaacaggaaggcatgcatgtgacacctcagaacacaaaaataggcacagtaaagacaagaagaaaaccagagcaagaaaatggggagaaaggattaacctggctggtgacgtagcagcattaaacagcggcttagcaacagaggcattttctgcttatggtaataagacggacaacacaagagaaaagaggacccacagaaggacaaaacgttttttatcctatccacggtttgtagaagtcttggtggtggcagacaacagaatggtttcataccatggagaaaaccttcaacactatattttaactttaatgtcaattgtagcctctatctataaagacccaagtattggaaatttaattaatattgttattgtgaacttaattgtgattcataatgaacaggatgggccttccatatcttttaatgctcagacaacattaaaaaacttttgccagtggcagcattcgaagaacagtccaggtggaatccatcatgatactgctgttctcttaacaagacaggatatctgcagagctcacgacaaatgtgataccttaggcctggctgaactgggaaccatttgtgatccctatagaagctgttctattagtgaagatagtggattgagtacagcttttacgatcgcccatgagctgggccatgtgtttaacatgcctcatgatgacaacaacaaatgtaaagaagaaggagttaagagtccccagcatgtcatggctccaacactgaacttctacaccaacccctggatgtggtcaaagtgtagtcgaaaatatatcactgagtttttagacactggttatggcgagtgtttgcttaacgaacctgaatccagaccctaccctttgcctgtccaactgccaggcatcctttacaacgtgaataaacaatgtgaattgatttttggaccaggttctcaggtgtgcccatatatgatgcagtgcagacggctctggtgcaataacgtcaatggagtacacaaaggctgccggactcagcacacaccctgggccgatgggacggagtgcgagcctggaaagcactgcaagtatggattttgtgttcccaaagaaatggatgtccccgtgacagatggatcctggggaagttggagtccctttggaacctgctccagaacatgtggagggggcatcaaaacagccattcgagagtgcaacagaccagaaccaaaaaatggtggaaaatactgtgtaggacgtagaatgaaatttaagtcctgcaacacggagccatgtctcaagcagaagcgagacttccgagatgaacagtgtgctcactttgacgggaagcattttaacatcaacggtctgcttcccaatgtgcgctgggtccctaaatacagtggaattctgatgaaggaccggtgcaagttgttctgcagagtggcagggaacacagcctactatcagcttcgagacagagtgatagatggaactccttgtggccaggacacaaatgatatctgtgtccagggcctttgccggcaagctggatgcgatcatgttttaaactcaaaagcccggagagataaatgtggggtttgtggtggcgataattcttcatgcaaaacagtggcaggaacatttaatacagtacattatggttacaatactgtggtccgaattccagctggtgctaccaatattgatgtgcggcagcacagtttctcaggggaaacagacgatgacaactacttagctttatcaagcagtaaaggtgaattcttgctaaatggaaactttgttgtcacaatggccaaaagggaaattcgcattgggaatgctgtggtagagtacagtgggtccgagactgccgtagaaagaattaactcaacagatcgcattgagcaagaacttttgcttcaggttttgtcggtgggaaagttgtacaaccccgatgtacgctattctttcaatattccaattgaagataaacctcagcagttttactggaacagtcatgggccatggcaagcatgcagtaaaccctgccaaggggaacggaaacgaaaacttgtttgcaccagggaatctgatcagcttactgtttctgatcaaagatgcgatcggctgccccagcctggacacattactgaaccctgtggtacagactgtgacctgaggtggcatgttgccagcaggagtgaatgtagtgcccagtgtggcttgggttaccgcacattggacatctactgtgccaaatatagcaggctggatgggaagactgagaaggttgatgatggtttttgcagcagccatcccaaaccaagcaaccgtgaaaaatgctcaggggaatgtaacacgggtggctggcgctattctgcctggactgaatgttcaaaaagctgtgacggtgggacccagaggagaagggctatttgtgtcaatacccgaaatgatgtactggatgacagcaaatgcacacatcaagagaaagttaccattcagaggtgcagtgagttcccttgtccacagtggaaatctggagactggtcagagtgcttggtcacctgtggaaaagggcataagcaccgccaggtctggtgtcagtttggtgaagatcgattaaatgatagaatgtgtgaccctgagaccaagccaacatctatgcagacttgtcagcagccggaatgtgcatcctggcaggcgggtccctggggacagtgcagtgtcacttgtggacagggataccagctaagagcagtgaaatgcatcattgggacttatatgtcagtggtagatgacaatgactgtaatgcagcaactagaccaactgatacccaggactgtgaattaccatcatgtcatcctcccccagctgccccggaaacgaggagaagcacatacagtgcaccaagaacccagtggcgatttgggtcttggaccccatgctcagccacttgtgggaaaggtacccggatgagatacgtcagctgccgagatgagaatggctctgtggctgacgagagtgcctgtgctaccctgcctagaccagtggcaaaggaagaatgttctgtgacaccctgtgggcaatggaaggccttggactggagctcttgctctgtgacctgtgggcaaggtagggcaacccggcaagtgatgtgtgtcaactacagtgaccacgtgatcgatcggagtgagtgtgaccaggattatatcccagaaactgaccaggactgttccatgtcaccatgccctcaaaggaccccagacagtggcttagctcagcaccccttccaaaatgaggactatcgtccccggagcgccagccccagccgcacccatgtgctcggtggaaaccagtggagaactggcccctggggagcatgttccagtacctgtgctggcggatcccagcggcgtgttgttgtatgtcaggatgaaaatggatacaccgcaaacgactgtgtggagagaataaaacctgatgagcaaagagcctgtgaatccggcccttgtcctcagtgggcttatggcaactggggagagtgcactaagctgtgtggtggaggcataagaacaagactggtggtctgtcagcggtccaacggtgaacggtttccagatttgagctgtgaaattcttgataaacctcccgatcgtgagcagtgtaacacacatgcttgtccacacgacgctgcatggagtactggcccttggagctcgtgttctgtctcttgtggtcgagggcataaacaacgaaatgtttactgcatggcaaaagatggaagccatttagaaagtgattactgtaagcacctggctaagccacatgggcacagaaagtgccgaggaggaagatgccccaaatggaaagctggtgctctgtcttcttagtgctctgtgtcctgtggccgaggcgtacagcagaggcatgtgggctgtcagatcggaacacacaaaatagccagagagaccgagtgcaacccatacaccagaccggagtcggaacgcgactgccaaggcccacggtgtcccctctacacttggagggcagaggaatggcaagaatgcaccaagacctgcggcgaaggctccaggtaccgcaaggtggtgtgtgtggatgacaacaaaaacgaggtgcatggggcacgctgtgacgtgagcaagcggccggtggaccgtgaaagctgtagtttgcaaccctgcgagtatgtctggatcacaggagaatggtcagagtgctcagtgacctgtggaaaaggctacaaacaaaggcttgtctcgtgcagcgagatttacaccgggaaggagaattatgaatacagctaccaaaccaccatcaactgcccaggcacgcagccccccagtgttcacccctgttacctgagggactgccctgtctcggccacctggagagttggcaactgggggagctgctcagtgtcttgtggtgttggagtgatgcagagatctgtgcaatgtttaaccaatgaggaccaacccagccacttatgccacactgatctgaagccagaagaacgaaaaacctgccgtaatgtctataactgtgagttaccccagaattgcaaggaggtaaaaagacttaaaggtgccagtgaagatggtgaatatttcctgatgattagaggaaagcttctgaagatattctgtgcggggatgcactctgaccaccccaaagagtacgtgacactggtgcatggagactctgagaatttctccgaggtttatgggcacaggttacacaacccaacagaatgtccctataacgggagccggcgcgatgactgccaatgtcggaaggattacacggccgctgggttttccagttttcagaaaatcagaatagacctgaccagcatgcagataatcaccactgacttacagtttgcaaggacaagcgaaggacatcccgtcccttttgccacagccggggattgctacagcgctgccaagtgcccacagggtcgttttagcatcaacctttatggaaccggcttgtctttaactgaatctgccagatggatatcacaagggaattatgctgtctctgacatcaagaagtcgccggatggtacccgagtcgtagggaaatgcggtggttactgtggaaaatgcactccatcctctggtactggcctggaggtgcgagttttatagctaaggaaaattgcctccagctgcatccatattgctgcaaaggacatgatttcattattttttatggctgcatagtatttcatcatgtatacagaccacatttttaaaatccagtccaccattaatcggtacctaggttgattccacgtttgctattgtgaatagtgctgcaataaacatgtgagtgcaggtga

SEQ ID NO: 55833 - DNA, 432 bp, Homo sapiens
tccttctggcccttcagaaatgcctctacctagaactcccttaccttgctgtagaacgtgggtactgcttcagcttcccccgtccaaagaacccaaaacttcctaccttcagtagtgactccaccccagtgtccacctaggatcccccagtctggagacaggcctggctggaaagccagaaaggagcaccagctatgtcccaggtgctatccacagcacctgccaggcacacaccagggctcaggtcatgagaaaataggacagaaccagcattcttatgaaaatatgctaaatacagccgagaggatctaaactagtaccggcaacgtaagttgctttggatataagtgctgcacttgcttcctccagtggagaatctaccgaaggcatgcaaggtgcggggatcgagggaaacccaccacaggaatgagc

SEQ ID NO: 55834 - DNA, 156 bp, Homo sapiens
gccgcggtgcggtcggatgcccagctcgcgtccagacccgcgggatgcagacccggatcagtcaggcttgagggctgctccgcatagaccaacgtccggggaaggcacacagtggccgagggcccgcgcgcttgggctacggctgtgatggtatct

SEQ ID NO: 55835 - DNA, 841 bp, Homo sapiens
agccccgcctttccccacgtgtctgccgcctaggggaggtgcctcatccggagcgggccgccaacggtccggccccgtccgcacagacgctcctgtcggcggcgcccgggagcggctcggctgcccgatgcttccgccccggctgccgcgggccgggctgtacgcttagtgcccggctcaggccccctgaagcgcccgcgggggtgagagcggcctccggccccgcggagacggagcggcttgaggacgaggcggcggccgcggggaggaggatgggggctaaccagttagtggtgctcaacgtgtacgacatgggtctcactcagtcgctcaggctggagtgcagtgtcacaatcacagctcactgaagcctcgacctcctgggctcagaattggttccttccgatgggttcttggtctcactgacttcaagaatgaagccgcagaccctcgtgtattggatgaacgaatatacctcatccattggaattggagtttttcattcaggaattgaagtctatggcagagaatttgcttatggtggccatccttaccccttttctggaatatttgaaatttccccaggaaatgcttctgaactaggagaaacatttaaatttaaagaagctgttgttttagggagcacggacttcctagaagatgatatagaaaaaattgtagaagaactgggaaaagaatacaaaggcaatgcttatcatttaatgcataaaaactgcaatcatttttcttcagctttatcagaggtaagctaaattttatcctaaaagttcttcaaataaatatttgctatcccactatacttgatatcccactatattcg

SEQ ID NO: 55836 - DNA, 4108 bp, Homo sapiens
agccccgcctttccccacgtgtctgccgcctaggggaggtgcctcatccggagcgggccgccaacggtccggccccgtccgcacagacgctcctgtcggcggcgcccgggagcggctcggctgcccgatgcttccgccccggctgccgcgggccgggctgtacgcttagtgcccggctcaggccccctgaagcgcccgcgggggtgagagcggcctccggccccgcggagacggagcggcttgaggacgaggcggcggccgcggggaggaggatgggggctaaccagttagtggtgctcaacgtgtacgacatgtattggatgaacgaatatacctcatccattggaattggagtttttcattcaggaattgaagtctatggcagagaatttgcttatggtggccatccttaccccttttctggaatatttgaaatttccccaggaaatgcttctgaactaggagaaacatttaaatttaaagaagctgttgttttagggagcacggacttcctagaagatgatatagaaaaaattgtagaagaactgggaaaagaatacaaaggcaatgcttatcatttaatgcataaaaactgcaatcatttttcttcagctttatcagagattctttgtgggaaagagattcctcgctggatcaatcgacttgcctacttcagctcctgtataccctttctacagagttgcctcccgaaggagtggctcacgcccgcagccctgcagtctagtgtcagccaagaactccaggatgaactggaggaagcagaggatgctgccgcatccgcttccgtggcaagcactgcagcaggctccagacccgggcgccacactaaactataaatgtctccaaagtcacacattcagaactgtctctggcagtcgaatatcactagagaaaagtaaacagagaagcatcctttagatattttgtatgcaaagatggctctcccccaaatcccagtttttcagctcaggattatatttgtaatcaaaaaaaaaaaatcacttggcgcaggagggagaactttgtaagaagctgccctctgttttttttatccactcgtaaatctggatttatttcttctgttttatacaagctctgttaagttatgtttacagtatcttgtatcgctgtttacaaatcttgcatggactcctgccacagtgaaagaagaaaatcttcatgtcttcaaaaattaggcaggtaatctttgtatacttctgacaattgccagatctatggcataaataggcacacaaaaaggtacttaaacagttatagtcaccatcacctgcttcagaatggtcttttagatttgtgtttgttttgttaaagttgttggcaccaggatgcagagaatcagactggcctgaggtgaaggagcacacagccctgagggcttggaaccctgggtccagttcctcttcacacccccttccactctgagtagcacatctccccaggtgcccatggaacacctgctttcatcccaaatatccgtccacctaggcggggtggtatgttcttacgtctctctgactttgatgccactcattctatagtttagctggttttcgttcaagatattcttggtagtaactgacaagtatgttgcacatgtattgggggaggcgcttcatttttattttaatacacatgtatttcctccttgcacaggattttgatggtgtgggaatatcctaagtggtagccttccaagtagcagtgagttgacattcagctgcttttaactattcaggctaccttttatactaaaccttgaaaactagaatctaatgtctaccccaaaaaagtagttctttgatattttatactttttatgtaccatgtcagaaagagtatgttggcgtttgtcatgggactcatttcacataatagaatgcctagtctcattgaccaatcgttaaaaaatcatatttgtgtgtcttaagattcatatttatatgttctctcaaatgtatgtctcttacgtaacatactctaagaatgaaactgtcaccacaggtaaatccttgttagcaaggaatctgtctgctccagtctactcctagtttgatccttggatgtaagaaccaagtcattacatgtcaaattcaatttttctgccttaagaatgaatgtccttcataaaatattggatgcagtgtaacactatccaaggcagtgacttcagctttatatacatataaaatatagttagttttaaaattattgacatttatttaaacttttagattggattgtttgctattgctctgtgtgaggatacataatctttcagtaaactgtatttttaacttttccataagctgattttggttcattttatcaacgtaagcacaccctgttcatagggaaaataaaccttgggttataagcattagcctgaggacaatgaagccacttaacctaatttatgctttcgactgttctgtttccagagaggaaagcctttacaaattactctcagttctttaggggcagaaggcttgtttcaagaggtttgacagaagaaaggaatatatgaacttaatgagatgtcgacttggttcaggtctaaaaatgagggcaaaacactaaggctctagcagtgacttgttcactaaaaagagagagtcctgtccccagacggttagtacaaagccttggatacagtttgcttgtaatatttttaataatgtgaggagtacagtgttttctaattcattcaagtatatatgatttaaacctgggctactgacacacacacagtagccattagttagactcttcttagtgaatatcaggaacatcccatctgtgcttaaccagaatccagcaagtcagcacacaagtgattttattgttattttgttgtatttacttgcatttgttgtatttactttcatctgcagcatttggagtttaaaaataatgtaaagggttctagtagaaatagtgtcctaaggccaattacctaccatactaacaatcagcagataaaattctggacgtgagattccttataatctaattatacctgaggttgagcaagaaatgtcttcctttagaaaatctcattcaagtcaggttcttctctacagttcaaaattgagaatggatttaattaactagcatttagccagctttttcttgcccttggagaaaaagaatcattctcaacctgataatctgttaagaaaaatcccatatgaacaatctggtcattaacatacatatgatacggagtctctttgttgtcaccaagtgaacatacttctcatggtgggttggacagtaatacatgttagagggtcagaagcttctggtttctgctgtttgctttaaatacccttggggtttttttttaaacccttacaaggggagcatcagctttggaaagtgtgactctgtaggagtgtagaaggcagtggtgtatgatcttagcctcgtcctgatgcctgaatccagccagctgttgctctgacccacagcaatagagcaagttacccatcaccagcatttgtacagagcagggaattctggttttagtccattggtagcattgtgtgtatgaggagattcaacaccacagacagctgcaggactcgatatccatggcttctttccatcacaaaacgggtagaaacacattcactgcttcagggttctaatctgtgtgtctccttatgactccatttctgtaagctactctgtaactttgatatatgctgtattttctttctttaaaagatttagatgttttttcagcaagctagccatacaaccattgtatctctttctcttcagtatggtttagagcccagatcagttagtaggctttcgttgtcttctctttcaatacatgtacatctttactgtttgaaaagtgttacagctgtcaaagaatcttcatggacctgaagataatttcttgtgaagttgaatgcaagtgtactgtcattcatagtgtttatatcaaaataccaggaatcttcacttttgctaccttgatatagcattgggctatcatgttacaacattgaaatacattgatttattaaaaaatacttttataagaaaaaaaaaa

SEQ ID NO: 55837 - DNA, 4778 bp, Homo sapiens
agccccgcctttccccacgtgtctgccgcctaggggaggtgcctcatccggagcgggccgccaacggtccggccccgtccgcacagacgctcctgtcggcggcgcccgggagcggctcggctgcccgatgcttccgccccggctgccgcgggccgggctgtacgcttagtgcccggctcaggccccctgaagcgcccgcgggggtgagagcggcctccggccccgcggagacggagcggcttgaggacgaggcggcggccgcggggaggaggatgggggctaaccagttagtggtgctcaacgtgtacgacatggtgagtgcggcccctggcggccccgagccctggcccaggccggcttcctctcgcccgtggggctcggaccccggccccaggcgcttcctgcctggcgtctccgcctccagcctagttctcgggggaagccgggggtgaaggagggagtattgttattttttaatcctcgcactcgtcgacgctccggtgaacccagtcagcccgagggttttggccaaagctcgggtgggcttgaacctctcccatccgctcagcttggacccgaccccggctctgggcccgaccccttggccgacgtgcagtgtcctttcggcaaagcttccgttgcgtttccaaccccacttgccggcccccggggctgccccgggacccccgtcccgaccgcctgcgctcccagctcctctgcttctgccgaactgtccgtctctctccatggctacgtcttcagaaactcccaagcccctctaagtccagaaggtcacagctttcgggtgcctgtgctagaatctcttcaaaggtgaacaggagccaacacaccctttccttgtgtgttaaaggcaacctcgttaaaatatgaatgaggctaacatttctcaagaaaatagcccagctgaattatttagagatcctggtggtgctcctttcctacactctgaagaccactttccagtattggatgaacgaatatacctcatccattggaattggagtttttcattcaggaattgaagtctatggcagagaatttgcttatggtggccatccttaccccttttctggaatatttgaaatttccccaggaaatgcttctgaactaggagaaacatttaaatttaaagaagctgttgttttagggagcacggacttcctagaagatgatatagaaaaaattgtagaagaactgggaaaagaatacaaaggcaatgcttatcatttaatgcataaaaactgcaatcatttttcttcagctttatcagagattctttgtgggaaagagattcctcgctggatcaatcgacttgcctacttcagctcctgtataccctttctacagagttgcctcccgaaggagtggctcacgcccgcagccctgcagtctagtgtcagccaagaactccaggatgaactggaggaagcagaggatgctgccgcatccgcttccgtggcaagcactgcagcaggctccagacccgggcgccacactaaactataaatgtctccaaagtcacacattcagaactgtctctggcagtcgaatatcactagagaaaagtaaacagagaagcatcctttagatattttgtatgcaaagatggctctcccccaaatcccagtttttcagctcaggattatatttgtaatcaaaaaaaaaaaatcacttggcgcaggagggagaactttgtaagaagctgccctctgttttttttatccactcgtaaatctggatttatttcttctgttttatacaagctctgttaagttatgtttacagtatcttgtatcgctgtttacaaatcttgcatggactcctgccacagtgaaagaagaaaatcttcatgtcttcaaaaattaggcaggtaatctttgtatacttctgacaattgccagatctatggcataaataggcacacaaaaaggtacttaaacagttatagtcaccatcacctgcttcagaatggtcttttagatttgtgtttgttttgttaaagttgttggcaccaggatgcagagaatcagactggcctgaggtgaaggagcacacagccctgagggcttggaaccctgggtccagttcctcttcacacccccttccactctgagtagcacatctccccaggtgcccatggaacacctgctttcatcccaaatatccgtccacctaggcggggtggtatgttcttacgtctctctgactttgatgccactcattctatagtttagctggttttcgttcaagatattcttggtagtaactgacaagtatgttgcacatgtattgggggaggcgcttcatttttattttaatacacatgtatttcctccttgcacaggattttgatggtgtgggaatatcctaagtggtagccttccaagtagcagtgagttgacattcagctgcttttaactattcaggctaccttttatactaaaccttgaaaactagaatctaatgtctaccccaaaaaagtagttctttgatattttatactttttatgtaccatgtcagaaagagtatgttggcgtttgtcatgggactcatttcacataatagaatgcctagtctcattgaccaatcgttaaaaaatcatatttgtgtgtcttaagattcatatttatatgttctctcaaatgtatgtctcttacgtaacatactctaagaatgaaactgtcaccacaggtaaatccttgttagcaaggaatctgtctgctccagtctactcctagtttgatccttggatgtaagaaccaagtcattacatgtcaaattcaatttttctgccttaagaatgaatgtccttcataaaatattggatgcagtgtaacactatccaaggcagtgacttcagctttatatacatataaaatatagttagttttaaaattattgacatttatttaaacttttagattggattgtttgctattgctctgtgtgaggatacataatctttcagtaaactgtatttttaacttttccataagctgattttggttcattttatcaacgtaagcacaccctgttcatagggaaaataaaccttgggttataagcattagcctgaggacaatgaagccacttaacctaatttatgctttcgactgttctgtttccagagaggaaagcctttacaaattactctcagttctttaggggcagaaggcttgtttcaagaggtttgacagaagaaaggaatatatgaacttaatgagatgtcgacttggttcaggtctaaaaatgagggcaaaacactaaggctctagcagtgacttgttcactaaaaagagagagtcctgtccccagacggttagtacaaagccttggatacagtttgcttgtaatatttttaataatgtgaggagtacagtgttttctaattcattcaagtatatatgatttaaacctgggctactgacacacacacagtagccattagttagactcttcttagtgaatatcaggaacatcccatctgtgcttaaccagaatccagcaagtcagcacacaagtgattttattgttattttgttgtatttacttgcatttgttgtatttactttcatctgcagcatttggagtttaaaaataatgtaaagggttctagtagaaatagtgtcctaaggccaattacctaccatactaacaatcagcagataaaattctggacgtgagattccttataatctaattatacctgaggttgagcaagaaatgtcttcctttagaaaatctcattcaagtcaggttcttctctacagttcaaaattgagaatggatttaattaactagcatttagccagctttttcttgcccttggagaaaaagaatcattctcaacctgataatctgttaagaaaaatcccatatgaacaatctggtcattaacatacatatgatacggagtctctttgttgtcaccaagtgaacatacttctcatggtgggttggacagtaatacatgttagagggtcagaagcttctggtttctgctgtttgctttaaatacccttggggtttttttttaaacccttacaaggggagcatcagctttggaaagtgtgactctgtaggagtgtagaaggcagtggtgtatgatcttagcctcgtcctgatgcctgaatccagccagctgttgctctgacccacagcaatagagcaagttacccatcaccagcatttgtacagagcagggaattctggttttagtccattggtagcattgtgtgtatgaggagattcaacaccacagacagctgcaggactcgatatccatggcttctttccatcacaaaacgggtagaaacacattcactgcttcagggttctaatctgtgtgtctccttatgactccatttctgtaagctactctgtaactttgatatatgctgtattttctttctttaaaagatttagatgttttttcagcaagctagccatacaaccattgtatctctttctcttcagtatggtttagagcccagatcagttagtaggctttcgttgtcttctctttcaatacatgtacatctttactgtttgaaaagtgttacagctgtcaaagaatcttcatggacctgaagataatttcttgtgaagttgaatgcaagtgtactgtcattcatagtgtttatatcaaaataccaggaatcttcacttttgctaccttgatatagcattgggctatcatgttacaacattgaaatacattgatttattaaaaaatacttttataagaaaaaaaaaa

SEQ ID NO: 55838 - DNA, 4054 bp, Homo sapiens
agccccgcctttccccacgtgtctgccgcctaggggaggtgcctcatccggagcgggccgccaacggtccggccccgtccgcacagacgctcctgtcggcggcgcccgggagcggctcggctgcccgatgcttccgccccggctgccgcgggccgggctgtacgcttagtgcccggctcaggccccctgaagcgcccgcgggggtgagagcggcctccggccccgcggagacggagcggcttgaggacgaggcggcggccgcggggaggaggatgggggctaaccagttagtggtgctcaacgtgtacgacatgtattggatgaacgaatatacctcatccattggaattggagtttttcattcaggaattgaagtctatggcagagaatttgcttatggtggccatccttaccccttttctggaatatttgaaatttccccaggaaatgcttctgaactaggagaaacatttaaatttaaagaagctgttgttttagggagcacggacttcctagaagatgatatagaaaaaattgtagaagaactgggaaaagaatacaaaggcaatgcttatcatttaatgcataaaaactgcaatcatttttcttcagctttatcagagattctttgtgggaaagagattcctcgctggatcaatcgacttgcctacttcagctcctgtataccctttctacagagttgcctcccgaaggagtggctcacgcccgcagccctgcagtctagtgtcagccaagaactccaggatgaactggaggaagcagaggatgctgccgcatccgcttccgtggcaagcactgcagcaggctccagacccgggcgccacactaaactataaatgtctccaaagtcacacattcagaactgtctctggcagtcgaatatcactagagaaaagtaaacagagaagcatcctttagatattttgtatgcaaagatggctctcccccaaatcccagtttttcagctcaggattatatttgtaatcaaaaaaaaaaaatcacttggcgcaggagggagaactttgtaagaagctgccctctgttttttttatccactcgtaaatctggatttatttcttctgttttatacaagctctgttaagttatgtttacagtatcttgtatcgctgtttacaaatcttgcatggactcctgccacagtgaaagaagaaaatcttcatgtcttcaaaaattaggcaggtaatctttgtatacttctgacaattgccagatctatggcataaataggcacacaaaaaggtacttaaacagttatagtcaccatcacctgcttcagaatggtcttttagatttgtgtttgttttgttaaagttgttggcaccaggatgcagagaatcagactggcctgaggtgaaggagcacacagccctgagggcttggaaccctgggtccagttcctcttcacacccccttccactctgagtagcacatctccccaggtgcccatggaacacctgctttcatcccaaatatccgtccacctaggcggggtggtatgttcttacgtctctctgactttgatgccactcattctatagtttagctggttttcgttcaagatattcttggtagtaactgacaagtatgttgcacatgtattgggggaggcgcttcatttttattttaatacacatgtatttcctccttgcacaggattttgatggtgtgggaatatcctaagtggtagccttccaagtagcagtgagttgacattcagctgcttttaactattcaggctaccttttatactaaaccttgaaaactagaatctaatgtctaccccaaaaaagtagttctttgatattttatactttttatgtaccatgtcagaaagagtatgttggcgtttgtcatgggactcatttcacataatagaatgcctagtctcattgaccaatcgttaaaaaatcatatttgtgtgtcttaagattcatatttatatgttctctcaaatgtatgtctcttacgtaacatactctaagaatgaaactgtcaccacaggtaaatccttgttagcaaggaatctgtctgctccagtctactcctagtttgatccttggatgtaagaaccaagtcattacatgtcaaattcaatttttctgccttaagaatgaatgtccttcataaaatattggatgcagtgtaacactatccaaggcagtgacttcagctttatatacatataaaatatagttagttttaaaattattgacatttatttaaacttttagattggattgtttgctattgctctgtgtgaggatacataatctttcagtaaactgtatttttaacttttccataagctgattttggttcattttatcaacgtaagcacaccctgttcatagggaaaataaaccttgggttataagcattagcctgaggacaatgaagccacttaacctaatttatgctttcgactgttctgtttccagagaggaaagcctttacaaattactctcagttctttaggggcagaaggcttgtttcaagaggtttgacagaagaaaggaatatatgaacttaatgagatgtcgacttggttcaggtctaaaaatgagggcaaaacactaaggctctagcagtgacttgttcactaaaaagagagagtcctgtccccagacggttagtacaaagccttggatacagtttgcttgtaatatttttaataatgtgaggagtacagtgttttctaattcattcaagtatatatgatttaaacctgggctactgacacacacacagtagccattagttagactcttcttagtgaatatcaggaacatcccatctgtgcttaaccagaatccagcaagtcagcacacaagtgattttattgttattttgttgtatttacttgcatttgttgtatttactttcatctgcagcatttggagtttaaaaataatgtaaagggttctagtagaaatagtgtcctaaggccaattacctaccatactaacaatcagcagataaaattctggacgtgagattccttataatctaattatacctgaggttgagcaagaaatgtcttcctttagaaaatctcattcaagtcaggttcttctctacagttcaaaattgagaatggatttaattaactagcatttagccagctttttcttgcccttggagaaaaagaatcattctcaacctgataatctgttaagaaaaatcccatatgaacaatctggtcattaacatacatatgatacggagtctctttgttgtcaccaagtgaacatacttctcatggtgggttggacagtaatacatgttagagggtcagaagcttctggtttctgctgtttgctttaaatacccttggggtttttttttaaacccttacaaggggagcatcagctttggaaagtgtgactctgtaggagtgtagaaggcagtggtgtatgatcttagcctcgtcctgatgcctgaatccagccagctgttgctctgacccacagcaatagagcaagttacccatcaccagcatttgtacagagcagggaattctggttttagtccattggtagcattgtgtgtatgaggagattcaacaccacagacagctgcaggactcgatatccatggcttctttccatcacatgactccatttctgtaagctactctgtaactttgatatatgctgtattttctttctttaaaagatttagatgttttttcagcaagctagccatacaaccattgtatctctttctcttcagtatggtttagagcccagatcagttagtaggctttcgttgtcttctctttcaatacatgtacatctttactgtttgaaaagtgttacagctgtcaaagaatcttcatggacctgaagataatttcttgtgaagttgaatgcaagtgtactgtcattcatagtgtttatatcaaaataccaggaatcttcacttttgctaccttgatatagcattgggctatcatgttacaacattgaaatacattgatttattaaaaaatacttttataagaaaaaaaaaa

SEQ ID NO: 55839 - DNA, 4052 bp, Homo sapiens
agccccgcctttccccacgtgtctgccgcctaggggaggtgcctcatccggagcgggccgccaacggtccggccccgtccgcacagacgctcctgtcggcggcgcccgggagcggctcggctgcccgatgcttccgccccggctgccgcgggccgggctgtacgcttagtgcccggctcaggccccctgaagcgcccgcgggggtgagagcggcctccggccccgcggagacggagcggcttgaggacgaggcggcggccgcggggaggaggatgggggctaaccagttagtggtgctcaacgtgtacgacatgtattggatgaacgaatatacctcatccattggaattggagtttttcattcaggaattgaagtctatggcagagaatttgcttatggtggccatccttaccccttttctggaatatttgaaatttccccaggaaatgcttctgaactaggagaaacatttaaatttaaagaagctgttgttttagggagcacggacttcctagaagatgatatagaaaaaattgtagaagaactgggaaaagaatacaaaggcaatgcttatcatttaatgcataaaaactgcaatcatttttcttcagctttatcagagattctttgtgggaaagagattcctcgctggatcaatcgacttgcctacttcagctcctgtataccctttctacagagttgcctcccgaaggagtggctcacgcccgcagccctgcagtctagtgtcagccaagaactccaggatgaactggaggaagcagaggatgctgccgcatccgcttccgtggcaagcactgcagcaggctccagacccgggcgccacactaaactataaatgtctccaaagtcacacattcagaactgtctctggcagtcgaatatcactagagaaaagtaaacagagaagcatcctttagatattttgtatgcaaagatggctctcccccaaatcccagtttttcagctcaggattatatttgtaatcaaaaaaaaaaaatcacttggcgcaggagggagaactttgtaagaagctgccctctgttttttttatccactcgtaaatctggatttatttcttctgttttatacaagctctgttaagttatgtttacagtatcttgtatcgctgtttacaaatcttgcatggactcctgccacagtgaaagaagaaaatcttcatgtcttcaaaaattaggcaggtaatctttgtatacttctgacaattgccagatctatggcataaataggcacacaaaaaggtacttaaacagttatagtcaccatcacctgcttcagaatggtcttttagatttgtgtttgttttgttaaagttgttggcaccaggatgcagagaatcagactggcctgaggtgaaggagcacacagccctgagggcttggaaccctgggtccagttcctcttcacacccccttccactctgagtagcacatctccccaggtgcccatggaacacctgctttcatcccaaatatccgtccacctaggcggggtggtatgttcttacgtctctctgactttgatgccactcattctatagtttagctggttttcgttcaagatattcttggtagtaactgacaagtatgttgcacatgtattgggggaggcgcttcatttttattttaatacacatgtatttcctccttgcacaggattttgatggtgtgggaatatcctaagtggtagccttccaagtagcagtgagttgacattcagctgcttttaactattcaggctaccttttatactaaaccttgaaaactagaatctaatgtctaccccaaaaaagtagttctttgatattttatactttttatgtaccatgtcagaaagagtatgttggcgtttgtcatgggactcatttcacataatagaatgcctagtctcattgaccaatcgttaaaaaatcatatttgtgtgtcttaagattcatatttatatgttctctcaaatgtatgtctcttacgtaacatactctaagaatgaaactgtcaccacaggtaaatccttgttagcaaggaatctgtctgctccagtctactcctagtttgatccttggatgtaagaaccaagtcattacatgtcaaattcaatttttctgccttaagaatgaatgtccttcataaaatattggatgcagtgtaacactatccaaggcagtgacttcagctttatatacatataaaatatagttagttttaaaattattgacatttatttaaacttttagattggattgtttgctattgctctgtgtgaggatacataatctttcagtaaactgtatttttaacttttccataagctgattttggttcattttatcaacgtaagcacaccctgttcatagggaaaataaaccttgggttataagcattagcctgaggacaatgaagccacttaacctaatttatgctttcgactgttctgtttccagagaggaaagcctttacaaattactctcagttctttaggggcagaaggcttgtttcaagaggtttgacagaagaaaggaatatatgaacttaatgagatgtcgacttggttcaggtctaaaaatgagggcaaaacactaaggctctagcagtgacttgttcactaaaaagagagagtcctgtccccagacggttagtacaaagccttggatacagtttgcttgtaatatttttaataatgtgaggagtacagtgttttctaattcattcaagtatatatgatttaaacctgggctactgacacacacacagtagccattagttagactcttcttagtgaatatcaggaacatcccatctgtgcttaaccagaatccagcaagtcagcacacaagtgattttattgttattttgttgtatttacttgcatttgttgtatttactttcatctgcagcatttggagtttaaaaataatgtaaagggttctagtagaaatagtgtcctaaggccaattacctaccatactaacaatcagcagataaaattctggacgtgagattccttataatctaattatacctgaggttgagcaagaaatgtcttcctttagaaaatctcattcaagtcaggttcttctctacagttcaaaattgagaatggatttaattaactagcatttagccagctttttcttgcccttggagaaaaagaatcattctcaacctgataatctgttaagaaaaatcccatatgaacaatctggtcattaacatacatatgatacggagtctctttgttgtcaccaagtgaacatacttctcatggtgggttggacagtaatacatgttagagggtcagaagcttctggtttctgctgtttgctttaaatacccttggggtttttttttaaacccttacaaggggagcatcagctttggaaagtgtgactctgtaggagtgtagaaggcagtggtgtatgatcttagcctcgtcctgatgcctgaatccagccagctgttgctctgacccacagcaatagagcaagttacccatcaccagcatttgtacagagcagggaattctggttttagtccattggtagcattgtgtgtatgaggagattcaacaccacagacagctgcaggactcgatatccatggcttctttccatcacaaaacgggtagaaacacattcactgcttcagggttctaatctgtgtgtctccttatgactccatttctgtaagctactctgtaactttgatatatgctgtattttctttctttaaaagatttagatgttttttcagcaagctagccatacaaccattgtatctctttctcttcagtatggtttagagcccagatcagttagtaggctttcgttgtcttctctttcaatacatgtacatctttactgtttgaaaagtgttacagctgtcaaagaatcttcatggacctgaagataatttcttgtgaagttgaatgcaagtgtactgtcattcatagtgtttatatctaatccgggatctcaactttacatgtccgtcctcgctgtggtgtcttctttagg

SEQ ID NO: 55840 - DNA, 4014 bp, Homo sapiens
agccccgcctttccccacgtgtctgccgcctaggggaggtgcctcatccggagcgggccgccaacggtccggccccgtccgcacagacgctcctgtcggcggcgcccgggagcggctcggctgcccgatgcttccgccccggctgccgcgggccgggctgtacgcttagtgcccggctcaggccccctgaagcgcccgcgggggtgagagcggcctccggccccgcggagacggagcggcttgaggacgaggcggcggccgcggggaggaggatgggggctaaccagttagtggtgctcaacgtgtacgacatgtattggatgaacgaatatacctcatccattggaattggagtttttcattcaggaattgaagtctatggcagagagaagctgttgttttagggagcacggacttcctagaagatgatatagaaaaaattgtagaagaactgggaaaagaatacaaaggcaatgcttatcatttaatgcataaaaactgcaatcatttttcttcagctttatcagagattctttgtgggaaagagattcctcgctggatcaatcgacttgcctacttcagctcctgtataccctttctacagagttgcctcccgaaggagtggctcacgcccgcagccctgcagtctagtgtcagccaagaactccaggatgaactggaggaagcagaggatgctgccgcatccgcttccgtggcaagcactgcagcaggctccagacccgggcgccacactaaactataaatgtctccaaagtcacacattcagaactgtctctggcagtcgaatatcactagagaaaagtaaacagagaagcatcctttagatattttgtatgcaaagatggctctcccccaaatcccagtttttcagctcaggattatatttgtaatcaaaaaaaaaaaatcacttggcgcaggagggagaactttgtaagaagctgccctctgttttttttatccactcgtaaatctggatttatttcttctgttttatacaagctctgttaagttatgtttacagtatcttgtatcgctgtttacaaatcttgcatggactcctgccacagtgaaagaagaaaatcttcatgtcttcaaaaattaggcaggtaatctttgtatacttctgacaattgccagatctatggcataaataggcacacaaaaaggtacttaaacagttatagtcaccatcacctgcttcagaatggtcttttagatttgtgtttgttttgttaaagttgttggcaccaggatgcagagaatcagactggcctgaggtgaaggagcacacagccctgagggcttggaaccctgggtccagttcctcttcacacccccttccactctgagtagcacatctccccaggtgcccatggaacacctgctttcatcccaaatatccgtccacctaggcggggtggtatgttcttacgtctctctgactttgatgccactcattctatagtttagctggttttcgttcaagatattcttggtagtaactgacaagtatgttgcacatgtattgggggaggcgcttcatttttattttaatacacatgtatttcctccttgcacaggattttgatggtgtgggaatatcctaagtggtagccttccaagtagcagtgagttgacattcagctgcttttaactattcaggctaccttttatactaaaccttgaaaactagaatctaatgtctaccccaaaaaagtagttctttgatattttatactttttatgtaccatgtcagaaagagtatgttggcgtttgtcatgggactcatttcacataatagaatgcctagtctcattgaccaatcgttaaaaaatcatatttgtgtgtcttaagattcatatttatatgttctctcaaatgtatgtctcttacgtaacatactctaagaatgaaactgtcaccacaggtaaatccttgttagcaaggaatctgtctgctccagtctactcctagtttgatccttggatgtaagaaccaagtcattacatgtcaaattcaatttttctgccttaagaatgaatgtccttcataaaatattggatgcagtgtaacactatccaaggcagtgacttcagctttatatacatataaaatatagttagttttaaaattattgacatttatttaaacttttagattggattgtttgctattgctctgtgtgaggatacataatctttcagtaaactgtatttttaacttttccataagctgattttggttcattttatcaacgtaagcacaccctgttcatagggaaaataaaccttgggttataagcattagcctgaggacaatgaagccacttaacctaatttatgctttcgactgttctgtttccagagaggaaagcctttacaaattactctcagttctttaggggcagaaggcttgtttcaagaggtttgacagaagaaaggaatatatgaacttaatgagatgtcgacttggttcaggtctaaaaatgagggcaaaacactaaggctctagcagtgacttgttcactaaaaagagagagtcctgtccccagacggttagtacaaagccttggatacagtttgcttgtaatatttttaataatgtgaggagtacagtgttttctaattcattcaagtatatatgatttaaacctgggctactgacacacacacagtagccattagttagactcttcttagtgaatatcaggaacatcccatctgtgcttaaccagaatccagcaagtcagcacacaagtgattttattgttattttgttgtatttacttgcatttgttgtatttactttcatctgcagcatttggagtttaaaaataatgtaaagggttctagtagaaatagtgtcctaaggccaattacctaccatactaacaatcagcagataaaattctggacgtgagattccttataatctaattatacctgaggttgagcaagaaatgtcttcctttagaaaatctcattcaagtcaggttcttctctacagttcaaaattgagaatggatttaattaactagcatttagccagctttttcttgcccttggagaaaaagaatcattctcaacctgataatctgttaagaaaaatcccatatgaacaatctggtcattaacatacatatgatacggagtctctttgttgtcaccaagtgaacatacttctcatggtgggttggacagtaatacatgttagagggtcagaagcttctggtttctgctgtttgctttaaatacccttggggtttttttttaaacccttacaaggggagcatcagctttggaaagtgtgactctgtaggagtgtagaaggcagtggtgtatgatcttagcctcgtcctgatgcctgaatccagccagctgttgctctgacccacagcaatagagcaagttacccatcaccagcatttgtacagagcagggaattctggttttagtccattggtagcattgtgtgtatgaggagattcaacaccacagacagctgcaggactcgatatccatggcttctttccatcacaaaacgggtagaaacacattcactgcttcagggttctaatctgtgtgtctccttatgactccatttctgtaagctactctgtaactttgatatatgctgtattttctttctttaaaagatttagatgttttttcagcaagctagccatacaaccattgtatctctttctcttcagtatggtttagagcccagatcagttagtaggctttcgttgtcttctctttcaatacatgtacatctttactgtttgaaaagtgttacagctgtcaaagaatcttcatggacctgaagataatttcttgtgaagttgaatgcaagtgtactgtcattcatagtgtttatatcaaaataccaggaatcttcacttttgctaccttgatatagcattgggctatcatgttacaacattgaaatacattgatttattaaaaaatacttttataagaaaaaaaaaa

SEQ ID NO: 55841 - DNA, 2733 bp, Homo sapiens
agccccgcctttccccacgtgtctgccgcctaggggaggtgcctcatccggagcgggccgccaacggtccggccccgtccgcacagacgctcctgtcggcggcgcccgggagcggctcggctgcccgatgcttccgccccggctgccgcgggccgggctgtacgcttagtgcccggctcaggccccctgaagcgcccgcgggggtgagagcggcctccggccccgcggagacggagcggcttgaggacgaggcggcggccgcggggaggaggatgggggctaaccagttagtggtgctcaacgtgtacgacatgtattggatgaacgaatatacctcatccattggaattggagtttttcattcaggaattgaagtctatggcagagaatttgcttatggtggccatccttaccccttttctggaatatttgaaatttccccaggaaatgcttctgaactaggagaaacatttaaatttaaagaagctgttgttttagggagcacggacttcctagaagatgatatagaaaaaattgtagaagaactgggaaaagaatacaaaggcaatgcttatcatttaatgcataaaaactgcaatcatttttcttcagctttatcagagattctttgtgggaaagagattcctcgctggatcaatcgacttgcctacttcagctcctgtataccctttctacagagttgcctcccgaaggagtggctcacgcccgcagccctgcagtctagtgtcagccaagaactccaggatgaactggaggaagcagaggatgctgccgcatccgcttccgtggcaagcactgcagcaggctccagacccgggcgccacactaaactataaatgtctccaaagtcacacattcagaactgtctctggcagtcgaatatcactagagaaaagtaaacagagaagcatcctttagatattttgtatgcaaagatggctctcccccaaatcccagtttttcagctcaggattatatttgtaatcaaaaaaaaaaaatcacttggcgcaggagggagaactttgtaagaagctgccctctgttttttttatccactcgtaaatctggatttatttcttctgttttatacaagctctgttaagttatgtttacagtatcttgtatcgctgtttacaaatcttgcatggactcctgccacagtgaaagaagaaaatcttcatgtcttcaaaaattaggcaggtaatctttgtatacttctgacaattgccagatctatggcataaataggcacacaaaaaggtacttaaacagttatagtcaccatcacctgcttcagaatggtcttttagatttgtgtttgttttgttaaagttgttggcaccaggatgcagagaatcagactggcctgaggtgaaggagcacacagccctgagggcttggaaccctgggtccagttcctcttcacacccccttccactctgagtagcacatctccccaggtgcccatggaacacctgctttcatcccaaatatccgtccacctaggcggggtggtatgttcttacgtctctctgactttgatgccactcattctatagtttagctggttttcgttcaagatattcttggtagtaactgacaagtatgttgcacatgtattgggggaggcgcttcatttttattttaatacacatgtatttcctccttgcacaggattttgatggtgtgggaatatcctaagtggtagccttccaagtagcagtgagttgacattcagctgcttttaactattcaggctaccttttatactaaaccttgaaaactagaatctaatgtctaccccaaaaaagtagttctttgatattttatactttttatgtaccatgtcagaaagagtatgttggcgtttgtcatgggactcatttcacataatagaatgcctagtctcattgaccaatcgttaaaaaatcatatttgtgtgtcttaagattcatatttatatgttctctcaaatgtatgtctcttacgtaacatactctaagaatgaaactgtcaccacaggtaaatccttgttagcaaggaatctgtctgctccagtctactcctagtttgatccttggatgtaagaaccaagtcattacatgtcaaattcaatttttctgccttaagaatgaatgtccttcataaaatattggatgcagtgtaacactatccaaggcagtgacttcagctttatatacatataaaatatagttagttttaaaattattgacatttatttaaacttttagattggattgtttgctattgctctgtgtgaggatacataatctttcagtaaactgtatttttaacttttccataagctgatttttgtatttttggtggagacggggtttcgccatgttggccaggctggcagctgggctcttaatgttacttattgtaactcacttcctgtaagactcaatctactcttcaagttgatgtaccctctatgactgtaattcctgaaatctgcagttatgctgtggtgatcttaagcgtgtcttgagttccatgcaaattcaattctgttgataatgtgtccataatcaaatcatcatcttgcaatgcaagggctaccccataattatcagacattaaaatagtttatttctttttccattctgtaatcttaaaataacatcagcttcagtgcctgttcacaatacaaaaaaagtcaaaaaacaaaaacaacacccaaaacat

SEQ ID NO: 55842 - DNA, 3510 bp, Homo sapiens
atacagaactctttctcttctgtagattctttgtgggaaagagattcctcgctggatcaatcgacttgcctacttcagctcctgtataccctttctacagagttgcctcccgaaggagtggctcacgcccgcagccctgcagtctagtgtcagccaagaactccaggatgaactggaggaagcagaggatgctgccgcatccgcttccgtggcaagcactgcagcaggctccagacccgggcgccacactaaactataaatgtctccaaagtcacacattcagaactgtctctggcagtcgaatatcactagagaaaagtaaacagagaagcatcctttagatattttgtatgcaaagatggctctcccccaaatcccagtttttcagctcaggattatatttgtaatcaaaaaaaaaaaatcacttggcgcaggagggagaactttgtaagaagctgccctctgttttttttatccactcgtaaatctggatttatttcttctgttttatacaagctctgttaagttatgtttacagtatcttgtatcgctgtttacaaatcttgcatggactcctgccacagtgaaagaagaaaatcttcatgtcttcaaaaattaggcaggtaatctttgtatacttctgacaattgccagatctatggcataaataggcacacaaaaaggtacttaaacagttatagtcaccatcacctgcttcagaatggtcttttagatttgtgtttgttttgttaaagttgttggcaccaggatgcagagaatcagactggcctgaggtgaaggagcacacagccctgagggcttggaaccctgggtccagttcctcttcacacccccttccactctgagtagcacatctccccaggtgcccatggaacacctgctttcatcccaaatatccgtccacctaggcggggtggtatgttcttacgtctctctgactttgatgccactcattctatagtttagctggttttcgttcaagatattcttggtagtaactgacaagtatgttgcacatgtattgggggaggcgcttcatttttattttaatacacatgtatttcctccttgcacaggattttgatggtgtgggaatatcctaagtggtagccttccaagtagcagtgagttgacattcagctgcttttaactattcaggctaccttttatactaaaccttgaaaactagaatctaatgtctaccccaaaaaagtagttctttgatattttatactttttatgtaccatgtcagaaagagtatgttggcgtttgtcatgggactcatttcacataatagaatgcctagtctcattgaccaatcgttaaaaaatcatatttgtgtgtcttaagattcatatttatatgttctctcaaatgtatgtctcttacgtaacatactctaagaatgaaactgtcaccacaggtaaatccttgttagcaaggaatctgtctgctccagtctactcctagtttgatccttggatgtaagaaccaagtcattacatgtcaaattcaatttttctgccttaagaatgaatgtccttcataaaatattggatgcagtgtaacactatccaaggcagtgacttcagctttatatacatataaaatatagttagttttaaaattattgacatttatttaaacttttagattggattgtttgctattgctctgtgtgaggatacataatctttcagtaaactgtatttttaacttttccataagctgattttggttcattttatcaacgtaagcacaccctgttcatagggaaaataaaccttgggttataagcattagcctgaggacaatgaagccacttaacctaatttatgctttcgactgttctgtttccagagaggaaagcctttacaaattactctcagttctttaggggcagaaggcttgtttcaagaggtttgacagaagaaaggaatatatgaacttaatgagatgtcgacttggttcaggtctaaaaatgagggcaaaacactaaggctctagcagtgacttgttcactaaaaagagagagtcctgtccccagacggttagtacaaagccttggatacagtttgcttgtaatatttttaataatgtgaggagtacagtgttttctaattcattcaagtatatatgatttaaacctgggctactgacacacacacagtagccattagttagactcttcttagtgaatatcaggaacatcccatctgtgcttaaccagaatccagcaagtcagcacacaagtgattttattgttattttgttgtatttacttgcatttgttgtatttactttcatctgcagcatttggagtttaaaaataatgtaaagggttctagtagaaatagtgtcctaaggccaattacctaccatactaacaatcagcagataaaattctggacgtgagattccttataatctaattatacctgaggttgagcaagaaatgtcttcctttagaaaatctcattcaagtcaggttcttctctacagttcaaaattgagaatggatttaattaactagcatttagccagctttttcttgcccttggagaaaaagaatcattctcaacctgataatctgttaagaaaaatcccatatgaacaatctggtcattaacatacatatgatacggagtctctttgttgtcaccaagtgaacatacttctcatggtgggttggacagtaatacatgttagagggtcagaagcttctggtttctgctgtttgctttaaatacccttggggtttttttttaaacccttacaaggggagcatcagctttggaaagtgtgactctgtaggagtgtagaaggcagtggtgtatgatcttagcctcgtcctgatgcctgaatccagccagctgttgctctgacccacagcaatagagcaagttacccatcaccagcatttgtacagagcagggaattctggttttagtccattggtagcattgtgtgtatgaggagattcaacaccacagacagctgcaggactcgatatccatggcttctttccatcacaaaacgggtagaaacacattcactgcttcagggttctaatctgtgtgtctccttatgactccatttctgtaagctactctgtaactttgatatatgctgtattttctttctttaaaagatttagatgttttttcagcaagctagccatacaaccattgtatctctttctcttcagtatggtttagagcccagatcagttagtaggctttcgttgtcttctctttcaatacatgtacatctttactgtttgaaaagtgttacagctgtcaaagaatcttcatggacctgaagataatttcttgtgaagttgaatgcaagtgtactgtcattcatagtgtttatatcaaaataccaggaatcttcacttttgctaccttgatatagcattgggctatcatgttacaacattgaaatacattgatttattaaaaaatacttttataagaaaaaaaaaa

SEQ ID NO: 55843 - DNA, 2751 bp, Homo sapiens
agccccgcctttccccacgtgtctgccgcctaggggaggtgcctcatccggagcgggccgccaacggtccggccccgtccgcacagacgctcctgtcggcggcgcccgggagcggctcggctgcccgatgcttccgccccggctgccgcgggccgggctgtacgcttagtgcccggctcaggccccctgaagcgcccgcgggggtgagagcggcctccggccccgcggagacggagcggcttgaggacgaggcggcggccgcggggaggaggatgggggctaaccagttagtggtgctcaacgtgtacgacatgtattggatgaacgaatatacctcatccattggaattggagtttttcattcaggaattgaagtctatggcagagaatttgcttatggtggccatccttaccccttttctggaatatttgaaatttccccaggaaatgcttctgaactaggagaaacatttaaatttaaagaagctgttgttttagggagcacggacttcctagaagatgatatagaaaaaattgtagaagaactgggaaaagaatacaaaggcaatgcttatcatttaatgcataaaaactgcaatcatttttcttcagctttatcagagattctttgtgggaaagagattcctcgctggatcaatcgacttgcctacttcagctcctgtataccctttctacagagttgcctcccgaaggagtggctcacgcccgcagccctgcagtctagtgtcagccaagaactccaggatgaactggaggaagcagaggatgctgccgcatccgcttccgtggcaagcactgcagcaggctccagacccgggcgccacactaaactataaatgtctccaaagtcacacattcagaactgtctctggcagtcgaatatcactagagaaaagtaaacagagaagcatcctttagatattttgtatgcaaagatggctctcccccaaatcccagtttttcagctcaggattatatttgtaatcaaaaaaaaaaaatcacttggcgcaggagggagaactttgtaagaagctgccctctgttttttttatccactcgtaaatctggatttatttcttctgttttatacaagctctgttaagttatgtttacagtatcttgtatcgctgtttacaaatcttgcatggactcctgccacagtgaaagaagaaaatcttcatgtcttcaaaaattaggcaggtaatctttgtatacttctgacaattgccagatctatggcataaataggcacacaaaaaggtacttaaacagttatagtcaccatcacctgcttcagaatggtcttttagatttgtgtttgttttgttaaagttgttggcaccaggatgcagagaatcagactggcctgaggtgaaggagcacacagccctgagggcttggaaccctgggtccagttcctcttcacacccccttccactctgagtagcacatctccccaggtgcccatggaacacctgctttcatcccaaatatccgtccacctaggcggggtggtatgttcttacgtctctctgactttgatgccactcattctatagtttagctggttttcgttcaagatattcttggtagtaactgacaagtatgttgcacatgtattgggggaggcgcttcatttttattttaatacacatgtatttcctccttgcacaggattttgatggtgtgggaatatcctaagtggtagccttccaagtagcagtgagttgacattcagctgcttttaactattcaggctaccttttatactaaaccttgaaaactagaatctaatgtctaccccaaaaaagtagttctttgatattttatactttttatgtaccatgtcagaaagagtatgttggcgtttgtcatgggactcatttcacataatagaatgcctagtctcattgaccaatcgttaaaaaatcatatttgtgtgtcttaagattcatatttatatgttctctcaaatgtatgtctcttacgtaacatactctaagaatgaaactgtcaccacaggtaaatccttgttagcaaggaatctgtctgctccagtctactcctagtttgatccttggatgtaagaaccaagtcattacatgtcaaattcaatttttctgccttaagaatgaatgtccttcataaaatattggatgcagtgtaacactatccaaggcagtgacttcagctttatatacatataaaatatagttagttttaaaattattgacatttatttaaacttttagattggattgtttgctattgctctgtgtgaggatacataatctttcagtaaactgtatttttaacttttccataagctgattttggttcattttatcaacgtaagcacaccctgttcatagggaaaataaaccttgggttataagcattagcctgaggacaatgaagccacttaacctaatttatgctttcgactgttctgtttccagagaggaaagcctttacaaattactctcagttctttaggggcagaaggcttgtttcaagaggtttgacagaagaaaggaatatatgaacttaatgagatgtcgacttggttcaggtctaaaaatgagggcaaaacactaaggctctagcagtgacttgttcactaaaaagagagagtcctgtccccagacggttagtacaaagccttggatacagtttgcttgtaatatttttaataaccgatcgtcgacatacgggatctctagatcgacc

SEQ ID NO: 55844 - DNA, 1189 bp, Homo sapiens
cggacgcgtgggtcgacccacgcgtccgaaataatgtaaagggttctagtagaaatagtgtcctaaggccaattacctaccatactaacaatcagcagataaaattctggacgtgagattccttataatctaattatacctgaggttgagcaagaaatgtcttcctttagaaaatctcattcaagtcaggttcttctctacagttcaaaattgagaatggatttaattaactagcatttagccagctttttcttgcccttggagaaaaagaatcattctcaacctgataatctgttaagaaaaatcccatatgaacaatctggtcattaacatacatatgatacggagtctctttgttgtcaccaagtgaacatacttctcatggtgggttggacagtaatacatgttagagggtcagaagcttctggtttctgctgtttgctttaaatacccttggggtttttttttaaacccttacaaggggagcatcagctttggaaagtgtgactctgtaggagtgtagaaggcagtggtgtatgatcttagcctcgtcctgatgcctgaatccagccagctgttgctctgacccacagcaatagagcaagttacccatcaccagcatttgtacagagcagggaattctggttttagtccattggtagcattgtgtgtatgaggagattcaacaccacagacagctgcaggactcgatatccatggcttctttccatcacaaaacgggtagaaacacattcactgcttcagggttctaatctgtgtgtctccttatgactccatttctgtaagctactctgtaactttgatatatgctgtattttctttctttaaaagatttagatgttttttcagcaagctagccatacaaccattgtatctctttctcttcagtatggtttagagcccagatcagttagtaggctttcgttgtcttctctttcaatacatgtacatctttactgtttgaaaagtgttacagctgtcaaagaatcttcatggacctgaagataatttcttgtgaagttgaatgcaagtgtactgtcattcatagtgtttatatcaaaataccaggaatcttcacttttgctaccttgatatagcattgggctatcatgttacaacattgaaatacattgatttattaaaaaatacttttataagaaaaaaaaaa

SEQ ID NO: 55845 - DNA, 1141 bp, Homo sapiens
atgctcatagctgactcttgagggtccacagatgacgcggagaaccccagataaaattctggacgtgagattccttataatctaattatacctgaggttgagcaagaaatgtcttcctttagaaaatctcattcaagtcaggttcttctctacagttcaaaattgagaatggatttaattaactagcatttagccagctttttcttgcccttggagaaaaagaatcattctcaacctgataatctgttaagaaaaatcccatatgaacaatctggtcattaacatacatatgatacggagtctctttgttgtcaccaagtgaacatacttctcatggtgggttggacagtaatacatgttagagggtcagaagcttctggtttctgctgtttgctttaaatacccttggggtttttttttaaacccttacaaggggagcatcagctttggaaagtgtgactctgtaggagtgtagaaggcagtggtgtatgatcttagcctcgtcctgatgcctgaatccagccagctgttgctctgacccacagcaatagagcaagttacccatcaccagcatttgtacagagcagggaattctggttttagtccattggtagcattgtgtgtatgaggagattcaacaccacagacagctgcaggactcgatatccatggcttctttccatcacaaaacgggtagaaacacattcactgcttcagggttctaatctgtgtgtctccttatgactccatttctgtaagctactctgtaactttgatatatgctgtattttctttctttaaaagatttagatgttttttcagcaagctagccatacaaccattgtatctctttctcttcagtatggtttagagcccagatcagttagtaggctttcgttgtcttctctttcaatacatgtacatctttactgtttgaaaagtgttacagctgtcaaagaatcttcatggacctgaagataatttcttgtgaagttgaatgcaagtgtactgtcattcatagtgtttatatcaaaataccaggaatcttcacttttgctaccttgatatagcattgggctatcatgttacaacattgaaatacattgatttattaaaaaatacttttataagaaaaaaaaaa

SEQ ID NO: 55846 - DNA, 7686 bp, Homo sapiens
tttatagcagcagcagaaatataccaccctagaggacacacctccttttagctaggtacctataaatgtccaggattttctattcaattgagaagaacccagcaaaatggggatctccacagtcatccttgaaatgtgtcttttatggggacaagttctatctacaggtgggtggatcccaaggactacagactacgcttcactgattccctcggaggtgcccttggatccaactgtagcagaaggttctccatttccctcggagtcgaccctggagtcaactgcagcagaaggttctccgatttccttggagtcaaccctggagtcaactgtagcagaaggttctctgattccctcagagtcaaccctggagtcaactgtagcagaaggatctgattctggtttggccctgaggctggtgaatggagatggcaggtgtcagggccgagtggagatcctataccgaggctcctggggcaccgtgtgtgatgacagctgggacaccaatgatgccaacgtggtctgtaggcagctgggttgtggctgggccatgtcagctccaggaaatgcctggtttggccagggctcaggacccattgccctggatgatgtgcgctgctcaggacacgaatcctacctgtggagctgcccccacaatggctggctctcccataactgtggccatggtgaagatgctggtgttatctgctcagctgcccagcctcagtcaacactcaggccagaaagttggcctgtcaggatatcaccacctgtacccacagaaggatctgaatccagtttggccctgaggctggtgaatggaggcgacaggtgtcgaggccgagtggaggtcctataccgaggctcctggggcaccgtgtgtgatgactactgggacaccaatgatgccaatgtggtctgcaggcagctgggctgtggctgggccatgtcagccccaggaaatgcccagtttggccagggctcaggacccattgtcctggatgatgtgcgctgctcaggacacgagtcctacctgtggagctgcccccacaatggctggctcacccacaactgtggccatagtgaagacgctggtgtcatctgctcagctccccagtcccggccgacacccagcccagatacttggccgacctcacatgcatcaacagcaggacctgaatccagtttggccctgaggctggtgaatggaggtgacaggtgtcagggccgagtggaggtcctataccgaggctcctggggcaccgtgtgtgatgatagctgggacaccagtgacgccaatgtggtctgccggcagctgggctgtggctgggccacgtcagccccaggaaatgcccggtttggccagggttcaggacccattgtcctggatgacgtgcgctgctcaggctatgagtcctacctgtggagctgcccccacaatggctggctctcccataactgtcagcacagtgaagacgctggtgtcatctgctcagctgcccactcctggtcgacgcccagtccagacacgttgccgaccatcaccttacctgcatcgacagtaggatctgaatccagtttggccctgaggctggtgaatggaggtgacaggtgtcagggccgagtggaggtcctataccgaggctcctggggcaccgtgtgtgatgacagctgggacaccaatgatgccaatgtggtctgcaggcagctgggctgtggctgggccatgttggccccaggaaatgcccggtttggtcagggctcaggacccattgtcctggatgacgtgcgctgctcagggaatgagtcctacttgtggagctgcccccacaatggctggctctcccataactgtggccatagtgaagacgctggtgtcatctgctcaggacctgaatccagtttggccctgaggctggtgaatggaggtgacaggtgtcagggccgagtggaggtcctataccgaggctcttggggcaccgtgtgtgatgacagctgggacaccaatgatgccaatgtggtctgcaggcagctgggctgtggctgggccacgtcagccccaggaaatgcccggtttggtcagggctcaggacccattgtcctggatgatgtgcgctgctcaggacatgagtcctacctgtggagctgccccaacaatggctggctctcccacaactgtggccatcatgaagatgctggtgtcatctgctcagctgcccagtcccggtcgacgcccaggccagacacgttgtcgaccatcacgttacctccatcgacagtaggatctgaatccagtttgaccctgaggctggtgaatggaagtgacaggtgtcagggccgagtagaggtcctataccgaggctcctggggcaccgtgtgtgatgacagctgggataccaatgatgccaatgtggtctgcaggcagctgggctgtggctgggccacgtcggccccaggaaatgcccggtttggccagggctcaggacccattgttctggatgatgtgcgctgctcaggacacgagtcctacctgtggagctgcccccacaatggctggctctcccacaactgtggccatcatgaagatgctggtgtcatctgctcagtttcccagtcccggccgacacccagtccagatacttggccgacctcacatgcatcaacagcaggatctgaatccagtttggccctgaggctggtgaatggaggtgacaggtgtcagggccgagtggaggtcctataccgaggctcctggggcaccgtgtgtgatgatagctgggacaccagtgacgccaatgtggtctgccggcagctgggctgtggctgggccacgtcagccccaggaaatgcccggtttggccagggttcaggacccattgtcctggatgacgtgcgctgctcaggctatgagtcctacctgtggagctgcccccacaatggctggctctcccataactgtcagcacagtgaagacgctggtgtcatctgctcagctgcccactcctggtcgacgcccagtccagacacattgccgaccatcaccttgcctgcatcgacagtaggatctgaatccagtttggccctgaggctggtgaatggaggtgacaggtgtcagggccgagtggaggtcctataccaaggctcctggggcaccgtgtgcgatgacagctgggacaccaatgatgccaatgtcgtctgcaggcaactgggctgtggctgggccatgtcagccccaggaaatgcccggtttggtcagggctcaggacccattgtcctggatgatgtgcgctgctcaggacacgagtcttacctgtggagctgcccccacaatggctggctctcccacaactgtggccatagtgaagacgctggtgtcatctgctcagcttcccagtcccggccaacacctagtccagacacttggccaacctcacatgcatcaacagcaggatctgaatccagtttggccctgaggctggtgaatggaggtgacaggtgtcagggccgagtggaggtcctataccgaggctcctggggcaccgtgtgtgatgactactgggacaccaatgatgccaatgtggtttgcaggcagctgggctgtggctgggccatgtcagccccaggaaatgcccggtttggccagggttcaggacccattgtcctggatgatgtgcgctgctcaggacatgagtcctatctgtggagctgcccccacaatggctggctctcccacaactgtggccatcatgaagacgctggtgtcatctgctcagcttcccagtcccagccgacacccagcccagacacttggccaacctcacatgcatcaacagcaggatctgaatccagtttggccctgaggctggtgaatggaggtgacaggtgtcagggccgagtggaggtcctataccgaggctcctggggcaccgtgtgtgatgactactgggacaccaatgatgccaatgtggtttgcaggcagctgggctgtggctgggccacgtcagccccaggaaatgcccggtttggccagggttcaggacccattgtcctggatgatgtgcgctgctcaggacatgagtcctatctgtggagctgcccccacaatggctggctctcccacaactgtggccatcatgaagacgctggtgtcatctgctcagcttcccagtcccagccgacacccagcccagacacttggccaacctcacatgcatcaacagcaggatctgaatccagtttggccctgaggctggtgaatggaggtgacaggtgtcagggccgagtggaggtcctataccgaggctcctggggcaccgtgtgtgatgactactgggacaccaatgatgccaatgtggtttgcaggcagctgggctgtggctgggccacgtcagccccaggaaatgcccggtttggccagggttcaggacccattgtcctggatgatgtgcgctgctcaggacatgagtcctatctgtggagctgcccccacaatggctggctctcccacaactgtggccatcatgaagacgctggtgtcatctgctcagcttcccagtcccagccgacacccagcccagacacttggccaacctctcgtgcatcaacagcaggatctgaatccactttggccctgagactggtgaatggaggtgacaggtgtcgaggccgagtggaggtcctataccaaggctcctggggcaccgtgtgtgatgactactgggacaccaatgatgccaacgtggtctgcaggcagctgggctgtggctgggccatgtcagccccaggaaatgcccagtttggccagggctcaggacccattgtcctggatgatgtgcgctgctcaggacacgagtcttacctgtggagctgcccccacaatggctggctctcccacaactgtggccatcatgaagatgctggtgtcatctgctcagctgctcagtcccagtcaacgcccaggccagatacttggctgaccaccaacttaccggcattgacagtaggatctgaatccagtttggctctgaggctggtgaatggaggtgacaggtgtcgaggccgagtggaggtcctgtatcgaggctcctggggaaccgtgtgtgatgacagctgggacaccaatgatgccaatgtggtctgcaggcagctgggctgtggctgggccatgtcggccccaggaaatgcccggtttggccagggctcaggacccattgtcctggatgatgtgcgctgctcagggaatgagtcctacctgtggagctgcccccacaaaggctggctcacccacaactgtggccatcacgaagacgctggtgtcatctgctcagccacccaaataaattctactacgacagattggtggcatccaacaactacaaccactgcaagaccctcttcaaattgtggtggcttcttattctatgccagtgggacattctccagcccatcctaccctgcatactaccccaacaatgctaagtgtgtttgggaaatagaagtgaattctggttatcgcataaacctgggcttcagtaatctgaaattggaggcacaccataactgcagttttgattatgttgaaatctttgatggatcattgaatagcagtctcctgctggggaaaatctgtaatgataccaggcaaatatttacatcttcttacaaccgaatgaccattcactttcgaagtgacatcagtttccaaaacactggctttttggcttggtataactccttcccaagcgatgccaccttgaggttggtcaatttaaattcatcctatggtctatgtgccgggcgtgtagaaatttaccatggtggcacctgggggacagtttgtgatgactcctggaccattcaggaagctgaggtggtctgcagacagctagggtgtggacgtgcagtttcagcccttggaaatgcatattttggctctggctctggccccatcaccctggacgatgtagagtgctcagggacggaatccactctctggcagtgccggaaccgaggctggttctcccacaactgtaatcatcgtgaagatgctggtgtcatctgctcaggaaaccatctatcgacacctgctccttttctcaacatcacccgtccaaacacagattattcctgcggaggcttcctatcccaaccatcaggggacttttccagcccattctatcccgggaactatccaaacaatgccaagtgtgtgtgggacattgaggtgcaaaacaactaccgtgtgactgtgatcttcagagatgtccagcttgaaggtggctgcaactatgattatattgaagttttcgatggcccctaccgcagttcccctctcattgctcgagtttgtgatggggccagaggctccttcacttcttcctccaacttcatgtccattcgcttcatcagtgaccacagcatcacaaggagagggttccgggctgagtactactccagtccctccaatgacagcaccaacctgctctgtctgccaaatcacatgcaagccagtgtgagcaggagctatctccaatccttgggcttttctgccagtgaccttgtcatttccacctggaatggatactacgagtgtcggccccagataacgccgaacctggtgatattcacaattccctactcaggctgcggcaccttcaagcaggcagacaatgacaccatcgactattccaacttcctcacagcagctgtctcaggtggcatcatcaagaggaggacagacctccgtattcacgtcagctgcagaatgcttcagaacacctgggtcgacaccatgtacattgctaatgacaccatccacgttgctaataacaccatccaggtcgaggaagtccagtatggcaattttgacgtgaacatttccttttatacttcctcatctttcttgtatcctgtgaccagccgcccttactacgtggacctgaaccaggacttgtacgttcaggctgaaatcctccattctgatgctgtactgaccttgtttgtggacacctgcgtggcatcaccatactccaatgacttcacgtctttgacttatgatctaatccggagtggatgcgtgagggatgacacctacggaccctactcctcgccgtctcttcgcattgcccgcttccggttcagggccttccacttcctgaaccgcttcccctccgtgtacctgcgttgtaaaatggtggtgtgcagagcgtatgacccctcttcccgctgctaccgaggctgtgtgttgaggtcgaagagggatgtgggctcctaccaggaaaaggtggacgtcgtcctgggtcccatccagctgcagacccccccacgccgagaagaggagcctcggtaggtggtcgctctcagaccccactgtccaccggggcgcagacccctgactcggggacttgggatgttcctcttggtgtcatattccaactcagattgagccctacattgtgctgcacctggtcatacggagttgaatcagacctggttcccgcctcccccaaggctcatggtccttggaggacccgttgcagggcgaggtcaagagagttctgacctggatggcccatagacctgacgtcccagaatccatgcttctcatctgcaaaatgaaaatgtcaatacttacttcttagcactgttgagagggttacttacataaaggaattttggtgaaactgc

SEQ ID NO: 55847 - DNA, 7656 bp, Homo sapiens
tttatagcagcagcagaaatataccaccctagaggacacacctccttttagctaggtacctataaatgtccaggattttctattcaattgagaagaacccagcaaaatggggatctccacagtcatccttgaaatgtgtcttttatggggacaagttctatctacaggtgggtggatcccaaggactacagactacgcttcactgattccctcggaggtgcccttggatccaactgtagcagaaggttctccatttccctcggagtcgaccctggagtcaactgcagcagaaggttctccgatttccttggagtcaaccctggagtcaactgtagcagaaggttctctgattccctcagagtcaaccctggagtcaactgtagcagaaggatctgattctggtttggccctgaggctggtgaatggagatggcaggtgtcagggccgagtggagatcctataccgaggctcctggggcaccgtgtgtgatgacagctgggacaccaatgatgccaacgtggtctgtaggcagctgggttgtggctgggccatgtcagctccaggaaatgcctggtttggccagggctcaggacccattgccctggatgatgtgcgctgctcaggacacgaatcctacctgtggagctgcccccacaatggctggctctcccataactgtggccatggtgaagatgctggtgttatctgctcagctgcccagcctcagtcaacactcaggccagaaagttggcctgtcaggatatcaccacctgtacccacagaaggatctgaatccagtttggccctgaggctggtgaatggaggcgacaggtgtcgaggccgagtggaggtcctataccgaggctcctggggcaccgtgtgtgatgactactgggacaccaatgatgccaatgtggtctgcaggcagctgggctgtggctgggccatgtcagccccaggaaatgcccagtttggccagggctcaggacccattgtcctggatgatgtgcgctgctcaggacacgagtcctacctgtggagctgcccccacaatggctggctcacccacaactgtggccatagtgaagacgctggtgtcatctgctcagctccccagtcccggccgacacccagcccagatacttggccgacctcacatgcatcaacagcaggacctgaatccagtttggccctgaggctggtgaatggaggtgacaggtgtcagggccgagtggaggtcctataccgaggctcctggggcaccgtgtgtgatgatagctgggacaccagtgacgccaatgtggtctgccggcagctgggctgtggctgggccacgtcagccccaggaaatgcccggtttggccagggttcaggacccattgtcctggatgacgtgcgctgctcaggctatgagtcctacctgtggagctgcccccacaatggctggctctcccataactgtcagcacagtgaagacgctggtgtcatctgctcagacacgttgccgaccatcaccttacctgcatcgacagtaggatctgaatccagtttggccctgaggctggtgaatggaggtgacaggtgtcagggccgagtggaggtcctataccgaggctcctggggcaccgtgtgtgatgacagctgggacaccaatgatgccaatgtggtctgcaggcagctgggctgtggctgggccatgttggccccaggaaatgcccggtttggtcagggctcaggacccattgtcctggatgacgtgcgctgctcagggaatgagtcctacttgtggagctgcccccacaatggctggctctcccataactgtggccatagtgaagacgctggtgtcatctgctcaggacctgaatccagtttggccctgaggctggtgaatggaggtgacaggtgtcagggccgagtggaggtcctataccgaggctcttggggcaccgtgtgtgatgacagctgggacaccaatgatgccaatgtggtctgcaggcagctgggctgtggctgggccacgtcagccccaggaaatgcccggtttggtcagggctcaggacccattgtcctggatgatgtgcgctgctcaggacatgagtcctacctgtggagctgccccaacaatggctggctctcccacaactgtggccatcatgaagatgctggtgtcatctgctcagctgcccagtcccggtcgacgcccaggccagacacgttgtcgaccatcacgttacctccatcgacagtaggatctgaatccagtttgaccctgaggctggtgaatggaagtgacaggtgtcagggccgagtagaggtcctataccgaggctcctggggcaccgtgtgtgatgacagctgggataccaatgatgccaatgtggtctgcaggcagctgggctgtggctgggccacgtcggccccaggaaatgcccggtttggccagggctcaggacccattgttctggatgatgtgcgctgctcaggacacgagtcctacctgtggagctgcccccacaatggctggctctcccacaactgtggccatcatgaagatgctggtgtcatctgctcagtttcccagtcccggccgacacccagtccagatacttggccgacctcacatgcatcaacagcaggatctgaatccagtttggccctgaggctggtgaatggaggtgacaggtgtcagggccgagtggaggtcctataccgaggctcctggggcaccgtgtgtgatgatagctgggacaccagtgacgccaatgtggtctgccggcagctgggctgtggctgggccacgtcagccccaggaaatgcccggtttggccagggttcaggacccattgtcctggatgacgtgcgctgctcaggctatgagtcctacctgtggagctgcccccacaatggctggctctcccataactgtcagcacagtgaagacgctggtgtcatctgctcagctgcccactcctggtcgacgcccagtccagacacattgccgaccatcaccttgcctgcatcgacagtaggatctgaatccagtttggccctgaggctggtgaatggaggtgacaggtgtcagggccgagtggaggtcctataccaaggctcctggggcaccgtgtgcgatgacagctgggacaccaatgatgccaatgtcgtctgcaggcaactgggctgtggctgggccatgtcagccccaggaaatgcccggtttggtcagggctcaggacccattgtcctggatgatgtgcgctgctcaggacacgagtcttacctgtggagctgcccccacaatggctggctctcccacaactgtggccatagtgaagacgctggtgtcatctgctcagcttcccagtcccggccaacacctagtccagacacttggccaacctcacatgcatcaacagcaggatctgaatccagtttggccctgaggctggtgaatggaggtgacaggtgtcagggccgagtggaggtcctataccgaggctcctggggcaccgtgtgtgatgactactgggacaccaatgatgccaatgtggtttgcaggcagctgggctgtggctgggccatgtcagccccaggaaatgcccggtttggccagggttcaggacccattgtcctggatgatgtgcgctgctcaggacatgagtcctatctgtggagctgcccccacaatggctggctctcccacaactgtggccatcatgaagacgctggtgtcatctgctcagcttcccagtcccagccgacacccagcccagacacttggccaacctcacatgcatcaacagcaggatctgaatccagtttggccctgaggctggtgaatggaggtgacaggtgtcagggccgagtggaggtcctataccgaggctcctggggcaccgtgtgtgatgactactgggacaccaatgatgccaatgtggtttgcaggcagctgggctgtggctgggccacgtcagccccaggaaatgcccggtttggccagggttcaggacccattgtcctggatgatgtgcgctgctcaggacatgagtcctatctgtggagctgcccccacaatggctggctctcccacaactgtggccatcatgaagacgctggtgtcatctgctcagcttcccagtcccagccgacacccagcccagacacttggccaacctcacatgcatcaacagcaggatctgaatccagtttggccctgaggctggtgaatggaggtgacaggtgtcagggccgagtggaggtcctataccgaggctcctggggcaccgtgtgtgatgactactgggacaccaatgatgccaatgtggtttgcaggcagctgggctgtggctgggccacgtcagccccaggaaatgcccggtttggccagggttcaggacccattgtcctggatgatgtgcgctgctcaggacatgagtcctatctgtggagctgcccccacaatggctggctctcccacaactgtggccatcatgaagacgctggtgtcatctgctcagcttcccagtcccagccgacacccagcccagacacttggccaacctctcgtgcatcaacagcaggatctgaatccactttggccctgagactggtgaatggaggtgacaggtgtcgaggccgagtggaggtcctataccaaggctcctggggcaccgtgtgtgatgactactgggacaccaatgatgccaacgtggtctgcaggcagctgggctgtggctgggccatgtcagccccaggaaatgcccagtttggccagggctcaggacccattgtcctggatgatgtgcgctgctcaggacacgagtcttacctgtggagctgcccccacaatggctggctctcccacaactgtggccatcatgaagatgctggtgtcatctgctcagctgctcagtcccagtcaacgcccaggccagatacttggctgaccaccaacttaccggcattgacagtaggatctgaatccagtttggctctgaggctggtgaatggaggtgacaggtgtcgaggccgagtggaggtcctgtatcgaggctcctggggaaccgtgtgtgatgacagctgggacaccaatgatgccaatgtggtctgcaggcagctgggctgtggctgggccatgtcggccccaggaaatgcccggtttggccagggctcaggacccattgtcctggatgatgtgcgctgctcagggaatgagtcctacctgtggagctgcccccacaaaggctggctcacccacaactgtggccatcacgaagacgctggtgtcatctgctcagccacccaaataaattctactacgacagattggtggcatccaacaactacaaccactgcaagaccctcttcaaattgtggtggcttcttattctatgccagtgggacattctccagcccatcctaccctgcatactaccccaacaatgctaagtgtgtttgggaaatagaagtgaattctggttatcgcataaacctgggcttcagtaatctgaaattggaggcacaccataactgcagttttgattatgttgaaatctttgatggatcattgaatagcagtctcctgctggggaaaatctgtaatgataccaggcaaatatttacatcttcttacaaccgaatgaccattcactttcgaagtgacatcagtttccaaaacactggctttttggcttggtataactccttcccaagcgatgccaccttgaggttggtcaatttaaattcatcctatggtctatgtgccgggcgtgtagaaatttaccatggtggcacctgggggacagtttgtgatgactcctggaccattcaggaagctgaggtggtctgcagacagctagggtgtggacgtgcagtttcagcccttggaaatgcatattttggctctggctctggccccatcaccctggacgatgtagagtgctcagggacggaatccactctctggcagtgccggaaccgaggctggttctcccacaactgtaatcatcgtgaagatgctggtgtcatctgctcaggaaaccatctatcgacacctgctccttttctcaacatcacccgtccaaacacagattattcctgcggaggcttcctatcccaaccatcaggggacttttccagcccattctatcccgggaactatccaaacaatgccaagtgtgtgtgggacattgaggtgcaaaacaactaccgtgtgactgtgatcttcagagatgtccagcttgaaggtggctgcaactatgattatattgaagttttcgatggcccctaccgcagttcccctctcattgctcgagtttgtgatggggccagaggctccttcacttcttcctccaacttcatgtccattcgcttcatcagtgaccacagcatcacaaggagagggttccgggctgagtactactccagtccctccaatgacagcaccaacctgctctgtctgccaaatcacatgcaagccagtgtgagcaggagctatctccaatccttgggcttttctgccagtgaccttgtcatttccacctggaatggatactacgagtgtcggccccagataacgccgaacctggtgatattcacaattccctactcaggctgcggcaccttcaagcaggcagacaatgacaccatcgactattccaacttcctcacagcagctgtctcaggtggcatcatcaagaggaggacagacctccgtattcacgtcagctgcagaatgcttcagaacacctgggtcgacaccatgtacattgctaatgacaccatccacgttgctaataacaccatccaggtcgaggaagtccagtatggcaattttgacgtgaacatttccttttatacttcctcatctttcttgtatcctgtgaccagccgcccttactacgtggacctgaaccaggacttgtacgttcaggctgaaatcctccattctgatgctgtactgaccttgtttgtggacacctgcgtggcatcaccatactccaatgacttcacgtctttgacttatgatctaatccggagtggatgcgtgagggatgacacctacggaccctactcctcgccgtctcttcgcattgcccgcttccggttcagggccttccacttcctgaaccgcttcccctccgtgtacctgcgttgtaaaatggtggtgtgcagagcgtatgacccctcttcccgctgctaccgaggctgtgtgttgaggtcgaagagggatgtgggctcctaccaggaaaaggtggacgtcgtcctgggtcccatccagctgcagacccccccacgccgagaagaggagcctcggtaggtggtcgctctcagaccccactgtccaccggggcgcagacccctgactcggggacttgggatgttcctcttggtgtcatattccaactcagattgagccctacattgtgctgcacctggtcatacggagttgaatcagacctggttcccgcctcccccaaggctcatggtccttggaggacccgttgcagggcgaggtcaagagagttctgacctggatggcccatagacctgacgtcccagaatccatgcttctcatctgcaaaatgaaaatgtcaatacttacttcttagcactgttgagagggttacttacataaaggaattttggtgaaactgc

SEQ ID NO: 55848 - DNA, 5802 bp, Homo sapiens
tttatagcagcagcagaaatataccaccctagaggacacacctccttttagctaggtacctataaatgtccaggattttctattcaattgagaagaacccagcaaaatggggatctccacagtcatccttgaaatgtgtcttttatggggacaagttctatctacaggtgggtggatcccaaggactacagactacgcttcactgattccctcggaggtgcccttggatccaactgtagcagaaggttctccatttccctcggagtcgaccctggagtcaactgcagcagaaggttctccgatttccttggagtcaaccctggagtcaactgtagcagaaggttctctgattccctcagagtcaaccctggagtcaactgtagcagaaggatctgattctggtttggccctgaggctggtgaatggagatggcaggtgtcagggccgagtggagatcctataccgaggctcctggggcaccgtgtgtgatgacagctgggacaccaatgatgccaacgtggtctgtaggcagctgggttgtggctgggccatgtcagctccaggaaatgcctggtttggccagggctcaggacccattgccctggatgatgtgcgctgctcaggacacgaatcctacctgtggagctgcccccacaatggctggctctcccataactgtggccatggtgaagatgctggtgttatctgctcagctgcccagcctcagtcaacactcaggccagaaagttggcctgtcaggatatcaccacctgtacccacagaaggatctgaatccagtttggccctgaggctggtgaatggaggcgacaggtgtcgaggccgagtggaggtcctataccgaggctcctggggcaccgtgtgtgatgactactgggacaccaatgatgccaatgtggtctgcaggcagctgggctgtggctgggccatgtcagccccaggaaatgcccagtttggccagggctcaggacccattgtcctggatgatgtgcgctgctcaggacacgagtcctacctgtggagctgcccccacaatggctggctcacccacaactgtggccatagtgaagacgctggtgtcatctgctcagctccccagtcccggccgacacccagcccagatacttggccgacctcacatgcatcaacagcaggacctgaatccagtttggccctgaggctggtgaatggaggtgacaggtgtcagggccgagtggaggtcctataccgaggctcctggggcaccgtgtgtgatgatagctgggacaccagtgacgccaatgtggtctgccggcagctgggctgtggctgggccacgtcagccccaggaaatgcccggtttggccagggttcaggacccattgtcctggatgacgtgcgctgctcaggctatgagtcctacctgtggagctgcccccacaatggctggctctcccataactgtcagcacagtgaagacgctggtgtcatctgctcagctgcccactcctggtcgacgcccagtccagacacattgccgaccatcaccttgcctgcatcgacagtaggatctgaatccagtttggccctgaggctggtgaatggaggtgacaggtgtcagggccgagtggaggtcctataccaaggctcctggggcaccgtgtgcgatgacagctgggacaccaatgatgccaatgtcgtctgcaggcaactgggctgtggctgggccatgtcagccccaggaaatgcccggtttggtcagggctcaggacccattgtcctggatgatgtgcgctgctcaggacacgagtcttacctgtggagctgcccccacaatggctggctctcccacaactgtggccatagtgaagacgctggtgtcatctgctcagcttcccagtcccggccaacacctagtccagacacttggccaacctcacatgcatcaacagcaggatctgaatccagtttggccctgaggctggtgaatggaggtgacaggtgtcagggccgagtggaggtcctataccgaggctcctggggcaccgtgtgtgatgactactgggacaccaatgatgccaatgtggtttgcaggcagctgggctgtggctgggccatgtcagccccaggaaatgcccggtttggccagggttcaggacccattgtcctggatgatgtgcgctgctcaggacatgagtcctatctgtggagctgcccccacaatggctggctctcccacaactgtggccatcatgaagacgctggtgtcatctgctcagcttcccagtcccagccgacacccagcccagacacttggccaacctcacatgcatcaacagcaggatctgaatccagtttggccctgaggctggtgaatggaggtgacaggtgtcagggccgagtggaggtcctataccgaggctcctggggcaccgtgtgtgatgactactgggacaccaatgatgccaatgtggtttgcaggcagctgggctgtggctgggccacgtcagccccaggaaatgcccggtttggccagggttcaggacccattgtcctggatgatgtgcgctgctcaggacatgagtcctatctgtggagctgcccccacaatggctggctctcccacaactgtggccatcatgaagacgctggtgtcatctgctcagcttcccagtcccagccgacacccagcccagacacttggccaacctctcgtgcatcaacagcaggatctgaatccactttggccctgagactggtgaatggaggtgacaggtgtcgaggccgagtggaggtcctataccaaggctcctggggcaccgtgtgtgatgactactgggacaccaatgatgccaacgtggtctgcaggcagctgggctgtggctgggccatgtcagccccaggaaatgcccagtttggccagggctcaggacccattgtcctggatgatgtgcgctgctcaggacacgagtcttacctgtggagctgcccccacaatggctggctctcccacaactgtggccatcatgaagatgctggtgtcatctgctcagctgctcagtcccagtcaacgcccaggccagatacttggctgaccaccaacttaccggcattgacagtaggatctgaatccagtttggctctgaggctggtgaatggaggtgacaggtgtcgaggccgagtggaggtcctgtatcgaggctcctggggaaccgtgtgtgatgacagctgggacaccaatgatgccaatgtggtctgcaggcagctgggctgtggctgggccatgtcggccccaggaaatgcccggtttggccagggctcaggacccattgtcctggatgatgtgcgctgctcagggaatgagtcctacctgtggagctgcccccacaaaggctggctcacccacaactgtggccatcacgaagacgctggtgtcatctgctcagccacccaaataaattctactacgacagattggtggcatccaacaactacaaccactgcaagaccctcttcaaattgtggtggcttcttattctatgccagtgggacattctccagcccatcctaccctgcatactaccccaacaatgctaagtgtgtttgggaaatagaagtgaattctggttatcgcataaacctgggcttcagtaatctgaaattggaggcacaccataactgcagttttgattatgttgaaatctttgatggatcattgaatagcagtctcctgctggggaaaatctgtaatgataccaggcaaatatttacatcttcttacaaccgaatgaccattcactttcgaagtgacatcagtttccaaaacactggctttttggcttggtataactccttcccaagcgatgccaccttgaggttggtcaatttaaattcatcctatggtctatgtgccgggcgtgtagaaatttaccatggtggcacctgggggacagtttgtgatgactcctggaccattcaggaagctgaggtggtctgcagacagctagggtgtggacgtgcagtttcagcccttggaaatgcatattttggctctggctctggccccatcaccctggacgatgtagagtgctcagggacggaatccactctctggcagtgccggaaccgaggctggttctcccacaactgtaatcatcgtgaagatgctggtgtcatctgctcaggaaaccatctatcgacacctgctccttttctcaacatcacccgtccaaacacagattattcctgcggaggcttcctatcccaaccatcaggggacttttccagcccattctatcccgggaactatccaaacaatgccaagtgtgtgtgggacattgaggtgcaaaacaactaccgtgtgactgtgatcttcagagatgtccagcttgaaggtggctgcaactatgattatattgaagttttcgatggcccctaccgcagttcccctctcattgctcgagtttgtgatggggccagaggctccttcacttcttcctccaacttcatgtccattcgcttcatcagtgaccacagcatcacaaggagagggttccgggctgagtactactccagtccctccaatgacagcaccaacctgctctgtctgccaaatcacatgcaagccagtgtgagcaggagctatctccaatccttgggcttttctgccagtgaccttgtcatttccacctggaatggatactacgagtgtcggccccagataacgccgaacctggtgatattcacaattccctactcaggctgcggcaccttcaagcaggcagacaatgacaccatcgactattccaacttcctcacagcagctgtctcaggtggcatcatcaagaggaggacagacctccgtattcacgtcagctgcagaatgcttcagaacacctgggtcgacaccatgtacattgctaatgacaccatccacgttgctaataacaccatccaggtcgaggaagtccagtatggcaattttgacgtgaacatttccttttatacttcctcatctttcttgtatcctgtgaccagccgcccttactacgtggacctgaaccaggacttgtacgttcaggctgaaatcctccattctgatgctgtactgaccttgtttgtggacacctgcgtggcatcaccatactccaatgacttcacgtctttgacttatgatctaatccggagtggatgcgtgagggatgacacctacggaccctactcctcgccgtctcttcgcattgcccgcttccggttcagggccttccacttcctgaaccgcttcccctccgtgtacctgcgttgtaaaatggtggtgtgcagagcgtatgacccctcttcccgctgctaccgaggctgtgtgttgaggtcgaagagggatgtgggctcctaccaggaaaaggtggacgtcgtcctgggtcccatccagctgcagacccccccacgccgagaagaggagcctcggtaggtggtcgctctcagaccccactgtccaccggggcgcagacccctgactcggggacttgggatgttcctcttggtgtcatattccaactcagattgagccctacattgtgctgcacctggtcatacggagttgaatcagacctggttcccgcctcccccaaggctcatggtccttggaggacccgttgcagggcgaggtcaagagagttctgacctggatggcccatagacctgacgtcccagaatccatgcttctcatctgcaaaatgaaaatgtcaatacttacttcttagcactgttgagagggttacttacataaaggaattttggtgaaactgc

SEQ ID NO: 55849 - DNA, 7168 bp, Homo sapiens
tttatagcagcagcagaaatataccaccctagaggacacacctccttttagctaggtacctataaatgtccaggattttctattcaattgagaagaacccagcaaaatggggatctccacagtcatccttgaaatgtgtcttttatggggacaagttctatctacaggtgggtggatcccaaggactacagactacgcttcactgattccctcggaggtgcccttggatccaactgtagcagaaggttctccatttccctcggagtcgaccctggagtcaactgcagcagaaggttctccgatttccttggagtcaaccctggagtcaactgtagcagaaggttctctgattccctcagagtcaaccctggagtcaactgtagcagaaggatctgattctggtttggccctgaggctggtgaatggagatggcaggtgtcagggccgagtggagatcctataccgaggctcctggggcaccgtgtgtgatgacagctgggacaccaatgatgccaacgtggtctgtaggcagctgggttgtggctgggccatgtcagctccaggaaatgcctggtttggccagggctcaggacccattgccctggatgatgtgcgctgctcaggacacgaatcctacctgtggagctgcccccacaatggctggctctcccataactgtggccatggtgaagatgctggtgttatctgctcagctgcccagcctcagtcaacactcaggccagaaagttggcctgtcaggatatcaccacctgtacccacagaaggatctgaatccagtttggccctgaggctggtgaatggaggcgacaggtgtcgaggccgagtggaggtcctataccgaggctcctggggcaccgtgtgtgatgactactgggacaccaatgatgccaatgtggtctgcaggcagctgggctgtggctgggccatgtcagccccaggaaatgcccagtttggccagggctcaggacccattgtcctggatgatgtgcgctgctcaggacacgagtcctacctgtggagctgcccccacaatggctggctcacccacaactgtggccatagtgaagacgctggtgtcatctgctcagctccccagtcccggccgacacccagcccagatacttggccgacctcacatgcatcaacagcaggacctgaatccagtttggccctgaggctggtgaatggaggtgacaggtgtcagggccgagtggaggtcctataccgaggctcctggggcaccgtgtgtgatgatagctgggacaccagtgacgccaatgtggtctgccggcagctgggctgtggctgggccacgtcagccccaggaaatgcccggtttggccagggttcaggacccattgtcctggatgacgtgcgctgctcaggctatgagtcctacctgtggagctgcccccacaatggctggctctcccataactgtcagcacagtgaagacgctggtgtcatctgctcagctgcccactcctggtcgacgcccagtccagacacgttgccgaccatcaccttacctgcatcgacagtaggatctgaatccagtttggccctgaggctggtgaatggaggtgacaggtgtcagggccgagtggaggtcctataccgaggctcctggggcaccgtgtgtgatgacagctgggacaccaatgatgccaatgtggtctgcaggcagctgggctgtggctgggccatgttggccccaggaaatgcccggtttggtcagggctcaggacccattgtcctggatgacgtgcgctgctcagggaatgagtcctacttgtggagctgcccccacaatggctggctctcccataactgtggccatagtgaagacgctggtgtcatctgctcaggacctgaatccagtttggccctgaggctggtgaatggaggtgacaggtgtcagggccgagtggaggtcctataccgaggctcttggggcaccgtgtgtgatgacagctgggacaccaatgatgccaatgtggtctgcaggcagctgggctgtggctgggccacgtcagccccaggaaatgcccggtttggtcagggctcaggacccattgtcctggatgatgtgcgctgctcaggacatgagtcctacctgtggagctgccccaacaatggctggctctcccacaactgtggccatcatgaagatgctggtgtcatctgctcagctgcccagtcccggtcgacgcccaggccagacacgttgtcgaccatcacgttacctccatcgacagtaggatctgaatccagtttgaccctgaggctggtgaatggaagtgacaggtgtcagggccgagtagaggtcctataccgaggctcctggggcaccgtgtgtgatgacagctgggataccaatgatgccaatgtggtctgcaggcagctgggctgtggctgggccacgtcggccccaggaaatgcccggtttggccagggctcaggacccattgttctggatgatgtgcgctgctcaggacacgagtcctacctgtggagctgcccccacaatggctggctctcccacaactgtggccatcatgaagatgctggtgtcatctgctcagtttcccagtcccggccgacacccagtccagatacttggccgacctcacatgcatcaacagcaggatctgaatccagtttggccctgaggctggtgaatggaggtgacaggtgtcagggccgagtggaggtcctataccgaggctcctggggcaccgtgtgtgatgatagctgggacaccagtgacgccaatgtggtctgccggcagctgggctgtggctgggccacgtcagccccaggaaatgcccggtttggccagggttcaggacccattgtcctggatgacgtgcgctgctcaggctatgagtcctacctgtggagctgcccccacaatggctggctctcccataactgtcagcacagtgaagacgctggtgtcatctgctcagctgcccactcctggtcgacgcccagtccagacacattgccgaccatcaccttgcctgcatcgacagtaggatctgaatccagtttggccctgaggctggtgaatggaggtgacaggtgtcagggccgagtggaggtcctataccaaggctcctggggcaccgtgtgcgatgacagctgggacaccaatgatgccaatgtcgtctgcaggcaactgggctgtggctgggccatgtcagccccaggaaatgcccggtttggtcagggctcaggacccattgtcctggatgatgtgcgctgctcaggacacgagtcttacctgtggagctgcccccacaatggctggctctcccacaactgtggccatagtgaagacgctggtgtcatctgctcagcttcccagtcccggccaacacctagtccagacacttggccaacctcacatgcatcaacagcaggatctgaatccagtttggccctgaggctggtgaatggaggtgacaggtgtcagggccgagtggaggtcctataccgaggctcctggggcaccgtgtgtgatgactactgggacaccaatgatgccaatgtggtttgcaggcagctgggctgtggctgggccatgtcagccccaggaaatgcccggtttggccagggttcaggacccattgtcctggatgatgtgcgctgctcaggacatgagtcctatctgtggagctgcccccacaatggctggctctcccacaactgtggccatcatgaagacgctggtgtcatctgctcagcttcccagtcccagccgacacccagcccagacacttggccaacctcacatgcatcaacagcaggatctgaatccagtttggccctgaggctggtgaatggaggtgacaggtgtcagggccgagtggaggtcctataccgaggctcctggggcaccgtgtgtgatgactactgggacaccaatgatgccaatgtggtttgcaggcagctgggctgtggctgggccacgtcagccccaggaaatgcccggtttggccagggttcaggacccattgtcctggatgatgtgcgctgctcaggacatgagtcctatctgtggagctgcccccacaatggctggctctcccacaactgtggccatcatgaagacgctggtgtcatctgctcagcttcccagtcccagccgacacccagcccagacacttggccaacctcacatgcatcaacagcaggatctgaatccagtttggccctgaggctggtgaatggaggtgacaggtgtcagggccgagtggaggtcctataccgaggctcctggggcaccgtgtgtgatgactactgggacaccaatgatgccaatgtggtttgcaggcagctgggctgtggctgggccacgtcagccccaggaaatgcccggtttggccagggttcaggacccattgtcctggatgatgtgcgctgctcaggacatgagtcctatctgtggagctgcccccacaatggctggctctcccacaactgtggccatcatgaagacgctggtgtcatctgctcagcttcccagtcccagccgacacccagcccagacacttggccaacctctcgtgcatcaacagcaggatctgaatccactttggccctgagactggtgaatggaggtgacaggtgtcgaggccgagtggaggtcctataccaaggctcctggggcaccgtgtgtgatgactactgggacaccaatgatgccaacgtggtctgcaggcagctgggctgtggctgggccatgtcagccccaggaaatgcccagtttggccagggctcaggacccattgtcctggatgatgtgcgctgctcaggacacgagtcttacctgtggagctgcccccacaatggctggctctcccacaactgtggccatcatgaagatgctggtgtcatctgctcagctgctcagtcccagtcaacgcccaggccagatacttggctgaccaccaacttaccggcattgacagtaggatctgaatccagtttggctctgaggctggtgaatggaggtgacaggtgtcgaggccgagtggaggtcctgtatcgaggctcctggggaaccgtgtgtgatgacagctgggacaccaatgatgccaatgtggtctgcaggcagctgggctgtggctgggccatgtcggccccaggaaatgcccggtttggccagggctcaggacccattgtcctggatgatgtgcgctgctcagggaatgagtcctacctgtggagctgcccccacaaaggctggctcacccacaactgtggccatcacgaagacgctggtgtcatctgctcagccacccaaataaattctactacgacagattggtggcatccaacaactacaaccactgcaagaccctcttcaaattgtggtggcttcttattctatgccagtgggacattctccagcccatcctaccctgcatactaccccaacaatgctaagtgtgtttgggaaatagaagtgaattctggttatcgcataaacctgggcttcagtaatctgaaattggaggcacaccataactgcagttttgattatgttgaaatctttgatggatcattgaatagcagtctcctgctggggaaaatctgtaatgataccaggcaaatatttacatcttcttacaaccgaatgaccattcactttcgaagtgacatcagtttccaaaacactggctttttggcttggtataactccttcccaagcgatgccaccttgaggttggtcaatttaaattcatcctatggtctatgtgccgggcgtgtagaaatttaccatggtggcacctgggggacagtttgtgatgactcctggaccattcaggaagctgaggtggtctgcagacagctagggtgtggacgtgcagtttcagcccttggaaatgcatattttggctctggctctggccccatcaccctggacgatgtagagtgctcagggacggaatccactctctggcagtgccggaaccgaggctggttctcccacaactgtaatcatcgtgaagatgctggtgtcatctgctcaggaaaccatctatcgacacctgctccttttctcaacatcacccgtccaaacacagattattcctgcggaggcttcctatcccaaccatcaggggacttttccagcccattctatcccgggaactatccaaacaatgccaagtgtgtgtgggacattgaggtgcaaaacaactaccgtgtgactgtgatcttcagagatgtccagcttgaaggtggctgcaactatgattatattgaagttttcgatggcccctaccgcagttcccctctcattgctcgagtttgtgatggggccagaggctccttcacttcttcctccaacttcatgtccattcgcttcatcagtgaccacagcatcacaaggagagggttccgggctgagtactactccagtccctccaatgacagcaccaacctgctctgtctgccaaatcacatgcaagccagtgtgagcaggagctatctccaatccttgggcttttctgccagtgaccttgtcatttccacctggaatggatactacgagtgtcggccccagataacgccgaacctggtgatattcacaattccctactcaggctgcggcaccttcaagcaggcagacaatgacaccatcgactattccaacttcctcacagcagctgtctcaggtggcatcatcaagaggaggacagacctccgtattcacgtcagctgcagaatgcttcagaacacctgggtcgacaccatgtacattgctaatgacaccatccacgttgctaataacaccatccaggtcgaggaagtccagtatggcaattttgacgtgaacatttccttttatacttcctcatctttcttgtatcctgtgacactcagattgagccctacattgtgctgcacctggtcatacggagttgaatcagacctggttcccgcctcccccaaggctcatggtccttggaggacccgttgcagggcgaggtcaagagagttctgacctggatggcccatagacctgacgtcccagaatccatgcttctcatctgcaaaatgaaaatgtcaatacttacttcttagcactgttgagagggttacttacataaaggaattttggtgaaactgc

SEQ ID NO: 55850 - DNA, 7107 bp, Homo sapiens
tttatagcagcagcagaaatataccaccctagaggacacacctccttttagctaggtacctataaatgtccaggattttctattcaattgagaagaacccagcaaaatggggatctccacagtcatccttgaaatgtgtcttttatggggacaagttctatctacaggtgggtggatcccaaggactacagactacgcttcactgattccctcggaggtgcccttggatccaactgtagcagaaggttctccatttccctcggagtcgaccctggagtcaactgcagcagaaggttctccgatttccttggagtcaaccctggagtcaactgtagcagaaggttctctgattccctcagagtcaaccctggagtcaactgtagcagaaggatctgattctggtttggccctgaggctggtgaatggagatggcaggtgtcagggccgagtggagatcctataccgaggctcctggggcaccgtgtgtgatgacagctgggacaccaatgatgccaacgtggtctgtaggcagctgggttgtggctgggccatgtcagctccaggaaatgcctggtttggccagggctcaggacccattgccctggatgatgtgcgctgctcaggacacgaatcctacctgtggagctgcccccacaatggctggctctcccataactgtggccatggtgaagatgctggtgttatctgctcagctgcccagcctcagtcaacactcaggccagaaagttggcctgtcaggatatcaccacctgtacccacagaaggatctgaatccagtttggccctgaggctggtgaatggaggcgacaggtgtcgaggccgagtggaggtcctataccgaggctcctggggcaccgtgtgtgatgactactgggacaccaatgatgccaatgtggtctgcaggcagctgggctgtggctgggccatgtcagccccaggaaatgcccagtttggccagggctcaggacccattgtcctggatgatgtgcgctgctcaggacacgagtcctacctgtggagctgcccccacaatggctggctcacccacaactgtggccatagtgaagacgctggtgtcatctgctcagctccccagtcccggccgacacccagcccagatacttggccgacctcacatgcatcaacagcaggacctgaatccagtttggccctgaggctggtgaatggaggtgacaggtgtcagggccgagtggaggtcctataccgaggctcctggggcaccgtgtgtgatgatagctgggacaccagtgacgccaatgtggtctgccggcagctgggctgtggctgggccacgtcagccccaggaaatgcccggtttggccagggttcaggacccattgtcctggatgacgtgcgctgctcaggctatgagtcctacctgtggagctgcccccacaatggctggctctcccataactgtcagcacagtgaagacgctggtgtcatctgctcagctgcccactcctggtcgacgcccagtccagacacgttgccgaccatcaccttacctgcatcgacagtaggatctgaatccagtttggccctgaggctggtgaatggaggtgacaggtgtcagggccgagtggaggtcctataccgaggctcctggggcaccgtgtgtgatgacagctgggacaccaatgatgccaatgtggtctgcaggcagctgggctgtggctgggccatgttggccccaggaaatgcccggtttggtcagggctcaggacccattgtcctggatgacgtgcgctgctcagggaatgagtcctacttgtggagctgcccccacaatggctggctctcccataactgtggccatagtgaagacgctggtgtcatctgctcaggacctgaatccagtttggccctgaggctggtgaatggaggtgacaggtgtcagggccgagtggaggtcctataccgaggctcttggggcaccgtgtgtgatgacagctgggacaccaatgatgccaatgtggtctgcaggcagctgggctgtggctgggccacgtcagccccaggaaatgcccggtttggtcagggctcaggacccattgtcctggatgatgtgcgctgctcaggacatgagtcctacctgtggagctgccccaacaatggctggctctcccacaactgtggccatcatgaagatgctggtgtcatctgctcagctgcccagtcccggtcgacgcccaggccagacacgttgtcgaccatcacgttacctccatcgacagtaggatctgaatccagtttgaccctgaggctggtgaatggaagtgacaggtgtcagggccgagtagaggtcctataccgaggctcctggggcaccgtgtgtgatgacagctgggataccaatgatgccaatgtggtctgcaggcagctgggctgtggctgggccacgtcggccccaggaaatgcccggtttggccagggctcaggacccattgttctggatgatgtgcgctgctcaggacacgagtcctacctgtggagctgcccccacaatggctggctctcccacaactgtggccatcatgaagatgctggtgtcatctgctcagtttcccagtcccggccgacacccagtccagatacttggccgacctcacatgcatcaacagcaggatctgaatccagtttggccctgaggctggtgaatggaggtgacaggtgtcagggccgagtggaggtcctataccgaggctcctggggcaccgtgtgtgatgatagctgggacaccagtgacgccaatgtggtctgccggcagctgggctgtggctgggccacgtcagccccaggaaatgcccggtttggccagggttcaggacccattgtcctggatgacgtgcgctgctcaggctatgagtcctacctgtggagctgcccccacaatggctggctctcccataactgtcagcacagtgaagacgctggtgtcatctgctcagctgcccactcctggtcgacgcccagtccagacacattgccgaccatcaccttgcctgcatcgacagtaggatctgaatccagtttggccctgaggctggtgaatggaggtgacaggtgtcagggccgagtggaggtcctataccaaggctcctggggcaccgtgtgcgatgacagctgggacaccaatgatgccaatgtcgtctgcaggcaactgggctgtggctgggccatgtcagccccaggaaatgcccggtttggtcagggctcaggacccattgtcctggatgatgtgcgctgctcaggacacgagtcttacctgtggagctgcccccacaatggctggctctcccacaactgtggccatagtgaagacgctggtgtcatctgctcagcttcccagtcccggccaacacctagtccagacacttggccaacctcacatgcatcaacagcaggatctgaatccagtttggccctgaggctggtgaatggaggtgacaggtgtcagggccgagtggaggtcctataccgaggctcctggggcaccgtgtgtgatgactactgggacaccaatgatgccaatgtggtttgcaggcagctgggctgtggctgggccatgtcagccccaggaaatgcccggtttggccagggttcaggacccattgtcctggatgatgtgcgctgctcaggacatgagtcctatctgtggagctgcccccacaatggctggctctcccacaactgtggccatcatgaagacgctggtgtcatctgctcagcttcccagtcccagccgacacccagcccagacacttggccaacctcacatgcatcaacagcaggatctgaatccagtttggccctgaggctggtgaatggaggtgacaggtgtcagggccgagtggaggtcctataccgaggctcctggggcaccgtgtgtgatgactactgggacaccaatgatgccaatgtggtttgcaggcagctgggctgtggctgggccacgtcagccccaggaaatgcccggtttggccagggttcaggacccattgtcctggatgatgtgcgctgctcaggacatgagtcctatctgtggagctgcccccacaatggctggctctcccacaactgtggccatcatgaagacgctggtgtcatctgctcagcttcccagtcccagccgacacccagcccagacacttggccaacctcacatgcatcaacagcaggatctgaatccagtttggccctgaggctggtgaatggaggtgacaggtgtcagggccgagtggaggtcctataccgaggctcctggggcaccgtgtgtgatgactactgggacaccaatgatgccaatgtggtttgcaggcagctgggctgtggctgggccacgtcagccccaggaaatgcccggtttggccagggttcaggacccattgtcctggatgatgtgcgctgctcaggacatgagtcctatctgtggagctgcccccacaatggctggctctcccacaactgtggccatcatgaagacgctggtgtcatctgctcagcttcccagtcccagccgacacccagcccagacacttggccaacctctcgtgcatcaacagcaggatctgaatccactttggccctgagactggtgaatggaggtgacaggtgtcgaggccgagtggaggtcctataccaaggctcctggggcaccgtgtgtgatgactactgggacaccaatgatgccaacgtggtctgcaggcagctgggctgtggctgggccatgtcagccccaggaaatgcccagtttggccagggctcaggacccattgtcctggatgatgtgcgctgctcaggacacgagtcttacctgtggagctgcccccacaatggctggctctcccacaactgtggccatcatgaagatgctggtgtcatctgctcagctgctcagtcccagtcaacgcccaggccagatacttggctgaccaccaacttaccggcattgacagtaggatctgaatccagtttggctctgaggctggtgaatggaggtgacaggtgtcgaggccgagtggaggtcctgtatcgaggctcctggggaaccgtgtgtgatgacagctgggacaccaatgatgccaatgtggtctgcaggcagctgggctgtggctgggccatgtcggccccaggaaatgcccggtttggccagggctcaggacccattgtcctggatgatgtgcgctgctcagggaatgagtcctacctgtggagctgcccccacaaaggctggctcacccacaactgtggccatcacgaagacgctggtgtcatctgctcagccacccaaataaattctactacgacagattggtggcatccaacaactacaaccactgcaagaccctcttcaaattgtggtggcttcttattctatgccagtgggacattctccagcccatcctaccctgcatactaccccaacaatgctaagtgtgtttgggaaatagaagtgaattctggttatcgcataaacctgggcttcagtaatctgaaattggaggcacaccataactgcagttttgattatgttgaaatctttgatggatcattgaatagcagtctcctgctggggaaaatctgtaatgataccaggcaaatatttacatcttcttacaaccgaatgaccattcactttcgaagtgacatcagtttccaaaacactggctttttggcttggtataactccttcccaagcgatgccaccttgaggttggtcaatttaaattcatcctatggtctatgtgccgggcgtgtagaaatttaccatggtggcacctgggggacagtttgtgatgactcctggaccattcaggaagctgaggtggtctgcagacagctagggtgtggacgtgcagtttcagcccttggaaatgcatattttggctctggctctggccccatcaccctggacgatgtagagtgctcagggacggaatccactctctggcagtgccggaaccgaggctggttctcccacaactgtaatcatcgtgaagatgctggtgtcatctgctcaggaaaccatctatcgacacctgctccttttctcaacatcacccgtccaaacacagattattcctgcggaggcttcctatcccaaccatcaggggacttttccagcccattctatcccgggaactatccaaacaatgccaagtgtgtgtgggacattgaggtgcaaaacaactaccgtgtgactgtgatcttcagagatgtccagcttgaaggtggctgcaactatgattatattgaagttttcgatggcccctaccgcagttcccctctcattgctcgagtttgtgatggggccagaggctccttcacttcttcctccaacttcatgtccattcgcttcatcagtgaccacagcatcacaaggagagggttccgggctgagtactactccagtccctccaatgacagcaccaacctgctctgtctgccaaatcacatgcaagccagtgtgagcaggagctatctccaatccttgggcttttctgccagtgaccttgtcatttccacctggaatggatactacgagtgtcggccccagataacgccgaacctggtgatattcacaattccctactcaggctgcggcaccttcaagcaggcagacaatgacaccatcgactattccaacttcctcacagcagctgtctcaggtggcatcatcaagaggaggacagacctccgtattcacgtcagctgcagaatgcttcagaacacctgggtcgacaccatgtacattgctaatgacaccatccacgttgctaataacaccatccaggtcgaggaagtccagtatggcaattttgacgtgaacatttccttttatacttcctcatctttcttgtatcctgtgaccccgcctcccccaaggctcatggtccttggaggacccgttgcagggcgaggtcaagagagttctgacctggatggcccatagacctgacgtcccagaatccatgcttctcatctgcaaaatgaaaatgtcaatacttacttcttagcactgttgagagggttacttacataaaggaattttggtgaaactgc

SEQ ID NO: 55851 - DNA, 461 bp, Homo sapiens
ggggaaattataacgtatccaatttgaaacagggacctgcttatcaattaatagaaattaaatacgcctcatttaagaaatttggccctcaaggccaaaaattcgcacgaggagcctcggtaggtggtcgctctcagaccccactgtccaccggggcgcagacccctgactcggggacttgggatgttcctcttggtgtcatattccaactcagattgagccctacattgtgctgcacctggtcatacggagttgaatcagacctggttcccgcctcccccaaggctcatggtccttggaggacccgttgcagggcgaggtcaagagagttctgacctggatggcccatagacctgacgtcccagaatccatgcttctcatctgcaaaatgaaaatgtcaatacttacttcttagcactgttgagagggttacttacataaaggaattttggtgaaactgc

SEQ ID NO: 55852 - DNA, 238 bp, Homo sapiens
aacagtgcttatgtgacctacccttggagggcagagatgggccattctccatgggcccccagggctggaatggagttccaaactgcagaagaccatgcccctagaggctccagagaccgtgaactttttcaatgacacgtttgaaaatctattacaaattaatatcagtacctgattttttgaagatgaagctgacaggtattaaatgaaaacggaagcactcttaattaggaacctt

SEQ ID NO: 55853 - DNA, 601 bp, Homo sapiens
gggggggaaagaaagaaagagaaaaaggagggcgagtggcgagcaggggcctcggccgccacccacacgccccgaagcgtgctcgtcccccgcgcggggctcccggccgccgccctcggccatcggctgctccccggtggcccaggcctcggactccgcggccggcccggcgcggcccagcgccctcagggatcatggcccaggtagcagtgtccaccctgcctgttgaagaagagtcctcctcagagaccaggatggtggtgacattcctcgtgtctgccctcgaatccatgtgtaaagaactggccaagtccaaggcagaagtggcctgcatcgcagtgtacgaaacagacgtgtttgtcgtcggaaccgagagaggatgcgcttttgttaatgccaggacggattttcagaaagattttgcaaaatactgtaggtgttttaattttatcctttgtattcccaatctcaaaaggatcgcaggcaagacttccacagtattttcttctaagctatcataagcattctcctagaaacgatcctaacacatcttcttggattcagcttaccaaataaacactgcttaacactgcagagtcca

SEQ ID NO: 55854 - DNA, 1477 bp, Homo sapiens
  misc_feature (265)..(265): n is a, c, g, or t
  misc_feature (271)..(271): n is a, c, g, or t
  misc_feature (335)..(335): n is a, c, g, or t
  misc_feature (345)..(345): n is a, c, g, or t
  misc_feature (430)..(430): n is a, c, g, or t
cgagaccagcctggccaacatggtgaaacccagtctctactaaaaatacaaaaattagccagatgtggtggcacgcacctgtaatttcaactactcgggaggcagagtttgcagtgagcccagtcgagaccctgtctcttaattaaaaacaaaaacaaaaacaaaaaaaactaggctgggctcagtggctcgcctgttatcctagcactttggcaggctaaggtgggtagatcgcctgagctcagccgttcgagaccagtctggncaacanggtgaaacctcatctctactaaaatacaaaagaaattagctgggcatggtggtgtgtgcctgtngtcccagctnctcgggaggctgaggcaggagaattgtttgaacccaggaggtggaggttgcagcgagccgagatcttgccattgcactccagccngggtggcagagcgagactctgtttctacaaaacaaaaaacaaaaaacaaaaaaaaaaaactggtagaacgttaggttcacaccatccaaagacgtttgcgtcttcttgtaggtaaagccttagggacaacagtgatggtgcctgttccctatgagaagatgctgcgagaccagtcggctgtggtagtgcaggggcttccggaaggcgttgcctttcaacaccctgagaattacgaccttgcaaccctgaaatggattttggagaacaaagcagggatttcattcatcataaataggtgacacactctgcacccccgccccttcagttcatttaaagatgaaaccaatagcctaattttaattcactcgtgcatcccgcctgctgcgtttcagagctgactgttcagatgtgtcatgcttttttcattggtccgtgctgggtaatggtgttgcttttcttgcagacccttcctaggaccagagagtcagctgggtaagtgacagcttctcaggtttggtggctcttctgagctgctgaaccacttcttcttcattaaaacttgaattgggggccgggcgtgatggctcacacctgtaatcccagcactttgggaggctgaggcaggtggatcacaaaggtcaggagatcgcgaccatcctggctaacacggtgaagcccagtctgtactaaaaatacaaaaaaaaattagccgggcgtggtggcaggcgcctgtagtcccagctactcgggtgtctgaggcaggagaatggcgtgaacccgggaggtggagcttgcagtgagcggagatcgcgccactgcactccagcctgggcgactgagcaagactccgtctcaaaaaaaaaaaaacaaaacttgaatttgggtgaggggagggaacttagaggatgggccaataggtgcagcaagccattgtggcacacatgtgcctaggaaacaaacctgcacattctgcagatgtatcccccccttttttttttagaagaaataaagaatattttttaaaaaaagaaaaatacatttgtagct

SEQ ID NO: 55855 - DNA, 1222 bp, Homo sapiens
gggggggaaagaaagaaagagaaaaaggagggcgagtggcgagcaggggcctcggccgccacccacacgccccgaagcgtgctcgtcccccgcgcggggctcccggccgccgccctcggccatcggctgctccccggtggcccaggcctcggactccgcggccggcccggcgcggcccagcgccctcaggtgtataccaaggactggaattgatgggccaagctttgtgttttaaggaaaaaaaaatcatgttttagtttcgtgctggtaatttgaagtaagcagatgtctagatataagcttggaaactggccagttggagattgctcacggctgcaattgaagactccagcagcctcttctcctctttgcttccatttggagaggaaggcgtcataggctgtgtgacttccgtggacgcggggcttggcaccggcttgcagttgggatcaatcttcagtggcggtttggagtgggtcacggttcttcctgcttgccttccagtttagtccctgacgtctgctccccagggccctggctcttcccccacgccttcagcctgcacagtcccttctctcattctcaggctgcagaacctggaagtacagttgtccccccttacccgctgtttcagttacctgaggtcaaccgtggtctgaaaatactacatggaaaattccggaaataaacaattcgtaagttttaaattgcacgctgtgatgaaatctcgcgctgtgcagcctgggcagtgaatcgtcccctttgttcagcgtccccacgctgtggacgctccacacccatagtcacttagtagctggctcggttatcagatcgaccgtcacagtgtcccagtgtatgtgttcaagtcacccttattttccgtcataatggccccaaagcacaagagtagtgatgctgggaatttggataggccaaagagaagccgtaaagtgcttcctctaagtgaaaaggtgaaagttctcgacttaatcaggaaagacaaaaaatcctatgctgaggttgctaagatctacgggaagaatgaatcttccatccgtgaaattgtgaagaaggaaaaagaaattcgtgctagttttgctgtctcacctccaactgctaaagtgacggccacagtgcgtgataagtgcttagttaagatggaacaggcactgcatttgtgggtggaagagatgaacagaaaacgtgttcccattgacagcaa

SEQ ID NO: 55856 - DNA, 1205 bp, Homo sapiens
ctttccttctttatggctgaataaaaatccatgatatgaatacacagcattttgattttccatccattgatggctatttgggtaatttccaccttttggctgttatgaataatactgctatgaacattggtgtacacgtttttgtgcggacatttgttttcaattctcataggtgtataccaaggactggaattgatgggccaagctttgtgttttaaggaaaaaaaaatcatgttttagtttcgtgctggtaatttgaagtaagcagatgtctagatataagcttggaaactggccagttggagattgctcacggctgcaattgaagactccagcagcctcttctcctctttgcttccatttggagaggaaggcgtcataggctgtgtgacttccgtggacgcggggcttggcaccggcttgcagttgggatcaatcttcagtggcggtttggagtgggtcacggttcttcctgcttgccttccagtttagtccctgacgtctgctccccagggccctggctcttcccccacgccttcagcctgcacagtcccttctctcattctcaggctgcagaacctggaagtacagttgtccccccttacccgctgtttcagttacctgaggtcaaccgtggtctgaaaatactacatggaaaattccggaaataaacaattcgtaagttttaaattgcacgctgtgatgaaatctcgcgctgtgcagcctgggcagtgaatcgtcccctttgttcagcgtccccacgctgtggacgctccacacccatagtcacttagtagctggctcggttatcagatcgaccgtcacagtgtcccagtgtatgtgttcaagtcacccttattttccgtcataatggccccaaagcacaagagtagtgatgctgggaatttggataggccaaagagaagccgtaaagtgcttcctctaagtgaaaaggtgaaagttctcgacttaatcaggaaagacaaaaaatcctatgctgaggttgctaagatctacgggaagaatgaatcttccatccgtgaaattgtgaagaaggaaaaagaaattcgtgctagttttgctgtctcacctccaactgctaaagtgacggccacagtgcgtgataagtgcttagttaagatggaacaggcactgcatttgtgggtggaagagatgaacagaaaacgtgttcccattgacagcaa

SEQ ID NO: 55857 - DNA, 1044 bp, Homo sapiens
tcagttcagcgggctgggtttcgtgttacttactggccggtggcgtccatttcacatgacgggatgcaggtccactcgggcgaaacggaaatactcaggaaggcagtggaggactatttctgcttttgttatggtaaagccttagggacaacagtgatggtgcctgttccctatgagaagatgctgcgagaccagtcggctgtggtagtgcaggggcttccggaaggcgttgcctttcaacaccctgagaattacgaccttgcaaccctgaaatggattttggagaacaaagcagggatttcattcatcataaataggtggccctgggatggtaacagatgcggagagatccatagtatcaccaagtgaaagctgcggccccatcaatgtgaaaactgaacccatggaagattctggtgggtaccaagatgcttttagaatcaagtatcggccaagcgtggtagctcacgcctgtaatcccagcaatttgggaggccgaggcaggcggatcacttgaggtcaggagttcaagaccagcctggccaacatggtgaaaccccgtctctcctaaaaatacaaaaattagccaggcgtggctgtgcgtgcctgtaatcccagctaccagggaggctgaggcaggagaattgcttggacctgggaggctgaggctgcagtgagctgagatggcgccactgcactccagcctgggtgacagagcaagaccctgtctcaaaaaaacaaacaaggctgcgcacggtggatcacgcttgtaatcccagcactttgggaggctgaggcggacagatcgcctgagctcaggagttcaagaccatcctggccaacatagtaaaaccctgtctctactaaaatacaaaaaattagctgggcatgttcgtgtgcgcctgtagtcccagctacttgggaggctgaggcatgagaattgcttgagcccgggaggtggaggttgcagtgagccaagatcgcaccactgcactccaccttgggctacagagtgagattctgtgtcaaaaaaaaacaaaaaca

SEQ ID NO: 55858 - DNA, 346 bp, Homo sapiens
catcccggttgattccagatagccgggggccttgaataccacccccggctatctggaaatcagttcctgagaattacgaccttgcaaccctgaaatggattttggagaacaaagcagggatttcattcatcataaatagacccttcctaggaccagagagtcagctgggtggccctgggatggtaacagatgcggagagatccatagtatcaccaagtgaaagctgcggccccatcaatgtgaaaactgaacccatggaagattctggcatttcactgaaagcagaagctgtctcagtcaagaaagaatcagaagatcctaattactatcaatataatatgcaagg

SEQ ID NO: 55859 - DNA, 1492 bp, Homo sapiens
gggggggaaagaaagaaagagaaaaaggagggcgagtggcgagcaggggcctcggccgccacccacacgccccgaagcgtgctcgtcccccgcgcggggctcccggccgccgccctcggccatcggctgctccccggtggcccaggcctcggactccgcggccggcccggcgcggcccagcgccctcagggatcatggcccaggtagcagtgtccaccctgcctgttgaagaagagtcctcctcagagaccaggatggtggtgacattcctcgtgtctgccctcgaatccatgtgtaaagaactggccaagtccaaggcagaagtggcctgcatcgcagtgtacgaaacagacgtgtttgtcgtcggaaccgagagaggatgcgcttttgttaatgccaggacggattttcagaaagattttgcaaaatactgcgttgcagagggactgtgtgaggtgaaacctccctgccctgtgaacgggatgcaggtccactcgggcgaaacggaaatactcaggaaggcagtggaggactatttctgcttttgttatggtaaagccttagggacaacagtgatggtgcctgttccctatgagaagatgctgcgagaccagtcggctgtggtagtgcaggggcttccggaaggcgttgcctttcaacaccctgagaattacgaccttgcaaccctgaaatggattttggagaacaaagcagggatttcattcatcataaatagacccttcctaggaccagagagtcagctgggtggccctgggatggtaacagatgcggagagatccatagtatcaccaagtgaaagctgcggccccatcaatgtgaaaactgaacccatggaagattctggtgggtaccaagatgcttttagaatcaagtatcggccaagcgtggtagctcacgcctgtaatcccagcaatttgggaggccgaggcaggcggatcacttgaggtcaggagttcaagaccagcctggccaacatggtgaaaccccgtctctcctaaaaatacaaaaattagccaggcgtggctgtgcgtgcctgtaatcccagctaccagggaggctgaggcaggagaattgcttggacctgggaggctgaggctgcagtgagctgagatggcgccactgcactccagcctgggtgacagagcaagaccctgtctcaaaaaaacaaacaaggctgcgcacggtggatcacgcttgtaatcccagcactttgggaggctgaggcggacagatcgcctgagctcaggagttcaagaccatcctggccaacatagtaaaaccctgtctctactaaaatacaaaaaattagctgggcatgttcgtgtgcgcctgtagtcccagctacttgggaggctgaggcatgagaattgcttgagcccgggaggtggaggttgcagtgagccaagatcgcaccactgcactccaccttgggctacagagtgagattctgtgtcaaaaaaaaacaaaaaca

SEQ ID NO: 55860 - DNA, 943 bp, Homo sapiens
gggggggaaagaaagaaagagaaaaaggagggcgagtggcgagcaggggcctcggccgccacccacacgccccgaagcgtgctcgtcccccgcgcggggctcccggccgccgccctcggccatcggctgctccccggtggcccaggcctcggactccgcggccggcccggcgcggcccagcgccctcagggatcatggcccaggtagcagtgtccaccctgcctgttgaagaagagtcctcctcagagaccaggatggtggtgacattcctcgtgtctgccctcgaatccatgtgtaaagaactggccaagtccaaggcagaagtggcctgcatcgcagtgtacgaaacagacgtgtttgtcgtcggaaccgagagaggatgcgcttttgttaatgccaggacggattttcagaaagattttgcaaaatactgcgttgcagagggactgtgtgaggtgaaacctccctgccctgtgaacgggatgcaggtccactcgggcgaaacggaaatactcaggaaggcagtggaggactatttctgcttttgttatggtaaagccttagggacaacagtgatggtgcctgttccctatgagaagatgctgcgagaccagtcggctgtggtagtgcaggggcttccggaaggcgttgcctttcaacaccctgagaattacgaccttgcaaccctgaaatggattttggagaacaaagcagggatttcattcatcataaatagacccttcctaggaccagagagtcagctgggtggccctgggatggtaacagatgcggagagatccatagtatcaccaagtgaaagctgcggccccatcaatgtgaaaactgaacccatggaagattctggcatttcactgaaagcagaagctgtctcagtcaagaaagaatcagaagatcctaattactatcaatataatatgcaagg

SEQ ID NO: 55861 - DNA, 575 bp, Homo sapiens
gggggggaaagaaagaaagagaaaaaggagggcgagtggcgagcaggggcctcggccgccacccacacgccccgaagcgtgctcgtcccccgcgcggggctcccggccgccgccctcggccatcggctgctccccggtggcccaggcctcggactccgcggccggcccggcgcggcccagcgccctcagggatcatggcccaggtagcagtgtccaccctgcctgttgaagaagagtcctcctcagagaccaggatggtggtgacattcctcgtgtctgccctcgaatccatgagaagtggcctgcatcgcagtgtacgaaacagacgtgtttgtcgtcggaaccgagagaggatgcgcttttgttaatgccaggacggattttcagaaagattttgcaaaatactgtaggtgttttaattttatcctttgtattcccaatctcaaaaggatcgcaggcaagacttccacagtattttcttctaagctatcataagcattctcctagaaacgatcctaacacatcttcttggattcagcttaccaaataaacactgcttaacactgcagagtcca

SEQ ID NO: 55862 - DNA, 665 bp, Homo sapiens
gggggggaaagaaagaaagagaaaaaggagggcgagtggcgagcaggggcctcggccgccacccacacgccccgaagcgtgctcgtcccccgcgcggggctcccggccgccgccctcggccatcggctgctccccggtggcccaggcctcggactccgcggccggcccggcgcggcccagcgccctcagggatcatggcccaggtagcagtgtccaccctgcctgttgaagaagagtcctcctcagagaccaggatggtggtgacattcctcgtgtctgccctcgaatccatgtgtaaagaactggccaagtccaaggcagaagtggcctgcatcgcagtgtacgaaacagacgtgtttgtcgtcggaaccgagagaggatgcgcttttgttaatgccaggacggattttcagaaagattttgcaaaatactgtaggtgttttaattttatcctttgtattcccaatctcaaaaggatcgcaggcaagacttccacagtattttcttctaagctatcataagcattctcctagaaacgatcctaacacatcttcttggattcagcttaccaaataaacactgcttaacactgcagagtccagcggcggagtatcgcaaaccgtaatagacattacatccataaaattttcccagtccttattgta

SEQ ID NO: 55863 - DNA, 226 bp, Homo sapiens
agtattttcttctaagctatcataagcattctcctagaaacgatcctaacacatcttcttggattcagcttaccaaataaacactgcttaacactgcagagtccaagacaaatggtcattttattttatactaggtcctcagcggtactctggtttattagaataaatttcaaggacatagaacaaattatctttaattcctaaaataaacaccattttacaaaat

SEQ ID NO: 55864 - DNA, 2170 bp, Homo sapiens
gcgtttcccagaaggcccagcgccgggaaggggtttgcagctgctccgtcatcgtgcggcccgacgctatctcgcgctcgtgtgcaggcccggctcggctcctggtccccggtgcgagggttaacgcgaggccccggcctcggtccccggactaggccgtgaccccgggtgccatgaagcaggagggctcggcgcggcgccgcggcgcggacaaggcgaaaccgccgcccggcggaggagaacaagaacccccaccgccgccggccccccaggatgtggagatgaaagaggaggcagcgacgggtggcgggtcgacgggggaggcagacggcaagacggcggcggcagcggctgagcactcccagcgagagctggacacagtcaccttggaggacatcaaggagcacgtgaaacagctagagaaagcggtttcaggcaaggagccgagattcgtgctgcgggccctgcggatgctgccttccacatcacgccgcctcaaccactatgttctgtataaggctgtgcagggcttcttcacttcaaataatgccactcgagactttttgctccccttcctggaagagcccatggacacagaggctgatttacagttccgtccccgcacgggaaaagctgcgtcgacacccctcctgcctgaagtggaagcctatctccaactcctcgtggtcatcttcatgatgaacagcaagcgctacaaagaggcacagaagatctctgatgatctgatgcagaagatcagtactcagaaccgccgggccctagaccttgtagccgcaaagtgttactattatcacgcccgggtctatgagttcctggacaagctggatgtggtgcgcagcttcttgcatgctcggctccggacagctacgcttcggcatgacgcagacgggcaggccaccctgttgaacctcctgctgcggaattacctacactacagcttgtacgaccaggctgagaagctggtgtccaagtctgtgttcccagagcaggccaacaacaatgagtgggccaggtacctctactacacagggcgaatcaaagccatccagctggagtactcagaggcccggagaacgatgaccaacgcccttcgcaaggcccctcagcacacagctgtcggcttcaaacagacggtgcacaagcttctcatcgtggtggagctgttgctgggggagatccctgaccggctgcagttccgccagccctccctcaagcgctcactcatgccctatttccttctgactcaagctgtcaggacaggaaacctagccaagttcaaccaggtcctggatcagtttggggagaagtttcaagcagatgggacctacaccctaattatccggctgcggcacaacgtgattaagacaggtgtacgcatgatcagcctctcctattcccgaatctccttggctgacatcgcccagaagctgcagttggatagccccgaagatgcagagttcattgttgccaaggccatccgggatggtgtcattgaggccagcatcaaccacgagaagggctatgtccaatccaaggagatgattgacatctattccacccgagagccccagctagccttccaccagcgcatctccttctgcctagatatccacaacatgtctgtcaaggccatgaggtttcctcccaaatcgtacaacaaggacttggagtctgcagaggaacggcgtgagcgagaacagcaggacttggagtttgccaaggagatggcagaagatgatgatgacagcttcccttgagctggggggctggggaggggtagggggaatggggacaggctctttcccccttgggggtcccctgcccagggcactgtccccattttcccacacacagctcatatgctgcattcgtgcagggggtgggggtgctgggagccagccaccctgacctcccccagggctcctccccagccggtgacttactgtacagcaggcaggagggtgggcaggcaacctccccgggcagggtcctggccagcagtgtgggagcaggaggggaaggatagttctgtgtactcctttagggagtgggggactagaactgggatgtcttggcttgtatgttttttgaagcttcgattatgatttttaaacaataaaaagttctccacagtgaaaagtgcatcagt

SEQ ID NO: 55865 - DNA, 346 bp, Homo sapiens
atatcgtcgacccaggggtccgcccaggcgtccgcattttcccacacacagctcatatgctgcattcgtgcagggggtgggggtgctgggagccagccaccctgacctcccccagggctcctccccagccggtgacttactgtacagcaggcaggagggtgggcaggcaacctccccgggcagggtcctggccagcagtgtgggagcaggaggggaaggatagttctgtgtactcctttagggagtgggggactagaactgggatgtcttggcttgtatgttttttgaagcttcgattatgatttttaaacaataaaaagttctccacagtgaaaagtgcatcagt

SEQ ID NO: 55866 - DNA, 2142 bp, Homo sapiens
  misc_feature (23)..(23): n is a, c, g, or t
  misc_feature (27)..(27): n is a, c, g, or t
aaggctaggtacgaggctggttnaatnggccgaggacgctatctcgcgctcgtgtgcaggcccggctcggctcctggtccccggtgcgagggttaacgcgaggccccggcctcggtccccggactaggccgtgaccccgggtgccatgaagcaggagggctcggcgcggcgccgcggcgcggacaaggcgaaaccgccgcccggcggaggagaacaagaacccccaccgccgccggccccccaggatgtggagatgaaagaggaggcagcgacgggtggcgggtcgacgggggaggcagacggcaagacggcggcggcagcggctgagcactcccagcgagagctggacacagtcaccttggaggacatcaaggagcacgtgaaacagctagagaaagcggtttcaggcaaggagccgagattcgtgctgcgggccctgcggatgctgccttccacatcacgccgcctcaaccactatgttctgtataaggctgtgcagggcttcttcacttcaaataatgccactcgagactttttgctccccttcctggaagagcccatggacacagaggctgatttacagttccgtccccgcacgggaaaagctgcgtcgacacccctcctgcctgaagtggaagcctatctccaactcctcgtggtcatcttcatgatgaacagcaagcgctacaaagaggcacagaagatctctgatgatctgatgcagaagatcagtactcagaaccgccgggccctagaccttgtagccgcaaagtgttactattatcacgcccgggtctatgagttcctggacaagctggatgtggtgcgcagcttcttgcatgctcggctccggacagctacgcttcggcatgacgcagacgggcaggccaccctgttgaacctcctgctgcggaattacctacactacagcttgtacgaccaggctgagaagctggtgtccaagtctgtgttcccagagcaggccaacaacaatgagtgggccaggtacctctactacacagggcgaatcaaagccatccagctggagtactcagaggcccggagaacgatgaccaacgcccttcgcaaggcccctcagcacacagctgtcggcttcaaacagacggtgcacaagcttctcatcgtggtggagctgttgctgggggagatccctgaccggctgcagttccgccagccctccctcaagcgctcactcatgccctatttccttctgactcaagctgtcaggacaggaaacctagccaagttcaaccaggtcctggatcagtttggggagaagtttcaagcagatgggacctacaccctaattatccggctgcggcacaacgtgattaagacaggtgtacgcatgatcagcctctcctattcccgaatctccttggctgacatcgcccagaagctgcagttggatagccccgaagatgcagagttcattgttgccaaggccatccgggatggtgtcattgaggccagcatcaaccacgagaagggctatgtccaatccaaggagatgattgacatctattccacccgagagccccagctagccttccaccagcgcatctccttctgcctagatatccacaacatgtctgtcaaggccatgaggtttcctcccaaatcgtacaacaaggacttggagtctgcagaggaacggcgtgagcgagaacagcaggacttggagtttgccaaggagatggcagaagatgatgatgacagcttcccttgagctggggggctggggaggggtagggggaatggggacaggctctttcccccttgggggtcccctgcccagggcactgtccccattttcccacacacagctcatatgctgcattcgtgcagggggtgggggtgctgggagccagccaccctgacctcccccagggctcctccccagccggtgacttactgtacagcaggcaggagggtgggcaggcaacctccccgggcagggtcctggccagcagtgtgggagcaggaggggaaggatagttctgtgtactcctttagggagtgggggactagaactgggatgtcttggcttgtatgttttttgaagcttcgattatgatttttaaacaataaaaagttctccacagtgaaaagtgcatcagt

SEQ ID NO: 55867 - DNA, 2127 bp, Homo sapiens
gggctagtacgatgctgggtttgctatctcgcgctcgtgtgcaggcccggctcggctcctggtccccggtgcgagggttaacgcgaggccccggcctcggtccccggactaggccgtgaccccgggtgccatgaagcaggagggctcggcgcggcgccgcggcgcggacaaggcgaaaccgccgcccggcggaggagaacaagaacccccaccgccgccggccccccaggatgtggagatgaaagaggaggcagcgacgggtggcgggtcgacgggggaggcagacggcaagacggcggcggcagcggctgagcactcccagcgagagctggacacagtcaccttggaggacatcaaggagcacgtgaaacagctagagaaagcggtttcaggcaaggagccgagattcgtgctgcgggccctgcggatgctgccttccacatcacgccgcctcaaccactatgttctgtataaggctgtgcagggcttcttcacttcaaataatgccactcgagactttttgctccccttcctggaagagcccatggacacagaggctgatttacagttccgtccccgcacgggaaaagctgcgtcgacacccctcctgcctgaagtggaagcctatctccaactcctcgtggtcatcttcatgatgaacagcaagcgctacaaagaggcacagaagatctctgatgatctgatgcagaagatcagtactcagaaccgccgggccctagaccttgtagccgcaaagtgttactattatcacgcccgggtctatgagttcctggacaagctggatgtggtgcgcagcttcttgcatgctcggctccggacagctacgcttcggcatgacgcagacgggcaggccaccctgttgaacctcctgctgcggaattacctacactacagcttgtacgaccaggctgagaagctggtgtccaagtctgtgttcccagagcaggccaacaacaatgagtgggccaggtacctctactacacagggcgaatcaaagccatccagctggagtactcagaggcccggagaacgatgaccaacgcccttcgcaaggcccctcagcacacagctgtcggcttcaaacagacggtgcacaagcttctcatcgtggtggagctgttgctgggggagatccctgaccggctgcagttccgccagccctccctcaagcgctcactcatgccctatttccttctgactcaagctgtcaggacaggaaacctagccaagttcaaccaggtcctggatcagtttggggagaagtttcaagcagatgggacctacaccctaattatccggctgcggcacaacgtgattaagacaggtgtacgcatgatcagcctctcctattcccgaatctccttggctgacatcgcccagaagctgcagttggatagccccgaagatgcagagttcattgttgccaaggccatccgggatggtgtcattgaggccagcatcaaccacgagaagggctatgtccaatccaaggagatgattgacatctattccacccgagagccccagctagccttccaccagcgcatctccttctgcctagatatccacaacatgtctgtcaaggccatgaggtttcctcccaaatcgtacaacaaggacttggagtctgcagaggaacggcgtgagcgagaacagcaggacttggagtttgccaaggagatggcagaagatgatgatgacagcttcccttgagctggggggctggggaggggtagggggaatggggacaggctctttcccccttgggggtcccctgcccagggcactgtccccattttcccacacacagctcatatgctgcattcgtgcagggggtgggggtgctgggagccagccaccctgacctcccccagggctcctccccagccggtgacttactgtacagcaggcaggagggtgggcaggcaacctccccgggcagggtcctggccagcagtgtgggagcaggaggggaaggatagttctgtgtactcctttagggagtgggggactagaactgggatgtcttggcttgtatgttttttgaagcttcgattatgatttttaaacaataaaaagttctccacagtgaaaagtgcatcagt

SEQ ID NO: 55868 - DNA, 2334 bp, Homo sapiens
gcgtttcccagaaggcccagcgccgggaaggggtttgcagctgctccgtcatcgtgcggcccgacgctatctcgcgctcgtgtgcaggcccggctcggctcctggtccccggtgcgagggttaacgcgaggccccggcctcggtccccggactaggccgtgaccccgggtgccatgaagcaggagggctcggcgcggcgccgcggcgcggacaaggcgaaaccgccgcccggcggaggagaacaagaacccccaccgccgccggccccccaggatgtggagatgaaagaggaggcagcgacgggtggcgggtcgacgggggaggcagacggcaagacggcggcggcagcggctgagcactcccagcgagagctggacacagtcaccttggaggacatcaaggagcacgtgaaacagctagagaaagcggtttcaggcaaggagccgagattcgtgctgcgggccctgcggatgctgccttccacatcacgccgcctcaaccactatgttctgtataaggctgtgcagggcttcttcacttcaaataatgccactcgagactttttgctccccttcctggaagagcccatggacacagaggctgatttacagttccgtccccgcacgggaaaagctgcgtcgacacccctcctgcctgaagtggaagcctatctccaactcctcgtggtcatcttcatgatgaacagcaagcgctacaaagaggcacagaagatctctgatgatctgatgcagaagatcagtactcagaaccgccgggccctagaccttgtagccgcaaagtgttactattatcacgcccgggtctatgagttcctggacaagctggatgtggtgcgcagcttcttgcatgctcggctccggacagctacgcttcggcatgacgcagacgggcaggccaccctgttgaacctcctgctgcggaattacctacactacagcttgtacgaccaggctgagaagctggtgtccaagtctgtgttcccagagcaggccaacaacaatgagtgggccaggtacctctactacacaggtgagcagaggggcccaacccataaatcagaaggtgtctcaggcctgcctggtgcaaattttccaaggggtggtgcataagaggcccatttggcaccctggcttgtcggtggggagttggatgaccctactctgttgaccaactctcctctcctccactcccagggcgaatcaaagccatccagctggagtactcagaggcccggagaacgatgaccaacgcccttcgcaaggcccctcagcacacagctgtcggcttcaaacagacggtgcacaagcttctcatcgtggtggagctgttgctgggggagatccctgaccggctgcagttccgccagccctccctcaagcgctcactcatgccctatttccttctgactcaagctgtcaggacaggaaacctagccaagttcaaccaggtcctggatcagtttggggagaagtttcaagcagatgggacctacaccctaattatccggctgcggcacaacgtgattaagacaggtgtacgcatgatcagcctctcctattcccgaatctccttggctgacatcgcccagaagctgcagttggatagccccgaagatgcagagttcattgttgccaaggccatccgggatggtgtcattgaggccagcatcaaccacgagaagggctatgtccaatccaaggagatgattgacatctattccacccgagagccccagctagccttccaccagcgcatctccttctgcctagatatccacaacatgtctgtcaaggccatgaggtttcctcccaaatcgtacaacaaggacttggagtctgcagaggaacggcgtgagcgagaacagcaggacttggagtttgccaaggagatggcagaagatgatgatgacagcttcccttgagctggggggctggggaggggtagggggaatggggacaggctctttcccccttgggggtcccctgcccagggcactgtccccattttcccacacacagctcatatgctgcattcgtgcagggggtgggggtgctgggagccagccaccctgacctcccccagggctcctccccagccggtgacttactgtacagcaggcaggagggtgggcaggcaacctccccgggcagggtcctggccagcagtgtgggagcaggaggggaaggatagttctgtgtactcctttagggagtgggggactagaactgggatgtcttggcttgtatgttttttgaagcttcgattatgatttttaaacaataaaaagttctccacagtgaaaagtgcatcagt

SEQ ID NO: 55869 - DNA, 2277 bp, Homo sapiens
gcgtttcccagaaggcccagcgccgggaaggggtttgcagctgctccgtcatcgtgcggcccgacgctatctcgcgctcgtgtgcaggcccggctcggctcctggtccccggtgcgagggttaacgcgaggccccggcctcggtccccggactaggccgtgaccccgggtgccatgaagcaggagggctcggcgcggcgccgcggcgcggacaaggcgaaaccgccgcccggcggaggagaacaagaacccccaccgccgccggccccccaggatgtggagatgaaagaggaggcagcgacgggtggcgggtcgacgggggaggcagacggcaagacggcggcggcagcggctgagcactcccagcgagagctggacacagtcaccttggaggacatcaaggagcacgtgaaacagctagagaaagcggtttcaggcaaggagccgagattcgtgctgcgggccctgcggatgctgccttccacatcacgccgcctcaaccactatgttctgtataaggctgtgcagggcttcttcacttcaaataatgccactcgagactttttgctccccttcctggaagagcccatggacacagaggctgatttacagttccgtccccgcacgggaaaagctgcgtcgacacccctcctgcctgaagtggaagcctatctccaactcctcgtggtcatcttcatgatgaacagcaagcgctacaaagaggcacagaagatctctgatgatctgatgcagaagatcagtactcagaaccgccgggccctagaccttgtagccgcaaagtgttactattatcacgcccgggtctatgagttcctggacaagctggatgtggtgcgcagcttcttgcatgctcggctccggacagctacgcttcggcatgacgcagacgggcaggccaccctgttgaacctcctgctgcggaattacctacactacagcttgtacgaccaggctgagaagctggtgtccaagtctgtgttcccagagcaggccaacaacaatgagtgggccaggtacctctactacacagggcgaatcaaagccatccagctggagtactcagaggcccggagaacgatgaccaacgcccttcgcaaggcccctcagcacacagctgtcggcttcaaacagacggtgcacaagcttctcatcgtggtggagctgttgctgggggagatccctgaccggctgcagttccgccagccctccctcaagcgctcactcatgccctatttccttctgactcaaggtaaggctggcttccccaccccagagcccactaggcccccttcagtggggcctcttacatgcctgtgcctatttgcatcatccaatctactcctgttctgcctgcagctgtcaggacaggaaacctagccaagttcaaccaggtcctggatcagtttggggagaagtttcaagcagatgggacctacaccctaattatccggctgcggcacaacgtgattaagacaggtgtacgcatgatcagcctctcctattcccgaatctccttggctgacatcgcccagaagctgcagttggatagccccgaagatgcagagttcattgttgccaaggccatccgggatggtgtcattgaggccagcatcaaccacgagaagggctatgtccaatccaaggagatgattgacatctattccacccgagagccccagctagccttccaccagcgcatctccttctgcctagatatccacaacatgtctgtcaaggccatgaggtttcctcccaaatcgtacaacaaggacttggagtctgcagaggaacggcgtgagcgagaacagcaggacttggagtttgccaaggagatggcagaagatgatgatgacagcttcccttgagctggggggctggggaggggtagggggaatggggacaggctctttcccccttgggggtcccctgcccagggcactgtccccattttcccacacacagctcatatgctgcattcgtgcagggggtgggggtgctgggagccagccaccctgacctcccccagggctcctccccagccggtgacttactgtacagcaggcaggagggtgggcaggcaacctccccgggcagggtcctggccagcagtgtgggagcaggaggggaaggatagttctgtgtactcctttagggagtgggggactagaactgggatgtcttggcttgtatgttttttgaagcttcgattatgatttttaaacaataaaaagttctccacagtgaaaagtgcatcagt

SEQ ID NO: 55870 - DNA, 2083 bp, Homo sapiens
gttaactgctgatggccgccgtgccatcgtgtcgccctggcacgtagtgcctgtgaaacccctgtgtggtgcgcatgaatgccaggatggtgctctgtgctgctggctgcctgctggctgcggacaaggcgaaaccgccgcccggcggaggagaacaagaacccccaccgccgccggccccccaggatgtggagatgaaagaggaggcagcgacgggtggcgggtcgacgggggaggcagacggcaagacggcggcggcagcggctgagcactcccagcgagagctggacacagtcaccttggaggacatcaaggagcacgtgaaacagctagagaaagcggtttcaggcaaggagccgagattcgtgctgcgggccctgcggatgctgccttccacatcacgccgcctcaaccactatgttctgtataaggctgtgcagggcttcttcacttcaaataatgccactcgagactttttgctccccttcctggaagagcccatggacacagaggctgatttacagttccgtccccgcacgggaaaagctgcgtcgacacccctcctgcctgaagtggaagcctatctccaactcctcgtggtcatcttcatgatgaacagcaagcgctacaaagaggcacagaagatctctgatgatctgatgcagaagatcagtactcagaaccgccgggccctagaccttgtagccgcaaagtgttactattatcacgcccgggtctatgagttcctggacaagctggatgtggtgcgcagcttcttgcatgctcggctccggacagctacgcttcggcatgacgcagacgggcaggccaccctgttgaacctcctgctgcggaattacctacactacagcttgtacgaccaggctgagaagctggtgtccaagtctgtgttcccagagcaggccaacaacaatgagtgggccaggtacctctactacacagggcgaatcaaagccatccagctggagtactcagaggcccggagaacgatgaccaacgcccttcgcaaggcccctcagcacacagctgtcggcttcaaacagacggtgcacaagcttctcatcgtggtggagctgttgctgggggagatccctgaccggctgcagttccgccagccctccctcaagcgctcactcatgccctatttccttctgactcaagctgtcaggacaggaaacctagccaagttcaaccaggtcctggatcagtttggggagaagtttcaagcagatgggacctacaccctaattatccggctgcggcacaacgtgattaagacaggtgtacgcatgatcagcctctcctattcccgaatctccttggctgacatcgcccagaagctgcagttggatagccccgaagatgcagagttcattgttgccaaggccatccgggatggtgtcattgaggccagcatcaaccacgagaagggctatgtccaatccaaggagatgattgacatctattccacccgagagccccagctagccttccaccagcgcatctccttctgcctagatatccacaacatgtctgtcaaggccatgaggtttcctcccaaatcgtacaacaaggacttggagtctgcagaggaacggcgtgagcgagaacagcaggacttggagtttgccaaggagatggcagaagatgatgatgacagcttcccttgagctggggggctggggaggggtagggggaatggggacaggctctttcccccttgggggtcccctgcccagggcactgtccccattttcccacacacagctcatatgctgcattcgtgcagggggtgggggtgctgggagccagccaccctgacctcccccagggctcctccccagccggtgacttactgtacagcaggcaggagggtgggcaggcaacctccccgggcagggtcctggccagcagtgtgggagcaggaggggaaggatagttctgtgtactcctttagggagtgggggactagaactgggatgtcttggcttgtatgttttttgaagcttcgattatgatttttaaacaataaaaagttctccacagtgaaaagtgcatcagt

SEQ ID NO: 55871 - DNA, 2263 bp, Homo sapiens
gcgtttcccagaaggcccagcgccgggaaggggtttgcagctgctccgtcatcgtgcggcccgacgctatctcgcgctcgtgtgcaggcccggctcggctcctggtccccggtgcgagggttaacgcgaggccccggcctcggtccccggactaggccgtgaccccgggtgccatgaagcaggagggctcggcgcggcgccgcggcgcggacaaggcgaaaccgccgcccggcggaggagaacaagaacccccaccgccgccggccccccaggatgtggagatgaaagaggaggcagcgacgggtggcgggtcgacgggggaggcagacggcaagacggcggcggcagcggctgagcactcccagcgagagctggacacagtcaccttggaggacatcaaggagcacgtgaaacagctagagaaagcggtttcaggcaaggagccgagattcgtgctgcgggccctgcggatgctgccttccacatcacgccgcctcaaccactatgttctgtataaggctgtgcagggcttcttcacttcaaataatgccactcgagactttttgctccccttcctggaagagcccatggacacagaggctgatttacagttccgtccccgcacgggaaaagctgcgtcgacacccctcctgcctgaagtggaagcctatctccaactcctcgtggtcatcttcatgatgaacagcaagcgctacaaagaggcacagaagatctctgatgatctgatgcagaagatcagtactcagaaccgccgggccctagaccttgtagccgcaaagtgttactattatcacgcccgggtctatgagttcctggacaagctggatgtggtgcgcagcttcttgcatgctcggctccggacagctacgcttcggcatgacgcagacgggcaggccaccctgttgaacctcctgctgcggaattacctacactacagcttgtacgaccaggctgagaagctggtgtccaagtctgtgttcccagagcaggccaacaacaatgagtgggccaggtacctctactacacagggcgaatcaaagccatccagctggagtactcagaggcccggagaacgatgaccaacgcccttcgcaaggcccctcagcacacagctgtcggcttcaaacagacggtgcacaagcttctcatcgtggtggagctgttgctgggggagatccctgaccggctgcagttccgccagccctccctcaagcgctcactcatgccctatttccttctgactcaagctgtcaggacaggaaacctagccaagttcaaccaggtcctggatcagtttggggagaagtttcaagcagatgggacctacaccctaattatccggctgcggcacaacgtgattaagacaggtgtacgcatgatcagcctctcctattcccgaatctccttggctgacatcgcccagaagctgcagttggatagccccgaagatgcagagttcattgttgccaaggccatccgggatggtgtcattgaggccagcatcaaccacgagaagggctatgtccaatccaaggagatgattgacatctattccacccgagagccccagctagccttccaccagcgcatctccttctgcctagatatccacaacatgtctgtcaagggttggtaagattaaaagaagtccctgtattgaggcacttagcgaagtctaaattgtaaaaaagatggcgctggtatctagctccacaaaagggccatgaggtttcctcccaaatcgtacaacaaggacttggagtctgcagaggaacggcgtgagcgagaacagcaggacttggagtttgccaaggagatggcagaagatgatgatgacagcttcccttgagctggggggctggggaggggtagggggaatggggacaggctctttcccccttgggggtcccctgcccagggcactgtccccattttcccacacacagctcatatgctgcattcgtgcagggggtgggggtgctgggagccagccaccctgacctcccccagggctcctccccagccggtgacttactgtacagcaggcaggagggtgggcaggcaacctccccgggcagggtcctggccagcagtgtgggagcaggaggggaaggatagttctgtgtactcctttagggagtgggggactagaactgggatgtcttggcttgtatgttttttgaagcttcgattatgatttttaaacaataaaaagttctccacagtgaaaagtgcatcagt

SEQ ID NO: 55872 - DNA, 1818 bp, Homo sapiens
  misc_feature (1818)..(1818): n is a, c, g, or t
gcgtttcccagaaggcccagcgccgggaaggggtttgcagctgctccgtcatcgtgcggcccgacgctatctcgcgctcgtgtgcaggcccggctcggctcctggtccccggtgcgagggttaacgcgaggccccggcctcggtccccggactaggccgtgaccccgggtgccatgaagcaggagggctcggcgcggcgccgcggcgcggacaaggcgaaaccgccgcccggcggaggagaacaagaacccccaccgccgccggccccccaggatgtggagatgaaagaggaggcagcgacgggtggcgggtcgacgggggaggcagacggcaagacggcggcggcagcggctgagcactcccagcgagagctggacacagtcaccttggaggacatcaaggagcacgtgaaacagctagagaaagcggtttcaggcaaggagccgagattcgtgctgcgggccctgcggatgctgccttccacatcacgccgcctcaaccactatgttctgtataaggctgtgcagggcttcttcacttcaaataatgccactcgagactttttgctccccttcctggaagagcccatggacacagaggctgatttacagttccgtccccgcacgggaaaagctgcgtcgacacccctcctgcctgaagtggaagcctatctccaactcctcgtggtcatcttcatgatgaacagcaagcgctacaaagaggcacagaagatctctgatgatctgatgcagaagatcagtactcagaaccgccgggccctagaccttgtagccgcaaagtgttactattatcacgcccgggtctatgagttcctggacaagctggatgtggtgcgcagcttcttgcatgctcggctccggacagctacgcttcggcatgacgcagacgggcaggccaccctgttgaacctcctgctgcggaattacctacactacagcttgtacgaccaggctgagaagctggtgtccaagtctgtgttcccagagcaggccaacaacaatgagtgggccaggtacctctactacacagggcgaatcaaagccatccagctggagtactcagaggcccggagaacgatgaccaacgcccttcgcaaggcccctcagcacacagctgtcggcttcaaacagacggtgcacaagcttctcatcgtggtggagctgttgctgggggagatccctgaccggctgcagttccgccagccctccctcaagcgctcactcatgccctatttccttctgactcaagctgtcaggacaggaaacctagccaagttcaaccaggtcctggatcagtttggggagaagtttcaagcagatgggacctacaccctaattatccggctgcggcacaacgtgattaagacaggtgtacgcatgatcagcctctcctattcccgaatctccttggctgacatcgcccagaagctgcagttggatagccccgaagatgcagagttcattgttgccaaggccatccgggatggtgtcattgaggccagcatcaaccacgagaagggctatgtccaatccaaggagatgattgacatctattccacccgagagccccagctagccttccaccagcgcatctccttctgcctagatatccacaacatgtctgtcaaggccatgaggtttcctcccaaatcgtacaacaaggacttggagtctgcagaggaacggcgtgagcgagaacagcaggacttggagtttgccaaggagatggcagaagatgatgatgacagcttcccttgagctggacgacggggatcctctggaacgactatcacccagn

SEQ ID NO: 55873 - DNA, 2137 bp, Homo sapiens
gcgtttcccagaaggcccagcgccgggaaggggtttgcagctgctccgtcatcgtgcggcccgacgctatctcgcgctcgtgtgcaggcccggctcggctcctggtccccggtgcgagggttaacgcgaggccccggcctcggtccccggactaggccgtgaccccgggtgccatgaagcaggagggctcggcgcggcgccgcggcgcggacaaggcgaaaccgccgcccggcggaggagaacaagaacccccaccgccgccggccccccaggatgtggagatgaaagaggaggcagcgacgggtggcgggtcgacgggggaggcagacggcaagacggcggcggcagcggctgagcactcccagcgagagctggacacagtcaccttggaggacatcaaggagcacgtgaaacagctagagaaagcggtttcaggcaaggagccgagattcgtgctgcgggccctgcggatgctgccttccacatcacgccgcctcaaccactatgttctgtataaggctgtgcagggcttcttcacttcaaataatgccactcgagactttttgctccccttcctggaagagcccatggacacagaggctgatttacagttccgtccccgcacgggaaaagctgcgtcgacacccctcctgcctgaagtggaagcctatctccaactcctcgtggtcatcttcatgatgaacagcaagcgctacaaagaggcacagaagatctctgatgatctgatgcagaagatcagtactcagaaccgccgggccctagaccttgtagccgcaaagtgttactattatcacgcccgggtctatgagttcctggacaagctggatgtggtgcgcagcttcttgcatgctcggctccggacagctacgcttcggcatgacgcagacgggcaggccaccctgttgaacctcctgctgcggaattacctacactacagcttgtacgaccaggctgagaagctggtgtccaagtctgtgttcccagagcaggccaacaacaatgagtgggccaggtacctctactacacagggcgaatcaaagccatccagctggagtactcagaggcccggagaacgatgaccaacgcccttcgcaaggcccctcagcacacagctgtcggcttcaaacagacggtgcacaagcttctcatcgtggtggagctgttgctgggggagatccctgaccggctgcagttccgccagccctccctcaagcgctcactcatgccctatttccttctgactcaagctgtcaggacaggaaacctagccaagttcaaccaggtcctggatcagtttggggagaagtttcaagcagatgggacctacaccctaattatccggctgcggcacaacgtgattaagacaggtgtacgcatgatcagcctctcctattcccgaatctccttggctgacatcgcccagaagctgcagttggatagccccgaagatgcagagttcattgttgccaaggccatccgggatggtgtcattgaggccagcatcaaccacgagaagggctatgtccaatccaaggagatgattgacatctattccacccgagagccccagctagccttccaccagcgcatctccttctgcctagatatccacaacatgtctgtcaaggccatgaggtttcctcccaaatcgtacaacaaggacttggagtctgcagagtttgccaaggagatggcagaagatgatgatgacagcttcccttgagctggggggctggggaggggtagggggaatggggacaggctctttcccccttgggggtcccctgcccagggcactgtccccattttcccacacacagctcatatgctgcattcgtgcagggggtgggggtgctgggagccagccaccctgacctcccccagggctcctccccagccggtgacttactgtacagcaggcaggagggtgggcaggcaacctccccgggcagggtcctggccagcagtgtgggagcaggaggggaaggatagttctgtgtactcctttagggagtgggggactagaactgggatgtcttggcttgtatgttttttgaagcttcgattatgatttttaaacaataaaaagttctccacagtgaaaagtgcatcagt

SEQ ID NO: 55874 - DNA, 1261 bp, Homo sapiens
  misc_feature (27)..(27): n is a, c, g, or t
  misc_feature (30)..(30): n is a, c, g, or t
aactaggctaggtacgaggccgggtgntgnggaattacctacactacagcttgtacgaccaggctgagaagctggtgtccaagtctgtgttcccagagcaggccaacaacaatgagtgggccaggtacctctactacacagggcgaatcaaagccatccagctggagtactcagaggcccggagaacgatgaccaacgcccttcgcaaggcccctcagcacacagctgtcggcttcaaacagacggtgcacaagcttctcatcgtggtggagctgttgctgggggagatccctgaccggctgcagttccgccagccctccctcaagcgctcactcatgccctatttccttctgactcaagctgtcaggacaggaaacctagccaagttcaaccaggtcctggatcagtttggggagaagtttcaagcagatgggacctacaccctaattatccggctgcggcacaacgtgattaagacaggtgtacgcatgatcagcctctcctattcccgaatctccttggctgacatcgcccagaagctgcagttggatagccccgaagatgcagagttcattgttgccaaggccatccgggatggtgtcattgaggccagcatcaaccacgagaagggctatgtccaatccaaggagatgattgacatctattccacccgagagccccagctagccttccaccagcgcatctccttctgcctagatatccacaacatgtctgtcaaggccatgaggtttcctcccaaatcgtacaacaaggacttggagtctgcagaggaacggcgtgagcgagaacagcaggacttggagtttgccaaggagatggcagaagatgatgatgacagcttcccttgagctggggggctggggaggggtagggggaatggggacaggctctttcccccttgggggtcccctgcccagggcactgtccccattttcccacacacagctcatatgctgcattcgtgcagggggtgggggtgctgggagccagccaccctgacctcccccagggctcctccccagccggtgacttactgtacagcaggcaggagggtgggcaggcaacctccccgggcagggtcctggccagcagtgtgggagcaggaggggaaggatagttctgtgtactcctttagggagtgggggactagaactgggatgtcttggcttgtatgttttttgaagcttcgattatgatttttaaacaataaaaagttctccacagtgaaaagtgcatcagt

SEQ ID NO: 55875 - DNA, 1734 bp, Homo sapiens
gcgtttcccagaaggcccagcgccgggaaggggtttgcagctgctccgtcatcgtgcggcccgacgctatctcgcgctcgtgtgcaggcccggctcggctcctggtccccggtgcgagggttaacgcgaggccccggcctcggtccccggactaggccgtgaccccgggtgccatgaagcaggagggctcggcgcggcgccgcggcgcggacaaggcgaaaccgccgcccggcggaggagaacaagaacccccaccgccgccggccccccaggatgtggagatgaaagaggaggcagcgacgggtggcgggtcgacgggggaggcagacggcaagacggcggcggcagcggctgagcactcccagcgagagctggacacagtcaccttggaggacatcaaggagcacgtgaaacagctagagaaagcggtttcaggcaaggagccgagattcgtgctgcgggccctgcggatgctgccttccacatcacgccgcctcaaccactatgttctgtataaggctgtgcagggcttcttcacttcaaataatgccactcgagactttttgctccccttcctggaagagcccatggacacagaggctgatttacagttccgtccccgcacgggaaaagctgcgtcgacacccctcctgcctgaagtggaagcctatctccaactcctcgtggtcatcttcatgatgaacagcaagcgctacaaagaggcacagaagatctctgatgatctgatgcagaagatcagtactcagaaccgccgggccctagaccttgtagccgcaaagtgttactattatcacgcccgggtctatgagttcctggacaagctggatgtggtgcgcagcttcttgcatgctcggctccggacagctacgcttcggcatgacgcagacgggcaggccaccctgttgaacctcctgctgcggaattacctacactacagcttgtacgaccaggctgagaagctggtgtccaagtctgtgttcccagagcaggccaacaacaatgagtgggccaggtacctctactacacagggcgaatcaaagccatccagctggagtactcagaggcccggagaacgatgaccaacgcccttcgcaaggcccctcagcacacagctgtcggcttcaaacagacggtgcacaagcttctcatcgtggtggagctgttgctgggggagatccctgaccggctgcagttccgccagccctccctcaagcgctcactcatgccctatttccttctgactcaagctgtcaggacaggaaacctagccaagttcaaccaggtcctggatcagtttggggagaagtttcaagcagatgggacctacaccctaattatccggctgcggcacaacgtgattaagacaggtgtacgcatgatcagcctctcctattcccgaatctccttggctgacatcgcccagaagctgcagttggatagccccgaagatgcagagttcattgttgccaaggccatccgggatggtgtcattgaggccagcatcaaccacgagaagggctatgtccaatccaaggagatgattgacatctattccacccgagagccccagctagccttccaccagcgcatctccttctgcctagatatccacaacatgtctgtcaaggccatgaggtttcctcccaaatcgtacaacaaggacttggagtctgcagagaacgatttgggaggaaaacctcatgtccggacca

SEQ ID NO: 55876 - DNA, 1727 bp, Homo sapiens
gcgtttcccagaaggcccagcgccgggaaggggtttgcagctgctccgtcatcgtgcggcccgacgctatctcgcgctcgtgtgcaggcccggctcggctcctggtccccggtgcgagggttaacgcgaggccccggcctcggtccccggactaggccgtgaccccgggtgccatgaagcaggagggctcggcgcggcgccgcggcgcggacaaggcgaaaccgccgcccggcggaggagaacaagaacccccaccgccgccggccccccaggatgtggagatgaaagaggaggcagcgacgggtggcgggtcgacgggggaggcagacggcaagacggcggcggcagcggctgagcactcccagcgagagctggacacagtcaccttggaggacatcaaggagcacgtgaaacagctagagaaagcggtttcaggcaaggagccgagattcgtgctgcgggccctgcggatgctgccttccacatcacgccgcctcaaccactatgttctgtataaggctgtgcagggcttcttcacttcaaataatgccactcgagactttttgctccccttcctggaagagcccatggacacagaggctgatttacagttccgtccccgcacgggaaaagctgcgtcgacacccctcctgcctgaagtggaagcctatctccaactcctcgtggtcatcttcatgatgaacagcaagcgctacaaagaggcacagaagatctctgatgatctgatgcagaagatcagtactcagaaccgccgggccctagaccttgtagccgcaaagtgttactattatcacgcccgggtctatgagttcctggacaagctggatgtggtgcgcagcttcttgcatgctcggctccggacagctacgcttcggcatgacgcagacgggcaggccaccctgttgaacctcctgctgcggaattacctacactacagcttgtacgaccaggctgagaagctggtgtccaagtctgtgttcccagagcaggccaacaacaatgagtgggccaggtacctctactacacagggcgaatcaaagccatccagctggagtactcagaggcccggagaacgatgaccaacgcccttcgcaaggcccctcagcacacagctgtcggcttcaaacagacggtgcacaagcttctcatcgtggtggagctgttgctgggggagatccctgaccggctgcagttccgccagccctccctcaagcgctcactcatgccctatttccttctgactcaagctgtcaggacaggaaacctagccaagttcaaccaggtcctggatcagtttggggagaagtttcaagcagatgggacctacaccctaattatccggctgcggcacaacgtgattaagacaggtgtacgcatgatcagcctctcctattcccgaatctccttggctgacatcgcccagaagctgcagttggatagccccgaagatgcagagttcattgttgccaaggccatccgggatggtgtcattgaggccagcatcaaccacgagaagggctatgtccaatccaaggagatgattgacatctattccacccgagagccccagctagccttccaccagcgcatctccttctgcctagatatccacaacatgtctgtcaaggtgagaagcccgtggctgcagagtcacgcctggcagcagcacacccctccccccccagagagagcggcggggatccgt

SEQ ID NO: 55877 - DNA, 1645 bp, Homo sapiens
gcgtttcccagaaggcccagcgccgggaaggggtttgcagctgctccgtcatcgtgcggcccgacgctatctcgcgctcgtgtgcaggcccggctcggctcctggtccccggtgcgagggttaacgcgaggccccggcctcggtccccggactaggccgtgaccccgggtgccatgaagcaggagggctcggcgcggcgccgcggcgcggacaaggcgaaaccgccgcccggcggaggagaacaagaacccccaccgccgccggccccccaggatgtggagatgaaagaggaggcagcgacgggtggcgggtcgacgggggaggcagacggcaagacggcggcggcagcggctgagcactcccagcgagagctggacacagtcaccttggaggacatcaaggagcacgtgaaacagctagagaaagcggtttcaggcaaggagccgagattcgtgctgcgggccctgcggatgctgccttccacatcacgccgcctcaaccactatgttctgtataaggctgtgcagggcttcttcacttcaaataatgccactcgagactttttgctccccttcctggaagagcccatggacacagaggctgatttacagttccgtccccgcacgggaaaagctgcgtcgacacccctcctgcctgaagtggaagcctatctccaactcctcgtggtcatcttcatgatgaacagcaagcgctacaaagaggcacagaagatctctgatgatctgatgcagaagatcagtactcagaaccgccgggccctagaccttgtagccgcaaagtgttactattatcacgcccgggtctatgagttcctggacaagctggatgtggtgcgcagcttcttgcatgctcggctccggacagctacgcttcggcatgacgcagacgggcaggccaccctgttgaacctcctgctgcggaattacctacactacagcttgtacgaccaggctgagaagctggtgtccaagtctgtgttcccagagcaggccaacaacaatgagtgggccaggtacctctactacacagggcgaatcaaagccatccagctggagtactcagaggcccggagaacgatgaccaacgcccttcgcaaggcccctcagcacacagctgtcggcttcaaacagacggtgcacaagcttctcatcgtggtggagctgttgctgggggagatccctgaccggctgcagttccgccagccctccctcaagcgctcactcatgccctatttccttctgactcaagctgtcaggacaggaaacctagccaagttcaaccaggtcctggatcagtttggggagaagtttcaagcagatgggacctacaccctaattatccggctgcggcacaacgtgattaagacaggtgtacgcatgatcagcctctcctattcccgaatctccttggctgacatcgcccagaagctgcagttggatagccccgaagatgcagagttcattgttgccaaggccatccgggatggtgtcattgaggccagcatcaaccacgagaagggctatgtccaatccaaggagatgattgacatctattccacccgagagccccagctagccttccaccagcgaccgtggattgggcatagcccttactacaaagtgaa

SEQ ID NO: 55878 - DNA, 1874 bp, Homo sapiens
gcgtttcccagaaggcccagcgccgggaaggggtttgcagctgctccgtcatcgtgcggcccgacgctatctcgcgctcgtgtgcaggcccggctcggctcctggtccccggtgcgagggttaacgcgaggccccggcctcggtccccggactaggccgtgaccccgggtgccatgaagcaggagggctcggcgcggcgccgcggcgcggacaaggcgaaaccgccgcccggcggaggagaacaagaacccccaccgccgccggccccccaggatgtggagatgaaagaggaggcagcgacgggtggcgggtcgacgggggaggcagacggcaagacggcggcggcagcggctgagcactcccagcgagagctggacacagtcaccttggaggacatcaaggagcacgtgaaacagctagagaaagcggtttcaggcaaggagccgagattcgtgctgcgggccctgcggatgctgccttccacatcacgccgcctcaaccactatgttctgtataaggctgtgcagggcttcttcacttcaaataatgccactcgagactttttgctccccttcctggaagagcccatggacacagaggctgatttacagttccgtccccgcacgggaaaagctgcgtcgacacccctcctgcctgaagtggaagcctatctccaactcctcgtggtcatcttcatgatgaacagcaagcgctacaaagaggcacagaagatctctgatgatctgatgcagaagatcagtactcagaaccgccgggccctagaccttgtagccgcaaagtgttactattatcacgcccgggtctatgagttcctggacaagctggatgtggtgcgcagcttcttgcatgctcggctccggacagctacgcttcggcatgacgcagacgggcaggccaccctgttgaacctcctgctgcggaattacctacactacagcttgtacgaccaggctgagaagctggtgtccaagtctgtgttcccagagcaggccaacaacaatgagtgggccaggtacctctactacacagggcgaatcaaagccatccagctggagtactcagaggcccggagaacgatgaccaacgcccttcgcaaggcccctcagcacacagctgtcggcttcaaacagacggtgcacaagcttctcatcgtggtggagctgttgctgggggagatccctgaccggctgcagttccgccagccctccctcaagcgctcactcatgccctatttccttctgactcaagctgtcaggacaggaaacctagccaagttcaaccaggtcctggatcagtttggggagaagtttcaagcagatgggacctacaccctaattatccggctgcggcacaacgtgattaagacaggtgtacgcatgatcagcctctcctattcccgaatctccttggctgacatcgcccagaagctgcagttggatagccccgaagatgcagagttcattgttgccaaggccatccgggatggtgtcattgaggccagcatcaaccacgagaagggctatgtccaatccaaggagatgaattttcccacacacagctcatatgctgcattcgtgcagggggtgggggtgctgggagccagccaccctgacctcccccagggctcctccccagccggtgacttactgtacagcaggcaggagggtgggcaggcaacctccccgggcagggtcctggccagcagtgtgggagcaggaggggaaggatagttctgtgtactcctttagggagtgggggactagaactgggatgtcttggcttgtatgttttttgaagcttcgattatgatttttaaacaataaaaagttctccacagtgaaaagtgcatcagt

SEQ ID NO: 55879 - DNA, 905 bp, Homo sapiens
  misc_feature (49)..(49): n is a, c, g, or t
ctcattgggtggcgcatggcgtggctcgtggggtggctctttgggcggnggtttggggagaagtttcaagcagatgggacctacaccctaattatccggctgcggcacaacgtgattaagacaggtgtacgcatgatcagcctctcctattcccgaatctccttggctgacatcgcccagaagctgcagttggatagccccgaagatgcagagttcattgttgccaaggccatccgggatggtgtcattgaggccagcatcaaccacgagaagggctatgtccaatccaaggagatgattgacatctattccacccgagagccccagctagccttccaccagcgcatctccttctgcctagatatccacaacatgtctgtcaaggccatgaggtttcctcccaaatcgtacaacaaggacttggagtctgcagaggaacggcgtgagcgagaacagcaggacttggagtttgccaaggagatggcagaagatgatgatgacagcttcccttgagctggggggctggggaggggtagggggaatggggacaggctctttcccccttgggggtcccctgcccagggcactgtccccattttcccacacacagctcatatgctgcattcgtgcagggggtgggggtgctgggagccagccaccctgacctcccccagggctcctccccagccggtgacttactgtacagcaggcaggagggtgggcaggcaacctccccgggcagggtcctggccagcagtgtgggagcaggaggggaaggatagttctgtgtactcctttagggagtgggggactagaactgggatgtcttggcttgtatgttttttgaagcttcgattatgatttttaaacaataaaaagttctccacagtgaaaagtgcatcagt

SEQ ID NO: 55880 - DNA, 1697 bp, Homo sapiens
gcgtttcccagaaggcccagcgccgggaaggggtttgcagctgctccgtcatcgtgcggcccgacgctatctcgcgctcgtgtgcaggcccggctcggctcctggtccccggtgcgagggttaacgcgaggccccggcctcggtccccggactaggccgtgaccccgggtgccatgaagcaggagggctcggcgcggcgccgcggcgcggacaaggcgaaaccgccgcccggcggaggagaacaagaacccccaccgccgccggccccccaggatgtggagatgaaagaggaggcagcgacgggtggcgggtcgacgggggaggcagacggcaagacggcggcggcagcggctgagcactcccagcgagagctggacacagtcaccttggaggacatcaaggagcacgtgaaacagctagagaaagcggtttcaggcaaggagccgagattcgtgctgcgggccctgcggatgctgccttccacatcacgccgcctcaaccactatgttctgtataaggctgtgcagggcttcttcacttcaaataatgccactcgagactttttgctccccttcctggaagagcccatggacacagaggctgatttacagttccgtccccgcacgggaaaagctgcgtcgacacccctcctgcctgaagtggaagcctatctccaactcctcgtggtcatcttcatgatgaacagcaagcgctacaaagaggcacagaagatctctgatgatctgatgcagaagatcagtactcagaaccgccgggccctagaccttgtagccgcaaagtgttactattatcacgcccgggtctatgagttcctggacaagctggatgtggtgcgcagcttcttgcatgctcggctccggacagctacgcttcggcatgacgcagacgggcaggccaccctgttgaacctcctgctgcggaattacctacactacagcttgtacgaccaggctgagaagctggtgtccaagtctgtgttcccagagcaggccaacaacaatgagtgggccaggtacctctactacacagggcgaatcaaagccatccagctggagtactcagaggcccggagaacgatgaccaacgcccttcgcaaggcccctcagcacacagctgtcggcttcaaacagacggtgcacaagcttctcatcgtggtggagctgttgctgggggagatccctgaccggctgcagttccgccagccctccctcaagcgctcactcatgccctatttccttctgactcaagctgtcaggacaggaaacctagccaagttcaaccaggtcctggatcagtttggggagaagtttcaagcagatgggacctacaccctaattatccggctgcggcacaacgtgattaagacaggtgtacgcatgatcagcctctcctattcccgaatctccttggctgacatcgcccagaagctgcagttggatagccccgaagatgcagagttcattgttgccaaggccatccgggatggtgtcattgaggccagcatcaaccacgagaagggctatgtccaatccaaggagatgagggaaggatagttctgtgtactcctttagggagtgggggactagaactgggatgtcttggcttgtatgttttttgaagcttcgattatgatttttaaacaataaaaagttctccacagtgaaaagtgcatcagt

SEQ ID NO: 55881 - DNA, 686 bp, Homo sapiens
ctaggtctatagtcgttccagaggatccccgtcgccagcatcaaccacgagaagggctatgtccaatccaaggagatgattgacatctattccacccgagagccccagctagccttccaccagcgcatctccttctgcctagatatccacaacatgtctgtcaaggccatgaggtttcctcccaaatcgtacaacaaggacttggagtctgcagaggaacggcgtgagcgagaacagcaggacttggagtttgccaaggagatggcagaagatgatgatgacagcttcccttgagctggggggctggggaggggtagggggaatggggacaggctctttcccccttgggggtcccctgcccagggcactgtccccattttcccacacacagctcatatgctgcattcgtgcagggggtgggggtgctgggagccagccaccctgacctcccccagggctcctccccagccggtgacttactgtacagcaggcaggagggtgggcaggcaacctccccgggcagggtcctggccagcagtgtgggagcaggaggggaaggatagttctgtgtactcctttagggagtgggggactagaactgggatgtcttggcttgtatgttttttgaagcttcgattatgatttttaaacaataaaaagttctccacagtgaaaagtgcatcagt

SEQ ID NO: 55882 - DNA, 822 bp, Homo sapiens
  misc_feature (13)..(13): n is a, c, g, or t
ctcgtgcaatctnggcagaggtcacaacgtgattaagacaggtgtacgcatgatcagcctctcctattcccgaatctccttggctgacatcgcccagaagctgcagttggatagccccgaagatgcagagttcattgttgccaaggccatccgggatggtgtcattgaggccagcatcaaccacgagaagggctatgtccaatccaaggagatgattgacatctattccacccgagagccccagctagccttccaccagcgcatctccttctgcctagatatccacaacatgtctgtcaaggccatgaggtttcctcccaaatcgtacaacaaggacttggagtctgcagaggaacggcgtgagcgagaacagcaggacttggagtttgccaaggagatggcagaagatgatgatgacagcttcccttgagctggggggctggggaggggtagggggaatggggacaggctctttcccccttgggggtcccctgcccagggcactgtccccattttcccacacacagctcatatgctgcattcgtgcagggggtgggggtgctgggagccagccaccctgacctcccccagggctcctccccagccggtgacttactgtacagcaggcaggagggtgggcaggcaacctccccgggcagggtcctggccagcagtgtgggagcaggaggggaaggatagttctgtgtactcctttagggagtgggggactagaactgggatgtcttggcttgtatgttttttgaagcttcgattatgatttttaaacaataaaaagttctccacagtgaaaagtgcatcagt

SEQ ID NO: 55883 - DNA, 1850 bp, Homo sapiens
gcgtttcccagaaggcccagcgccgggaaggggtttgcagctgctccgtcatcgtgcggcccgacgctatctcgcgctcgtgtgcaggcccggctcggctcctggtccccggtgcgagggttaacgcgaggccccggcctcggtccccggactaggccgtgaccccgggtgccatgaagcaggagggctcggcgcggcgccgcggcgcggacaaggcgaaaccgccgcccggcggaggagaacaagaacccccaccgccgccggccccccaggatgtggagatgaaagaggaggcagcgacgggtggcgggtcgacgggggaggcagacggcaagacggcggcggcagcggctgagcactcccagcgagagctggacacagtcaccttggaggacatcaaggagcacgtgaaacagctagagaaagcggtttcaggcaaggagccgagattcgtgctgcgggccctgcggatgctgccttccacatcacgccgcctcaaccactatgttctgtataaggctgtgcagggcttcttcacttcaaataatgccactcgagactttttgctccccttcctggaagagcccatggacacagaggctgatttacagttccgtccccgcacgggaaaagctgcgtcgacacccctcctgcctgaagtggaagcctatctccaactcctcgtggtcatcttcatgatgaacagcaagcgctacaaagaggcacagaagatctctgatgatctgatgcagaagatcagtactcagaaccgccgggccctagaccttgtagccgcaaagtgttactattatcacgcccgggtctatgagttcctggacaagctggatgtggtgcgcagcttcttgcatgctcggctccggacagctacgcttcggcatgacgcagacgggcaggccaccctgttgaacctcctgctgcggaattacctacactacagcttgtacgaccaggctgagaagctggtgtccaagtctgtgttcccagagcaggccaacaacaatgagtgggccaggtacctctactacacagggcgaatcaaagccatccagctggagtactcagaggcccggagaacgatgaccaacgcccttcgcaaggcccctcagcacacagctgtcggcttcaaacagacggtgcacaagcttctcatcgtggtggagctgttgctgggggagatccctgaccggctgcagttccgccagccctccctcaagcgctcactcatgccctatttccttctgactcaaggtaaggctggcttccccaccccagagcccactaggcccccttcagtggggcctcttacatgcctgtgcctatttgcatcatccaatctactcctgttctgcctgcagctgtcaggacaggaaacctagccaagttcaaccaggtcctggatcagtttggggagaagtttcaagcagatgggacctacaccctaattatccggctgcggcacaacgtgattaagacaggtgtacgcatgatcagcctctcctattcccgaatctccttggctgacatcgcccagaagctgcagttggatagccccgaagatgcagagttcattgttgccaaggccatccgggatggtgtcattgaggccagcatcaaccacgagaagggctatgtccaatccaaggagatgattgacatctattccacccgagagccccagctagccttccaccagcggggaaggatagttctgtgtactcctttagggagtgggggactagaactgggatgtcttggcttgtatgttttttgaagcttcgattatgatttttaaacaataaaaagttctccacagtgaaaagtgcatcagt

SEQ ID NO: 55884 - DNA, 1138 bp, Homo sapiens
gcgtttcccagaaggcccagcgccgggaaggggtttgcagctgctccgtcatcgtgcggcccgacgctatctcgcgctcgtgtgcaggcccggctcggctcctggtccccggtgcgagggttaacgcgaggccccggcctcggtccccggactaggccgtgaccccgggtgccatgaagcaggagggctcggcgcggcgccgcggcgcggacaaggcgaaaccgccgcccggcggaggagaacaagaacccccaccgccgccggccccccaggatgtggagatgaaagaggaggcagcgacgggtggcgggtcgacgggggaggcagacggcaagacggcggcggcagcggctgagcactcccagcgagagctggacacagtcaccttggaggacatcaaggagcacgtgaaacagctagagaaagcggtttcaggcaaggagccgagattcgtgctgcgggccctgcggatgctgccttccacatcacgccgcctcaaccactatgttctgtataaggctgtgcagggcttcttcacttcaaataatgccactcgagactttttgctccccttcctggaagagcccatggacacagaggctgatttacagttccgtccccgcacgggaaaagctgcgtcgacacccctcctgcctgaagtggaagcctatctccaactcctcgtggtcatcttcatgatgaacagcaagcgctacaaagaggcacagaagatctctgatgatctgatgcagaagatcagtactcagaaccgccgggccctagaccttgtagccgcaaagtgttactattatcacgcccgggtctatgagttcctggacaagctggatgtggtgcgcagcttcttgcatgctcggctccggacagctacgcttcggcatgacgcagacgggcaggccaccctgttgaacctcctgctgcggaattacctacactacagcttgtacgaccaggctgagaagctggtgtccaagtctgtgttcccagagcaggccaacaacaatgagtgggccaggtacctctactacacagggcgaattcaaaaggccatcccaggcctggaaggttaactcaaggaggggccccccgggaaggaaaaacccggaaatttgggaaaccc

SEQ ID NO: 55885 - DNA, 1094 bp, Homo sapiens
gcgtttcccagaaggcccagcgccgggaaggggtttgcagctgctccgtcatcgtgcggcccgacgctatctcgcgctcgtgtgcaggcccggctcggctcctggtccccggtgcgagggttaacgcgaggccccggcctcggtccccggactaggccgtgaccccgggtgccatgaagcaggagggctcggcgcggcgccgcggcgcggacaaggcgaaaccgccgcccggcggaggagaacaagaacccccaccgccgccggccccccaggatgtggagatgaaagaggaggcagcgacgggtggcgggtcgacgggggaggcagacggcaagacggcggcggcagcggctgagcactcccagcgagagctggacacagtcaccttggaggacatcaaggagcacgtgaaacagctagagaaagcggtttcaggcaaggagccgagattcgtgctgcgggccctgcggatgctgccttccacatcacgccgcctcaaccactatgttctgtataaggctgtgcagggcttcttcacttcaaataatgccactcgagactttttgctccccttcctggaagagcccatggacacagaggctgatttacagttccgtccccgcacgggaaaagctgcgtcgacacccctcctgcctgaagtggaagcctatctccaactcctcgtggtcatcttcatgatgaacagcaagcgctacaaagaggcacagaagatctctgatgatctgatgcagaagatcagtactcagaaccgccgggccctagaccttgtagccgcaaagtgttactattatcacgcccgggtctatgagttcctggacaagctggatgtggtgcgcagcttcttgcatgctcggctccggacagctacgcttcggcatgacgcagacgggcaggcaacctccccgggcagggtcctggccagcagtgtgggagcaggaggggaaggatagttctgtgtactcctttagggagtgggggactagaactgggatgtcttggcttgtatgttttttgaagcttcgattatgatttttaaacaataaaaagttctccacagtgaaaagtgcatcagt

SEQ ID NO: 55886 - DNA, 804 bp, Homo sapiens
acccagcagccagcccactgggtgcaggccaggcccctcccacatggaatcctccaccgggaaggcctctccccgttgccacatccactgtgttcctccttttcctcctccctgcccagtcaagagagttggtcgtttattcctcttttttcagcatttcccacagggcactgtaataattcctttgatgcctactcacagaggggacgcagggagtgcaggttgcgtgagtgcctcacctgcttccttccctcgctcatctcctctctttgctgtgccccaggccatgaggtttcctcccaaatcgtacaacaaggacttggagtctgcagaggaacggcgtgagcgagaacagcaggacttggagtttgccaaggagatggcagaagatgatgatgacagcttcccttgagctggggggctggggaggggtagggggaatggggacaggctctttcccccttgggggtcccctgcccagggcactgtccccattttcccacacacagctcatatgctgcattcgtgcagggggtgggggtgctgggagccagccaccctgacctcccccagggctcctccccagccggtgacttactgtacagcaggcaggagggtgggcaggcaacctccccgggcagggtcctggccagcagtgtgggagcaggaggggaaggatagttctgtgtactcctttagggagtgggggactagaactgggatgtcttggcttgtatgttttttgaagcttcgattatgatttttaaacaataaaaagttctccacagtgaaaagtgcatcagt

SEQ ID NO: 55887 - DNA, 742 bp, Homo sapiens
gcgtttcccagaaggcccagcgccgggaaggggtttgcagctgctccgtcatcgtgcggcccgacgctatctcgcgctcgtgtgcaggcccggctcggctcctggtccccggtgcgagggttaacgcgaggccccggcctcggtccccggactaggccgtgaccccgggtgccatgaagcaggagggctcggcgcggcgccgcggcgcggacaaggcgaaaccgccgcccggcggaggagaacaagaacccccaccgccgccggccccccaggatgtggagatgaaagaggaggcagcgacgggtggcgggtcgacgggggaggcagacggcaagacggcggcggcagcggctgagcactcccagcgagagctggacacagtcaccttggaggacatcaaggagcacgtgaaacagctagagaaagcggtttcaggcaaggagccgagattcgtgctgcgggccctgcggatgctgccttccacatcacgccgcctcaaccactatgttctgtataaggctgtgcagggcttcttcacttcaaataatgccactcgagactttttgctccccttcctggaagagcccatggacacagaggctgatttacagttccgtccccgcacgggaaaagctgcgtcgacacccctcctgcctgaagtggaagcctatctccaactcctcgtggtcatcttcatgatgaacagcaagcgctacaaagaggtatccaggatgcagtgaga

SEQ ID NO: 55888 - DNA, 342 bp, Homo sapiens
cttccctcgctcatctcctctctttgctgtgccccaggccatgaggtttcctcccaaatcgtacaacaaggacttggagtctgcagagggtaagctctctgctttctgggtgagaccgaaaggtcaaacttccacacagaaggggagtcgggcgagtgtctggaagggctgagctgctctgaagctttggcctcacttgcctctctccccaggaacggcgtgagcgagaacagcaggacttggagtttgccaaggagatggcagaagatgatgatgacagcttcccttgagctggggggctggggaggggtagggggaatggggacaggctctttccccctt

SEQ ID NO: 55889 - DNA, 436 bp, Homo sapiens
ttgaaaggggccacagtggctgagaaacgttggactatattactatttccaatcttctgatcgtctatgagaattccttcggtaagatttgttaagaattcagatcctgggctccttctcagacatactcggttgaaagccctgaggcaggacctaggaatctgcattctaatagtctcctgggctgtcttcatactcagcaggtttgaggccactgagtaaggggttcttgcagtcctctagtcccttgtcacagctctggaagcaggacgctccaggtttgggtggtgttcgggcccctttttcaggcagcccttcagaaattcgcagtgagtgtcctgcgtctcccctggcctgggaaggtctcctgccaagtcaattcctgcagcacagagggaaagggtgcccttgtctgattagaaacagacacagctgt

SEQ ID NO: 55890 - DNA, 378 bp, Homo sapiens
tggtaaagaaatcagcctaacccagccctgaactcatctgaccaccaaagcttttcctcacattggcaccctgagaaactggtattctgaagaacgcgctttaggaaaaactgctttagacaacaggaatttggtaagaagaactttgtttctgtgaacacatatttgcatgtcagggtacatccttttgtattttatttatatttagtgtgtctatgtcttgtcttcttggtagctttacaagaatttcgaggagagaaagtatgattttgtctctttgaattcctacttctcaccacccataatgtggtgcacacataaatatctgtaaatatgcagttagaactttgcatcactaatgagttaattaaactattc

SEQ ID NO: 55891 - DNA, 379 bp, Homo sapiens
ccgttctcagccctttatgcattgccttatgtagtcttcacaatagccctgtgaattggcactgttggaattaccatttacagctgaaaaaagtaaggcacagggaggttaagtcactcgcctgaaaccacccaatcagtctacctcaaaggcaagtgctcagcctgtgctctacagggaaattcacagaatcatccctgttttacaggtaagaaagcaggagttgataacggtgagaaattcctggccactcatgtgaaatgaataggaaaaaaaaacagtaaatatagggttcagtactacctacagtttcaggcatgcaatagaggtcttgcaattcatcccctgtggataagggacaactatttcattgcctgta

SEQ ID NO: 55892 - DNA, 351 bp, Homo sapiens
cctttgcctcaaattccctgaagcatctcttttcaaacatcagtcaagtgtgagccaagtccttggccttgccaatgtaaaggcaatttcgtcccttgggcaaaaattgccaaccttaatgggttccagctgttgcatggttgagtgccctctcagtcagcctacagcctgccctggcatttcaaagggctcctgccaggtctgtgtcacccccacgcaaaaggtgaagctggcctttgaaccacgtggccttgccctgtggatgtgcattacctccaagggaaaggaaatgacttccttctggctgcgtggcctggccagaggcctcaggagctcagattacctggatca

SEQ ID NO: 55893 - DNA, 1292 bp, Homo sapiens
gaaaagtataaacctaaggcatcacctttacagaaaatatcttccacggaaacatctaaaggccacagatcagccctggggttcagagggatcctgacagctactcctcaagatcctctctgttgtgattcatccccccggggccctacagtttctccttcctgactcttacatttctttggatggcatcattattttaggtgccaagcactgtggattctgcctctcagtgtccagacacccattttccttcccactgttccttccccatggagaagcctgtggctggctgacagcagagagagatgctcaacttggagaaggtgttacctgggccaggtggggaaggtttgtttgcagagcaaagaagtgaaggaagtattaaccctttgcatggcctcctgagaatccgacaagacgtaaatagccaagaatatctgtgaaacttcatcactgagttacaatatttatcactgcaagtgtgttgttcattgacactataaagccatgtggaattaagcagccttgaaacacaaaatggagaaaggctaagagctgagaattgttgccttcagggaaatacaatcaatgtcaagcaaacaaccaccccaaaatggttagctttatcagcattcaggcctacagtgaacgcaaatgttccagatctgagtttcaatttttaaagaataaacatatgcaaatgaccattagtcttagtagttttagggctcagaatgatcttatcttgttaacattcagggcaactgcttatacccatttgaatgtcatttagagggctaggaaagactgcttcaacatttgatgactaaatggcagggctcagccacaatgctcactccgagaaatgagaaatagacacaccagtatgctagatgctgatgcagttcaggaaatgctaccccaaaatatggcccctcagcatactgagtattttaagcagaagacaattaagaaaaccacaaaaacagaaaggtccctctgaccttctcccaccctctctctcttgaagatcctcatgtgacaggtgacctgccatataatcagaaggaagaaatgttacacagagaggctgagaagaatctgaggacttgctaagttttccccagtttattaccattagatcatatgccttttttgttcaatcatacttctatacaactgtccatcattcattaaacctaaccacaaaagtagttttcactcggtttttgagtgaaggctcctgtgtcacataaaacttacattaaataaatttgttccacttttaaaaa

SEQ ID NO: 55894 - DNA, 637 bp, Homo sapiens
gaaaagtataaacctaaggcatcacctttacagaaaatatcttccacggaaacatctaaaggccacagatcagccctggggttcagagggatcctgacagctactcctcaagatcctctctgttgtgattcatccccccggggccctacagtttctccttcctgactcttacatttctttggatggcatcattattttaggtgccaagcactgtggattctgcctctcagtgtccagacacccattttccttcccactgttccttccccatggagaagcctgtggctggctgacagcagagagagatgctcaacttggagaaggtgttacctgggccaggtggggaaggtttgtttgcagagcaaagaagtgaagatcctcatgtgacaggtgacctgccatataatcagaaggaagaaatgttacacagagaggctgagaagaatctgaggacttgctaagttttccccagtttattaccattagatcatatgccttttttgttcaatcatacttctatacaactgtccatcattcattaaacctaaccacaaaagtagttttcactcggtttttgagtgaaggctcctgtgtcacataaaacttacattaaataaatttgttccacttttaaaaa

SEQ ID NO: 55895 - DNA, 623 bp, Homo sapiens
atgattcgcgaagcatttgcggaagacagcgggcgatttacttgcagtgctgtaaatgaggctggaaccgtcagcacatcctgctatctggctgtgcaggtgtcagaagaatttgaaaaggaaaccacagccgtgactgagaaatttactacagaagagaaacgctttgttgagtcaagagatgtggttatgactgatactagcctcacagaggaacaagcagggcctggagaacctgccgcgccttactttattacaaaaccagtggtccagaaactggtggaaggtgggagcgtggtgtttggatgccaagttggcggcaacccaaagccccatgtatactggaaaaaatctggtgttcctctaaccactggatacagatacaaagtgagttacaacaaacaaaccggtgaatgcaagctggtgatttctatgacttttgctgatgatgctggagaatacactattgttgttcgcaataagcatggagaaacttctgcatctgcttccttgcttgaagaagctgattatgagttactgatgaagtcccagcaagaaatgctttatcagacacaagtgactgcatttgttcaagaacctaaagttggagaaacagcacctgg

SEQ ID NO: 55896 - DNA, 858 bp, Homo sapiens
gtgagagaggatgaacattgtgtcctcatatggcagaagagtgaaagagagggaacacattcttgcaagccccttatatagtgacattcattcattcatgatggcagagctctcatgacctaagcaccttccaaaaagccccacctcccaacactgttgcactgggcatgaagtttccaacacatgcattttgggagacacattcagaccatagcatggcccaaataaataagtaaaaaacagcaacttagcgaaaacagattatgtagtcataagaaaacataggggaaagaacccaactatagttcatgttctttctgagcaaaggctatattgcatttctgaaaacaaaaacatgataccttttagaaaaggaatattataaaaacgtaaagagctctagtaatttaaaatgttataaatgaaaagttaataggagagttagaagattaaagttgaaggaatctcccaaaaagtagaacaaaaaaagccaaaagatagaaaggaagagacccaaataagaattgtgtcccctgaaaattcatgtgttgaagccgtaaagcccagtacctcaggacgtgactgtatttggagacagggcctttaaagagattaggttaaaatgaggccattagggtgagccttattgctatccaacttaggtccttattagaagagaaaattcggacatacaaagagacatgagggatgcaagggcatcctagaaagaccatgtgaggacacagaagaaagtagccatctgtaatacagggagagagaccttaggagaaaccaaacttactgataccttgatctcagaactgtgaaaataaatttctgttgtttaagccacaaaaa

SEQ ID NO: 55897 - DNA, 294 bp, Homo sapiens
tcttttatctgccccttccccaggctttggaggagaagatacggaccacggagacacaggtgcttgtggcatctgcacagaagaagctgctagaggaaagactaaagcttgtctcagaactgtgggatgctgggatcaaggtatgggaggcaagccccagggtggcagcaaacttaggtgtgctggacacaaactgaataaaagctcacccataatggatcctgccattacttctcaaaagtagagctaagaacagggtgccagcttggacaccctctgtccctgaggacagca

SEQ ID NO: 55898 - DNA, 757 bp, Homo sapiens
tcaaatgttacccggcatggatgcagcactttacagagctctctcactctaggactttaccttactccctcaaaaccctgggaaggagatggtaaaactaacccagttttcaggcctggatggttcagtgaccagtcaggaaagggaagacttagaacaaggacccgggactaaagtgctccccttttccatctgtctcacctggctgcaatagtccttccctgaggaaagcacctcattctggggacccaggagaggtaagagcacctgccaggcagcctctgcccctcagagccaaggaagtgacccagagctggctgtggtggggagcgtttgcactctgcagagaggagcagactggtaggggtgctttcaactcaaccttccctaactccctccctctacctgtgatgctgtaatgagccacttgctatatttctaccagggttgggtgtcctcactccaaacgaatgtctgagagttcttaggggaaatgctacctactcagcagttcttagggatgtgctgcctaattctgtgagaggcagcacatcatagtcaaaggaacatcgagttttagggtcagaaagatctaggtttgaatcttggcccttcccttgtgacgctgggttgcctcccagagcatccagccctgcacctctaaactgtggttaatattacttatccttgtcaggctgcaataaagatgaacgagtacagtgactagtacaaggcctggcacacacacacacaaaaa

SEQ ID NO: 55899 - DNA, 976 bp, Homo sapiens
aaataaacaacataataaacccaaataaagtagaatgaagggatttgagaaataaatattgaagaaaaataaaacaaaaaaatcaatttgagcttattaacaaaattcaaagctagttcttttaagatgtctaatactatagaaacatctttggcctgatatatgaaggagaagagagcaaaaggaaaaggacacagtaaatttaaaagtatgttttaatacaatacaatctatggcagaatgcgtaattgttcacaatactttgcatctccctgtattcatgtcctttgttatgtaaattcgcaattcctcctggtaatggtaaaatatatccacctccattcataatattgtgctggactgtgtgatttactttggcagaagtgccagtgccagttctgaatctaggccttaagggtatcacatatgtccacttatccctcttgtacttcttccatccccaggagaagaatgtgtctctggtagccaattgatccaaaaaggatctgacattttcagatgtggaaccaaggccagccaagcccagccaagcccagcatagatccgatccgccaaagcccaactgtcttacagatgtataaactggaataaatgttgctttatacttagtttggggtggtttactacacagcattattatggctatgctgactagcacactatgttaccaacacattggaaaaaacagaatatgcacataatttttctgaaaaatattttggcaaaatagtcccaagaagaagtagaaaatctgaacaaataaattaacacaaaagaaaaattaatgccaagttctgccaccaccaaatgacatgttctactatgtcttcaaaaagacagattattcttgtcttatataaactattacagaacaggaaaaatggtgagaaatgatccaattcatttttttaaaaaggtagcataacattggtagcaatgccagactagaacagaa

SEQ ID NO: 55900 - DNA, 498 bp, Homo sapiens
tctcaccctgtcacccaggctggagtgcagtggcacaatctctgctcactgcaagctccacctcccaggttcacaccattctcctgcctcagcctcctgagtagctgggattacaggcgcccaccaccacgcccagctaattttttgggtttttagtagagatggggtttcaccatgttagccaggatggtctcaatctcctgaccttgtgatccgcccagctcagcctcccaaagtgctgggattataggcttgagccaccgcgcccggcctaaacagttttcttaaaatactccagttctgttcatgaacttcgtcaaatacactgacacctgccaacttaaaaccgcaaaagaaaatcaattccatatattaaattgaaaatcacaaatcagattgcttaatgtaccaaattctctgtttaaataatgaacacgctcaaattatcttgatcattgcaaaacttaatcctaaatttaacataaaatattaacattc

SEQ ID NO: 55901 - DNA, 322 bp, Homo sapiens
taataaatagtatatgtagtgaagaaaaagttataacaagtatacattacatttaacacacctagcacataggacaccctcaacaaacagctacagctgctgtaaatcatgtgtatataatataacatgcaagcatatcttcatgtattgattaattactacttcttggaaaaggatctgaggaacatatttaatatatttaatatgcctgctcatatgttcatttagtgcttatcaattatatttagtgcttttctattagcttcatccatttgattaagatagcaacttgtattatttaatatatgttactctgtgctgt

SEQ ID NO: 55902 - DNA, 278 bp, Homo sapiens
cagttatttatacataaagctaaagaaagtcttcccaggtgaagcctttaaagtaatactacatgtgcttcccgatgtttataatgcctgctgcacagaaatcccactttaggtcactagccatcacatgggtaacatgagaaagataatgaaaatattcttgaagtttcctgaagtgcaacaactgggaaatctcttagcaaccaacatgtaaaaatatacctgtacactcttttctattcattttatcttgaacggagcagtaagaaaaccacgtg

SEQ ID NO: 55903 - DNA, 231 bp, Homo sapiens
ggaaatgagcacagagagaaccagtcacagcatgatggaagaaacctggaactaaagcctcactacttctctttcctgactgccccgccacctcagatcccaaatccacagcttacaggaagtttttaccaatgttatttctaagtgagcacagaatgtacggtccaagccagtgataagaattctccctgtagcctggggttattgtaattaaagtgcataacttatctc

SEQ ID NO: 55904 - DNA, 369 bp, Homo sapiens
tgccattagcaacactgttcagatgagataattaagaaaaaaagccaattgaatgattgagtgaatgaatgattgaaaatctttccgaagttataataataattgtgattattggggtcaaagcaaaaccattttagtctaaaagattgtacactataccaacttttacccaatttggaatgaaaaattacatttccaaaccatgtagaaattctgaactctttgaaatattttcttttgtgggaaagaaccagaaattctttgtcatatgtacccatttatcttattttagttacccaaccaaaagataaaataatattctcaaagagataattgactggaggagtttaaagtgtttataaatattag

SEQ ID NO: 55905 - DNA, 2513 bp, Homo sapiens
catcactagcttgcctccaagctctctcactatgaacagacaagtttgcaagaaatccttcagtggcaggagccagggtttctctggccgctctgctgtggtctccggcagcagcaggatgagctgtgtggcccgctctgggggagctggtggaggggcctgtggcttcaggagcggagcaggcagctttggcagtcgcagcctctacaacctgggcagcaacaagagcatctccatcagcgtggcagctggcagctcccgggctggaggctttgggggagggcggagcagctgtggctttgcaggtggctatggaggtggctttgggggcagctatggtggtggctttggtggtggcagaggagtaggtagtggttttggaggggctggtggctttggtggagctggtggctttggtggtcctggtgtatttggtgggcctggcagctttggtggtcctggtggctttggccctgggggctttcctgggggaattcaggaagtgattgtaaaccagagtctcctgcagcccctcaatgtggagatcgacccccagattgggcaagtaaaggcccaggagcgggaacagatcaagaccctcaacaacaagtttgcctccttcatcgacaaggtgcggttcctggaacagcagaacaaggtcctggagaccaagtgggaactgctccagcagcagaccacaggctcagggcccagcagcctggagccttgttttgaatcctacatcagcttcctatgcaagcagctagattcacttctaggggagagggggaacctggagggagagctgaaaagcatgcaggacctggtggaagacttcaaaaagaagtatgaagatgaaatcaacaaacgcactgccgcagagaatgagtttgtggggctcaagaaggatgtggatgcggctttcatgaacaaggtggagctgcaggccaaagtggacagcctgacagatgaagtcagcttcctgaggaccctctatgagatggagctgtcccagatgcaaagccatgccagtgacacgtctgtggttctgtccatggacaacaaccgctgcctggacctgggcagcatcattgccgaggtccgcacccagtatgaggagattgcccagaggagcaagtctgaagctgaggccctgtaccagaccaagcttggggagctgcagaccacagctggcaggcatggggatgacctgaggaacaccaagagtgagatcatggagctcaacaggatgatccagaggctacgggctgagattgaaaatgtcaagaagcagaatgccaacctgcagacggcaattgcagaggctgagcagcgtggagagatggccctcaaggacgccaatgccaagctccaagacttgcagactgccctacagaaggctaaggatgacctggctcggctcctgcgtgactaccaggagctgatgaatgtcaagctggccctggatgtggagattgccacctaccgcaagctgctggagggagaggagtgcaggatgtctggagaatgtcagagtgccgtgtgcatttcagtggtcagcaatgtcaccagcacaagtggcagctctggcagtagccgtggagtttttggaggggtcagtggcagtggcagtggtggctacaaaggcggcagcagcagcagcagcagcagcggctatggagtcagtggcggcagcggcagtggctatggaggggtcagcagtggcagcactgggggcaggggtagcagcgggagctaccagagcagcagtagtgggagcaggctcggcggtgcaggtagcatctccgtgagccacagtggaatgggctccagctctggcagcatccagacttctggaggaagtggctacaagtctggtggtggaggcagcaccagtatccgcttctcccagaccacgagctcaagccagcatagctccaccaagtgatctactgttccaaatctctataaccacctgcttcccactcagcctgcaatagtgtttcccactctctgcttggcatcaatagatgcataagggtcaaccacatttttcctcaagttccctggagaagaagctgaactcctggtttctccatccccatgaccttcccagggccatggaggtcctgctgctggtctgggatgatgatgcccctggaaaccttcctgcaatggccccttactttggacagcaacccctgagcccaagccagttttggccttcacagcctggccggttcccactctggcccatctcccattcttactgggagttggagatttgaagccagtcatctcagcactgtctgaggagggcagagccatgggttctgtgctggagggtgcacggccaagatctccagactgctggttcccagggaaccctccctacatctgggcttcagatcctgactcccttctgtcccctaattccctgagctgtagatcctctggtgatgagtatgttgcactttcttttctcaataaattgcactgaacttcaaaaaaaa

SEQ ID NO: 55906 - DNA, 2213 bp, Homo sapiens
cggccaggctggtacaggcggctgctcgcggaggcacttctccgagcgtgacgtgcggactccgctccactgcggcccgcccgcccgccggtctagccgccgcctccttcgctccctgagcgcgccaggcgagggtcagctgccggggcgacgcggcgcggagagggcgggcgggggggctgtgggagcgccggtctctatatggcggcggctctgtcgggcctggctgtccggctctcgcgctcggccgccgcccgctcctatggggtcttctgcaaggggctgactcgcacgctgctcatcttcttcgacctggcctggcggctgcgtatcaacttcccctacctctacatcgtggcttccatgatgctcaacgtccgcctgcaggttcatattgagatccattgaaggccctcccagactgacgaaggcgtgacctcaggcccaccgcatccaagaacacgaagcatgagggacagaagagggcccctcggcacctgcctggcacaagtgcagcaggccggaggaggtgactcggacaaactatcatgcagccttaagaaaagaatgccggagggcccttggcctgcagatgcaccctcctggatgaataagcctgtggttgatggaaattcacaaagtgaggcattatcactggaaatgagaaaggatccgagcggggctggcctctggcttcacagtggcggcccagtgcttccatatgtgagagaatcagtaagaagaaatccagcctcagcagccactccgagcacagccgtgggtttgttccctgctccaacagagtgttttgctcgggtgtcctgcagtggtgttgaagctctggggcagcgagactggctgggaggagggcccagggccactgacggccacagaggacagtgccccaaaggagagcctcgggttgtcacgactgccacgccatcaaaaagtgccggaaatgggaagttttcaggatgacccaccaagtgcttttcccaagggtctgggctctgagttggaacccgcttgcctgcactccatcctgtctgcaacgctgcacgtgtatcccgaagtgctcctgagtgaggagacaaaacgcattttccttgaccgtttaaagcccatgttttcaaagcaaacaatagaattcaagaaaatgcttaaaagcacctcagatggtctgcagataacactggggttactggctctgcaaccttttgaattagcaaatacattatgccatagttaaggtacaagcagaacaataccaatagattaattttaagagttgtcttagaatgatttctttcgcattaagtctggatgcaaactgtgcagcccttaggttcctgctgtagttttgtacgacctggcagacttaaagtaaattgagtttaaattcaaagccagttgatgcggaaggaacttttttggcatgtgttaaattgtgctttaaaagacatataaagaattgggaaacatttcaggagacgatcatagcctgtataaataccagattagaacatacggatttaccatgaagttctgtcttcaacatccattctaaagggctactgtcccaaatcctgtgtgtccttttgacttgtctgatcacccaatggaagtggatacttgtaaagtctacaccactgtacttggcgttaaatcttgctgaattcgtggtaagctgttaccatgtctacattttgtagaatgattttggtctgcagcaaaattcgatttcacttctcatacccctttccttccacttgaaatgcaatttagacagaggccctgtggtgaaagttgcaatattaagtttacctttagaagatcccttctcaaactcagaaccctagcagtgttaccttaaacaaaaatgagctcgagaaaaaagtagctcagttacagagaagcaaatcgagttatttcccacataaaaagtttcccagattctaagaattgcagtatcctgtaccctaaaatttttcaaggtgactcctgttgtcgtctgttgataactttaataaaggtcatttaaggacataagtttttaaagactcccaaagtgaaacttaaacattttcgggattatcgattgcatatatcagtttatgctgtgtgctgaattactatgccatgtgctattttagtgtttggggaaaatgaaaaataaaatttgttctttagcttaataaatatgtcttatttta

SEQ ID NO: 55907 - DNA, 2314 bp, Homo sapiens
  misc_feature (2227)..(2227): n is a, c, g, or t
cggccaggctggtacaggcggctgctcgcggaggcacttctccgagcgtgacgtgcggactccgctccactgcggcccgcccgcccgccggtctagccgccgcctccttcgctccctgagcgcgccaggcgagggtcagctgccggggcgacgcggcgcggagagggcgggcgggggggctgtgggagcgccggtctctatatggcggcggctctgtcgggcctggctgtccggctctcgcgctcggccgccgcccgctcctatggggtcttctgcaaggggctgactcgcacgctgctcatcttcttcgacctggcctggcggctgcgtatcaacttcccctacctctacatcgtggcttccatgatgctcaacgtccgcctgcaggttcatattgagatccattgaaggccctcccagactgacgaaggcgtgacctcaggcccaccgcatccaagaacacgaagcatgagggacagaagagggcccctcggcacctgcctggcacaagtgcagcaggccggaggaggtgactcggacaaactatcatgcagccttaagaaaagaatgccggagggcccttggcctgcagatgcaccctcctggatgaataagcctgtggttgatggaaattcacaaagtgaggcattatcactggaaatgagaaaggatccgagcggggctggcctctggcttcacagtggcggcccagtgcttccatatgtgagagaatcagtaagaagaaatccagcctcagcagccactccgagcacagccgtgggtttgttccctgctccaacagagtgttttgctcgggtgtcctgcagtggtgttgaagctctggggcagcgagactggctgggaggagggcccagggccactgacggccacagaggacagtgccccaaaggagagcctcgggttgtcacgactgccacgccatcaaaaagtgccggaaatgggaagttttcaggatgacccaccaagtgcttttcccaagggtctgggctctgagttggaacccgcttgcctgcactccatcctgtctgcaacgctgcacgtgtatcccgaagtgctcctgagtgaggagacaaaacgcattttccttgaccgtttaaagcccatgttttcaaagcaaacaatagaattcaagaaaatgcttaaaagcacctcagatggtctgcagataacactggggttactggctctgcaaccttttgaattagcaaatacattatgccatagttaaggtacaagcagaacaataccaatagattaattttaagagttgtcttagaatgatttctttcgcattaagtctggatgcaaactgtgcagcccttaggttcctgctgtagttttgtacgacctggcagacttaaagtaaattgagtttaaattcaaagccagttgatgcggaaggaacttttttggcatgtgttaaattgtgctttaaaagacatataaagaattgggaaacatttcaggagacgatcatagcctgtataaataccagattagaacatacggatttaccatgaagttctgtcttcaacatccattctaaagggctactgtcccaaatcctgtgtgtccttttgacttgtctgatcacccaatggaagtggatacttgtaaagtctacaccactgtacttggcgttaaatcttgctgaattcgtggtaagctgttaccatgtctacattttgtagaatgattttggtctgcagcaaaattcgatttcacttctcatacccctttccttccacttgaaatgcaatttagacagaggccctgtggtgaaagttgcaatattaagtttacctttagaagatcccttctcaaactcagaaccctagcagtgttaccttaaacaaaaatgagctcgagaaaaaagtagctcagttacagagaagcaaatcgagttatttcccacataaaaagtttcccagattctaagaattgcagtatcctgtaccctaaaatttttcaaggtgactcctgttgtcgtctgttgataactttaataaaggtcatttaaggacataagtttttaaagactcccaaagtgaaacttaaacattttcgggattatcgattgcatatatcagtttatgctgtgtgctgaattactatgccatgtgctattttagtgtttggggaaaatgaaaaataaaatttgttctttagcttaataaatatgtcttattttaaaaaaaaaaagggnggggtcaaagtatctcgaggggccaaatagcgtacaagtttgtaaaaggggccatgggggttaaaagagaggcggtaaacgggaacc

SEQ ID NO: 55908 - DNA, 1975 bp, Homo sapiens
cggccaggctggtacaggcggctgctcgcggaggcacttctccgagcgtgacgtgcggactccgctccactgcggcccgcccgcccgccggtctagccgccgcctccttcgctccctgagcgcgccaggcgagggtcagctgccggggcgacgcggcgcggagagggcgggcgggggggctgtgggagcgccggtctctatatggcggcggctctgtcgggcctggctgtccggctctcgcgctcggccgccgcccgctcctatggggtcttctgcaaggggctgactcgcacgctgctcatcttcttcgacctggcctggcggctgcgtatcaacttcccccttggcctgcagatgcaccctcctggatgaataagcctgtggttgatggaaattcacaaagtgaggcattatcactggaaatgagaaaggatccgagcggggctggcctctggcttcacagtggcggcccagtgcttccatatgtgagagaatcagtaagaagaaatccagcctcagcagccactccgagcacagccgtgggtttgttccctgctccaacagagtgttttgctcgggtgtcctgcagtggtgttgaagctctggggcagcgagactggctgggaggagggcccagggccactgacggccacagaggacagtgccccaaaggagagcctcgggttgtcacgactgccacgccatcaaaaagtgccggaaatgggaagttttcaggatgacccaccaagtgcttttcccaagggtctgggctctgagttggaacccgcttgcctgcactccatcctgtctgcaacgctgcacgtgtatcccgaagtgctcctgagtgaggagacaaaacgcattttccttgaccgtttaaagcccatgttttcaaagcaaacaatagaattcaagaaaatgcttaaaagcacctcagatggtctgcagataacactggggttactggctctgcaaccttttgaattagcaaatacattatgccatagttaaggtacaagcagaacaataccaatagattaattttaagagttgtcttagaatgatttctttcgcattaagtctggatgcaaactgtgcagcccttaggttcctgctgtagttttgtacgacctggcagacttaaagtaaattgagtttaaattcaaagccagttgatgcggaaggaacttttttggcatgtgttaaattgtgctttaaaagacatataaagaattgggaaacatttcaggagacgatcatagcctgtataaataccagattagaacatacggatttaccatgaagttctgtcttcaacatccattctaaagggctactgtcccaaatcctgtgtgtccttttgacttgtctgatcacccaatggaagtggatacttgtaaagtctacaccactgtacttggcgttaaatcttgctgaattcgtggtaagctgttaccatgtctacattttgtagaatgattttggtctgcagcaaaattcgatttcacttctcatacccctttccttccacttgaaatgcaatttagacagaggccctgtggtgaaagttgcaatattaagtttacctttagaagatcccttctcaaactcagaaccctagcagtgttaccttaaacaaaaatgagctcgagaaaaaagtagctcagttacagagaagcaaatcgagttatttcccacataaaaagtttcccagattctaagaattgcagtatcctgtaccctaaaatttttcaaggtgactcctgttgtcgtctgttgataactttaataaaggtcatttaaggacataagtttttaaagactcccaaagtgaaacttaaacattttcgggattatcgattgcatatatcagtttatgctgtgtgctgaattactatgccatgtgctattttagtgtttggggaaaatgaaaaataaaatttgttctttagcttaataaatatgtcttatttta

SEQ ID NO: 55909 - DNA, 1722 bp, Homo sapiens
cggccaggctggtacaggcggctgctcgcggaggcacttctccgagcgtgacgtgcggactccgctccactgcggcccgcccgcccgccggtctagccgccgcctccttcgctccctgagcgcgccaggcgagggtcagctgccggggcgacgcggcgcggagagggcgggcgggggggctgtgggagcgccggtctctatatggcggcggctctgtcgggcctggctgtccggctctcgcgctcggccgccgcccgctcctatggggtcttctgcaaggggctgactcgcacgctgctcatcttcttcgacctggcctggcggctgcgtatcaacttcccctacctctacatcgtggcttccatgatgctcaacgtccgcctgcaggttcatattgagatccattgaaggccctcccagactgacgaaggcgtgacctcaggcccaccgcatccaagaacacgaagcatgagggacagaagagggcccctcggcacctgcctggcacaagtgcagcaggccggaggaggtgactcggacaaactatcatgcagccttaagaaaagaatgccggagggcccttggcctgcagatgcaccctcctggatgaataagcctgtggttgatggaaattcacaaagtgaggcattatcactggaaatgagaaaggatccgagcggggctggcctctggcttcacagtggcggcccagtgcttccatatgtgagagaatcagtaagaagaaatccagcctcagcagccactccgagcacagccgtgggtttgttccctgctccaacagagtgttttgctcgggtgtcctgcagtggtgttgaagctctggggcagcgagactggctgggaggagggcccagggccactgacggccacagaggacagtgccccaaaggagagcctcgggttgtcacgactgccacgccatcaaaaagtgccggaaatgggaagttttcaggatgacccaccaagtgcttttcccaagggtctgggctctgagttggaacccgcttgcctgcactccatcctgtctgcaacgctgcacgtgtatcccgaagtgctcctgagtgaggagacaaaacgcattttccttgaccgtttaaagcccatgttttcaaagcaaacaatagaattcaagaaaatgcttaaaagcacctcagatggtctgcagataacactggggttactggctctgcaaccttttgaattagcaaatacattatgccatagttaaggtacaagcagaacaataccaatagattaattttaagagttgtcttagaatgatttctttcgcattaagtctggatgcaaactgtgcagcccttaggttcctgctgtagttttgtacgacctggcagacttaaagtaaattgagtttaaattcaaagccagttgatgcggaaggaacttttttggcatgtgttaaattgtgctttaaaagacatataaagaattgcagtatcctgtaccctaaaatttttcaaggtgactcctgttgtcgtctgttgataactttaataaaggtcatttaaggacataagtttttaaagactcccaaagtgaaacttaaacattttcgggattatcgattgcatatatcagtttatgctgtgtgctgaattactatgccatgtgctattttagtgtttggggaaaatgaaaaataaaatttgttctttagcttaataaatatgtcttatttta

SEQ ID NO: 55910 - DNA, 570 bp, Homo sapiens
tgttctccactaggccgggcgtggtggctcacgcctgtaatcccagtactttgggaggccaaggcgagtggatcatgaggtcaggagatggagaccatcccagctaacttggtgaaaccttgtctctattaaaaatacaaaaaattagcgggcttggtggcatgcaactggtcgcccagcgtgggcgacagagcaagactctgtctcaaaaaaacaaaaaccttaatacggctgggcatggtggctcacacctgtaatcccagcactttgggacgctgaggtgggtggatcacctgaggtcaggagttcaaaaccagccttaccaatatggtgaaaccctgtactggagactgtcataaagatctcagtgtttgttaggaaatatttggtgggtgtagatgctcttaagacccatgtgtcttcattttagaactttaatttgattccctttcctaggttcatattgagatccattgaaggccctcccagactgacgaaggcgtgacctcaggcccaccgcatccaagaacacgaagcatgagggacagaagagggcccctcggcacctgc

SEQ ID NO: 55911 - DNA, 236 bp, Homo sapiens
ggaaaaaattgaaactcaagccaaggaaactaagaaatttagtaaaatgatacaagagctcaaacagaaaataactattatatgcaaaaaccaaactgattttctacagctgaaattttcactacaacaatttcataatacaattggaagtatttacagcagaatagaccaagctgcaggaagaatctcagagttcaaagaccagttctttgaatctcagtcagacaaaaataaag

SEQ ID NO: 55912 - DNA, 257 bp, Homo sapiens
ctgctaatgttcaagatatatattagttttctatttctgctgtaacaaatactacaaactcagtggctaaattaacaaatttgtcttgcagttctagagattagaagttcaaaatgggtctccctaagcagacatcaaggtgtcagtagggctatgttccttctggaggctctaagagaaaacttgttttcttgctttttacagcttctagagaatgtccacatttcttgactcatggccaccttccaacttcaaag

SEQ ID NO: 55913 - DNA, 393 bp, Homo sapiens
ggacaacatcttctagaaaaagcagccattcagtaaagattttgggtgcgtagatgatttgatgggctagagaattattcctgaaagttccttgcttgcattattaaccaaattatcaagcctttcttaaaccggttatacttttctggccataccattttccaggtcacaagaagcatattcatgggtacaaccccacatggaaaaggattaatgtagctagacggcccaagttgaaatcaaggccctccgaactttttaaaaagttcatccttgcccatcatcagttataaaataagtacattcctacaagtatcccttcagaggtccattacaaaccggaaagaatgattgcaatgcaggtgccgttcgttattcagctgtccattagct

SEQ ID NO: 55914 - DNA, 698 bp, Homo sapiens
ctagagcccaggtgtcctggctcccacactaccttgcagcccgcccacagggaggaaacgcaccacacaactccactggcagcaaagagaagctgataaaccggttatcactgatttatctccgataacctgggagatttaagccacttctgccaaatcagggtatgatttcttaaaactctgtgagcaaatgcctgctcctggggtgctggagtttggctggtggtaaggccttcacccactaaaccgtgagaacatgattcccaagagcagagtacaaaacagcatcaaaaccaggcgcggtggcaggtacctgtagtgccagctacttgggaggctgaagcgggaggatcacttaaacccaggagtttgaggttatcgtgagctatgactgtaccactgcactccagcctgggcaacatagtaagactgtatctcaaaaaaaaagaaacagaatcaagtgccaattgtgcgcagcccaggtttgcgccctgggattcagagcaggactcacaagtcgtgtgacgaggtggtattgcatgctgtgtgccaggttttagttccttcactccctgacatgcctgctgtgtgccctgtgccatgtgccaggccccatgctggtctgagtagggtgaaccagccaggcacagggtgacgggctgggagcaggactctcgtctccctccactctggggccc

SEQ ID NO: 55915 - DNA, 366 bp, Homo sapiens
gtttggctaatcatcctatgattttgctatagcttgaaaactttttatatcttaaatttttttataattttgaagtattattgtttgggctttgtatatccagtgtattttcaattaaattcccctaactaaagtaattcaaaaggaataaaagtgtaatgtgggctgggcgtggcggctcatgcctgtaatcccagcactttgggaggcccaggcgggcagatcacctgagggcaggagttggagaccagcctggccaacatggtgaaaccctgtctctactaaaaatacaaaattagccgggtgtggtggcacatgcctataatcccagctatttgggaggctgagtcagggagaatctcttga

SEQ ID NO: 55916 - DNA, 330 bp, Homo sapiens
agaactcacactggggagaagccctgtgaatgtagcaaatgtaataaagcattccgtagttacagatcctatcttagacataaaaggagtcacacgggagagaagccttatcaatgtaaggaatgtagaaaagcattcacgtatcccagttcccttcgtagacatgaaaggacccactctgcgaaaaaaccttatgaatgtaagcagtgtgggaaagcattatcttataagttttcaaacacacctaagaatgcgctctggagaaagaccttataaatgttagatatgtgggaaaggcctttattctgccaagtcatttcgaagacatga

SEQ ID NO: 55917 - DNA, 950 bp, Homo sapiens
tagatttgcaagttttgtagctttttatctgtattaacagaaagggcaaatggacaccattgtctgttttctaattcaacccatcaatcagtctactatattggaaaatgaatagctctccttataaaacagtctcctaaagaatatctgaggccacgcatagtggctcatgcctataatcctaggcctttggggggtcaaagtgaaaggattgcttgagcttaggaattcaagaccagcctggacaacataatgagacccccatctctacagaaaaattaaaaaattagccaggcggggtgttgcatgtttgtagtcccagttactcaggaggctgaggtgggaggattgcttgaacttgagaggttgagactgcagtgggctatgattgggacactacactccagcctgggtgacagagttgagaccctgtctcaaaaaaaagaataattgacttctctagtacgtgtatatcaggccttggcttttgcctttgtgtactaaaaggtccagtctagttttagtttttgaacttggacaagaaattttttgtgaagcttttgtttcacaaatcagtaagtgctagaattagtccatatacagtcatgtgcctcataatgacatttcagaccacttatactaggttggttccataagattataatggagctgacaaattcctattgcctagtgacattagagctgtagggcaatgcattactcaagtgttcatggtggtgctgttataaacctactgactgccagttgtataaaagcataacatatacaattacatacagtacatatgtggcaggccattcttctattgctgtaaagaaatacctgagactgagtaatttataaagaaagagctttaattggctcatggttctgcaggctgcacaggaggcatagcggcatctgcttctgagaaggcctcaagaagcttc

SEQ ID NO: 55918 - DNA, 303 bp, Homo sapiens
agtctttgaagatataattaagtaaaggacctcaagataagatgatcttggattatccaggtgggccctaatccatcgacaagcgttcttataagagatagagaggagaggacacaggaaccgatgagaaggccatgtgagacagaggcagagactggagtgatgcagccacaagccaaggagccgttgaaatcccagaagctgaaagaggtaaaaaaagggtctcccctggagccttcagagggagtgtggccttgctgacaccttgattttggccttctggcttccagaactgagaatggc

SEQ ID NO: 55919 - DNA, 429 bp, Homo sapiens
ccacaccttcagcgtgggcatcatggccatcatgaacatgtcacactgctgcagagattttgtttatggccagttttggggccagtttatggccagatttgggggcctgtttccaacactgccctgctatacctcctcctcctccacattcttatacaagttatctgagatacaatctgggatttttctgactgaagcatataatttaaccatattctcttgaccagaacagattatttcttgaatcaaactaataagatcaattgactaattatatgtggaataagttgctgaaatgtgaatctcagatgtgcattagaggacaagtcttaatgctgcagcaatatgcattctttttttttttttttgagatggagtttcactctgtcacctaggctagagtgcagtgatccagtcttgcctcactgc

SEQ ID NO: 55920 - DNA, 345 bp, Homo sapiens
ctccaataagaccctggacggcgcgggtacggggttgcaagaggtcttggtgactccttgagaaagccgtctgggggactggattagaaaagtcagcaggttaatgccaataggatttcccttttaaatgtcacctgccacagtggctcaagtcctgggggatctgataattaaagatggccttgtgcttccttaaatagaaagcttggcacacaaatgacttcaagagtcaaatccgcgttgactttacgcacctctccctgcagcctgagactctcggctgagcttggctttgtgtggccttgcgcctcctgccccctagtgggcgtgatgctcacagagcta

SEQ ID NO: 55921 - DNA, 376 bp, Homo sapiens
caccatgttggccaggctggtctccaactcctgacctaaggtgagcctccaagggcctctttgaataaccaggaaatcaagccctaaatgttggtttcatccacaaggacagacgcagacaggctttgtattcacggaagcagtgagcggtgcgcacgggagccatcagggtcgcctctggggtcaacaccaaacctctctctctgcctttccttcccttgtgcgtggtaaggtgctgaggaagtcaaggaaatcggaacagcagggccacttccagctgcgcagattggatgtgcacagacgttcatcattcaatgtcctaaacatctaaatagttttaaagatgttactaattaaaaccatttttcaaaaatta

SEQ ID NO: 55922 - DNA, 233 bp, Homo sapiens
aggaaaggaaaatgccccctagtggattacgttttaaccactgtgctaacttgagagatagcctgctatctctttacgggacatgagggatgataagcacctcattgcatggtcctggggactgatgaacaaaggctaacatgtggaaaagagcaactaaagaaagaagagccacctccaggttaattagtagaagtctcctcgctgatatgctctcatacactaaaacagca

SEQ ID NO: 55923 - DNA, 359 bp, Homo sapiens
agttttccactgtagtttggataggttcagtactctaaaataaaaccagtcactgcagatagatttccattgcagaagattcttccataaagaagtgatctgtagaacacttgcttctttatcccaccatatagtcttattagttgtggtaagtagctctcatctgttgttttcatgaaaatgaattctataacaaatactatggtctctgtaattgctctgccctataacagtgctattcattgtatgcaatttatattataaactgaggaagaaagtaggaaagttgtaaacataggcttctagagtaaaccagctagcaacgattgctttaaaagacacaaaaaatgtatacagta

SEQ ID NO: 55924 - DNA, 239 bp, Homo sapiens
atactcagaaaagtcagtgatagcaaagcagaaaccttatactatgatgcaatttgaatagtaaactagttttaaatcatgcaaaattgagacaggaatacatgatatgatgagaaacacattggtaaacaatcagataaaacagttaatggaatgccatgttcaagctaggcaagaaagaattaacaatgcatcacttcttttctggtgaattctaacaaggtttatttccactcagc

SEQ ID NO: 55925 - DNA, 394 bp, Homo sapiens
gaaagcaaaatgaatgcagggaaatcaggaggggattattgcaatagtcaggggagaaatgaaggtggcttggagtaacatagaggctatggaaataaagagagggagaggcagattcaggaactgtctttgatgtgggattgacaggatttcgtgcctgaatagatgtgtgcgcaaagagaacagagcacctcagatcatttcccgtttccggcctagcaacctgtggatggctgtatagaaaaggagatctgcttgggacgtttgaagtgcctttgagacatccaagtggcaatgaaaagcaagagttgggtttacagagccagagcttaagcaagagagttacctccagccatgggagtaaaggcagccacccaccaggcagagagactgg

SEQ ID NO: 55926 - DNA, 511 bp, Homo sapiens
gccgacaggaaggtgaagaagtcatctgcgtgctgtgagggtggcgcaccccaactccatggggacagaaggtcctgcatttaggacccttccagacctcacacctatgtatctcttcatctggctgattacttatatcctttcaaagacgcttcttagtaaactgtgcctccctcacatggccagcggagaagggccttgccctacctctcagactgcagccctgagccactccttggaggtgaggagcaccattcacctgagcagctccccgccctggtgtctgagaaataaatctgccttcagtcatacggttctaccaatctgagcacacgacctcccgatagggtactgaggatggcttctgacctggaggcatcaaggacctgaaggcagtaaccatttcagaggacagccacatccctcaaattacaaacatctaaaatgtccattaactgttgagtggatatataaattctgatgttttataaaatggcataccctacatcaa

SEQ ID NO: 55927 - DNA, 555 bp, Homo sapiens
acaatacctgtaccacctttgtatcttggagctgaataacttctttttgattttacaggctcataggtggaagaaacttaccttgagtctcaaatgagactttggacttttgagttaatgctggaacgagttgaccttgggggactattgggaagagatgattatattttgcagtgagatttaggtggccaggggcagaatgataatagtttttatgtttgtctcctccaaatcccgtgttgagatgtaatccccaatgttggagatagggcttggtgggaggtgtttgggtcatgggggcagatctctcatgaatgccttcgtgccctccctgcagtaatgagttcatgtgagatctggttgcttaaaagaggctggcatctctgcctctctgtcttgctgtttttcttgacgtgtgacatgttggcttccctttgccttgcaccatgattttaagcttcttgaggctctcaccaaagcagatgctggcactgtgctttgtgtgcagcctgcagaactgggagccaaataaacctcttttgtttggaaattacc

SEQ ID NO: 55928 - DNA, 111 bp, Homo sapiens
attcctccacttactcaagccagaagccttggaagcatcttattcctcccacgctccacaccattccttcagattcctccggcagctctaactttgcccagattctaccac

SEQ ID NO: 55929 - DNA, 835 bp, Homo sapiens
ccttgtacaatacagcacctaacacagcgccctaaaagagtaggtattcaataaacagtcattgaatgaaagaatgaccagacaataccatcttgcaaagccccttcaggtgacaatctaaacttgtgggtaggagagtgcataaagtttattgctcaactgctcctccagcctgctgaatttactgagtaaagaaatagcaaatatgatagatgttttagatttcatagaacagaatggttgtccattaattctttcattcaatgactgtttattgaatacctactcttttagggcgctgtgttaggtgctgtattgtacaagaaaaatataataaattagattcccagcgctattctgacatagtgaatgaccttgaaaaatttactaaacatactatgtttgtttctccatgagtaaaatagggatacagggacaaacagtctaatatctcatagaaataccatggagacaaataaaatattttaatataaatatgatattaaagtaaatttctgaagtaatacttttgggtatggcactagtttttcctctgactattttactgtttctttcactctcaatataaaaactatttgataagataaaacgatatattttattgtaattagaatttagacaaatcagctataatgtaaaaatgttaataataattacgttttatctgattaaagttacaatgatcatagcactttaaaaatattatctgaactgtcatttgtttatatattaccgtctaataaaatagttatagatcttccaagtttgatgccttacattttaaaaggaaaagataaatggttgattaagaatc

SEQ ID NO: 55930 - DNA, 2527 bp, Homo sapiens
tgaagatgctgaagatgtaccagtcttcaaagaaagctaaagaaggcactgaagatgcgtctcccacaaagcagaaaagtcccatcagtttcttccagtgtgtctacttggatgggtacaatggctatggatttcagtttcctttcactcctgcagaccgccctggagagagctctggtcaagcaaattctccaggacagaagcaacaaggacagtaaacacacatgtatgacccttacaagtgctttaagattttaaaaatgtgatgttttgtccacaatagttcaggcaattaagaatatgcaacccagagaatttctgtgaaaacattttgctctttggcctggtgtggacggaaagggtggccaaatggattgagtgatgagcagacatgtttaagggtctaagtctcaagaatctgttatgtgtgtttgctgcggtgggagggggtgcttgtatttatcttatttccagtcactataaggttgtacacaaactaatttaaagtttacttaataatggtatctttaaaataattgacacaattgcaaaatgaattcctggcttcagttagctattatttttttaatgacaacatagactgtgctctaagtttaaaagatggggaagcttatataaaagtgacccttttgcatcatatgggtatctaaacttaatttacccaataagttgatgcttaatgattttattttatttttgtctatttctattttagttgtggctttgctctaagaatgggtaatagttgtactacagactgctataaatttcttgtgatactcttttagagctcaaaatatctctgagctttagacatggtaaggtggagagtaaatgcttgataaatctttaagatatgtcttgaatgataattaggacattcagtccagtggaaatacaccattcaattagtcaggtctggtgaatcgtttgtttaaaatattagcaaatgagatgtggaattctgaaatttctccagactgtgtcttaataaaaatgtcacctgggtgaaattttagatcaatcactaaatttgggtgacaaatataaaaatattttcatttcactttaatacattctttctgtgaagtaaaatgtttttctttctcataatggcaaaatatgaatgccatcaaagtttaaggaattcattttagccttaaatgccttcgtgagatgtcttacttgtattttaggtaactggtcatcagtgccaatgacatggataacaatttttaatctactcgacagtgcatccctgggaatgactgttatgttttgtcatattcctggtaatataaatactcgtgttctttactacattgtttttatcaactctaaaagtcatgcctctgtgacctttatcatgtttacaattgcaactgaacttatgacaaattaactcaggaaataaattgagttatcctttctagcattgtaattaccatcagcaaggcctgagatagccagagccaatactagccaagtgatttattttcaaggatgccactaactacggttctttaggaccaagatataaaacagtcactaaaaatcattaggctaggtatcagtaatacattcattactaataatgcatttttggagactttgtgaaagaagttggtctctgccaaaagctggtggaccacattcacaccacgaaagccagtgtcacatgaaccagattaatgactctctttatggggtatgtgggacatcctggaagtgtataatttcaggaatgaccagacaataccatcttgcaaagccccttcaggtgacaatctaaacttgtgggtaggagagtgcataaagtttattgctcaactgctcctccagcctgctgaatttactgagtaaagaaatagcaaatatgatagatgttttagatttcatagaacagaatggttgtccattaattctttcattcaatgactgtttattgaatacctactcttttagggcgctgtgttaggtgctgtattgtacaagaaaaatataataaattagattcccagcgctattctgacatagtgaatgaccttgaaaaatttactaaacatactatgtttgtttctccatgagtaaaatagggatacagggacaaacagtctaatatctcatagaaataccatggagacaaataaaatattttaatataaatatgatattaaagtaaatttctgaagtaatacttttgggtatggcactagtttttcctctgactattttactgtttctttcactctcaatataaaaactatttgataagataaaacgatatattttattgtaattagaatttagacaaatcagctataatgtaaaaatgttaataataattacgttttatctgattaaagttacaatgatcatagcactttaaaaatattatctgaactgtcatttgtttatatattaccgtctaataaaatagttatagatcttccaagtttgatgccttacattttaaaaggaaaagataaatggttgattaagaatc

SEQ ID NO: 55931 - DNA, 1739 bp, Homo sapiens
  misc_feature (1645)..(1645): n is a, c, g, or t
  misc_feature (1667)..(1667): n is a, c, g, or t
  misc_feature (1678)..(1678): n is a, c, g, or t
  misc_feature (1720)..(1720): n is a, c, g, or t
tgaagatgctgaagatgtaccagtcttcaaagaaagctaaagaaggcactgaagatgcgtctcccacaaagcagaaaagtcccatcagtttcttccagtgtgtctacttggatgggtacaatggctatggatttcagtttcctttcactcctgcagaccgccctggagagagctctggtcaagcaaattctccaggacagaagcaacaaggacagtaaacacacatgtatgacccttacaagtgctttaagattttaaaaatgtgatgttttgtccacaatagttcaggcaattaagaatatgcaacccagagaatttctgtgaaaacattttgctctttggcctggtgtggacggaaagggtggccaaatggattgagtgatgagcagacatgtttaagggtctaagtctcaagaatctgttatgtgtgtttgctgcggtgggagggggtgcttgtatttatcttatttccagtcactataaggttgtacacaaactaatttaaagtttacttaataatggtatctttaaaataattgacacaattgcaaaatgaattcctggcttcagttagctattatttttttaatgacaacatagactgtgctctaagtttaaaagatggggaagcttatataaaagtgacccttttgcatcatatgggtatctaaacttaatttacccaataagttgatgcttaatgattttattttatttttgtctatttctattttagttgtggctttgctctaagaatgggtaatagttgtactacagactgctataaatttcttgtgatactcttttagagctcaaaatatctctgagctttagacatggtaaggtggagagtaaatgcttgataaatctttaagatatgtcttgaatgataattaggacattcagtccagtggaaatacaccattcaattagtcaggtctggtgaatcgtttgtttaaaatattagcaaatgagatgtggaattctgaaatttctccagactgtgtcttaataaaaatgtcacctgggtgaaattttagatcaatcactaaatttgggtgacaaatataaaaatattttcatttcactttaatacattctttctgtgaagtaaaatgtttttctttctcataatggcaaaatatgaatgccatcaaagtttaaggaattcattttagccttaaatgccttcgtgagatgtcttacttgtattttaggtaactggtcatcagtgccaatgacatggataacaatttttaatctactcgacagtgcatccctgggaatgactgttatgttttgtcatattcctggtaatataaatactcgtgttctttactacattgtttttatcaactctaaaagtcatgcctctgtgacctttatcatgtttacaattgcaactgaacttatgacaaattaactcaggaaataaattgagttatcctttctagcattgtaattaccatcagcaaggcctgagatagccagagccaatactagccaagtgatttattttcaaggatgccactaactacggttctttaggaccaagatataaaacagtcactaaaaatcattaggctaggtatcagtaatacattcattactaataatgcatttttggagactttgtgagagtggncaaggtgaccctgggcagcaanccccaaccaanggccagaggcagccccctttttctgggggggtcaccccggangatttttggggggccccag

SEQ ID NO: 55932 - DNA, 340 bp, Homo sapiens
gcacgagaaaataatcatttgtaaaattcataattttctgcataaactatatttaaatgccatattaaaaaggtgacaaattcaggtaagattatcgagagtaagaattgaataccacttttatcctgatattcctatcttataacctcccatacaacagatgcaaaatatattttatgtatgttttgttttatttatgatttaccaaatctcattttacagattatttgaggtgagcctacacacgtgtgtgtgtgtgtgtgtgtgtgtgtgtgtgtgtgtctcttacatagcacatacaatacagacagttttgactttaaaaaaaatagaggatagt

SEQ ID NO: 55933 - DNA, 320 bp, Homo sapiens
gtgtgaataggcaagcactttgtttgttgtactaaggaactcaaaatgataggctttttgtcaccatgtgcttccaggatctctgttgcatgagcagagatagaggatcttgcacaaacaattaaatgctctagccataagtagtgcaagtttcctttgcttgaaatttactgctgatagccacttggtcacaccttacttccagaggctaggaagtacagttttcccacagtctaagaatgaaagagaattaaccacagtaatgcatagcactcataccatggatgactggataattttaaaagaatgaaatatgcaag

SEQ ID NO: 55934 - DNA, 453 bp, Homo sapiens
cagatcaccaatggcggcatatttttatccatcccccaccccctttttttttctaagagatagggtcctattctgtctcccaggctggagttcagttgtgcaattgtagctcactgcagcctcagacttttgggctcaaccaatcttcctgcggcagcctcccaagaagctaggactacagtcacatgccaccatgcccagctaatatttgtattttcgtttgtagcaacagggtgtccctatgttgcccaggctcgtctagaactcctggcctcaagcaatcctcccactttggcctccctaatatatgggattacaggcatgagctactgcttctggccttatttacatctttactttggagtttgtctttctcttctgtgggctattacatgaactgtcttagcccattctataaaacattttctgccttggtcacgtggaacattacga

SEQ ID NO: 55935 - DNA, 657 bp, Homo sapiens
cttctctccttctttgaaaagcctttttttcttattcttagaacctttgttagtactatataccaaagccagggcataaaatttaccttttttcttaggttaataacaacttgggtggaatcttatatacagactgagacactatagataactccctttgaaagctatgactgaaattaataatagaattgaactaaaaactggcagaaaactatctatttaatcaagtattagtctaaacaatgtaagacatgataagggagaaggggtgatagctgcattaaaagaaatcctaggaaatcattttgagagagacctgatgaatgtttatatggttcatgctcaactatcagcaattttaataataagatcagagttggccaggcgtggtggctcacacctgtaatcccagccgtttgggaggccgaggtgggcagatcacaaggtcaggagttcgagaccagcctggccaaagtgaaaccccgtcttaactaaaaatacaaaaaaattagccaggcgtggtggcaggcgcctgtaatcccagctgcttgggagactgaggcacggagaattgtttgaacctgggaggcagtgcttgcagtgagcccagattgcgcctctgcactccagccagggtaacagtgcaagactccatct

SEQ ID NO: 55936 - DNA, 292 bp, Homo sapiens
ggcagagagaccagcccgcctgttggcttgcaggggtaatgagccttggcttgaaaaaattgttggcctccagagagcacggggctgtggtttcagaatcagtgatgggtgccgcacatcaagacgggaatcaagcaagaccaaggccctgtggactgagcagcgtggagggcgaacggctgcaggctccagacttcaccacagggtggccaacagtggcatcgggaccaaataaagatgtctaacagcttcctgggagcaggaggaggcaggattctggttgccatgaaaa

SEQ ID NO: 55937 - DNA, 3607 bp, Homo sapiens
ctggcccaagaggctgctgtgccctctggggagcccggccgaggcgcctttccacgttcagtccgacccgcagagggctttcttcgccgtgctggccgcggcccgcctcagcatctggtacagccgacctagtgtgttaattgtaacctacaaggagcctgcaaaatcatctactcagtttggatcctacaagcaagctgaatggaggccagatagtaccatgatagctgtatcaacggcaaatggatacatcttgttttttcatattacatctacaagaggggacaagtacctttatgaaccagtgtatcccaaaggaagtccacaaatgaaggggacaccccattttaaggaagaacagtgtgctccagcattaaatttggagatgaggaaaatactggatttacaagcacccatcatgaggtttgcagtctgtgttggaagatctcctggttgctacttctgatggacttcttcatcttattcactgggaaggaatgacaaatggaaggaaagccattaatctttgcacagtacccttttcagtagacctgcagtcatctagagtaggttcattcctgggcttcacagacgtacacatcagagacatggaatactgtgccacacttgatgggtttgctgttgtatttaatgatggtaaagttggatttattacaccagtgtcaagtagatttactgcagagcagcttcatggagtttggccacaagatgttgttgacggaacgtgtgtagcagtaaataacaagtatcgactaatggcatttggctgtgtgagtggttctgtgcaggtctatacaatagataacagcactggagccatgctgctatctcataaattagagctaacagcaaaacagtatcctgacatttggaataaaacaggagctgttaaattgatgagatggtctcctgacaatagtgttgtaatagtgacctgggaatacggaggcctttctttatggagtgtttttggagcacagctgatttgtacacttggaggagattttgcttataggtctgatggcaccaaaaaagatccccttaagatcaactctatgagctggggtgcagaaggctatcacctatgggtaatcagcggatttggttctcaaaacactgaaattgagtctgacctcaggagtgtagttaaacagcccagcatcctgttatttcagtttattaagagtgtactcactgtaaacccttgtatgagtaaccaagagcaggtgttgcttcagggtgaggatcgcttgtacttgaactgtggagaggcttcacaaacccagaatcccaggagttcttcaacacactctgagcataagcccagtcgagaaaagagcccatttgcagatggaggtttagagtctcagggattaagcactttacttggacatcggcattggcatgttgtacagatttccagcacctatctagagagcaattggcctatacggttttcagctattgataagcttggacagaatattgctgtggttggcaagtttggttttgcacattactctttactcaccaaaaaatggaaactttttggaaacattacccaggagcaaaatatgatcgtgacaggtggcttagcctggtggaatgattttatggtccttgcgtgttataacataaatgaccgtcaagaagagcttagagtatacttgcgaacatcaaatctggacaatgcctttgctcatgtcaccaaagcacaagcagaaacattactgcttagtgtcttccaggacatggtaatagtatttagagcagactgttcaatatgcctttacagtattgaaagaaaatctgatggtccaaatactactgctggtattcaagttcttcaggaggtttccatgtcacgctacattcctcaccctttcctggtggtatctgtcactctgacatcagtgagtacagagaatggaatcaccttgaaaatgccacagcaggctcgtggtgcagagagcattatgttaaacctggcaggacagctcatcatgatgcagagggacaggtcaggcccacagatccgggagaaggacagtaaccctaataaccaaaggaaacttctgccattctgtcctcctgttgtactagcccagtctgttgaaaatgtctggacaacgtgtcgagcaaataaacagaaacgtcaccttctggaggccctctggctgagctgtggtggtgcagggatgaaagtttggctccctctcttccctagggatcaccgcaagccccattccttcttgtcccagcggatcatgctgcctttccacatcaacatttacccgctagctgttctgtttgaagatgctttagtccttggtgctgtcaatgacactttgctctatgattctttatatactcggaacaatgctagagaacagctggaggtgctcttccctttctgtgttgtggagagaacctctcagatctacctccaccacattctacgtcaacttctggtcagaaaccttggggagcaagccttgctcttggcccagtcctgtgccacattaccttacttccctcatgtgctggagctcatgctccatgaagtactggaagaagaagctacctcacgggagcccattcccgaccctctgcttcccactgtggcaaaatttatcactgagttccccctcttcctgcagacagttgtccattgtgccaggaagaccgaatatgccctgtggaattacctttttgcagctgttggaaaccctaaggacttgtttgaggagtgtttgatggctcaggatttggacacagctgcctcttaccttattatcttacagaatatggaagtccctgcagtaagtaggcaacatgctacccttctattcaacacagcactagaacaaggcaagtgggacctttgtcgacacatgattcgatttcttaaagccattggctctggagaatctgagacacctccatccacacccacagctcaggaacccagttcaagtggtggatttgagttcttcaggaatcgaagcatcagtttatcccagtcagctgaaaatgttcctgccagtaaattcagtttacagaaaacactaagtatgccatctggtccctctggaaaaagatggagcaaagacagtgactgtgctgagaacatgtatattgacatgatgctctggagacatgctcggcgcctcttagaagatgtgaggttaaaggaccttggctgctttgcagcccagctgggctttgaactaattagttggctatgcaaggaacgtacccgagccgcccgggtagacaactttgtaatagccctgaagagactccacaaagatttcctgtggccacttccaatcatcccagcctcttctatcagttctcctttcaaaaatggaaaataccgaactggtaatgtagacttcatgtcacttgtacaaggagaattgtattttactccgtgtatttacacattttgctattagttgatattcaaggaattattttcattccaaacttaggaatggataaaagccaactttttgtacatgagttggaatgcccactgtttgaccaaagatgtaaataaagtagaacctatgtctctaag

SEQ ID NO: 55938 - DNA, 6621 bp, Homo sapiens
aagtatgaaaaggaatttaatagtatttaatagggtatatataatatacacataacattttttgtttttccttatatagtatttgatactttgaacactctttcttaaattcatcttacttccttggctttcttgatatcagtttctactggtttccctggttgtctttttctttgtgccagtacctttgcggtctcatttatgggttcctctttcctctaaccctttccctcttcttgcctcctttgcacaaatatttagtgacagatttaactaacactgcccttggggctgtgcatacagaggtgagcaaaacaggctatttccccattaaagaagtaaatgctgaatatcttcataaatattgataagtgatgagatcatgctatgtaactatttttgatttcttgcctgagaagtcctctgaagacggagaatattttattcatcctcgaatatccagcacacagtatagcacgtttgcagtctgtgttggaagatctcctggttgctacttctgatggacttcttcatcttattcactgggaaggaatgacaaatggaaggaaagccattaatctttgcacagtacccttttcagtagacctgcagtcatctagagtaggttcattcctgggcttcacagacgtacacatcagagacatggaatactgtgccacacttgatgggtttgctgttgtatttaatgatggtaaagttggatttattacaccagtgtcaagtagatttactgcagagcagcttcatggagtttggccacaagatgttgttgacggaacgtgtgtagcagtaaataacaagtatcgactaatggcatttggctgtgtgagtggttctgtgcaggtctatacaatagataacagcactggagccatgctgctatctcataaattagagctaacagcaaaacagtatcctgacatttggaataaaacaggagctgttaaattgatgagatggtctcctgacaatagtgttgtaatagtgacctgggaatacggaggcctttctttatggagtgtttttggagcacagctgatttgtacacttggaggagattttgcttataggtctgatggcaccaaaaaagatccccttaagatcaactctatgagctggggtgcagaaggctatcacctatgggtaatcagcggatttggttctcaaaacactgaaattgagtctgacctcaggagtgtagttaaacagcccagcatcctgttatttcagtttattaagagtgtactcactgtaaacccttgtatgagtaaccaagagcaggtgttgcttcagggtgaggatcgcttgtacttgaactgtggagaggcttcacaaacccagaatcccaggagttcttcaacacactctgagcataagcccagtcgagaaaagagcccatttgcagatggaggtttagagtctcagggattaagcactttacttggacatcggcattggcatgttgtacagatttccagcacctatctagagagcaattggcctatacggttttcagctattgataagcttggacagaatattgctgtggttggcaagtttggttttgcacattactctttactcaccaaaaaatggaaactttttggaaacattacccaggagcaaaatatgatcgtgacaggtggcttagcctggtggaatgattttatggtccttgcgtgttataacataaatgaccgtcaagaagagcttagagtatacttgcgaacatcaaatctggacaatgcctttgctcatgtcaccaaagcacaagcagaaacattactgcttagtgtcttccaggacatggtaatagtatttagagcagactgttcaatatgcctttacagtattgaaagaaaatctgatggtccaaatactactgctggtattcaagttcttcaggaggtttccatgtcacgctacattcctcaccctttcctggtggtatctgtcactctgacatcagtgagtacagagaatggaatcaccttgaaaatgccacagcaggctcgtggtgcagagagcattatgttaaacctggcaggacagctcatcatgatgcagagggacaggtcaggcccacagatccgggagaaggacagtaaccctaataaccaaaggaaacttctgccattctgtcctcctgttgtactagcccagtctgttgaaaatgtctggacaacgtgtcgagcaaataaacagaaacgtcaccttctggaggccctctggctgagctgtggtggtgcagggatgaaagtttggctccctctcttccctagggatcaccgcaagccccattccttcttgtcccagcggatcatgctgcctttccacatcaacatttacccgctagctgttctgtttgaagatgctttagtccttggtgctgtcaatgacactttgctctatgattctttatatactcggaacaatgctagagaacagctggaggtgctcttccctttctgtgttgtggagagaacctctcagatctacctccaccacattctacgtcaacttctggtcagaaaccttggggagcaagccttgctcttggcccagtcctgtgccacattaccttacttccctcatgtgctggagctcatgctccatgaagtactggaagaagaagctacctcacgggagcccattcccgaccctctgcttcccactgtggcaaaatttatcactgagttccccctcttcctgcagacagttgtccattgtgccaggaagaccgaatatgccctgtggaattacctttttgcagctgttggaaaccctaaggacttgtttgaggagtgtttgatggctcaggatttggacacagctgcctcttaccttattatcttacagaatatggaagtccctgcagtaagtaggcaacatgctacccttctattcaacacagcactagaacaaggcaagtgggacctttgtcgacacatgattcgatttcttaaagccattggctctggagaatctgagacacctccatccacacccacagctcaggaacccagttcaagtggtggatttgagttcttcaggaatcgaagcatcagtttatcccagtcagctgaaaatgttcctgccagtaaattcagtttacagaaaacactaagtatgccatctggtccctctggaaaaagatggagcaaagacagtgactgtgctgagaacatgtatattgacatgatgctctggagacatgctcggcgcctcttagaagatgtgaggttaaaggaccttggctgctttgcagcccagctgggctttgaactaattagttggctatgcaaggaacgtacccgagccgcccgggtagacaactttgtaatagccctgaagagactccacaaagatttcctgtggccacttccaatcatcccagcctcttctatcagttctcctttcaaaaatggaaaataccgaactgtgggagagcagctgttaaagtctcaatcagctgacccatttttgaaccttgagatggatgctggcatctccaacatccagcgaagtcagagctggctcagcaacattggccccacccatcatgagatagacacagcttcatcccatggaccacaaatgcaagatgccttcttgtcacctttatctaataaaggtgatgaatgcagtattggttcagccacagacttgactgaaagtagctccatggtggatggcgactggacaatggtggatgaaaatttctctacactcagtttaactcagtcagagctggagcacatttccatggagttggccagtaaagggcctcataaatcccaggtccagcttcggtatttgctacacattttcatggaggcagggtgcctagactggtgcatcgttataggcctgattcttagagaatcctcaataatcaatcagattttggttattacacagtcttcagaggtagatggagagatgttacagaacataaagacagggctccatgcagtggaccgatgggcctctacagactgtcctggatataagccatttttaaacatcattaagccacaactgcagaagctcagtgagataacagaagagcaggtccagccagatgccttccaaccaataactatgggtaagactccagaacagactagcccccgggcagaggagagcaggggctcctccagccatggaagcatcccccagggtgaagttggaagcagcaatatggtcagccggaaagaggaggacacagcccaagcagaggaggaagaaccttttcaggatgggacttacgactgttctgtgtcctaacagtgaggttccatcacaaaggggcagtattaattagcagcagcgtgcagctcagtacgttgtaacatagttggatgatttaacaggagaactcagttcagagactcttcggtaagtattagtagattttaactaattctttcttgtctaagaaatctttttgactccataaaaatgtgatataaagcatctttcataaaaaaattttaagctgcagtgaaaagtaaatattgtacagatgtacatgagaatattttggttttactcaaaggttggtagctcttaaaccacaggaattgttttgccccaggtgagcttactttttcactacttacatcttctcacatttcccggttctgcattatgtccagattgctttttaaaaaataaatgctaaggtgcttgctatagtctgtcaggtacttgagctacctgtttgctcccttggatacagctggactctttaatcagtcctcctgaatagattgctaccctggggcacaatatgtgccagtgtgatggaaacattctccttggctttactagccagtcaaatcccagtccagaattgatggaagctatttacctgtgagttaatgtgcttgttttagcaagcttgattcccattagaccaatgtgggcagaggtctgaggggggttcttctcaattttgctgttagataccactaaactattttgtattaaagaacagtatctttttgtgaatactcttgtgtaaatatattcaaaggcactgttcatattttagggcttgtattataatttgcaaggttttaatgctggattctgcatgtctacacatacaaagacagggcttgctcctctgcaaaactgaggaagacaggtttattggcttggtcatgaagtaacagaaatggtcacactgatcatgaaatgcagcaagttttgtgcaaattaacatagtctcttatttattgcttttgtaaattgaataaagatggacttctatgtaaatagactgctgaatcctgtattaccacggctactaaaaattagtgtgtaaagaatgcattcttcattgtaaacttaaagtattttatgtacttctagaaatgacttaaatttgttttcatacattatgaaaacaactgcatactccttaattgctttaaacacccatccactgtatgtaattctaattaccttataacagtattaagacagcttgtttgtactgtgcaatttgaacaaggaatgcaatgttattttttacaaaaaacaaacttgtttatttttataataacgatgtatttgatgtggaccaaattcgtaccactatctaaaatagcctcttttctcatagtgcagttgtagtttagaaacaaaacttggtcctctctccttgctttttaaagtaaatggctagatttagttgtcttagccaggtttcctttgaagagaaactcaaaaccattttgaaactgcttagttcagaatacatcgaagtatttaaaattactgagttgggtaatttactatcatttactttttacattacaagtgcaataatatttcacaaaatgaaactcccgaatgggtggagtatgtgattattggtacctggtccttctggtgctatttttatttaagtctttgtttcaaaccacctttccctgaatcttaaagataatgttttgcatgtgagtacatgcagcccagcaagaaactaaactgaactctcttctcctatcctagtccattaaggagaagaaccagcattgcttttgtgtttggtgtgaatattcagtcaataaaaatgatttaccattataaagagctgtgatcttttcaagtatctgaaataaaacactgtgctgctgagttcatctcaaacattcttgaaagcagggcaccagtataagttaactgtattcctgtgggttaggccgtgaatgaatcatttcttttatacaatattcttttacaactaatagagataggaggcccccaggcaagaagtttggcaggtttacagaaaatttggtaatttatttgttatataccttaatttttaaaaacccatttttattgtggtgtttggttcacatatcaactgtttaagccataattttagccaatgaatttaaatattcagtataactatttgaggtttactagatgcatttattaataaattatttgctgaaaccaaaacaagtcattgggggtgtgggaataaaatcaacctttgcttgtaattaaagttgctgctatttctgtaatgtgtatttttctccccttggtaaagggcaataaaaccattacaca

SEQ ID NO: 55939 - DNA, 7112 bp, Homo sapiens
aagtatgaaaaggaatttaatagtatttaatagggtatatataatatacacataacattttttgtttttccttatatagtatttgatactttgaacactctttcttaaattcatcttacttccttggctttcttgatatcagtttctactggtttccctggttgtctttttctttgtgccagtacctttgcggtctcatttatgggttcctctttcctctaaccctttccctcttcttgcctcctttgcacaaatatttagtgacagatttaactaacactgcccttggggctgtgcatacagaggtgagcaaaacaggctatttccccattaaagaagtaaatgctgaatatcttcataaatattgataagtgatgagatcatgctatgtaactatttttgatttcttgcctgagaagtcctctgaagacggagaatattttattcatcctcgaatatccagcacacagtatagcacgtttgcagtctgtgttggaagatctcctggttgctacttctgatggacttcttcatcttattcactgggaaggaatgacaaatggaaggaaagccattaatctttgcacagtacccttttcagtagacctgcagtcatctagagtaggttcattcctgggcttcacagacgtacacatcagagacatggaatactgtgccacacttgatgggtttgctgttgtatttaatgatggtaaagttggatttattacaccagtgtcaagtagatttactgcagagcagcttcatggagtttggccacaagatgttgttgacggaacgtgtgtagcagtaaataacaagtatcgactaatggcatttggctgtgtgagtggttctgtgcaggtctatacaatagataacagcactggagccatgctgctatctcataaattagagctaacagcaaaacagtatcctgacatttggaataaaacaggagctgttaaattgatgagatggtctcctgacaatagtgttgtaatagtgacctgggaatacggaggcctttctttatggagtgtttttggagcacagctgatttgtacacttggaggagattttgcttataggtctgatggcaccaaaaaagatccccttaagatcaactctatgagctggggtgcagaaggctatcacctatgggtaatcagcggatttggttctcaaaacactgaaattgagtctgacctcaggagtgtagttaaacagcccagcatcctgttatttcagtttattaagagtgtactcactgtaaacccttgtatgagtaaccaagagcaggtgttgcttcagggtgaggatcgcttgtacttgaactgtggagaggcttcacaaacccagaatcccaggagttcttcaacacactctgagcataagcccagtcgagaaaagagcccatttgcagatggaggtttagagtctcagggattaagcactttacttggacatcggcattggcatgttgtacagatttccagcacctatctagagagcaattggcctatacggttttcagctattgataagcttggacagaatattgctgtggttggcaagtttggttttgcacattactctttactcaccaaaaaatggaaactttttggaaacattacccaggagcaaaatatgatcgtgacaggtggcttagcctggtggaatgattttatggtccttgcgtgttataacataaatgaccgtcaagaagagcttagagtatacttgcgaacatcaaatctggacaatgcctttgctcatgtcaccaaagcacaagcagaaacattactgcttagtgtcttccaggacatggtaatagtatttagagcagactgttcaatatgcctttacagtattgaaagaaaatctgatggtccaaatactactgctggtattcaagttcttcaggaggtttccatgtcacgctacattcctcaccctttcctggtggtatctgtcactctgacatcagtgagtacagagaatggaatcaccttgaaaatgccacagcaggctcgtggtgcagagagcattatgttaaacctggcaggacagctcatcatgatgcagagggacaggtcaggcccacagatccgggagaaggacagtaaccctaataaccaaaggaaacttctgccattctgtcctcctgttgtactagcccagtctgttgaaaatgtctggacaacgtgtcgagcaaataaacagaaacgtcaccttctggaggccctctggctgagctgtggtggtgcagggatgaaagtttggctccctctcttccctagggatcaccgcaagccccattccttcttgtcccagcggatcatgctgcctttccacatcaacatttacccgctagctgttctgtttgaagatgctttagtccttggtgctgtcaatgacactttgctctatgattctttatatactcggaacaatgctagagaacagctggaggtgctcttccctttctgtgttgtggagagaacctctcagatctacctccaccacattctacgtcaacttctggtcagaaaccttggggagcaagccttgctcttggcccagtcctgtgccacattaccttacttccctcatgtgctggagctcatgctccatgaagtactggaagaagaagctacctcacgggagcccattcccgaccctctgcttcccactgtggcaaaatttatcactgagttccccctcttcctgcagacagttgtccattgtgccaggaagaccgaatatgccctgtggaattacctttttgcagctgttggaaaccctaaggacttgtttgaggagtgtttgatggctcaggatttggacacagctgcctcttaccttattatcttacagaatatggaagtccctgcagtaagtaggcaacatgctacccttctattcaacacagcactagaacaaggcaagtgggacctttgtcgacacatgattcgatttcttaaagccattggctctggagaatctgagacacctccatccacacccacagctcaggaacccagttcaagtggtggatttgagttcttcaggaatcgaagcatcagtttatcccagtcagctgaaaatgttcctgccagtaaattcagtttacagaaaacactaagtatgccatctggtccctctggaaaaagatggagcaaagacagtgactgtgctgagaacatgtatattgacatgatgctctggagacatgctcggcgcctcttagaagatgtgaggttaaaggaccttggctgctttgcagcccagctgggctttgaactaattagttggctatgcaaggaacgtacccgagccgcccgggtagacaactttgtaatagccctgaagagactccacaaagatttcctgtggccacttccaatcatcccagcctcttctatcagttctcctttcaaaaatggaaaataccgaactgtgggagagcagctgttaaagtctcaatcagctgacccatttttgaaccttgagatggatgctggcatctccaacatccagcgaagtcagagctggctcagcaacattggccccacccatcatgagatagacacagcttcatcccatggaccacaaatgcaagatgccttcttgtcacctttatctaataaaggtgatgaatgcagtattggttcagccacagacttgactgaaagtagctccatggtggatggcgactggacaatggtggatgaaaatttctctacactcagtttaactcagtcagagctggagcacatttccatggagttggccagtaaagggcctcataaatcccaggtccagcttcggtatttgctacacattttcatggaggcagggtgcctagactggtgcatcgttataggcctgattcttagagaatcctcaataatcaatcagattttggttattacacagtcttcagaggtagatggagagatgttacagaacataaagacagggctccatgcagtggaccgatgggcctctacagactgtcctggatataagccatttttaaacatcattaagccacaactgcagaagctcagtgagataacagaagagcaggtccagccagatgccttccaaccaataactatgggtaagactccagaacagactagcccccgggcagaggagagcaggggctcctccagccatggaagcatcccccagggtgaagttggaagcagcaatatggtcagccggaaagaggaggacacagcccaagcagaggaggaagaaccttttcaggatgggacttacgactgttctgtgtcctaacagtgaggttccatcacaaaggggcagtattaattagcagcagcgtgcagctcagtacgttgtaacatagttggatgatttaacaggagaactcagttcagagactcttcggtaagtattagtagattttaactaattctttcttgtctaagaaatctttttgactccataaaaatgtgatataaagcatctttcataaaaaaattttaagctgcagtgaaaagtaaatattgtacagatgtacatgagaatattttggttttactcaaaggttggtagctcttaaaccacaggaattgttttgccccaggtgagcttactttttcactacttacatcttctcacatttcccggttctgcattatgtccagattgctttttaaaaaataaatgctaaggtgcttgctatagtctgtcaggtacttgagctacctgtttgctcccttggatacagctggactctttaatcagtcctcctgaatagattgctaccctggggcacaatatgtgccagtgtgatggaaacattctccttggctttactagccagtcaaatcccagtccagaattgatggaagctatttacctgtgagttaatgtgcttgttttagcaagcttgattcccattagaccaatgtgggcagaggtctgaggggggttcttctcaattttgctgttagataccactaaactattttgtattaaagaacagtatctttttgtgaatactcttgtgtaaatatattcaaaggcactgttcatattttagggcttgtattataatttgcaaggttttaatgctggattctgcatgtctacacatacaaagacagggcttgctcctctgcaaaactgaggaagacaggtttattggcttggtcatgaagtaacagaaatggtcacactgatcatgaaatgcagcaagttttgtgcaaattaacatagtctcttatttattgcttttgtaaattgaataaagatggacttctatgtaaatagactgctgaatcctgtattaccacggctactaaaaattagtgtgtaaagaatgcattcttcattgtaaacttaaagtattttatgtacttctagaaatgacttaaatttgttttcatacattatgaaaacaactgcatactccttaattgctttaaacacccatccactgtatgtaattctaattaccttataacagtattaagacagcttgtttgtactgtgcaatttgaacaaggaatgcaatgttattttttacaaaaaacaaacttgtttatttttataataacgatgtatttgatgtggaccaaattcgtaccactatctaaaatagcctcttttctcatagtgcagttgtagtttagaaacaaaacttggtcctctctccttgctttttaaagtaaatggctagatttagttgtcttagccaggtttcctttgaagagaaactcaaaaccattttgaaactgcttagttcagaatacatcgaagtatttaaaattactgagttgggtaatttactatcatttactttttacattacaagtgcaataatatttcacaaaatgaaactcccgaatgggtggagtatgtgattattggtacctggtccttctggtgctatttttatttaagtctttgtttcaaaccacctttccctgaatcttaaagataatgttttgcatgtgagtacatgcagcccagcaagaaactaaactgaactctcttctcctatcctagtccattaaggagaagaaccagcattgcttttgtgtttggtgtgaatattcagtcaataaaaatgatttaccattataaagagctgtgatcttttcaagtatctgaaataaaacactgtgctgctgagttcatctcaaacattcttgaaagcagggcaccagtataagttaactgtattcctgtgggttaggccgtgaatgaatcatttcttttatacaatattcttttacaactaatagagataggaggcccccaggcaagaagtttggcaggtttacagaaaatttggtaatttatttgttatataccttaatttttaaaaacccatttttattgtggtgtttggttcacatatcaactgtttaagccataattttagccaatgaatttaaatattcagtataactatttgaggtttactagatgcatttattaataaattatttgctgaaaccaaaacaagtcattgggggtgtgggaataaaatcaacctttgcttgtaattaaagttgctgctatttctgtaatgtgtatttttctccccttggtaaagggcaataaaaccattacacaaactttggtttattcatcatctcaggttaacagccacgaaaatcatcttttcattatataattctgcttcttagaattttccttatgaaatgaaattcagacagatttatttaaaatatttatttatatgtagatttagaatgacagcatcaagagttcgcaacatcctagatgcctgacagtaaaatactggaggaaacagcccatgtcgatgacatggaaaatgttcaaaatataatgaaggaatgacagaaaattatgtataccttaagatacctaccaagcaaacaaaattttacatgtaagtatagaggaacctaggcgtcatttctaataagcgggattaaaaagtactttgactttttcccattttcctaatttcagtctccatggatttgcctattctggacatttcatataaatggaaacatatagtatgtgaacttttctatctcacttcttggcaccaaagcatgttgttattttggctg

SEQ ID NO: 55940 - DNA, 6564 bp, Homo sapiens
aagtatgaaaaggaatttaatagtatttaatagggtatatataatatacacataacattttttgtttttccttatatagtatttgatactttgaacactctttcttaaattcatcttacttccttggctttcttgatatcagtttctactggtttccctggttgtctttttctttgtgccagtacctttgcggtctcatttatgggttcctctttcctctaaccctttccctcttcttgcctcctttgcacaaatatttagtgacagatttaactaacactgcccttggggctgtgcatacagaggtgagcaaaacaggctatttccccattaaagaagtaaatgctgaatatcttcataaatattgataagtgatgagatcatgctatgtaactatttttgatttcttgcctgagaagtcctctgaagacggagaatattttattcatcctcgaatatccagcacacagtatagcacgtttgcagtctgtgttggaagatctcctggttgctacttctgatggacttcttcatcttattcactgggaaggaatgacaaatggaaggaaagccattaatctttgcacagtacccttttcagtagacctgcagtcatctagagtaggttcattcctgggcttcacagacgtacacatcagagacatggaatactgtgccacacttgatgggtttgctgttgtatttaatgatggtaaagttggatttattacaccagtgtcaagtagatttactgcagagcagcttcatggagtttggccacaagatgttgttgacggaacgtgtgtagcagtaaataacaagtatcgactaatggcatttggctgtgtgagtggttctgtgcaggtctatacaatagataacagcactggagccatgctgctatctcataaattagagctaacagcaaaacagtatcctgacatttggaataaaacaggagctgttaaattgatgagatggtctcctgacaatagtgttgtaatagtgacctgggaatacggaggcctttctttatggagtgtttttggagcacagctgatttgtacacttggaggagattttgcttataggtctgatggcaccaaaaaagatccccttaagatcaactctatgagctggggtgcagaaggctatcacctatgggtaatcagcggatttggttctcaaaacactgaaattgagtctgacctcaggagtgtagttaaacagcccagcatcctgttatttcagtttattaagagtgtactcactgtaaacccttgtatgagtaaccaagagcaggtgttgcttcagggtgaggatcgcttgtacttgaactgtggagaggcttcacaaacccagaatcccaggagttcttcaacacactctgagcataagcccagtcgagaaaagagcccatttgcagatggaggtttagagtctcagggattaagcactttacttggacatcggcattggcatgttgtacagatttccagcacctatctagagagcaattggcctatacggttttcagctattgataagcttggacagaatattgctgtggttggcaagtttggttttgcacattactctttactcaccaaaaaatggaaactttttggaaacattacccaggagcaaaatatgatcgtgacaggtggcttagcctggtggaatgattttatggtccttgcgtgttataacataaatgaccgtcaagaagagcttagagtatacttgcgaacatcaaatctggacaatgcctttgctcatgtcaccaaagcacaagcagaaacattactgcttagtgtcttccaggacatggtaatagtatttagagcagactgttcaatatgcctttacagtattgaaagaaaatctgatggtccaaatactactgctggtattcaagttcttcaggaggtttccatgtcacgctacattcctcaccctttcctggtggtatctgtcactctgacatcagtgagtacagagaatggaatcaccttgaaaatgccacagcaggctcgtggtgcagagagcattatgttaaacctggcaggacagctcatcatgatgcagagggacaggtcaggcccacagatccgggagaaggacagtaaccctaataaccaaaggaaacttctgccattctgtcctcctgttgtactagcccagtctgttgaaaatgtctggacaacgtgtcgagcaaataaacagaaacgtcaccttctggaggccctctggctgagctgtggtggtgcagggatgaaagtttggctccctctcttccctagggatcaccgcaagccccattccttcttgtcccagcggatcatgctgcctttccacatcaacatttacccgctagctgttctgtttgaagatgctttagtccttggtgctgtcaatgacactttgctctatgattctttatatactcggaacaatgctagagaacagctggaggtgctcttccctttctgtgttgtggagagaacctctcagatctacctccaccacattctacgtcaacttctggtcagaaaccttggggagcaagccttgctcttggcccagtcctgtgccacattaccttacttccctcatgtgctggagctcatgctccatgaagtactggaagaagaagctacctcacgggagcccattcccgaccctctgcttcccactgtggcaaaatttatcactgagttccccctcttcctgcagacagttgtccattgtgccaggaagaccgaatatgccctgtggaattacctttttgcagctgttggaaaccctaaggacttgtttgaggagtgtttgatggctcaggatttggacacagctgcctcttaccttattatcttacagaatatggaagtccctgcagtaagtaggcaacatgctacccttctattcaacacagcactagaacaaggcaagtgggacctttgtcgacacatgattcgatttcttaaagccattggctctggagaatctgagacacctccatccacacccacagctcaggaacccagttcaagtggtggatttgagttcttcaggaatcgaagcatcagtttatcccagtcagctgaaaatgttcctgccagtaaattcagtttacagaaaacactaagtatgccatctggtccctctggaaaaagatggagcaaagacagtgactgtgctgagaacatgtatattgacatgatgctctggagacatgctcggcgcctcttagaagatgtgaggttaaaggaccttggctgctttgcagcccagctgggctttgaactaattagttggctatgcaaggaacgtacccgagccgcccgggtagacaactttgtaatagccctgaagagactccacaaagatttcctgtggccacttccaatcatcccagcctcttctatcagttctcctttcaaaaatggaaaataccgaactgtgggagagcagctgttaaagtctcaatcagctgacccatttttgaaccttgagatggatgctggcatctccaacatccagcgaagtcagagctggctcagcaacattggccccacccatcatgagatagacacagcttcatcccatggaccacaaatgcaagatgccttcttgtcacctttatctaataaaggtgatgaatgcagtattggttcagccacagacttgactgaaagtagctccatggtggatggcgactggacaatggtggatgaaaatttctctacactcagtttaactcagtcagagctggagcacatttccatggagttggccagtaaagggcctcataaatcccaggtccagcttcggtatttgctacacattttcatggaggcagggtgcctagactggtgcatcgttataggcctgattcttagagaatcctcaataatcaatcagattttggttattacacagtcttcagaggtagatggagagatgttacagaacataaagacagggctccatgcagtggaccgatgggcctctacagactgtcctggatataagccatttttaaacatcattaagccacaactgcagaagctcagtgagataacagaagagcaggtccagccagatgccttccaaccaataactatgggtaagactccagaacagactagcccccgggcagaggagagcaggggctcctccagccatggaagcatcccccagggtgaagttggaagcagcaatatggtcagccggaaagaggaggacacagcccaagcagaggaggaagaaccttttcaggatgggacttacgactgttctgtgtcctaacagtgaggttccatcacaaaggggcagtattaattagcagcagcgtgcagctcagtacgttgtaacatagttggatgatttaacaggagaactcagttcagagactcttcggtaagtattagtagattttaactaattctttcttgtctaagaaatctttttgactccataaaaatgtgatataaagcatctttcataaaaaaattttaagctgcagtgaaaagtaaatattgtacagatgtacatgagaatattttggttttactcaaaggttggtagctcttaaaccacaggaattgttttgccccaggtgagcttactttttcactacttacatcttctcacatttcccggttctgcattatgtccagattgctttttaaaaaataaatgctaaggtgcttgctatagtctgtcaggtacttgagctacctgtttgctcccttggatacagctggactctttaatcagtcctcctgaatagattgctaccctggggcacaatatgtgccagtgtgatggaaacattctccttggctttactagccagtcaaatcccagtccagaattgatggaagctatttacctgtgagttaatgtgcttgttttagcaagcttgattcccattagaccaatgtgggcagaggtctgaggggggttcttctcaattttgctgttagataccactaaactattttgtattaaagaacagtatctttttgtgaatactcttgtgtaaatatattcaaaggcactgttcatattttagggcttgtattataatttgcaaggttttaatgctggattctgcatgtctacacatacaaagacagggcttgctcctctgcaaaactgaggaagacaggtttattggcttggtcatgaagtaacagaaatggtcacactgatcatgaaatgcagcaagttttgtgcaaattaacatagtctcttatttattgcttttgtaaattgaataaagatggacttctatgtaaatagactgctgaatcctgtattaccacggctactaaaaattagtgtgtaaagaatgcattcttcattgtaaacttaaagtattttatgtacttctagaaatgacttaaatttgttttcatacattatgaaaacaactgcatactccttaattgctttaaacacccatccactgtatgtaattctaattaccttataacagtattaagacagcttgtttgtactgtgcaatttgaacaaggaatgcaatgttattttttacaaaaaacaaacttgtttatttttataataacgatgtatttgatgtggaccaaattcgtaccactatctaaaatagcctcttttctcatagtgcagttgtagtttagaaacaaaacttggtcctctctccttgctttttaaagtaaatggctagatttagttgtcttagccaggtttcctttgaagagaaactcaaaaccattttgaaactgcttagttcagaatacatcgaagtatttaaaattactgagttgggtaatttactatcatttactttttacattacaagtgcaataatatttcacaaaatgaaactcccgaatgggtggagtatgtgattattggtacctggtccttctggtgctatttttatttaagtctttgtttcaaaccacctttccctgaatcttaaagataatgttttgcatgtgagtacatgcagcccagcaagaaactaaactgaactctcttctcctatcctagtccattaaggagaagaaccagcattgcttttgtgtttggtgtgaatattcagtcaataaaaatgatttaccattataaagagctgtgatcttttcaagtatcagtataagttaactgtattcctgtgggttaggccgtgaatgaatcatttcttttatacaatattcttttacaactaatagagataggaggcccccaggcaagaagtttggcaggtttacagaaaatttggtaatttatttgttatataccttaatttttaaaaacccatttttattgtggtgtttggttcacatatcaactgtttaagccataattttagccaatgaatttaaatattcagtataactatttgaggtttactagatgcatttattaataaattatttgctgaaaccaaaacaagtcattgggggtgtgggaataaaatcaacctttgcttgtaattaaagttgctgctatttctgtaatgtgtatttttctccccttggtaaagggcaataaaaccattacaca

SEQ ID NO: 55941 - DNA, 4342 bp, Homo sapiens
aagtatgaaaaggaatttaatagtatttaatagggtatatataatatacacataacattttttgtttttccttatatagtatttgatactttgaacactctttcttaaattcatcttacttccttggctttcttgatatcagtttctactggtttccctggttgtctttttctttgtgccagtacctttgcggtctcatttatgggttcctctttcctctaaccctttccctcttcttgcctcctttgcacaaatatttagtgacagatttaactaacactgcccttggggctgtgcatacagaggtgagcaaaacaggctatttccccattaaagaagtaaatgctgaatatcttcataaatattgataagtgatgagatcatgctatgtaactatttttgatttcttgcctgagaagtcctctgaagacggagaatattttattcatcctcgaatatccagcacacagtatagcacgtttgcagtctgtgttggaagatctcctggttgctacttctgatggacttcttcatcttattcactgggaaggaatgacaaatggaaggaaagccattaatctttgcacagtacccttttcagtagacctgcagtcatctagagtaggttcattcctgggcttcacagacgtacacatcagagacatggaatactgtgccacacttgatgggtttgctgttgtatttaatgatggtaaagttggatttattacaccagtgtcaagtagatttactgcagagcagcttcatggagtttggccacaagatgttgttgacggaacgtgtgtagcagtaaataacaagtatcgactaatggcatttggctgtgtgagtggttctgtgcaggtctatacaatagataacagcactggagccatgctgctatctcataaattagagctaacagcaaaacagtatcctgacatttggaataaaacaggagctgttaaattgatgagatggtctcctgacaatagtgttgtaatagtgacctgggaatacggaggcctttctttatggagtgtttttggagcacagctgatttgtacacttggaggagattttgcttataggtctgatggcaccaaaaaagatccccttaagatcaactctatgagctggggtgcagaaggctatcacctatgggtaatcagcggatttggttctcaaaacactgaaattgagtctgacctcaggagtgtagttaaacagcccagcatcctgttatttcagtttattaagagtgtactcactgtaaacccttgtatgagtaaccaagagcaggtgttgcttcagggtgaggatcgcttgtacttgaactgtggagaggcttcacaaacccagaatcccaggagttcttcaacacactctgagcataagcccagtcgagaaaagagcccatttgcagatggaggtttagagtctcagggattaagcactttacttggacatcggcattggcatgttgtacagatttccagcacctatctagagagcaattggcctatacggttttcagctattgataagcttggacagaatattgctgtggttggcaagtttggttttgcacattactctttactcaccaaaaaatggaaactttttggaaacattacccaggagcaaaatatgatcgtgacaggtggcttagcctggtggaatgattttatggtccttgcgtgttataacataaatgaccgtcaagaagagcttagagtatacttgcgaacatcaaatctggacaatgcctttgctcatgtcaccaaagcacaagcagaaacattactgcttagtgtcttccaggacatggtaatagtatttagagcagactgttcaatatgcctttacagtattgaaagaaaatctgatggtccaaatactactgctggtattcaagttcttcaggaggtttccatgtcacgctacattcctcaccctttcctggtggtatctgtcactctgacatcagtgagtacagagaatggaatcaccttgaaaatgccacagcaggctcgtggtgcagagagcattatgttaaacctggcaggacagctcatcatgatgcagagggacaggtcaggcccacagatccgggagaaggacagtaaccctaataaccaaaggaaacttctgccattctgtcctcctgttgtactagcccagtctgttgaaaatgtctggacaacgtgtcgagcaaataaacagaaacgtcaccttctggaggccctctggctgagctgtggtggtgcagggatgaaagtttggctccctctcttccctagggatcaccgcaagccccattccttcttgtcccagcggatcatgctgcctttccacatcaacatttacccgctagctgttctgtttgaagatgctttagtccttggtgctgtcaatgacactttgctctatgattctttatatactcggaacaatgctagagaacagctggaggtgctcttccctttctgtgttgtggagagaacctctcagatctacctccaccacattctacgtcaacttctggtcagaaaccttggggagcaagccttgctcttggcccagtcctgtgccacattaccttacttccctcatgtgctggagctcatgctccatgaagtactggaagaagaagctacctcacgggagcccattcccgaccctctgcttcccactgtggcaaaatttatcactgagttccccctcttcctgcagacagttgtccattgtgccaggaagaccgaatatgccctgtggaattacctttttgcagctgttggaaaccctaaggacttgtttgaggagtgtttgatggctcaggatttggacacagctgcctcttaccttattatcttacagaatatggaagtccctgcagtaagtaggcaacatgctacccttctattcaacacagcactagaacaaggcaagtgggacctttgtcgacacatgattcgatttcttaaagccattggctctggagaatctgagacacctccatccacacccacagctcaggaacccagttcaagtggtggatttgagttcttcaggaatcgaagcatcagtttatcccagtcagctgaaaatgttcctgccagtaaattcagtttacagaaaacactaagtatgccatctggtccctctggaaaaagatggagcaaagacagtgactgtgctgagaacatgtatattgacatgatgctctggagacatgctcggcgcctcttagaagatgtgaggttaaaggaccttggctgctttgcagcccagctgggctttgaactaattagttggctatgcaaggaacgtacccgagccgcccgggtagacaactttgtaatagccctgaagagactccacaaagatttcctgtggccacttccaatcatcccagcctcttctatcagttctcctttcaaaaatggaaaataccgaactgtgggagagcagctgttaaagtctcaatcagctgacccatttttgaaccttgagatggatgctggcatctccaacatccagcgaagtcagagctggctcagcaacattggccccacccatcatgagatagacacagcttcatcccatggaccacaaatgcaagatgccttcttgtcacctttatctaataaaggtgatgaatgcagtattggttcagccacagacttgactgaaagtagctccatggtggatggcgactggacaatggtggatgaaaatttctctacactcagtttaactcagtcagagctggagcacatttccatggagttggccagtaaagggcctcataaatcccaggtccagcttcggtatttgctacacattttcatggaggcagggtgcctagactggtgcatcgttataggcctgattcttagagaatcctcaataatcaatcagattttggttattacacagtcttcagaggtagatggagagatgttacagaacataaagacagggctccatgcagtggaccgatgggcctctacagactgtcctggatataagccatttttaaacatcattaagccacaactgcagaagctcagtgagataacagaagagcaggtccagccagatgccttccaaccaataactatgggtaagactccagaacagactagcccccgggcagaggagagcaggggctcctccagccatggaagcatcccccagggtgaagttggaagcagcaatatggtcagccggaaagaggaggacacagcccaagcagaggaggtctggtagggctgagcttgcaagaggatcaacatgcctttggctagagatttactacatccgtccttggaagagg

SEQ ID NO: 55942 - DNA, 292 bp, Homo sapiens
acagtttaattatttagggttgttaggtcattatttttacccttttaaacttacaggtttttctggcaaaaagtgagagagtaatttattatattcttaatcctatttcatgtgcttatttttttcatcagtaggttcattcctgggcttcacagacgtacacatcagagacatggaatactgtgccacacttgatgggtttgctgttgtatttaatgatggtaaagttggatttattacaccagtgtcaagtagatttactgcagaggtatgacttatttactttgaaggg

SEQ ID NO: 55943 - DNA, 472 bp, Homo sapiens
agtcaggcaaacctcccttttttttcttccttttctgctgatcttcaacaatttacttaactcagtttcctcacttgtaaaatacaaatgatatgcctatctgcagagtcactgggagaaataaatgaaatgacttaaagtatatgtatgctatctggcatgtagtaggagtttaataaattatagtttacatacaccagaagagtacttgcctcgcttttccttgtatggtactttttaatcttattattaaactaacccctgtggtggtgtggctacattctttgagtttagaaaacgagataaagaattgctcatatcttcccaaattgtgtagtataaaaagaatgctgtcctggttgttttttgtagaatatggaagtccctgcagtaagtaggcaacatgctacccttctattcaacacagcactagaacaaggcaagtgggacctttgtcgacacatgattcgat

SEQ ID NO: 55944 - DNA, 839 bp, Homo sapiens
ctccccactcttgtattaactgaagaaaatccatgacatattatctataaatatttcagtttttttcctacaaggactctttaagaattatgaccaaaataccattatcatccctataaaaatttgataattccttggtaccatcaaatatccattaagtattcagatttctaattgtttcatagacatcataattttgtataggttaagatttaaataaggttcacatattgtgattgtgttcttaattctctttttaagtggatgttcccccaccctctccttttcccttccttgcagtttattcatggaagaaatttggttttgtggattttctcacaataatgattttgcttattacatctccatggtttagtttaacagtttcctctatttcctgtagtagctgaatgtaaagacttggtcaaactctagctagattttattgagggagttggggaagactgcttcataggtggtggtagtatatttttccatctaaaggtacataatgtcggttatctaattctttctttaaatgttttctatgttcacatggtaattttagccatggatttcatgttttagtttcaagatcctgagaaatcaacatctgaggaacagctaatatttaaaattaaaggaaaatatattttctccacgaagttggttgtaacttttggcaattcttcatcaggtgatgaatgcagtattggttcagccacagacttgactgaaagtagctccatggtggatggcgactggacaatggtggatgaaaatttctctacactcagtttaactcagtcagagctggagcacatttccatggagttggc

SEQ ID NO: 55945 - DNA, 374 bp, Homo sapiens
  misc_feature (6)..(6): n is a, c, g, or t
tgtgtntatcgatgcacccaattatgtggattcacataattgagtggcaagatagtataggactcctttccgattcctaaaaccattagtatctactaatttgacgctgaaattttgtatttttggtggagacaaggtttcaccatgttggccaggctggtctgacgctcctgacttcaagtgatccggcctcccaaagtgctgggattacacgcgtgaggccagaaattttaactctaaaacggtatcacttcccatctggaattctgggcactgaggggatggtgatagaaatggcttatcttttaaaggtttagattctggatcctccacttactattctgtggcatcgataaacacgggtaccgagctcg

SEQ ID NO: 55946 - DNA, 414 bp, Homo sapiens
gtgagctaccgtgcccggcttgaggtgtttttttaactaatacattgtagcactattgctggtatgtggattcacataattgagtggcaagatagtataggactcctttccgattcctaaaaccattagtatctactaatttgacgctgaaattttgtatttttggtggagacaaggtttcaccatgttggccaggctggtctgacgctcctgacttcaagtgatccggcctcccaaagtgctgggattacacgcgtgaggccagaaattttaactctaaaacggtatcacttcccatctggaattctgggcactgaggggatggtgatagaaatggcttatcttttaaaggtttagattctggatcctccacttactattctgtggcatcgataaacacgggtaccgagctcg

SEQ ID NO: 55947 - DNA, 256 bp, Homo sapiens
tatttttggtggagacaaggtttcaccatgttggccaggctggtctgacgctcctgacttcaagtgatccggcctcccaaagtgctgggattacacgcgtgaggccagaaattttaactctaaaacggtatcacttcccatctggaattctgggcactgaggggatggtgatagaaatggcttatcttttaaaggtttagattctggatcctccacttactattctgtggctcagtttcattagattaaaaaaaaa

SEQ ID NO: 55948 - DNA, 96 bp, Homo sapiens
gcataaggagctttgacaaggacccactgtctggccccatcttcagagattccaataggtctggggtgtgcacaggcactggcgtctttaaaatct

SEQ ID NO: 55949 - DNA, 362 bp, Homo sapiens
gaagtcacatgccaacatctgacaagtgccctttacgatgtagcctcaagtatgtaagcggcaagaaccacagcctttagagcgattttggaattaagttgttaaaatgtgtttttaacttagtacttactgaaatatccattctcccgcagacagacttatagctgtcttccactagggctggaaattgaccttttaaccactgacagttgacaggatgtttattttcccattataacagttgccaattgtccaccaatttctcttctcacagaaataaagaaggtcggctgtgatgaactatactctctgtagcctctctctgacaatttctttatacctatatttgatattggtagttc

SEQ ID NO: 55950 - DNA, 574 bp, Homo sapiens
cctctcaggtttcagtgatgaataggcatgggaaagtaggaataccaaatggcctctcatttggtagtcggttggggaatgcatgagagaaaataagaccacagtgtgcccagggatgctgagctgatggcacattttgagcagtaaactttcttagtgtagatccctccttcctcgctccctcttttccttcattgttcttgtcctaatttacaacttcactaagttcttcctttcccacttgtatactttgtaggcaatatatgttttggtttgtgaactacctcacattgtccccaagggcagggaactatgtccttatgtcccttttccccaggagggctgaataaatgcctgttgattaactcaacttggtgtaacaaacatatattatctataatgcataagtctctgagctaagggctctgacatgtacatacggaataagaaataagattcctgccttcaagaaacttccaggagagagaaaagagctcctcaagttattataatacatagtaaatgtgatgagaactaaaagacaaaaaaaaaacaaaccacttttaatgcaaag

SEQ ID NO: 55951 - DNA, 735 bp, Homo sapiens
  misc_feature (485)..(485): n is a, c, g, or t
  misc_feature (508)..(508): n is a, c, g, or t
  misc_feature (735)..(735): n is a, c, g, or t
ggcggagcgagtttggttgcacttacaccggtacttaagcgcggaccggcgtgtccttggacttagagagtggggacgtccggcttcggagcgggagtgttcgttgtgccagcgactaaaaagagaattaaatatgggtgatgttgagaaaggcaagaagatttttattatgaagtgttcccagtgccacaccgttgaacaagggaggcaagcacaagactgggccaaaatctccatggtctctttggggcggaagacaggtcaggcccctggatactcttacacagccgccaaataagaaccaaagggcattcatcctggggagagggatacactggatggagtatttgggagaattccccaagaaggtacaattcccctggaaaccaaaaaatgatctttgtcggcattaagaagaaggaagaaagggcagacttaataggcttatctcaaaaaagctactaatgagtaataattggccactngccttatttattacaaaacaganaatgtctcatgacttttttatgtgtaccatcctttaatagatctcatacaccagaattcagatcatgaatgactgacagaatattgtggggcagtcctgattgaaactaagactggcttgtggttgaatgaatatgttcagttttgaagttgaatagtaaactccagttcagctaaatggtatcactgttgacccttttatgatatgattagacttcgttagtactn

SEQ ID NO: 55952 - DNA, 890 bp, Homo sapiens
  misc_feature (640)..(640): n is a, c, g, or t
  misc_feature (663)..(663): n is a, c, g, or t
  misc_feature (890)..(890): n is a, c, g, or t
ggcggagcgagtttggttgcacttacaccggtacttaagcgcggaccggcgtgtccttggacttagagagtggggacgtccggcttcggagcgggagtgttcgttgtgccagcgactaaaaagagagggcaaaagctgttgctcttctaataaggggccagttcttttcgtgggcacatgtttcttccgtcagtcgttctgacatcctagaaggagtttcatcaatcaccttgaaaccgacctggacgggtgacctcgtggtcgccccaggagatcacagaattaaatatgggtgatgttgagaaaggcaagaagatttttattatgaagtgttcccagtgccacaccgttgaacaagggaggcaagcacaagactgggccaaaatctccatggtctctttggggcggaagacaggtcaggcccctggatactcttacacagccgccaaataagaaccaaagggcattcatcctggggagagggatacactggatggagtatttgggagaattccccaagaaggtacaattcccctggaaaccaaaaaatgatctttgtcggcattaagaagaaggaagaaagggcagacttaataggcttatctcaaaaaagctactaatgagtaataattggccactngccttatttattacaaaacaganaatgtctcatgacttttttatgtgtaccatcctttaatagatctcatacaccagaattcagatcatgaatgactgacagaatattgtggggcagtcctgattgaaactaagactggcttgtggttgaatgaatatgttcagttttgaagttgaatagtaaactccagttcagctaaatggtatcactgttgacccttttatgatatgattagacttcgttagtactn

SEQ ID NO: 55953 - DNA, 367 bp, Homo sapiens
cacgccgtacaccctaacatgctcgccagcatgcgcgcgcaggtccttggcgcaggcattgggactggagccaatgaggtgcggcgacgttactgcgtagccgccagctcggccgcacgtcagggcgcgggaggcggagcgagtttggttgcacttacaccggtacttaagcgcggaccggcgtgtccttggacttagagagtggggacgtccggcttcggagcgggagtgttcgttgtgccagcgactaaaaagaggtgagagcgggtcgcggaggccgcacctggttagaggcagagctgtgggaggcgcgcacttgcgagcgaccgaaacccaagcggggagcattcgagtggagcccgcgctg

SEQ ID NO: 55954 - DNA, 861 bp, Homo sapiens
  misc_feature (611)..(611): n is a, c, g, or t
  misc_feature (634)..(634): n is a, c, g, or t
  misc_feature (861)..(861): n is a, c, g, or t
ggcggagcgagtttggttgcacttacaccggtacttaagcgcggaccggcgtgtccttggacttagagagtggggacgtccggcttcggagcgggagtgttcgttgtgccagcgactaaaaagaggggccagttcttttcgtgggcacatgtttcttccgtcagtcgttctgacatcctagaaggagtttcatcaatcaccttgaaaccgacctggacgggtgacctcgtggtcgccccaggagatcacagaattaaatatgggtgatgttgagaaaggcaagaagatttttattatgaagtgttcccagtgccacaccgttgaacaagggaggcaagcacaagactgggccaaaatctccatggtctctttggggcggaagacaggtcaggcccctggatactcttacacagccgccaaataagaaccaaagggcattcatcctggggagagggatacactggatggagtatttgggagaattccccaagaaggtacaattcccctggaaaccaaaaaatgatctttgtcggcattaagaagaaggaagaaagggcagacttaataggcttatctcaaaaaagctactaatgagtaataattggccactngccttatttattacaaaacaganaatgtctcatgacttttttatgtgtaccatcctttaatagatctcatacaccagaattcagatcatgaatgactgacagaatattgtggggcagtcctgattgaaactaagactggcttgtggttgaatgaatatgttcagttttgaagttgaatagtaaactccagttcagctaaatggtatcactgttgacccttttatgatatgattagacttcgttagtactn

SEQ ID NO: 55955 - DNA, 648 bp, Homo sapiens
gctcatctaagcctaagttggtctgcaggcgtttgaatgagttgtggttgccaagtaaagtggtgaacttacgtggtgattaatgaaattatcttaaatattaggaagagttgattgaagttttttgcctatgtgtgttgggaataaaaccaacacgttgctgatggggaggttaattgccgagggatgaatgaggtgtacattttaccagtattccagtcaggcttgccagaatacggggggtccgcagactccgtgggcatctcagatgtgccagtgaaagggtttctgtttgcttcattgctgacagcttgttactttttggaagctaggggtttctgttgcttgttcttggggagaatttttgaaacaggaaaagagagaccattaaaacatctagcggaaccccaggactttccctggaagtctgtgtgtcgagtgtacagtaggagttaggaagtactctggtgcagttcaggcctttctcttacctctcagtattctatttccgatctggatgtgtcccagatggcatttggtaagaatatctctgttaagactgattaatttttagtaatatttcttgttctttgtttctgttatgatccttgtctcgtcttcaaagtttaattagaaaatgattcggag

SEQ ID NO: 55956 - DNA, 205 bp, Homo sapiens
gtatttttgtagaggcggggtttccctatgttgcccaggatggtctcaaactcctgggctcaagcaatctgcccgcctcagcctccccgagtgctgggtttacagggtgagccaccatgcccggcccgcctgcgtctcttaaaggcttccaggatgtggctgcgttgggctcctagggccccgttctccaaacctggttctcctt

SEQ ID NO: 55957 - DNA, 310 bp, Homo sapiens
gagtgctccccgagtgtccaccgtcggcctgctctgttccggggcagggccacatctttgtccgtgtgccgaggaggggactggtgggctggagtcccagggggagattattccaagtaggggctccagaaagtggccagatggtgtgagtggctccagaagactcttctcttctctgtgcaagagccaggaaggctctagaaaggaatgtctgaggaagcatcggagactgggtcccgccatgcctgtgtcatctcctggcttccccggcccttatggctcgttcggaacaccacctggatacggctgc

SEQ ID NO: 55958 - DNA, 168 bp, Homo sapiens
gagtgctccccgagtgtccaccgtcggcctgctctgttccggggcagggccacatctttgtccgtgtgccgaggaggggactggtgggctggagtcccagggggagattattccaagtaggggctccagaaagatggctcgttcggaacaccacctggatacggctgc

SEQ ID NO: 55959 - DNA, 568 bp, Homo sapiens
ctatgacccataaaatggagctttgagcagcaaagctaccaagaaccacacagagatgcgggtgtgcctccctggggagagagccctgcaagcaaaagctcacttttactttcttaaaatagagctggaagggtttctgcctgtgtagcagctgagctgagacagttttcctttccagctgagggttataacctaatgcagctattctcctctctgcgtttcaaacgcagagaggaagagaggtttttgaaatggctacgagagctgctctgcaagctagacgtgggaagaaaaaatctgggtgccttgtcttgtgaaaccttgctgcaagcacagcccttatgcggttaattttgaagtgctgtttattaatcttagtgtatgattactggcctttttcatttatctataatttacctaagattacaaatcagaagtcatcttgctaccagtatttagaagccaactatgattattaacgatgtccaacccgtctggcccaccagggtccttttgacactgctctaacagccctcctctgcactcccctgcgtttggggaagcctct

SEQ ID NO: 55960 - DNA, 142 bp, Homo sapiens
ctactactgctcgaattcaagctgctaacgatgtacggggacatgggtggcactcagtctctcttctctccagctgactaaactttttttctgtaccagttaatttttccaactactaatagaataaaggcagttttctaaa

SEQ ID NO: 55961 - DNA, 177 bp, Homo sapiens
cattggataagcgatgggggtttggatgcaaacaggattggcgcttttgggtacatggagtgttcagcaaagaccaaagatggagtgagagaggtttttgaaatggctacgagagctgctctgcaagctagacgtgggaagaaaaactgtagaggctgatgggaggcagaggctggg

SEQ ID NO: 55962 - DNA, 653 bp, Homo sapiens
ccacgcgtcgcgaccacgcgtcgccacgcgtccgatctgggtgccttgtcttgtgaaaccttgctgcaagcacagcccttatgcggttaattttgaagtgctgtttattaatcttagtgtatgattactggcctttttcatttatctataatttacctaagattacaaatcagaagtcatcttgctaccagtatttagaagccaactatgattattaacgatgtccaacccgtctggcccaccagggtccttttgacactgctctaacagccctcctctgcactcccacctgacacaccaggcgctaattcaaggaatttcttaacttcttgcttctttctagaaagagaaacagttggtaacttttgtgaattaggctgtaactactttataactaacatgtcctgcctattatctgtcagctgcaaggtactctggtgagtcaccacttcagggctttactccgtaacagattttgttggcatagctctggggtgggcagttttttgaaaatgggctcaaccagaaaagcccaagttcatgcagctgtggcagagttacagttctgtggtttcatgttagttaccttatagttactgtgtaattagtgccacttaatgtatgttaccaaaaataaatatatctaccccaga

SEQ ID NO: 55963 - DNA, 218 bp, Homo sapiens
ggggtgggcagcagcatcccagccttgagatgctcactttccttctctgcaaccagatcgtgggcagttttttgaaaatgggctcaaccagaaaagcccaagttcatgcagctgtggcagagttacagttctgtggtttcatgttagttaccttatagttactgtgtaattagtgccacttaatgtatgttaccaaaaataaatatatctaccccaga

SEQ ID NO: 55964 - DNA, 136 bp, Homo sapiens
agcaccttcaggctagtccctatctgcagctgtggcagagttacagttctgtggtttcatgttagttaccttatagttactgtgtaattagtgccacttaatgtatgttaccaaaaataaatatatctaccccaga

SEQ ID NO: 55965 - DNA, 347 bp, Homo sapiens
gcggccagctactactactaaattaacagcagctcagacccatattaccccttttcggccccatgtatctcagtaccccatggagctgggctaagtaaataggaattggtttcacgcctgaggcaattagacactttggaagatggcataacctgtctcacctggacttaagcgtctggctctaattcacagtgctcttttctcctcactgtatccaggttccctcccagaggagccaccagttctcatgggtggcactcagtctctcttctctccagctgactaaactttttttctgtaccagttaatttttccaactactaatagaataaaggcagttttctaaa

SEQ ID NO: 55966 - DNA, 741 bp, Homo sapiens
  misc_feature (15)..(15): n is a, c, g, or t
  misc_feature (47)..(47): n is a, c, g, or t
  misc_feature (61)..(61): n is a, c, g, or t
  misc_feature (75)..(75): n is a, c, g, or t
  misc_feature (660)..(660): n is a, c, g, or t
  misc_feature (665)..(665): n is a, c, g, or t
  misc_feature (741)..(741): n is a, c, g, or t
tgcggggggcgggtngcggcgggtcgggggggggcagcgggcggagncgtgcatgttctangtacgggggagcgncaagcggtcctccgtcggttctctcgttagtccacggtctggtcttcagctacccgccttcgtctccgagtttgcgactcgcggaccggcgtccccggcgcgaagaggctggactcggattcgttgcctgagcaatggctgccatccggaagaaactggtgattgttggtgatggagcctgtggaaagacatgcttgctcatagtcttcagcaaggaccagttcccagaggtgtatgtgcccacagtgtttgagaactatgtggcagatatcgaggtggatggaaagcaggtagagttggctttgtgggacacagctgggcaggaagattatgatcgcctgaggcccctctcctacccagataccgatgttatactgatgtgtttttccatcgacagccctgatagtttagcatcctggttgggaataagaaggatcttcggaatgatgagcacacaaggcgggagctagccaagatgaagcaggagccggtgaaacctgaagaaggcagagatatggcaaacaggattggcgcttttgggtacatggagtgttcagcaaagaccaaagatggagtgtttgatgntcaantgttgagtaactggagaaattgtgctgctggaactgtgagcagctatcgtattgaggtgtatactaggtatctgcn

SEQ ID NO: 55967 - DNA, 583 bp, Homo sapiens
catctaccagcagtgacagatgtcctgtaaagtgcctgcctttgtggggcaggaagtgccccccgtgaaactaccttgtgttgtggatcttttgctcctccagagcccttactcgggccccacctacagagatgctcagcaccactcttggctggactgagaaaaagctgttggttctctgtttaaaggaaagggattatatttcctttttatggttttgaaactagtgagtttcattaaatgtctagcatttttctgaagccacaaagaaagtgtctctgcaatttcactgaggttcttggaaagtcttcaagatagaattgtatgtatccccaaattctctacatttttctttcagaaaaaaacatcccagaaaagtggaccccagaagtcaagcatttctgtcccaacgtgcccatcatcctggttgggaataagaaggatcttcggaatgatgagcacacaaggcgggagctagccaagatgaagcaggagccggtgaaacctgaagaaggcagagatatggtcgcttggtcagctagacaagatggagtgagagaggtttgatctagacgtgggaaga

SEQ ID NO: 55968 - DNA, 843 bp, Homo sapiens
  misc_feature (742)..(742): n is a, c, g, or t
agagggccaagcggcggcggcggggtcctgtactcttgctgtggctgggcggctagttcaagttgccatagctgcgagtctggggagagcacagtcggttgagtcgctgcgtttggtcggttgcaccttctgggtcactggtagccgcgggagccgggtggggcctaggcgatgatccggcattaaggagctgggatcatcctccgtctcaggtggtttggggaaagtgtaggggcaaccaaagatcatcggcttgactaggccctttgccctgaacctcatgaagaaatgataggaggcagacatatgtgcctaaaaagagcgttgagctcagagaagaggctggactcggattcgttgcctgagcaatggctgccatccggaagacatgcttgctcatagtcttcagcaaggaccagttcccagaggtgtatgtgcccacagtgtttgagaactatgtggcagatatcgaggtggatggaaagcaggtagagttggctttgtgggacacagctgggcaggaagattatgatcgcctgaggcccctctcctacccagataccgatgttatactgatgtgtttttccatcgacagccctgatagtttagaaaacatcccagaaaagtggaccccagaagtcaagcatttctgtcccaacgtgcccatcatcctggttgggaataagaaggatcttcggaatgatgagcacacaaggcgggagctagccaagatgaagcaganccggtgaaacctgaagaagcagaagcaggaagcaggccggagggcagaagcaggagcagagcaggaagcggggatccttagatcacctcagcagcaagctg

SEQ ID NO: 55969 - DNA, 1946 bp, Homo sapiens
ccccaccaccctctctcccctctgcgccctctaactaagtctaggtacgaggcctgggtgttccgccctcgctctctcgcgctaccctcccgccgcccgcggtcctccgtcggttctctcgttagtccacggtctggtcttcagctacccgccttcgtctccgagtttgcgactcgcggaccggcgtccccggcgcgaagaggctggactcggattcgttgcctgagcaatggctgccatccggaagaaactggtgattgttggtgatggagcctgtggaaagacatgcttgctcatagtcttcagcaaggaccagttcccagaggtgtatgtgcccacagtgtttgagaactatgtggcagatatcgaggtggatggaaagcaggtagagttggctttgtgggacacagctgggcaggaagattatgatcgcctgaggcccctctcctacccagataccgatgttatactgatgtgtttttccatcgacagccctgatagtttagaaaacatcccagaaaagtggaccccagaagtcaagcatttctgtcccaacgtgcccatcatcctggttgggaataagaaggatcttcggaatgatgagcacacaaggcgggagctagccaagatgaagcaggagccggtgaaacctgaagaaggcagagatatggcaaacaggattggcgcttttgggtacatggagtgttcagcaaagaccaaagatggagtgagagaggtttttgaaatggctacgagagctgctctgcaagctagacgtgggaagaaaaaatctgggtgccttgtcttgtgaaaccttgctgcaagcacagcccttatgcggttaattttgaagtgctgtttattaatcttagtgtatgattactggcctttttcatttatctataatttacctaagattacaaatcagaagtcatcttgctaccagtatttagaagccaactatgattattaacgatgtccaacccgtctggcccaccagggtccttttgacactgctctaacagccctcctctgcactcccacctgacacaccaggcgctaattcaaggaatttcttaacttcttgcttctttctagaaagagaaacagttggtaacttttgtgaattaggctgtaactactttataactaacatgtcctgcctattatctgtcagctgcaaggtactctggtgagtcaccacttcagggctttactccgtaacagattttgttggcatagctctggggtgggcagttttttgaaaatgggctcaaccagaaaagcccaagttcatgcagctgtggcagagttacagttctgtggtttcatgttagttaccttatagttactgtgtaattagtgccacttaatgtatgttaccaaaaataaatatatctaccccagactagatgtagtattttttgtataattggatttcctaatactgtcatcctcaaagaaagtgtattggttttttaaaaaagaaagtgtatttggaaataaagtcagatggaaaattcattttttaaattcccgttttgtcactttttctgataaaagatggccatattaccccttttcggccccatgtatctcagtaccccatggagctgggctaagtaaataggaattggtttcacgcctgaggcaattagacactttggaagatggcataacctgtctcacctggacttaagcgtctggctctaattcacagtgctcttttctcctcactgtatccaggttccctcccagaggagccaccagttctcatgggtggcactcagtctctcttctctccagctgactaaactttttttctgtaccagttaatttttccaactactaatagaataaaggcagttttctaaaaaaaaaaagggggcgctaattcctcgagggccataggtccgttttgaaaagggccaaagggttaaaagagg

SEQ ID NO: 55970 - DNA, 1926 bp, Homo sapiens
  misc_feature (1897)..(1897): n is a, c, g, or t
ccccaccaccctctctcccctctgcgccctctaactaagtctaggtacgaggcctgggtgttccgccctcgctctctcgcgctaccctcccgccgcccgcggtcctccgtcggttctctcgttagtccacggtctggtcttcagctacccgccttcgtctccgagtttgcgactcgcggaccggcgtccccggcgcgaagaggctggactcggattcgttgcctgagcaatggctgccatccggaagaaactggtgattgttggtgatggagcctgtggaaagacatgcttgctcatagtcttcagcaaggaccagttcccagaggtgtatgtgcccacagtgtttgagaactatgtggcagatatcgaggtggatggaaagcaggtagagttggctttgtgggacacagctgggcaggaagattatgatcgcctgaggcccctctcctacccagataccgatgttatactgatgtgtttttccatcgacagccctgatagtttagaaaacatcccagaaaagtggaccccagaagtcaagcatttctgtcccaacgtgcccatcatcctggttgggaataagaaggatcttcggaatgatgagcacacaaggcgggagctagccaagatgaagcaggagccggtgaaacctgaagaaggcagagatatggcaaacaggattggcgcttttgggtacatggagtgttcagcaaagaccaaagatggagtgagagaggtttttgaaatggctacgagagctgctctgcaagctagacgtgggaagaaaaaatctgggtgccttgtcttgtgaaaccttgctgcaagcacagcccttatgcggttaattttgaagtgctgtttattaatcttagtgtatgattactggcctttttcatttatctataatttacctaagattacaaatcagaagtcatcttgctaccagtatttagaagccaactatgattattaacgatgtccaacccgtctggcccaccagggtccttttgacactgctctaacagccctcctctgcactcccacctgacacaccaggcgctaattcaaggaatttcttaacttcttgcttctttctagaaagagaaacagttggtaacttttgtgaattaggctgtaactactttataactaacatgtcctgcctattatctgtcagctgcaaggtactctggtgagtcaccacttcagggctttactccgtaacagattttgttggcatagctctggggtgggcagttttttgaaaatgggctcaaccagaaaagcccaagttcatgcagctgtggcagagttacagttctgtggtttcatgttagttaccttatagttactgtgtaattagtgccacttaatgtatgttaccaaaaataaatatatctaccccagactagatgtagtattttttgtataattggatttcctaatactgtcatcctcaaagaaagtgtattggttttttaaaaaagaaagtgtatttggaaataaagtcagatggaaaattcattttttaaattcccgttttgtcactttttctgataaaagatggccatattaccccttttcggccccatgtatctcagtaccccatggagctgggctaagtaaataggaattggtttcacgcctgaggcaattagacactttggaagatggcataacctgtctcacctggacttaagcgtctggctctaattcacagtgctcttttctcctcactgtatccaggttccctcccagaggagccaccagttctcatgggtggcactcagtctctcttctctccagctgactaaactttttttctgtaccagttaatttttccaactactaatagaataaaggcagttttctaaaaccagatgcggccggccccctncccccctccccctcaaccgctaacccacc

SEQ ID NO: 55971 - DNA, 1907 bp, Homo sapiens
ccccaccaccctctctcccctctgcgccctctaactaagtctaggtacgaggcctgggtgttccgccctcgctctctcgcgctaccctcccgccgcccgcggtcctccgtcggttctctcgttagtccacggtctggtcttcagctacccgccttcgtctccgagtttgcgactcgcggaccggcgtccccggcgcgaagaggctggactcggattcgttgcctgagcaatggctgccatccggaagaaactggtgattgttggtgatggagcctgtggaaagacatgcttgctcatagtcttcagcaaggaccagttcccagaggtgtatgtgcccacagtgtttgagaactatgtggcagatatcgaggtggatggaaagcaggtagagttggctttgtgggacacagctgggcaggaagattatgatcgcctgaggcccctctcctacccagataccgatgttatactgatgtgtttttccatcgacagccctgatagtttagaaaacatcccagaaaagtggaccccagaagtcaagcatttctgtcccaacgtgcccatcatcctggttgggaataagaaggatcttcggaatgatgagcacacaaggcgggagctagccaagatgaagcaggagccggtgaaacctgaagaaggcagagatatggcaaacaggattggcgcttttgggtacatggagtgttcagcaaagaccaaagatggagtgagagaggtttttgaaatggctacgagagctgctctgcaagctagacgtgggaagaaaaaatctgggtgccttgtcttgtgaaaccttgctgcaagcacagcccttatgcggttaattttgaagtgctgtttattaatcttagtgtatgattactggcctttttcatttatctataatttacctaagattacaaatcagaagtcatcttgctaccagtatttagaagccaactatgattattaacgatgtccaacccgtctggcccaccagggtccttttgacactgctctaacagccctcctctgcactcccacctgacacaccaggcgctaattcaaggaatttcttaacttcttgcttctttctagaaagagaaacagttggtaacttttgtgaattaggctgtaactactttataactaacatgtcctgcctattatctgtcagctgcaaggtactctggtgagtcaccacttcagggctttactccgtaacagattttgttggcatagctctggggtgggcagttttttgaaaatgggctcaaccagaaaagcccaagttcatgcagctgtggcagagttacagttctgtggtttcatgttagttaccttatagttactgtgtaattagtgccacttaatgtatgttaccaaaaataaatatatctaccccagactagatgtagtattttttgtataattggatttcctaatactgtcatcctcaaagaaagtgtattggttttttaaaaaagaaagtgtatttggaaataaagtcagatggaaaattcattttttaaattcccgttttgtcactttttctgataaaagatggccatattaccccttttcggccccatgtatctcagtaccccatggagctgggctaagtaaataggaattggtttcacgcctgaggcaattagacactttggaagatggcataacctgtctcacctggacttaagcgtctggctctaattcacagtgctcttttctcctcactgtatccaggttccctcccagaggagccaccagttctcatgggtggcactcagtctctcttctctccagctgactaaactttttttctgtaccagttaatttttccaactactaatagaataaaggcagttttctaaaaaaaaaaacaccacacaccgacaccacaaaca

SEQ ID NO: 55972 - DNA, 1885 bp, Homo sapiens
ccccaccaccctctctcccctctgcgccctctaactaagtctaggtacgaggcctgggtgttccgccctcgctctctcgcgctaccctcccgccgcccgcggtcctccgtcggttctctcgttagtccacggtctggtcttcagctacccgccttcgtctccgagtttgcgactcgcggaccggcgtccccggcgcgaagaggctggactcggattcgttgcctgagcaatggctgccatccggaagaaactggtgattgttggtgatggagcctgtggaaagacatgcttgctcatagtcttcagcaaggaccagttcccagaggtgtatgtgcccacagtgtttgagaactatgtggcagatatcgaggtggatggaaagcaggtagagttggctttgtgggacacagctgggcaggaagattatgatcgcctgaggcccctctcctacccagataccgatgttatactgatgtgtttttccatcgacagccctgatagtttagaaaacatcccagaaaagtggaccccagaagtcaagcatttctgtcccaacgtgcccatcatcctggttgggaataagaaggatcttcggaatgatgagcacacaaggcgggagctagccaagatgaagcaggagccggtgaaacctgaagaaggcagagatatggcaaacaggattggcgcttttgggtacatggagtgttcagcaaagaccaaagatggagtgagagaggtttttgaaatggctacgagagctgctctgcaagctagacgtgggaagaaaaaatctgggtgccttgtcttgtgaaaccttgctgcaagcacagcccttatgcggttaattttgaagtgctgtttattaatcttagtgtatgattactggcctttttcatttatctataatttacctaagattacaaatcagaagtcatcttgctaccagtatttagaagccaactatgattattaacgatgtccaacccgtctggcccaccagggtccttttgacactgctctaacagccctcctctgcactcccacctgacacaccaggcgctaattcaaggaatttcttaacttcttgcttctttctagaaagagaaacagttggtaacttttgtgaattaggctgtaactactttataactaacatgtcctgcctattatctgtcagctgcaaggtactctggtgagtcaccacttcagggctttactccgtaacagattttgttggcatagctctggggtgggcagttttttgaaaatgggctcaaccagaaaagcccaagttcatgcagctgtggcagagttacagttctgtggtttcatgttagttaccttatagttactgtgtaattagtgccacttaatgtatgttaccaaaaataaatatatctaccccagactagatgtagtattttttgtataattggatttcctaatactgtcatcctcaaagaaagtgtattggttttttaaaaaagaaagtgtatttggaaataaagtcagatggaaaattcattttttaaattcccgttttgtcactttttctgataaaagatggccatattaccccttttcggccccatgtatctcagtaccccatggagctgggctaagtaaataggaattggtttcacgcctgaggcaattagacactttggaagatggcataacctgtctcacctggacttaagcgtctggaggcaatttgaagtgtgtttttagcctctctgtagccaggatacataacaaacaagactccagtttactggtgtgacatccagtgtcttgtctaaatacaatatgatagttttatcatgtaccaataaaatgtccgagtgtgtaatccaaagaaggccgtctttttcacgtcctgtac

SEQ ID NO: 55973 - DNA, 1632 bp, Homo sapiens
ccccaccaccctctctcccctctgcgccctctaactaagtctaggtacgaggcctgggtgttccgccctcgctctctcgcgctaccctcccgccgcccgcggtcctccgtcggttctctcgttagtccacggtctggtcttcagctacccgccttcgtctccgagtttgcgactcgcggaccggcgtccccggcgcgaagaggctggactcggattcgttgcctgagcaatggctgccatccggaagaaactggtgattgttggtgatggagcctgtggaaagacatgcttgctcatagtcttcagcaaggaccagttcccagaggtgtatgtgcccacagtgtttgagaactatgtggcagatatcgaggtggatggaaagcaggtagagttggctttgtgggacacagctgggcaggaagattatgatcgcctgaggcccctctcctacccagataccgatgttatactgatgtgtttttccatcgacagccctgatagtttagaaaacatcccagaaaagtggaccccagaagtcaagcatttctgtcccaacgtgcccatcatcctggttgggaataagaaggatcttcggaatgatgagcacacaaggcgggagctagccaagatgaagcaggagccggtgaaacctgaagaaggcagagatatggcaaacaggattggcgcttttgggtacatggagtgttcagcaaagaccaaagatggagtgagagaggtttttgaaatggctacgagagctgctctgcaagctagacgtgggaagaaaaaatctgggtgccttgtcttgtgaaaccttgctgcaagcacagcccttatgcggttaattttgaagtgctgtttattaatcttagtgtatgattactggcctttttcatttatctataatttacctaagattacaaatcagaagtcatcttgctaccagtatttagaagccaactatgattattaacgatgtccaacccgtctggcccaccagggtccttttgacactgctctaacagccctcctctgcactcccacctgacacaccaggcgctaattcaaggaatttcttaacttcttgcttctttctagaaagagaaacagttggtaacttttgtgaattaggctgtaactactttataactaacatgtcctgcctattatctgtcagctgcaaggtactctggtgagtcaccacttcagggctttactccgtaacagattttgttggcatagctctggggtgggcagttttttgaaaatgggctcaaccagaaaagcccaagttcatgcagctgtggcagagttacagttctgtggtttcatgttagttaccttatagttactgtgtaattagtgccacttaatgtatgttaccaaaaataaatatatctaccccagactagatgtagtattttttgtataattggatttcctaatactgtcatcctcaaagaaagtgtattggttttttaaaaaagaaagtgtatttggaaataaagtcagatggaaaattcattttttaaaaaacccataccctttctttgaggatgacagtattaggaaatcccattataccaaaaatactacatctagtctgctagatatatttatttttggtaacat

SEQ ID NO: 55974 - DNA, 1829 bp, Homo sapiens
ccccaccaccctctctcccctctgcgccctctaactaagtctaggtacgaggcctgggtgttccgccctcgctctctcgcgctaccctcccgccgcccgcggtcctccgtcggttctctcgttagtccacggtctggtcttcagctacccgccttcgtctccgagtttgcgactcgcggaccggcgtccccggcgcgaagaggctggactcggattcgttgcctgagcaatggctgccatccggaagaaactggtgattgttggtgatggagcctgtggaaagacatgcttgctcatagtcttcagcaaggaccagttcccagaggtgtatgtgcccacagtgtttgagaactatgtggcagatatcgaggtggatggaaagcaggtagagttggctttgtgggacacagctgggcaggaagattatgatcgcctgaggcccctctcctacccagataccgatgttatactgatgtgtttttccatcgacagccctgatagtttagaaaacatcccagaaaagtggaccccagaagtcaagcatttctgtcccaacgtgcccatcatcctggttgggaataagaaggatcttcggaatgatgagcacacaaggcgggagctagccaagatgaagcaggagccggtgaaacctgaagaaggcagagatatggcaaacaggattggcgcttttgggtacatggagtgttcagcaaagaccaaagatggagtgagagaggtttttgaaatggctacgagagctgctctgcaagctagacgtgggaagaaaaaatctgggtgccttgtcttgtgaaaccttgctgcaagcacagcccttatgcggttaattttgaagtgctgtttattaatcttagtgtatgattactggcctttttcatttatctataatttacctaagattacaaatcagaagtcatcttgctaccagtatttagaagccaactatgattattaacgatgtccaacccgtctggcccaccagggtccttttgacactgctctaacagccctcctctgcactcccacctgacacaccaggcgctaattcaaggaatttcttaacttcttgcttctttctagaaagagaaacagttggtaacttttgtgaattaggctgtaactactttataactaacatgtcctgcctattatctgtcagctgcaaggtactctggtgagtcaccacttcagggctttactccgtaacagattttgttggcatagctctggggtgggcagttttttgaaaatgggctcaaccagaaaagcccaagttcattatagttactgtgtaattagtgccacttaatgtatgttaccaaaaataaatatatctaccccagactagatgtagtattttttgtataattggatttcctaatactgtcatcctcaaagaaagtgtattggttttttaaaaaagaaagtgtatttggaaataaagtcagatggaaaattcattttttaaattcccgttttgtcactttttctgataaaagatggccatattaccccttttcggccccatgtatctcagtaccccatggagctgggctaagtaaataggaattggtttcacgcctgaggcaattagacactttggaagatggcataacctgtctcacctggacttaagcgtctggctctaattcacagtgctcttttctcctcactgtatccaggttccctcccagaggagccaccagttctcatgggtggcactcagtctctcttctctccagctgactaaactttttttctgtaccagttaatttttccaactactaatagaataaaggcagttttctaaa

SEQ ID NO: 55975 - DNA, 1564 bp, Homo sapiens
ccccaccaccctctctcccctctgcgccctctaactaagtctaggtacgaggcctgggtgttccgccctcgctctctcgcgctaccctcccgccgcccgcggtcctccgtcggttctctcgttagtccacggtctggtcttcagctacccgccttcgtctccgagtttgcgactcgcggaccggcgtccccggcgcgaagaggctggactcggattcgttgcctgagcaatggctgccatccggaagaaactggtgattgttggtgatggagcctgtggaaagacatgcttgctcatagtcttcagcaaggaccagttcccagaggtgtatgtgcccacagtgtttgagaactatgtggcagatatcgaggtggatggaaagcaggtagagttggctttgtgggacacagctgggcaggaagattatgatcgcctgaggcccctctcctacccagataccgatgttatactgatgtgtttttccatcgacagccctgatagtttagaaaacatcccagaaaagtggaccccagaagtcaagcatttctgtcccaacgtgcccatcatcctggttgggaataagaaggatcttcggaatgatgagcacacaaggcgggagctagccaagatgaagcaggagccggtgaaacctgaagaaggcagagatatggcaaacaggattggcgcttttgggtacatggagtgttcagcaaagaccaaagatggagtgagagaggtttttgaaatggctacgagagctgctctgcaagctagacgtgggaagaaaaaatctgggtgccttgtcttgtgaaaccttgctgcaagcacagcccttatgcggttaattttgaagtgctgtttattaatcttagtgtatgattactggcctttttcatttatctataatttacctaagattacaaatcagaagtcatcttgctaccagtatttagaagccaactatgattattaacgatgtccaacccgtctggcccaccagggtccttttgacactgctctaacagccctcctctgcactcccacctgacacaccaggcgctaattcaaggaatttcttaacttcttgcttctttctagaaagagaaacagttggtaacttttgtgaattaggctgtaactactttataactaacatgtcctgcctattatctgtcagctgcaaggtactctggtgagtcaccacttcagggctttactccgtaacagattttgttggcatagctctggggtgggcagttttttgaaaatgggctcaaccagaaaagcccaagttcatgcagctgtggcagagttacagttctgtggtttcatgttagttaccttatagttactgtgtaattagtgccacttaatgtatgttaccaaaaataaatatatctaccccagactagatgtagtattttttgtataattggatttcctaatactgtcatcctcaaagaaagtgtattggttttttaaaaaagaaagtgtatttggaaataaagtcagatgcggcaagcctctcaataacttatttctcaacttatgttatttatacatc

SEQ ID NO: 55976 - DNA, 1560 bp, Homo sapiens
ccccaccaccctctctcccctctgcgccctctaactaagtctaggtacgaggcctgggtgttccgccctcgctctctcgcgctaccctcccgccgcccgcggtcctccgtcggttctctcgttagtccacggtctggtcttcagctacccgccttcgtctccgagtttgcgactcgcggaccggcgtccccggcgcgaagaggctggactcggattcgttgcctgagcaatggctgccatccggaagaaactggtgattgttggtgatggagcctgtggaaagacatgcttgctcatagtcttcagcaaggaccagttcccagaggtgtatgtgcccacagtgtttgagaactatgtggcagatatcgaggtggatggaaagcaggtagagttggctttgtgggacacagctgggcaggaagattatgatcgcctgaggcccctctcctacccagataccgatgttatactgatgtgtttttccatcgacagccctgatagtttagaaaacatcccagaaaagtggaccccagaagtcaagcatttctgtcccaacgtgcccatcatcctggttgggaataagaaggatcttcggaatgatgagcacacaaggcgggagctagccaagatgaagcaggagccggtgaaacctgaagaaggcagagatatggcaaacaggattggcgcttttgggtacatggagtgttcagcaaagaccaaagatggagtgagagaggtttttgaaatggctacgagagctgctctgcaagctagacgtgggaagaaaaaatctgggtgccttgtcttgtgaaaccttgctgcaagcacagcccttatgcggttaattttgaagtgctgtttattaatcttagtgtatgattactggcctttttcatttatctataatttacctaagattacaaatcagaagtcatcttgctaccagtatttagaagccaactatgattattaacgatgtccaacccgtctggcccaccagggtccttttgacactgctctaacagccctcctctgcactcccacctgacacaccaggcgctaattcaaggaatttcttaacttcttgcttctttctagaaagagaaacagttggtaacttttgtgaattaggctgtaactactttataactaacatgtcctgcctattatctgtcagctgcaaggtactctggtgagtcaccacttcagggctttactccgtaacagattttgttggcatagctctggggtgggcagttttttgaaaatgggctcaaccagaaaagcccaagttcatgcagctgtggcagagttacagttctgtggtttcatgttagttaccttatagttactgtgtaattagtgccacttaatgtatgttaccaaaaataaatatatctaccccagactagatgtagtattttttgtataattggatttcctaatactgtcatcctcaaagaaagtgtattggttttttaaaatactcagtgactttgaataagtcggtgtctttgtgttgtggtgtggttgtttggtggatgtgtggcttggtgtcga

SEQ ID NO: 55977 - DNA, 1484 bp, Homo sapiens
ccccaccaccctctctcccctctgcgccctctaactaagtctaggtacgaggcctgggtgttccgccctcgctctctcgcgctaccctcccgccgcccgcggtcctccgtcggttctctcgttagtccacggtctggtcttcagctacccgccttcgtctccgagtttgcgactcgcggaccggcgtccccggcgcgaagaggctggactcggattcgttgcctgagcaatggctgccatccggaagaaactggtgattgttggtgatggagcctgtggaaagacatgcttgctcatagtcttcagcaaggaccagttcccagaggtgtatgtgcccacagtgtttgagaactatgtggcagatatcgaggtggatggaaagcaggtagagttggctttgtgggacacagctgggcaggaagattatgatcgcctgaggcccctctcctacccagataccgatgttatactgatgtgtttttccatcgacagccctgatagtttagaaaacatcccagaaaagtggaccccagaagtcaagcatttctgtcccaacgtgcccatcatcctggttgggaataagaaggatcttcggaatgatgagcacacaaggcgggagctagccaagatgaagcaggagccggtgaaacctgaagaaggcagagatatggcaaacaggattggcgcttttgggtacatggagtgttcagcaaagaccaaagatggagtgagagaggtttttgaaatggctacgagagctgctctgcaagctagacgtgggaagaaaaaatctgggtgccttgtcttgtgaaaccttgctgcaagcacagcccttatgcggttaattttgaagtgctgtttattaatcttagtgtatgattactggcctttttcatttatctataatttacctaagattacaaatcagaagtcatcttgctaccagtatttagaagccaactatgattattaacgatgtccaacccgtctggcccaccagggtccttttgacactgctctaacagccctcctctgcactcccacctgacacaccaggcgctaattcaaggaatttcttaacttcttgcttctttctagaaagagaaacagttggtaacttttgtgaattaggctgtaactactttataactaacatgtcctgcctattatctgtcagctgcaaggtactctggtgagtcaccacttcagggctttactccgtaacagattttgttggcatagctctggggtgggcagttttttgaaaatgggctcaaccagaaaagcccaagttcatgcagctgtggcagagttacagttctgtggtttcatgttagttaccttatagttactgtgtaattagtgccacttaatgtatgttaccaaataatttttcccgaaaagttggttttggaaagggtccaaatggagcccaaaggttggttaccacaacgtgggaacaggaaataatcccgaatgaaggg

SEQ ID NO: 55978 - DNA, 1303 bp, Homo sapiens
ccccaccaccctctctcccctctgcgccctctaactaagtctaggtacgaggcctgggtgttccgccctcgctctctcgcgctaccctcccgccgcccgcggtcctccgtcggttctctcgttagtccacggtctggtcttcagctacccgccttcgtctccgagtttgcgactcgcggaccggcgtccccggcgcgaagaggctggactcggattcgttgcctgagcaatggctgccatccggaagaaactggtgattgttggtgatggagcctgtggaaagacatgcttgctcatagtcttcagcaaggaccagttcccagaggtgtatgtgcccacagtgtttgagaactatgtggcagatatcgaggtggatggaaagcaggtagagttggctttgtgggacacagctgggcaggaagattatgatcgcctgaggcccctctcctacccagataccgatgttatactgatgtgtttttccatcgacagccctgatagtttagaaaacatcccagaaaagtggaccccagaagtcaagcatttctgtcccaacgtgcccatcatcctggttgggaataagaaggatcttcggaatgatgagcacacaaggcgggagctagccaagatgaagcaggagccggtgaaacctgaagaaggcagagatatggcaaacaggattggcgcttttgggtacatggagtgttcagcaaagaccaaagatggagtgagagaggtttttgaaatggctacgagagctgctctgcaagctagacgtgggaagaaaaaatctgggtgccttgtcttgtgaaaccttgctgcaagcacagcccttatgcggttaattttgaagtgctgtttattaatcttagtgtatgattactggcctttttcatttatctataatttacctaagattacaaatcagaagtcatcttgctaccagtatttagaagccaactatgattattaacgatgtccaacccgtctggcccaccagggtccttttgacactgctctaacagccctcctctgcactccctgtaaacagcgctatcaggattcttactctgttctttctagaagagacggtggtacttcgggattaggcgactccttatactaatgtctggcttatcggcgccgaggtccgggggccctcggttacccgacatttgggttctcggggcttggacggcccaaaccctctgcggggaactgggcgaccacagggtgccttgtcaattccctcggtgttgccccatgtggagatgtaacgcttgttcctaggctaagctctccg

SEQ ID NO: 55979 - DNA, 1720 bp, Homo sapiens
ccccaccaccctctctcccctctgcgccctctaactaagtctaggtacgaggcctgggtgttccgccctcgctctctcgcgctaccctcccgccgcccgcggtcctccgtcggttctctcgttagtccacggtctggtcttcagctacccgccttcgtctccgagtttgcgactcgcggaccggcgtccccggcgcgaagaggctggactcggattcgttgcctgagcaatggctgccatccggaagaaactggtgattgttggtgatggagcctgtggaaagacatgcttgctcatagtcttcagcaaggaccagttcccagaggtgtatgtgcccacagtgtttgagaaaaaacatcccagaaaagtggaccccagaagtcaagcatttctgtcccaacgtgcccatcatcctggttgggaataagaaggatcttcggaatgatgagcacacaaggcgggagctagccaagatgaagcaggagccggtgaaacctgaagaaggcagagatatggcaaacaggattggcgcttttgggtacatggagtgttcagcaaagaccaaagatggagtgagagaggtttttgaaatggctacgagagctgctctgcaagctagacgtgggaagaaaaaatctgggtgccttgtcttgtgaaaccttgctgcaagcacagcccttatgcggttaattttgaagtgctgtttattaatcttagtgtatgattactggcctttttcatttatctataatttacctaagattacaaatcagaagtcatcttgctaccagtatttagaagccaactatgattattaacgatgtccaacccgtctggcccaccagggtccttttgacactgctctaacagccctcctctgcactcccacctgacacaccaggcgctaattcaaggaatttcttaacttcttgcttctttctagaaagagaaacagttggtaacttttgtgaattaggctgtaactactttataactaacatgtcctgcctattatctgtcagctgcaaggtactctggtgagtcaccacttcagggctttactccgtaacagattttgttggcatagctctggggtgggcagttttttgaaaatgggctcaaccagaaaagcccaagttcatgcagctgtggcagagttacagttctgtggtttcatgttagttaccttatagttactgtgtaattagtgccacttaatgtatgttaccaaaaataaatatatctaccccagactagatgtagtattttttgtataattggatttcctaatactgtcatcctcaaagaaagtgtattggttttttaaaaaagaaagtgtatttggaaataaagtcagatggaaaattcattttttaaattcccgttttgtcactttttctgataaaagatggccatattaccccttttcggccccatgtatctcagtaccccatggagctgggctaagtaaataggaattggtttcacgcctgaggcaattagacactttggaagatggcataacctgtctcacctggacttaagcgtctggctctaattcacagtgctcttttctcctcactgtatccaggttccctcccagaggagccaccagttctcatgggtggcactcagtctctcttctctccagctgactaaactttttttctgtaccagttaatttttccaactactaatagaataaaggcagttttctaaa

SEQ ID NO: 55980 - DNA, 1817 bp, Homo sapiens
ccccaccaccctctctcccctctgcgccctctaactaagtctaggtacgaggcctgggtgttccgccctcgctctctcgcgctaccctcccgccgcccgcggtcctccgtcggttctctcgttagtccacggtctggtcttcagctacccgccttcgtctccgagtttgcgactcgcggaccggcgtccccggcgcgaagaggctggactcggattcgttgcctgagcaatggctgccatccggaagaaactggtgattgttggtgatggagcctgtggaaagacatgcttgctcatagtcttcagcaaggaccagttcccagaggtgtatgtgcccacagtgtttgagaactatgtggcagatatcgaggtggatggaaagcaggtagagttggctttgtgggacacagctgggcaggaagattatgatcgcctgaggcccctctcctacccagataccgatgttatactgatgtgtttttccatcgacagccctgatagtttagcatcctggttgggaataagaaggatcttcggaatgatgagcacacaaggcgggagctagccaagatgaagcaggagccggtgaaacctgaagaaggcagagatatggcaaacaggattggcgcttttgggtacatggagtgttcagcaaagaccaaagatggagtgagagaggtttttgaaatggctacgagagctgctctgcaagctagacgtgggaagaaaaaatctgggtgccttgtcttgtgaaaccttgctgcaagcacagcccttatgcggttaattttgaagtgctgtttattaatcttagtgtatgattactggcctttttcatttatctataatttacctaagattacaaatcagaagtcatcttgctaccagtatttagaagccaactatgattattaacgatgtccaacccgtctggcccaccagggtccttttgacactgctctaacagccctcctctgcactcccacctgacacaccaggcgctaattcaaggaatttcttaacttcttgcttctttctagaaagagaaacagttggtaacttttgtgaattaggctgtaactactttataactaacatgtcctgcctattatctgtcagctgcaaggtactctggtgagtcaccacttcagggctttactccgtaacagattttgttggcatagctctggggtgggcagttttttgaaaatgggctcaaccagaaaagcccaagttcatgcagctgtggcagagttacagttctgtggtttcatgttagttaccttatagttactgtgtaattagtgccacttaatgtatgttaccaaaaataaatatatctaccccagactagatgtagtattttttgtataattggatttcctaatactgtcatcctcaaagaaagtgtattggttttttaaaaaagaaagtgtatttggaaataaagtcagatggaaaattcattttttaaattcccgttttgtcactttttctgataaaagatggccatattaccccttttcggccccatgtatctcagtaccccatggagctgggctaagtaaataggaattggtttcacgcctgaggcaattagacactttggaagatggcataacctgtctcacctggacttaagcgtctggctctaattcacagtgctcttttctcctcactgtatccaggttccctcccagaggagccaccagttctcatgggtggcactcagtctctcttctctccagctgactaaactttttttctgtaccagttaatttttccaactactaatagaataaaggcagttttctaaa

SEQ ID NO: 55981 - DNA, 1782 bp, Homo sapiens
ccccaccaccctctctcccctctgcgccctctaactaagtctaggtacgaggcctgggtgttccgccctcgctctctcgcgctaccctcccgccgcccgcggtcctccgtcggttctctcgttagtccacggtctggtcttcagctacccgccttcgtctccgagtttgcgactcgcggaccggcgtccccggcgcgaagaggctggactcggattcgttgcctgagcaatggctgccatccggaagaaactggtgattgttggtgatggagcctgtggaaagacatgcttgctcatagtcttcagcaaggaccagttcccagaggtgtatgtgcccacagtgtttgagaactatgtggcagatatcgaggtggatggaaagcaggtagagttggctttgtgggacacagctgggcaggaagattatgatcgcctgaggcccctctcctacccagataccgatgttatactgatgtgtttttccatcgacagccctgatagtttagaaaacatcccagaaaagtggaccccagaagtcaagcatgagccggtgaaacctgaagaaggcagagatatggcaaacaggattggcgcttttgggtacatggagtgttcagcaaagaccaaagatggagtgagagaggtttttgaaatggctacgagagctgctctgcaagctagacgtgggaagaaaaaatctgggtgccttgtcttgtgaaaccttgctgcaagcacagcccttatgcggttaattttgaagtgctgtttattaatcttagtgtatgattactggcctttttcatttatctataatttacctaagattacaaatcagaagtcatcttgctaccagtatttagaagccaactatgattattaacgatgtccaacccgtctggcccaccagggtccttttgacactgctctaacagccctcctctgcactcccacctgacacaccaggcgctaattcaaggaatttcttaacttcttgcttctttctagaaagagaaacagttggtaacttttgtgaattaggctgtaactactttataactaacatgtcctgcctattatctgtcagctgcaaggtactctggtgagtcaccacttcagggctttactccgtaacagattttgttggcatagctctggggtgggcagttttttgaaaatgggctcaaccagaaaagcccaagttcatgcagctgtggcagagttacagttctgtggtttcatgttagttaccttatagttactgtgtaattagtgccacttaatgtatgttaccaaaaataaatatatctaccccagactagatgtagtattttttgtataattggatttcctaatactgtcatcctcaaagaaagtgtattggttttttaaaaaagaaagtgtatttggaaataaagtcagatggaaaattcattttttaaattcccgttttgtcactttttctgataaaagatggccatattaccccttttcggccccatgtatctcagtaccccatggagctgggctaagtaaataggaattggtttcacgcctgaggcaattagacactttggaagatggcataacctgtctcacctggacttaagcgtctggctctaattcacagtgctcttttctcctcactgtatccaggttccctcccagaggagccaccagttctcatgggtggcactcagtctctcttctctccagctgactaaactttttttctgtaccagttaatttttccaactactaatagaataaaggcagttttctaaa

SEQ ID NO: 55982 - DNA, 1666 bp, Homo sapiens
ccccaccaccctctctcccctctgcgccctctaactaagtctaggtacgaggcctgggtgttccgccctcgctctctcgcgctaccctcccgccgcccgcggtcctccgtcggttctctcgttagtccacggtctggtcttcagctacccgccttcgtctccgagtttgcgactcgcggaccggcgtccccggcgcgaagaggctggactcggattcgttgcctgagcaatggctgccatccggaagaaactggtgattgttggtgatggagcctgtggaaagacatgcttgctcatagtcttcagcaaggaccagttcccagaggtgtatgtgcccacagtgtttgagaactatgtggcagatatcgaggtggatggaaagcaggtagagttggctttgtgggacacagctgggcaggaagattatggagccggtgaaacctgaagaaggcagagatatggcaaacaggattggcgcttttgggtacatggagtgttcagcaaagaccaaagatggagtgagagaggtttttgaaatggctacgagagctgctctgcaagctagacgtgggaagaaaaaatctgggtgccttgtcttgtgaaaccttgctgcaagcacagcccttatgcggttaattttgaagtgctgtttattaatcttagtgtatgattactggcctttttcatttatctataatttacctaagattacaaatcagaagtcatcttgctaccagtatttagaagccaactatgattattaacgatgtccaacccgtctggcccaccagggtccttttgacactgctctaacagccctcctctgcactcccacctgacacaccaggcgctaattcaaggaatttcttaacttcttgcttctttctagaaagagaaacagttggtaacttttgtgaattaggctgtaactactttataactaacatgtcctgcctattatctgtcagctgcaaggtactctggtgagtcaccacttcagggctttactccgtaacagattttgttggcatagctctggggtgggcagttttttgaaaatgggctcaaccagaaaagcccaagttcatgcagctgtggcagagttacagttctgtggtttcatgttagttaccttatagttactgtgtaattagtgccacttaatgtatgttaccaaaaataaatatatctaccccagactagatgtagtattttttgtataattggatttcctaatactgtcatcctcaaagaaagtgtattggttttttaaaaaagaaagtgtatttggaaataaagtcagatggaaaattcattttttaaattcccgttttgtcactttttctgataaaagatggccatattaccccttttcggccccatgtatctcagtaccccatggagctgggctaagtaaataggaattggtttcacgcctgaggcaattagacactttggaagatggcataacctgtctcacctggacttaagcgtctggctctaattcacagtgctcttttctcctcactgtatccaggttccctcccagaggagccaccagttctcatgggtggcactcagtctctcttctctccagctgactaaactttttttctgtaccagttaatttttccaactactaatagaataaaggcagttttctaaa

SEQ ID NO: 55983 - DNA, 1319 bp, Homo sapiens
ctacgcgtaactatctcttccccccccttcgcgcaccgcaatagatatactgaagtgactctcttattaaccaccgctcaggagccggtgaaacctgaagaaggcagagatatggcaaacaggattggcgcttttgggtacatggagtgttcagcaaagaccaaagatggagtgagagaggtttttgaaatggctacgagagctgctctgcaagctagacgtgggaagaaaaaatctgggtgccttgtcttgtgaaaccttgctgcaagcacagcccttatgcggttaattttgaagtgctgtttattaatcttagtgtatgattactggcctttttcatttatctataatttacctaagattacaaatcagaagtcatcttgctaccagtatttagaagccaactatgattattaacgatgtccaacccgtctggcccaccagggtccttttgacactgctctaacagccctcctctgcactcccacctgacacaccaggcgctaattcaaggaatttcttaacttcttgcttctttctagaaagagaaacagttggtaacttttgtgaattaggctgtaactactttataactaacatgtcctgcctattatctgtcagctgcaaggtactctggtgagtcaccacttcagggctttactccgtaacagattttgttggcatagctctggggtgggcagttttttgaaaatgggctcaaccagaaaagcccaagttcatgcagctgtggcagagttacagttctgtggtttcatgttagttaccttatagttactgtgtaattagtgccacttaatgtatgttaccaaaaataaatatatctaccccagactagatgtagtattttttgtataattggatttcctaatactgtcatcctcaaagaaagtgtattggttttttaaaaaagaaagtgtatttggaaataaagtcagatggaaaattcattttttaaattcccgttttgtcactttttctgataaaagatggccatattaccccttttcggccccatgtatctcagtaccccatggagctgggctaagtaaataggaattggtttcacgcctgaggcaattagacactttggaagatggcataacctgtctcacctggacttaagcgtctggctctaattcacagtgctcttttctcctcactgtatccaggttccctcccagaggagccaccagttctcatgggtggcactcagtctctcttctctccagctgactaaactttttttctgtaccagttaatttttccaactactaatagaataaaggcagttttctaaa

SEQ ID NO: 55984 - DNA, 1098 bp, Homo sapiens
ccccaccaccctctctcccctctgcgccctctaactaagtctaggtacgaggcctgggtgttccgccctcgctctctcgcgctaccctcccgccgcccgcggtcctccgtcggttctctcgttagtccacggtctggtcttcagctacccgccttcgtctccgagtttgcgactcgcggaccggcgtccccggcgcgaagaggctggactcggattcgttgcctgagcaatggctgccatccggaagaaactggtgattgttggtgatggagcctgtggaaagacatgcttgctcatagtcttcagcaaggaccagttcccagaggtgtatgtgcccacagtgtttgagaactatgtggcagatatcgaggtggatggaaagcaggtagagttggctttgtgggacacagctgggcaggaagattatgatcgcctgaggcccctctcctacccagataccgatgttatactgatgtgtttttccatcgacagccctgatagtttagaaaacatcccagaaaagtggaccccagaagtcaagcatttctgtcccaacgtgcccatcatcctggttgggaataagaaggatcttcggaatgatgagcacacaaggcgggagctagccaagatgaagcaggagccggtgaaacctgaagaaggcagagatatggcaaacaggattggcgcttttgggtacatggagtgttcagcaaagaccaaagatggagtgagagaggtttttgaaatggctacgagagctgctctgcaagctagacgtgggaagaaaaaatctgggtgccttgtcttgtgaaaccttgctgcaagcacagcccttatgcggttaattttgaagtgctgtttattaatcttagtgtatgattactggcctttttcatttatctataatttacctaagattacaaatcagaagtcatcttgctaccagtcccttttattgagtcaccgctgtccccggccttatggttaagcccttgtccctgagcaggggttagaattttcttcttcaaaacggttgtgggggctcatccgacttcggcggcacgccatgttcggggcaccctcctctctctccctttt

SEQ ID NO: 55985 - DNA, 1225 bp, Homo sapiens
gactctagaaggatccccccacaaacaggattggcgcttttgggtacatggagtgttcagcaaagaccaaagatggagtgagagaggtttttgaaatggctacgagagctgctctgcaagctagacgtgggaagaaaaaatctgggtgccttgtcttgtgaaaccttgctgcaagcacagcccttatgcggttaattttgaagtgctgtttattaatcttagtgtatgattactggcctttttcatttatctataatttacctaagattacaaatcagaagtcatcttgctaccagtatttagaagccaactatgattattaacgatgtccaacccgtctggcccaccagggtccttttgacactgctctaacagccctcctctgcactcccacctgacacaccaggcgctaattcaaggaatttcttaacttcttgcttctttctagaaagagaaacagttggtaacttttgtgaattaggctgtaactactttataactaacatgtcctgcctattatctgtcagctgcaaggtactctggtgagtcaccacttcagggctttactccgtaacagattttgttggcatagctctggggtgggcagttttttgaaaatgggctcaaccagaaaagcccaagttcatgcagctgtggcagagttacagttctgtggtttcatgttagttaccttatagttactgtgtaattagtgccacttaatgtatgttaccaaaaataaatatatctaccccagactagatgtagtattttttgtataattggatttcctaatactgtcatcctcaaagaaagtgtattggttttttaaaaaagaaagtgtatttggaaataaagtcagatggaaaattcattttttaaattcccgttttgtcactttttctgataaaagatggccatattaccccttttcggccccatgtatctcagtaccccatggagctgggctaagtaaataggaattggtttcacgcctgaggcaattagacactttggaagatggcataacctgtctcacctggacttaagcgtctggctctaattcacagtgctcttttctcctcactgtatccaggttccctcccagaggagccaccagttctcatgggtggcactcagtctctcttctctccagctgactaaactttttttctgtaccagttaatttttccaactactaatagaataaaggcagttttctaaa

SEQ ID NO: 55986 - DNA, 1229 bp, Homo sapiens
tcgctgatccgcttaggaaaaaccgcaaacaggattggcgcttttgggtacatggagtgttcagcaaagaccaaagatggagtgagagaggtttttgaaatggctacgagagctgctctgcaagctagacgtgggaagaaaaaatctgggtgccttgtcttgtgaaaccttgctgcaagcacagcccttatgcggttaattttgaagtgctgtttattaatcttagtgtatgattactggcctttttcatttatctataatttacctaagattacaaatcagaagtcatcttgctaccagtatttagaagccaactatgattattaacgatgtccaacccgtctggcccaccagggtccttttgacactgctctaacagccctcctctgcactcccacctgacacaccaggcgctaattcaaggaatttcttaacttcttgcttctttctagaaagagaaacagttggtaacttttgtgaattaggctgtaactactttataactaacatgtcctgcctattatctgtcagctgcaaggtactctggtgagtcaccacttcagggctttactccgtaacagattttgttggcatagctctggggtgggcagttttttgaaaatgggctcaaccagaaaagcccaagttcatgcagctgtggcagagttacagttctgtggtttcatgttagttaccttatagttactgtgtaattagtgccacttaatgtatgttaccaaaaataaatatatctaccccagactagatgtagtattttttgtataattggatttcctaatactgtcatcctcaaagaaagtgtattggttttttaaaaaagaaagtgtatttggaaataaagtcagatggaaaattcattttttaaattcccgttttgtcactttttctgataaaagatggccatattaccccttttcggccccatgtatctcagtaccccatggagctgggctaagtaaataggaattggtttcacgcctgaggcaattagacactttggaagatggcataacctgtctcacctggacttaagcgtctggctctaattcacagtgctcttttctcctcactgtatccaggttccctcccagaggagccaccagttctcatgggtggcactcagtctctcttctctccagctgactaaactttttttctgtaccagttaatttttccaactactaatagaataaaggcagttttctaaa

SEQ ID NO: 55987 - DNA, 1651 bp, Homo sapiens
ccccaccaccctctctcccctctgcgccctctaactaagtctaggtacgaggcctgggtgttccgccctcgctctctcgcgctaccctcccgccgcccgcggtcctccgtcggttctctcgttagtccacggtctggtcttcagctacccgccttcgtctccgagtttgcgactcgcggaccggcgtccccggcgcgaagaggctggactcggattcgttgcctgagcaatggctgccatccggaagaaactggtgattgttggtgatggagcctgtggaaagacatgcttgctcatagtcttcagcaaggaccagttcccagaggtgtatgtgcccacagtgtttgagaactatgtggcagatatcgaggtggatggaaagcaggtagagttggctttgtgggacacagctgggcaggaagattatgatcgcctgaggcccctctcctacccagataccgatgttatactgatgtgtttttccatcgacagccctgatagtttagagagaggtttttgaaatggctacgagagctgctctgcaagctagacgtgggaagaaaaaatctgggtgccttgtcttgtgaaaccttgctgcaagcacagcccttatgcggttaattttgaagtgctgtttattaatcttagtgtatgattactggcctttttcatttatctataatttacctaagattacaaatcagaagtcatcttgctaccagtatttagaagccaactatgattattaacgatgtccaacccgtctggcccaccagggtccttttgacactgctctaacagccctcctctgcactcccacctgacacaccaggcgctaattcaaggaatttcttaacttcttgcttctttctagaaagagaaacagttggtaacttttgtgaattaggctgtaactactttataactaacatgtcctgcctattatctgtcagctgcaaggtactctggtgagtcaccacttcagggctttactccgtaacagattttgttggcatagctctggggtgggcagttttttgaaaatgggctcaaccagaaaagcccaagttcatgcagctgtggcagagttacagttctgtggtttcatgttagttaccttatagttactgtgtaattagtgccacttaatgtatgttaccaaaaataaatatatctaccccagactagatgtagtattttttgtataattggatttcctaatactgtcatcctcaaagaaagtgtattggttttttaaaaaagaaagtgtatttggaaataaagtcagatggaaaattcattttttaaattcccgttttgtcactttttctgataaaagatggccatattaccccttttcggccccatgtatctcagtaccccatggagctgggctaagtaaataggaattggtttcacgcctgaggcaattagacactttggaagatggcataacctgtctcacctggacttaagcgtctggctctaattcacagtgctcttttctcctcactgtatccaggttccctcccagaggagccaccagttctcatgggtggcactcagtctctcttctctccagctgactaaactttttttctgtaccagttaatttttccaactactaatagaataaaggcagttttctaaa

SEQ ID NO: 55988 - DNA, 919 bp, Homo sapiens
ccccaccaccctctctcccctctgcgccctctaactaagtctaggtacgaggcctgggtgttccgccctcgctctctcgcgctaccctcccgccgcccgcggtcctccgtcggttctctcgttagtccacggtctggtcttcagctacccgccttcgtctccgagtttgcgactcgcggaccggcgtccccggcgcgaagaggctggactcggattcgttgcctgagcaatggctgccatccggaagaaactggtgattgttggtgatggagcctgtggaaagacatgcttgctcatagtcttcagcaaggaccagttcccagaggtgtatgtgcccacagtgtttgagaactatgtggcagatatcgaggtggatggaaagcaggtagagttggctttgtgggacacagctgggcaggaagattatgatcgcctgaggcccctctcctacccagataccgatgttatactgatgtgtttttccatcgacagccctgatagtttagaaaacatcccagaaaagtggaccccagaagtcaagcatttctgtcccaacgtgcccatcatcctggttgggaataagaaggatcttcggaatgatgagcacacaaggcgggagctagccaagatgaagcaggagccggtgaaacctgaagaaggcagagatatggcaaacaggattggcgcttttgggtacatggagtgttcagcaaagaccaaagatggagtgagagaggtttttgaaatggctacgagagctgctctgcaagctagacgtgggaagaaaaaatctgggtgccttgtcttgtgaaaccttgctgcaagcacagcccttatgcggttaattttgaagtgctgtttattaatcttagtgtatgattactggcccgcacatccgtactgacccggtaccgagctc

SEQ ID NO: 55989 - DNA, 1340 bp, Homo sapiens
cgtcgacacggctgctttaagacgacagaaggaaaacatcccagaaaagtggaccccagaagtcaagcatttctgtcccaacgtgcccatcatcctggttgggaataagaaggatcttcggaatgatgagcacacaaggcgggagctagccaagatgaagcaggagccggtgaaacctgaagaaggcagagatatggcaaacaggattggcgcttttgggtacatggagtgttcagcaaagaccaaagatggagtgagagaggtttttgaaatggctacgagagctgctctgcaagctagacgtgggaagaaaaaaagtgctgtttattaatcttagtgtatgattactggcctttttcatttatctataatttacctaagattacaaatcagaagtcatcttgctaccagtatttagaagccaactatgattattaacgatgtccaacccgtctggcccaccagggtccttttgacactgctctaacagccctcctctgcactcccacctgacacaccaggcgctaattcaaggaatttcttaacttcttgcttctttctagaaagagaaacagttggtaacttttgtgaattaggctgtaactactttataactaacatgtcctgcctattatctgtcagctgcaaggtactctggtgagtcaccacttcagggctttactccgtaacagattttgttggcatagctctggggtgggcagttttttgaaaatgggctcaaccagaaaagcccaagttcatgcagctgtggcagagttacagttctgtggtttcatgttagttaccttatagttactgtgtaattagtgccacttaatgtatgttaccaaaaataaatatatctaccccagactagatgtagtattttttgtataattggatttcctaatactgtcatcctcaaagaaagtgtattggttttttaaaaaagaaagtgtatttggaaataaagtcagatggaaaattcattttttaaattcccgttttgtcactttttctgataaaagatggccatattaccccttttcggccccatgtatctcagtaccccatggagctgggctaagtaaataggaattggtttcacgcctgaggcaattagacactttggaagatggcataacctgtctcacctggacttaagcgtctggctctaattcacagtgctcttttctcctcactgtatccaggttccctcccagaggagccaccagttctcatgggtggcactcagtctctcttctctccagctgactaaactttttttctgtaccagttaatttttccaactactaatagaataaaggcagttttctaaa

SEQ ID NO: 55990 - DNA, 964 bp, Homo sapiens
ccccaccaccctctctcccctctgcgccctctaactaagtctaggtacgaggcctgggtgttccgccctcgctctctcgcgctaccctcccgccgcccgcggtcctccgtcggttctctcgttagtccacggtctggtcttcagctacccgccttcgtctccgagtttgcgactcgcggaccggcgtccccggcgcgaagaggctggactcggattcgttgcctgagcaatggctgccatccggaagaaactggtgattgttggtgatggagcctgtggaaagacatgcttgctcatagtcttcagcaaggaccagttcccagaggtgtatgtgcccacagtgtttgagaactatgtggcagatatcgaggtggatggaaagcaggtagagttggctttgtgggacacagctgggcaggaagattatgatcgcctgaggcccctctcctacccagataccgatgttatactgatgtgtttttccatcgacagccctgatagtttagaaaacatcccagaaaagtggaccccagaagtcaagcatttctgtcccaacgtgcccatcatcctggttgggaataagaaggatcttcggaatgatgagcacacaaggcgggagctagccaagatgaagcaggagccggtgaaacctgaagaaggcagagatatggcaaacaggattggcgcttttgggtacatggagtgttcagcaaagaccaaagatggagtgagagaggtttttgaaatggctacgagagctgctctgcaagctagacgtgggaagaaaaaatctgggtgccttgtcttgtgaaaccttgctgcaagcacagcccttatgcggttaattttgatacactaagattaatacaaatctcttagattccaaagaggttgaataattaatgttcaaaggcaagagggcaaggcattttttaacactttttaaaataaaaatttataccac

SEQ ID NO: 55991 - DNA, 761 bp, Homo sapiens
ccccaccaccctctctcccctctgcgccctctaactaagtctaggtacgaggcctgggtgttccgccctcgctctctcgcgctaccctcccgccgcccgcggtcctccgtcggttctctcgttagtccacggtctggtcttcagctacccgccttcgtctccgagtttgcgactcgcggaccggcgtccccggcgcgaagaggctggactcggattcgttgcctgagcaatggctgccatccggaagaaactggtgattgttggtgatggagcctgtggaaagacatgcttgctcatagtcttcagcaaggaccagttcccagaggtgtatgtgcccacagtgtttgagaactatgtggcagatatcgaggtggatggaaagcaggtagagttggctttgtgggacacagctgggcaggaagattatgatcgcctgaggcccctctcctacccagataccgatgttatactgatgtgtttttccatcgacagccctgatagtttagaaaacatcccagaaaagtggaccccagaagtcaagcatttctgtcccaacgtgcccatcatcctggttgggaataagaaggatcttcggaatgatgagcacacaaggcgggagctagccaagatgaagcaggagcctcactgtgtcgccaggctggagtgctgtggcacgatcttggctcaactgcaacctccgcctcccagatttaagcgattcccctgcctcagcctcctgagtagctgggttacaggcgccc

SEQ ID NO: 55992 - DNA, 740 bp, Homo sapiens
  misc_feature (639)..(639): n is a, c, g, or t
ccccaccaccctctctcccctctgcgccctctaactaagtctaggtacgaggcctgggtgttccgccctcgctctctcgcgctaccctcccgccgcccgcggtcctccgtcggttctctcgttagtccacggtctggtcttcagctacccgccttcgtctccgagtttgcgactcgcggaccggcgtccccggcgcgaagaggctggactcggattcgttgcctgagcaatggctgccatccggaagaaactggtgattgttggtgatggagcctgtggaaagacatgcttgctcatagtcttcagcaaggaccagttcccagaggtgtatgtgcccacagtgtttgagaactatgtggcagatatcgaggtggatggaaagcaggtagagttggctttgtgggacacagctgggcaggaagattatgatcgcctgaggcccctctcctacccagataccgatgttatactgatgtgtttttccatcgacagccctgatagtttagaaaacatcccagaaaagtggaccccagaagtcaagcatttctgtcccaacgtgcccatcatcctggttgggaataagaaggatcttcggaatgatgagcacacaaggcgggagctagccaagatgaagcaganccggtgaaacctgaagaagcagaagcaggaagcaggccggagggcagaagcaggagcagagcaggaagcggggatccttagatcacctcagcagcaagctg

SEQ ID NO: 55993 - DNA, 160 bp, Homo sapiens
gattaaccttgcactcttgtggttgtttttcccattacagtagagttggctttgtgggacacagctgggcaggaagattatgatcgcctgaggcccctctcctacccagataccgatgttatactgatgtgtttttccatcgacagccctgatagtttag

SEQ ID NO: 55994 - DNA, 641 bp, Homo sapiens
gaggacaggcccccaccgcagcacaggaccaaactccagcctaaagtacacagcaaatagcccagcacgcccaccgctcatgccccgtgttgctacatctcgccctgtacagctggcttgtcggccttgggatgagtaaggtctatgggcttttgtttttactggtctgccaacaagcgcctgccacaaacaggattggcgcttttgggtacatggagtgttcagcaaagaccaaagatggagtgagagaggtttttgaaatggctacgagagctgctctgcaagctagacgtgggaagaaaaaatctgggtgccttgtcttgtgaaaccttgctgcaagcacagcccttatgcggttaattttgaagtgctgtttattaatcttagtgtatgattactggcctttttcatttatctataatttacctaagattacaaatcagaagtcatcttgctaccagtcagctcatagtacattcattcgttcattcattcattcattcatttttgagacagagtcttactctgttgcccaggctggaatacagtggcatgatctgccctctgcctcccggttcaagtgattctcctgcctcgtctcccgagtagctgggactataggtgtgtgccacaagcgcctg

SEQ ID NO: 55995 - DNA, 573 bp, Homo sapiens
agcccggtactcttccggccggcaggccgccgcaccgccgcggccgcgccccaccggctgctcgtggccgagccgcccctggcccctgacccttgacctgactcccagcccgggccccgcgccccaagcggcgaccccgcccgcgcagtccccggaagcgcgcccggtagtctcctgtgccccttcccccgcccggccgggcctggtggagcccaggctgcccgcctgcccgccctcggtccccggagcttcctctcccagcagcgccgggcagggcgggggctttgggccgggccccgcgaccgcgcagtgtagccggccgctgaaagcgcgcgtggctgtcggagttgaaatgggaaagaaactctttacaactccattttgctttttacgtttaacgagaaacgacaatcactgttttatattgattaaagtccagttacactttgggtaggttttcttttaatgcagacttgttggagactgtgtaagtaagtaaaagattgtattgaacgcttaggggtatgatctacggccataccacctcgaacgcgcccgaactcgtctgaaagc

SEQ ID NO: 55996 - DNA, 1875 bp, Homo sapiens
ccccaccaccctctctcccctctgcgccctctaactaagtctaggtacgaggcctgggtgttccgccctcgctctctcgcgctaccctcccgccgcccgcggtcctccgtcggttctctcgttagtccacggtctggtcttcagctacccgccttcgtctccgagtttgcgactcgcggaccggcgtccccggcgcgaagaggctggactcggattcgttgcctgagcaatggctgccatccggaagaaactggtgattgttggtgatggagcctgtggaaagacatgcttgctcatagtcttcagcaaggaccagttcccagaggtgtatgtgcccacagtgtttgagaactatgtggcagatatcgaggtggatggaaagcaggtagagttggctttgtgggacacagctgggcaggaagattatgatcgcctgaggcccctctcctacccagataccgatgttatactgatgtgtttttccatcgacagccctgatagtttagaaaacatcccagaaaagtggaccccagaagtcaagcatttctgtcccaacgtgcccatcatcctggttgggaataagaaggatcttcggaatgatgagcacacaaggcgggagctagccaagatgaagcaggagccggtgaaacctgaagaaggcagagatatggcaaacaggattggcgcttttgggtacatggagtgttcagcaaagaccaaagatggagtgagagaggtttttgaaatggctacgagagctgctctgcaagctagacgtgggaagaaaaaatctgggtgccttgtcttgtgaaaccttgctgcaagcacagcccttatgcggttaattttgaagtgctgtttattaatcttagtgtatgattactggcctttttcatttatctataatttacctaagattacaaatcagaagtcatcttgctaccagtatttagaagccaactatgattattaacgatgtccaacccgtctggcccaccagggtccttttgacactgctctaacagccctcctctgcactcccacctgacacaccaggcgctaattcaaggaatttcttaacttcttgcttctttctagaaagagaaacagttggtaacttttgtgaattaggctgtaactactttataactaacatgtcctgcctattatctgtcagctgcaaggtactctggtgagtcaccacttcagggctttactccgtaacagattttgttggcatagctctggggtgggcagttttttgaaaatgggctcaaccagaaaagcccaagttcatgcagctgtggcagagttacagttctgtggtttcatgttagttaccttatagttactgtgtaattagtgccacttaatgtatgttaccaaaaataaatatatctaccccagactagatgtagtattttttgtataattggatttcctaatactgtcatcctcaaagaaagtgtattggttttttaaaaaagaaagtgtatttggaaataaagtcagatggaaaattcattttttaaattcccgttttgtcactttttctgataaaagatggccatattaccccttttcggccccatgtatctcagtaccccatggagctgggctaagtaaataggaattggtttcacgcctgaggcaattagacactttggaagatggcataacctgtctcacctggacttaagcgtctggctctaattcacagtgctcttttctcctcactgtatccaggttccctcccagaggagccaccagttctcatgggtggcactcagtctctcttctctccagctgactaaactttttttctgtaccagttaatttttccaactactaatagaataaaggcagttttctaaa

SEQ ID NO: 55997 - DNA, 1937 bp, Homo sapiens
ccccaccaccctctctcccctctgcgccctctaactaagtctaggtacgaggcctgggtgttccgccctcgctctctcgcgctaccctcccgccgcccgcggtcctccgtcggttctctcgttagtccacggtctggtcttcagctacccgccttcgtctccgagtttgcgactcgcggaccggcgtccccggcgcgaagaggctggactcggattcgttgcctgagcaatggctgccatccggaagaaactggtgattgttggtgatggagcctgtggaaagacatgcttgctcatagtcttcagcaaggaccagttcccagaggtgtatgtgcccacagtgtttgagaactatgtggcagatatcgaggtggatggaaagcaggtagagttggctttgtgggacacagctgggcaggaagattatgatcgcctgaggcccctctcctacccagataccgatgttatactgatgtgtttttccatcgacagccctgatagtttagaaaacatcccagaaaagtggaccccagaagtcaagcatttctgtcccaacgtgcccatcatcctggttgggaataagaaggatcttcggaatgatgagcacacaaggcgggagctagccaagatgaagcaggagccggtgaaacctgaagaaggcagagatatggcaaacaggattggcgcttttgggtacatggagtgttcagcaaagaccaaagatggagtgagagaggtttttgaaatggctacgagagctgctctgcaagctagacgtgggaagaaaaaatctgggtgccttgtcttgtgaaaccttgctgcaagcacagcccttatgcggttaattttgaagtgctgtttattaatcttagtgtatgattactggcctttttcatttatctataatttacctaagattacaaatcagaagtcatcttgctaccagtatttagaagccaactatgattattaacgatgtccaacccgtctggcccaccagggtccttttgacactgctctaacagccctcctctgcactcccacctgacacaccaggcgctaattcaaggaatttcttaacttcttgcttctttctagaaagagaaacagttggtaacttttgtgaattaggctgtaactactttataactaacatgtcctgcctattatctgtcagctgcaaggtactctggtgagtcaccacttcagggctttactccgtaacagattttgttggcatagctctggggtgggcagttttttgaaaatgggctcaaccagaaaagcccaagttcatgcagctgtggcagagttacagttctgtggtttcatgttagttaccttatagttactgtgtaattagtgccacttaatgtatgttaccaaaaataaatatatctaccccagactagatgtagtattttttgtataattggatttcctaatactgtcatcctcaaagaaagtgtattggttttttaaaaaagaaagtgtatttggaaataaagtcagatggaaaattcattttttaaattcccgttttgtcactttttctgataaaagatggccatattaccccttttcggccccatgtatctcagtaccccatggagctgggctaagtaaataggaattggtttcacgcctgaggcaattagacactttggaagatggcataacctgtctcacctggacttaagcgtctggctctaattcacagtgctcttttctcctcactgtatccaggttccctcccagaggagccaccagttctcatgggtggcactcagtctctcttctctccagctgactaaactttttttctgtaccagttaatttttccaactactaatagaataaaggcagttttctaaaaaaaagagaacaacgaaaaaacagaaacaacacacacgagacaaagagcgcgcacaacaacg

SEQ ID NO: 55998 - DNA, 2239 bp, Homo sapiens
ccccaccaccctctctcccctctgcgccctctaactaagtctaggtacgaggcctgggtgttccgccctcgctctctcgcgctaccctcccgccgcccgcggtcctccgtcggttctctcgttagtccacggtctggtcttcagctacccgccttcgtctccgagtttgcgactcgcggaccggcgtccccggcgcgaagaggctggactcggattcgttgcctgagcaatggctgccatccggaagaaactggtgattgttggtgatggagcctgtggaaagacatgcttgctcatagtcttcagcaaggaccagttcccagaggtgtatgtgcccacagtgtttgagaactatgtggcagatatcgaggtggatggaaagcaggtagagttggctttgtgggacacagctgggcaggaagattatgatcgcctgaggcccctctcctacccagataccgatgttatactgatgtgtttttccatcgacagccctgatagtttagaaaacatcccagaaaagtggaccccagaagtcaagcatttctgtcccaacgtgcccatcatcctggttgggaataagaaggatcttcggaatgatgagcacacaaggcgggagctagccaagatgaagcaggagccggtgaaacctgaagaaggcagagatatggcaaacaggattggcgcttttgggtacatggagtgttcagcaaagaccaaagatggagtgagagaggtttttgaaatggctacgagagctgctctgcaagctagacgtgggaagaaaaaatctgggtgccttgtcttgtgaaaccttgctgcaagcacagcccttatgcggttaattttgaagtgctgtttattaatcttagtgtatgattactggcctttttcatttatctataatttacctaagattacaaatcagaagtcatcttgctaccagtatttagaagccaactatgattattaacgatgtccaacccgtctggcccaccagggtccttttgacactgctctaacagccctcctctgcactcccacctgacacaccaggcgctaattcaaggaatttcttaacttcttgcttctttctagaaagagaaacagttggtaacttttgtgaattaggctgtaactactttataactaacatgtcctgcctattatctgtcagctgcaaggtactctggtgagtcaccacttcagggctttactccgtaacagattttgttggcatagctctggggtgggcagttttttgaaaatgggctcaaccagaaaagcccaagttcatgcagctgtggcagagttacagttctgtggtttcatgttagttaccttatagttactgtgtaattagtgccacttaatgtatgttaccaaaaataaatatatctaccccagactagatgtagtattttttgtataattggatttcctaatactgtcatcctcaaagaaagtgtattggttttttaaaaaagaaagtgtatttggaaataaagtcagatggaaaattcattttttaaattcccgttttgtcactttttctgataaaagatggccatattaccccttttcggccccatgtatctcagtaccccatggagctgggctaagtaaataggaattggtttcacgcctgaggcaattagacactttggaagatggcataacctgtctcacctggacttaagcgtctggctctaattcacagtgctcttttctcctcactgtatccaggttccctcccagaggagccaccagttctcatgggtggcactcagtctctcttctctccagctgactaaactttttttctgtaccagttaatttttccaactactaatagaataaaggcagttttctaaaaaaaaaaaaaaaaaaaaaaaaaaaaaaaaaaaaaaaaaaaaaaaaaaaaaaaaaaaaaaaaaaaaaaaaaaaaaaaaaaagggggggggggccggccacacactcccccgcccgagggcgcccacacgcccgcaccccagcgtgtcgctgatcaagagggacgcgaggcagctactatagaatgagtggtcttttattgtcttcggctggcaggtgggagctgcgcgtagtttatttcttcacagcagaatcgggtggaggagagaaacaagcggtgcgcgttgtgctgtgttcaggttgtgcccactctcatatttgttctgggtggacgccagtaatagggatggaggaactcttcgtctta

SEQ ID NO: 55999 - DNA, 2281 bp, Homo sapiens
ccccaccaccctctctcccctctgcgccctctaactaagtctaggtacgaggcctgggtgttccgccctcgctctctcgcgctaccctcccgccgcccgcggtcctccgtcggttctctcgttagtccacggtctggtcttcagctacccgccttcgtctccgagtttgcgactcgcggaccggcgtccccggcgcgaagaggctggactcggattcgttgcctgagcaatggctgccatccggaagaaactggtgattgttggtgatggagcctgtggaaagacatgcttgctcatagtcttcagcaaggaccagttcccagaggtgtatgtgcccacagtgtttgagaactatgtggcagatatcgaggtggatggaaagcaggtagagttggctttgtgggacacagctgggcaggaagattatgatcgcctgaggcccctctcctacccagataccgatgttatactgatgtgtttttccatcgacagccctgatagtttagaaaacatcccagaaaagtggaccccagaagtcaagcatttctgtcccaacgtgcccatcatcctggttgggaataagaaggatcttcggaatgatgagcacacaaggcgggagctagccaagatgaagcaggagccggtgaaacctgaagaaggcagagatatggcaaacaggattggcgcttttgggtacatggagtgttcagcaaagaccaaagatggagtgagagaggtttttgaaatggctacgagagctgctctgcaagctagacgtgggaagaaaaaatctgggtgccttgtcttgtgaaaccttgctgcaagcacagcccttatgcggttaattttgaagtgctgtttattaatcttagtgtatgattactggcctttttcatttatctataatttacctaagattacaaatcagaagtcatcttgctaccagtatttagaagccaactatgattattaacgatgtccaacccgtctggcccaccagggtccttttgacactgctctaacagccctcctctgcactcccacctgacacaccaggcgctaattcaaggaatttcttaacttcttgcttctttctagaaagagaaacagttggtaacttttgtgaattaggctgtaactactttataactaacatgtcctgcctattatctgtcagctgcaaggtactctggtgagtcaccacttcagggctttactccgtaacagattttgttggcatagctctggggtgggcagttttttgaaaatgggctcaaccagaaaagcccaagttcatgcagctgtggcagagttacagttctgtggtttcatgttagttaccttatagttactgtgtaattagtgccacttaatgtatgttaccaaaaataaatatatctaccccagactagatgtagtattttttgtataattggatttcctaatactgtcatcctcaaagaaagtgtattggttttttaaaaaagaaagtgtatttggaaataaagtcagatggaaaattcattttttaaattcccgttttgtcactttttctgataaaagatggccatattaccccttttcggccccatgtatctcagtaccccatggagctgggctaagtaaataggaattggtttcacgcctgaggcaattagacactttggaagatggcataacctgtctcacctggacttaagcgtctggctctaattcacagtgctcttttctcctcactgtatccaggttccctcccagaggagccaccagttctcatgggtggcactcagtctctcttctctccagctgactaaactttttttctgtaccagttaatttttccaactactaatagaataaaggcagttttctaaaaaaaaaaaaaaaaaaaaaaaaaaaaaaaaaaaaaaaaaaaaaaaaaaaaaaaaaaaaaaaaaaaaaaaaaaaaaaaaaaaaaaaaaaaaaaaaaaaaaaaaaaaaaaaaaaaaaaaaaaaaagggggggggggccggccacacactcccccgcccgagggcgcccacacgcccgcaccccagcgtgtcgctgatcaagagggacgcgaggcagctactatagaatgagtggtcttttattgtcttcggctggcaggtgggagctgcgcgtagtttatttcttcacagcagaatcgggtggaggagagaaacaagcggtgcgcgttgtgctgtgttcaggttgtgcccactctcatatttgttctgggtggacgccagtaatagggatggaggaactcttcgtctta

SEQ ID NO: 56000 - DNA, 1834 bp, Homo sapiens
ccccaccaccctctctcccctctgcgccctctaactaagtctaggtacgaggcctgggtgttccgccctcgctctctcgcgctaccctcccgccgcccgcggtcctccgtcggttctctcgttagtccacggtctggtcttcagctacccgccttcgtctccgagtttgcgactcgcggaccggcgtccccggcgcgaagaggctggactcggattcgttgcctgagcaatggctgccatccggaagaaactggtgattgttggtgatggagcctgtggaaagacatgcttgctcatagtcttcagcaaggaccagttcccagaggtgtatgtgcccacagtgtttgagaactatgtggcagatatcgaggtggatggaaagcaggtagagttggctttgtgggacacagctgggcaggaagattatgatcgcctgaggcccctctcctacccagataccgatgttatactgatgtgtttttccatcgacagccctgatagtttagaaaacatcccagaaaagtggaccccagaagtcaagcatttctgtcccaacgtgcccatcatcctggttgggaataagaaggatcttcggaatgatgagcacacaaggcgggagctagccaagatgaagcaggagccggtgaaacctgaagaaggcagagatatggcaaacaggattggcgcttttgggtacatggagtgttcagcaaagaccaaagatggagtgagagaggtttttgaaatggctacgagagctgctctgcaagctagacgtgggaagaaaaaatctgggtgccttgtcttgtgaaaccttgctgcaagcacagcccttatgcggttaattttgaagtgctgtttattaatcttagtgtatgattactggcctttttcatttatctataatttacctaagattacaaatcagaagtcatcttgctaccagtatttagaagccaactatgattattaacgatgtccaacccgtctggcccaccagggtccttttgacactgctctaacagccctcctctgcactcccacctgacacaccaggcgctaattcaaggaatttcttaacttcttgcttctttctagaaagagaaacagttggtaacttttgtgaattaggctgtaactactttataactaacatgtcctgcctattatctgtcagctgcaaggtactctggtgagtcaccacttcagggctttactccgtaacagattttgttggcatagctctggggtgggcagttttttgaaaatgggctcaaccagaaaagcccaagttcatgcagctgtggcagagttacagttctgtggtttcatgttagttaccttatagttactgtgtaattagtgccacttaatgtatgttaccaaaaataaatatatctaccccagactagatgtagtattttttgtataattggatttcctaatactgtcatcctcaaagaaagtgtattggttttttaaaaaagaaagtgtatttggaaataaagtcagatggaaaattcattttttaaattcccgttttgtcactttttctgataaaagatggccatattaccccttttcggccccatgtatctcagtaccccatggagctgggctaagtaaataggaattggtttcacgcctgaggcaattagacactttggaagatggcataacctgtctcacctggacttaagcgtctggctctaattcacagtgctcttttctcctcactgtatccaggttccctcccagaggagccaccagttctcatgggtggcactcagtctctcttctctccagctgactagaggggccggagatcctctag

SEQ ID NO: 56001 - DNA, 1788 bp, Homo sapiens
tatgctctcgatctgagaacatagcttgtctcgattagtccacggtctggtcttcagctacccgccttcgtctccgagtttgcgactcgcggaccggcgtccccggcgcgaagaggctggactcggattcgttgcctgagcaatggctgccatccggaagaaactggtgattgttggtgatggagcctgtggaaagacatgcttgctcatagtcttcagcaaggaccagttcccagaggtgtatgtgcccacagtgtttgagaactatgtggcagatatcgaggtggatggaaagcaggtagagttggctttgtgggacacagctgggcaggaagattatgatcgcctgaggcccctctcctacccagataccgatgttatactgatgtgtttttccatcgacagccctgatagtttagaaaacatcccagaaaagtggaccccagaagtcaagcatttctgtcccaacgtgcccatcatcctggttgggaataagaaggatcttcggaatgatgagcacacaaggcgggagctagccaagatgaagcaggagccggtgaaacctgaagaaggcagagatatggcaaacaggattggcgcttttgggtacatggagtgttcagcaaagaccaaagatggagtgagagaggtttttgaaatggctacgagagctgctctgcaagctagacgtgggaagaaaaaatctgggtgccttgtcttgtgaaaccttgctgcaagcacagcccttatgcggttaattttgaagtgctgtttattaatcttagtgtatgattactggcctttttcatttatctataatttacctaagattacaaatcagaagtcatcttgctaccagtatttagaagccaactatgattattaacgatgtccaacccgtctggcccaccagggtccttttgacactgctctaacagccctcctctgcactcccacctgacacaccaggcgctaattcaaggaatttcttaacttcttgcttctttctagaaagagaaacagttggtaacttttgtgaattaggctgtaactactttataactaacatgtcctgcctattatctgtcagctgcaaggtactctggtgagtcaccacttcagggctttactccgtaacagattttgttggcatagctctggggtgggcagttttttgaaaatgggctcaaccagaaaagcccaagttcatgcagctgtggcagagttacagttctgtggtttcatgttagttaccttatagttactgtgtaattagtgccacttaatgtatgttaccaaaaataaatatatctaccccagactagatgtagtattttttgtataattggatttcctaatactgtcatcctcaaagaaagtgtattggttttttaaaaaagaaagtgtatttggaaataaagtcagatggaaaattcattttttaaattcccgttttgtcactttttctgataaaagatggccatattaccccttttcggccccatgtatctcagtaccccatggagctgggctaagtaaataggaattggtttcacgcctgaggcaattagacactttggaagatggcataacctgtctcacctggacttaagcgtctggctctaattcacagtgctcttttctcctcactgtatccaggttccctcccagaggagccaccagttctcatgggtggcactcagtctctcttctctccagctgactaaactttttttctgtaccagttaatttttccaactactaatagaataaaggcagttttctaaa

SEQ ID NO: 56002 - DNA, 1554 bp, Homo sapiens
ccccaccaccctctctcccctctgcgccctctaactaagtctaggtacgaggcctgggtgttccgccctcgctctctcgcgctaccctcccgccgcccgcggtcctccgtcggttctctcgttagtccacggtctggtcttcagctacccgccttcgtctccgagtttgcgactcgcggaccggcgtccccggcgcgaagaggctggactcggattcgttgcctgagcaatggctgccatccggaagaaactggtgattgttggtgatggagcctgtggaaagacatgcttgctcatagtcttcagcaaggaccagttcccagaggtgtatgtgcccacagtgtttgagaactatgtggcagatatcgaggtggatggaaagcaggtagagttggctttgtgggacacagctgggcaggaagattatgatcgcctgaggcccctctcctacccagataccgatgttatactgatgtgtttttccatcgacagccctgatagtttagaaaacatcccagaaaagtggaccccagaagtcaagcatttctgtcccaacgtgcccatcatcctggttgggaataagaaggatcttcggaatgatgagcacacaaggcgggagctagccaagatgaagcaggagccggtgaaacctgaagaaggcagagatatggcaaacaggattggcgcttttgggtacatggagtgttcagcaaagaccaaagatggagtgagagaggtttttgaaatggctacgagagctgctctgcaagctagacgtgggaagaaaaaatctgggtgccttgtcttgtgaaaccttgctgcaagcacagcccttatgcggttaattttgaagtgctgtttattaatcttagtgtatgattactggcctttttcatttatctataatttacctaagattacaaatcagaagtcatcttgctaccagtatttagaagccaactatgattattaacgatgtccaacccgtctggcccaccagggtccttttgacactgctctaacagccctcctctgcactcccacctgacacaccaggcgctaattcaaggaatttcttaacttcttgcttctttctagaaagagaaacagttggtaacttttgtgaattaggctgtaactactttataactaacatgtcctgcctattatctgtcagctgcaaggtactctggtgagtcaccacttcagggctttactccgtaacagattttgttggcatagctctggggtgggcagttttttgaaaatgggctcaaccagaaaagcccaagttcatgcagctgtggcagagttacagttctgtggtttcatgttagttaccttatagttactgtgtaattagtgccacttaatgtatgttaccaaaaataaatatatctaccccagactagatgtagtattttttgtataattggatttcctaatactgtcatcctcaaagaaagtgtattggttttttaaaaaagaaagtgtatttggaaataaagtcagatgcggccgactacacttataacctaatatatctacgaaatc

SEQ ID NO: 56003 - DNA, 1408 bp, Homo sapiens
ccccaccaccctctctcccctctgcgccctctaactaagtctaggtacgaggcctgggtgttccgccctcgctctctcgcgctaccctcccgccgcccgcggtcctccgtcggttctctcgttagtccacggtctggtcttcagctacccgccttcgtctccgagtttgcgactcgcggaccggcgtccccggcgcgaagaggctggactcggattcgttgcctgagcaatggctgccatccggaagaaactggtgattgttggtgatggagcctgtggaaagacatgcttgctcatagtcttcagcaaggaccagttcccagaggtgtatgtgcccacagtgtttgagaactatgtggcagatatcgaggtggatggaaagcaggtagagttggctttgtgggacacagctgggcaggaagattatgatcgcctgaggcccctctcctacccagataccgatgttatactgatgtgtttttccatcgacagccctgatagtttagaaaacatcccagaaaagtggaccccagaagtcaagcatttctgtcccaacgtgcccatcatcctggttgggaataagaaggatcttcggaatgatgagcacacaaggcgggagctagccaagatgaagcaggagccggtgaaacctgaagaaggcagagatatggcaaacaggattggcgcttttgggtacatggagtgttcagcaaagaccaaagatggagtgagagaggtttttgaaatggctacgagagctgctctgcaagctagacgtgggaagaaaaaatctgggtgccttgtcttgtgaaaccttgctgcaagcacagcccttatgcggttaattttgaagtgctgtttattaatcttagtgtatgattactggcctttttcatttatctataatttacctaagattacaaatcagaagtcatcttgctaccagtatttagaagccaactatgattattaacgatgtccaacccgtctggcccaccagggtccttttgacactgctctaacagccctcctctgcactcccacctgacacaccaggcgctaattcaaggaatttcttaacttcttgcttctttctagaaagagaaacagttggtaacttttgtgaattaggctgtaactactttataactaacatgtcctgcctattatctgtcagctgcaaggtactctggtgagtcaccacttcagggctttactccgtaacagattttgttggcatagctctggggtgggcagttttttgaaaatgggctcaaccagaaaagcccaagttcatgcagctgtggcagagttacagttctgtggtttcatgttagttaccttatagttactgtgtaattagtgccacttaatgtatgttaccaaaaataaatatatctaccccaga

SEQ ID NO: 56004 - DNA, 1856 bp, Homo sapiens
ccccaccaccctctctcccctctgcgccctctaactaagtctaggtacgaggcctgggtgttccgccctcgctctctcgcgctaccctcccgccgcccgcggtcctccgtcggttctctcgttagtccacggtctggtcttcagctacccgccttcgtctccgagtttgcgactcgcggaccggcgtccccggcgcgaagaggctggactcggattcgttgcctgagcaatggctgccatccggaagaaactggtgattgttggtgatggagcctgtggatcttcagcaaggaccagttcccagaggtgtatgtgcccacagtgtttgagaactatgtggcagatatcgaggtggatggaaagcaggtagagttggctttgtgggacacagctgggcaggaagattatgatcgcctgaggcccctctcctacccagataccgatgttatactgatgtgtttttccatcgacagccctgatagtttagaaaacatcccagaaaagtggaccccagaagtcaagcatttctgtcccaacgtgcccatcatcctggttgggaataagaaggatcttcggaatgatgagcacacaaggcgggagctagccaagatgaagcaggagccggtgaaacctgaagaaggcagagatatggcaaacaggattggcgcttttgggtacatggagtgttcagcaaagaccaaagatggagtgagagaggtttttgaaatggctacgagagctgctctgcaagctagacgtgggaagaaaaaatctgggtgccttgtcttgtgaaaccttgctgcaagcacagcccttatgcggttaattttgaagtgctgtttattaatcttagtgtatgattactggcctttttcatttatctataatttacctaagattacaaatcagaagtcatcttgctaccagtatttagaagccaactatgattattaacgatgtccaacccgtctggcccaccagggtccttttgacactgctctaacagccctcctctgcactcccacctgacacaccaggcgctaattcaaggaatttcttaacttcttgcttctttctagaaagagaaacagttggtaacttttgtgaattaggctgtaactactttataactaacatgtcctgcctattatctgtcagctgcaaggtactctggtgagtcaccacttcagggctttactccgtaacagattttgttggcatagctctggggtgggcagttttttgaaaatgggctcaaccagaaaagcccaagttcatgcagctgtggcagagttacagttctgtggtttcatgttagttaccttatagttactgtgtaattagtgccacttaatgtatgttaccaaaaataaatatatctaccccagactagatgtagtattttttgtataattggatttcctaatactgtcatcctcaaagaaagtgtattggttttttaaaaaagaaagtgtatttggaaataaagtcagatggaaaattcattttttaaattcccgttttgtcactttttctgataaaagatggccatattaccccttttcggccccatgtatctcagtaccccatggagctgggctaagtaaataggaattggtttcacgcctgaggcaattagacactttggaagatggcataacctgtctcacctggacttaagcgtctggctctaattcacagtgctcttttctcctcactgtatccaggttccctcccagaggagccaccagttctcatgggtggcactcagtctctcttctctccagctgactaaactttttttctgtaccagttaatttttccaactactaatagaataaaggcagttttctaaa

SEQ ID NO: 56005 - DNA, 1814 bp, Homo sapiens
ccccaccaccctctctcccctctgcgccctctaactaagtctaggtacgaggcctgggtgttccgccctcgctctctcgcgctaccctcccgccgcccgcggtcctccgtcggttctctcgttagtccacggtctggtcttcagctacccgccttcgtctccgagtttgcgactcgcggaccggcgtccccggcgcgaagaggctggactcggattcgttgcctgagcaatggctgccatccggaagaaactggtgattgttggtgatggagcctgtggaaagacatgcttgctcatagtcttcagcaaggaccagttcccagaggtgtatgtgcccacagtgtttgagaactatgtggcagatatcgaggtggatggaaagcaggtagagttggctttgtgggacacagctgggcaggaagattatgatcgcctgaggcccctctcctacccagataccgatgttatactgatgtgtttttccatcgacagccctgatagtttagaaaacatcccagaaaagtggaccccagaagtcaagcatttctgtcccaacgtgcccatcatcctggttgggaataagaaggatcttcggaatgatgagcacacaaggcgggagctagccaagatgaagcaggagccggtgaaacctgaagaaggcagagatatggcaaacaggattggcgcttttgggtacatggagtgttcagcaaagaccaaagatggagtgagagaggtttttgaaatggctacgagagctgctctgcaagctagacgtgggaagaaaaaaagtgctgtttattaatcttagtgtatgattactggcctttttcatttatctataatttacctaagattacaaatcagaagtcatcttgctaccagtatttagaagccaactatgattattaacgatgtccaacccgtctggcccaccagggtccttttgacactgctctaacagccctcctctgcactcccacctgacacaccaggcgctaattcaaggaatttcttaacttcttgcttctttctagaaagagaaacagttggtaacttttgtgaattaggctgtaactactttataactaacatgtcctgcctattatctgtcagctgcaaggtactctggtgagtcaccacttcagggctttactccgtaacagattttgttggcatagctctggggtgggcagttttttgaaaatgggctcaaccagaaaagcccaagttcatgcagctgtggcagagttacagttctgtggtttcatgttagttaccttatagttactgtgtaattagtgccacttaatgtatgttaccaaaaataaatatatctaccccagactagatgtagtattttttgtataattggatttcctaatactgtcatcctcaaagaaagtgtattggttttttaaaaaagaaagtgtatttggaaataaagtcagatggaaaattcattttttaaattcccgttttgtcactttttctgataaaagatggccatattaccccttttcggccccatgtatctcagtaccccatggagctgggctaagtaaataggaattggtttcacgcctgaggcaattagacactttggaagatggcataacctgtctcacctggacttaagcgtctggctctaattcacagtgctcttttctcctcactgtatccaggttccctcccagaggagccaccagttctcatgggtggcactcagtctctcttctctccagctgactaaactttttttctgtaccagttaatttttccaactactaatagaataaaggcagttttctaaa

SEQ ID NO: 56006 - DNA, 1012 bp, Homo sapiens
ccccaccaccctctctcccctctgcgccctctaactaagtctaggtacgaggcctgggtgttccgccctcgctctctcgcgctaccctcccgccgcccgcggtcctccgtcggttctctcgttagtccacggtctggtcttcagctacccgccttcgtctccgagtttgcgactcgcggaccggcgtccccggcgcgaagaggctggactcggattcgttgcctgagcaatggctgccatccggaagaaactggtgattgttggtgatggagcctgtggaaagacatgcttgctcatagtcttcagcaaggaccagttcccagaggtgtatgtgcccacagtgtttgagaactatgtggcagatatcgaggtggatggaaagcaggtagagttggctttgtgggacacagctgggcaggaagattatgatcgcctgaggcccctctcctacccagataccgatgttatactgatgtgtttttccatcgacagccctgatagtttagaaaacatcccagaaaagtggaccccagaagtcaagcatttctgtcccaacgtgcccatcatcctggttgggaataagaaggatcttcggaatgatgagcacacaaggcgggagctagccaagatgaagcaggagccggtgaaacctgaagaaggcagagatatggcaaacaggattggcgcttttgggtacatggagtgttcagcaaagaccaaagatggagtgagagaggtttttgaaatggctacgagagctgctctgcaagctagacgtgggaagaaaaaatctgggtgccttgtcttgtgaaaccttgctgcaagcacagcccttatgcggttaattttgaagtgctgtttattaatcttagtgtatgattactggcctttttcatttatctataatttacctaagattacaaatcagaagtcatcttgctaccagtatttagaagccaactatgattattaacgatgtccaacccgcccgctaggggacgggtaccgagct

SEQ ID NO: 56007 - DNA, 1623 bp, Homo sapiens
ccccaccaccctctctcccctctgcgccctctaactaagtctaggtacgaggcctgggtgttccgccctcgctctctcgcgctaccctcccgccgcccgcggtcctccgtcggttctctcgttagtccacggtctggtcttcagctacccgccttcgtctccgagtttgcgactcgcggaccggcgtccccggcgcgaagaggctggactcggattcgttgcctgagcaatggctgccatccggaagaaactggtgattgttggtgatggagcctgtggaaagacatgcttgctcatagtcttcagcaaggaccagttcccagaggtgtatgtgcccacagtgtttgagaactatgtggcagatatcgaggtggatggaaagcaggagccggtgaaacctgaagaaggcagagatatggcaaacaggattggcgcttttgggtacatggagtgttcagcaaagaccaaagatggagtgagagaggtttttgaaatggctacgagagctgctctgcaagctagacgtgggaagaaaaaatctgggtgccttgtcttgtgaaaccttgctgcaagcacagcccttatgcggttaattttgaagtgctgtttattaatcttagtgtatgattactggcctttttcatttatctataatttacctaagattacaaatcagaagtcatcttgctaccagtatttagaagccaactatgattattaacgatgtccaacccgtctggcccaccagggtccttttgacactgctctaacagccctcctctgcactcccacctgacacaccaggcgctaattcaaggaatttcttaacttcttgcttctttctagaaagagaaacagttggtaacttttgtgaattaggctgtaactactttataactaacatgtcctgcctattatctgtcagctgcaaggtactctggtgagtcaccacttcagggctttactccgtaacagattttgttggcatagctctggggtgggcagttttttgaaaatgggctcaaccagaaaagcccaagttcatgcagctgtggcagagttacagttctgtggtttcatgttagttaccttatagttactgtgtaattagtgccacttaatgtatgttaccaaaaataaatatatctaccccagactagatgtagtattttttgtataattggatttcctaatactgtcatcctcaaagaaagtgtattggttttttaaaaaagaaagtgtatttggaaataaagtcagatggaaaattcattttttaaattcccgttttgtcactttttctgataaaagatggccatattaccccttttcggccccatgtatctcagtaccccatggagctgggctaagtaaataggaattggtttcacgcctgaggcaattagacactttggaagatggcataacctgtctcacctggacttaagcgtctggctctaattcacagtgctcttttctcctcactgtatccaggttccctcccagaggagccaccagttctcatgggtggcactcagtctctcttctctccagctgactaaactttttttctgtaccagttaatttttccaactactaatagaataaaggcagttttctaaa

SEQ ID NO: 56008 - DNA, 1816 bp, Homo sapiens
ccccaccaccctctctcccctctgcgccctctaactaagtctaggtacgaggcctgggtgttccgccctcgctctctcgcgctaccctcccgccgcccgcggtcctccgtcggttctctcgttagtccacggtctggtcttcagctacccgccttcgtctccgagtttgcgactcgcggaccggcgtccccggcgcgaagaggctggactcggattcgttgcctgagcaatggctgccatccggaagaaactggtgattgttggtgatggagcctgtggaaagacatgcttgctcatagtcttcagcaaggaccagttcccagaggtgtatgtgcccacagtgtttgagaactatgtggcagatatcgaggtggatggaaagcaggtagagttggctttgtgggacacagctgggcaggaagattatgatcgcctgaggcccctctcctacccagataccgatgttatactgatgtgtttttccatcgacagccctgatagtttagaaaacatcccagaaaagtggaccccagaagtcaagcatttctgtcccaacgtgcccatcatcctggttgggaataagaaggatcttcggaatgatgagcacacaaggcgggagctagccaagatgaagcaggagccggtgaaacctgaagaaggcagagatatggagagaggtttttgaaatggctacgagagctgctctgcaagctagacgtgggaagaaaaaatctgggtgccttgtcttgtgaaaccttgctgcaagcacagcccttatgcggttaattttgaagtgctgtttattaatcttagtgtatgattactggcctttttcatttatctataatttacctaagattacaaatcagaagtcatcttgctaccagtatttagaagccaactatgattattaacgatgtccaacccgtctggcccaccagggtccttttgacactgctctaacagccctcctctgcactcccacctgacacaccaggcgctaattcaaggaatttcttaacttcttgcttctttctagaaagagaaacagttggtaacttttgtgaattaggctgtaactactttataactaacatgtcctgcctattatctgtcagctgcaaggtactctggtgagtcaccacttcagggctttactccgtaacagattttgttggcatagctctggggtgggcagttttttgaaaatgggctcaaccagaaaagcccaagttcatgcagctgtggcagagttacagttctgtggtttcatgttagttaccttatagttactgtgtaattagtgccacttaatgtatgttaccaaaaataaatatatctaccccagactagatgtagtattttttgtataattggatttcctaatactgtcatcctcaaagaaagtgtattggttttttaaaaaagaaagtgtatttggaaataaagtcagatggaaaattcattttttaaattcccgttttgtcactttttctgataaaagatggccatattaccccttttcggccccatgtatctcagtaccccatggagctgggctaagtaaataggaattggtttcacgcctgaggcaattagacactttggaagatggcataacctgtctcacctggacttaagcgtctggctctaattcacagtgctcttttctcctcactgtatccaggttccctcccagaggagccaccagttctcatgggtggcactcagtctctcttctctccagctgactaaactttttttctgtaccagttaatttttccaactactaatagaataaaggcagttttctaaa

SEQ ID NO: 56009 - DNA, 980 bp, Homo sapiens
ccccaccaccctctctcccctctgcgccctctaactaagtctaggtacgaggcctgggtgttccgccctcgctctctcgcgctaccctcccgccgcccgcggtcctccgtcggttctctcgttagtccacggtctggtcttcagctacccgccttcgtctccgagtttgcgactcgcggaccggcgtccccggcgcgaagaggctggactcggattcgttgcctgagcaatggctgccatccggaagaaactggtgattgttggtgatggagcctgtggaaagacatgcttgctcatagtcttcagcaaggaccagttcccagaggtgtatgtgcccacagtgtttgagaactatgtggcagatatcgaggtggatggaaagcaggtagagttggctttgtgggacacagctgggcaggaagattatgatcgcctgaggcccctctcctacccagataccgatgttatactgatgtgtttttccatcgacagccctgatagtttagaaaacatcccagaaaagtggaccccagaagtcaagcatttctgtcccaacgtgcccatcatcctggttgggaataagaaggatcttcggaatgatgagcacacaaggcgggagctagccaagatgaagcaggagccggtgaaacctgaagaaggcagagatatggcaaacaggattggcgcttttgggtacatggagtgttcagcaaagaccaaagatggagtgagagaggtttttgaaatggctacgagagctgctctgcaagctagacgtgggaagaaaaaatctgggtgccttgtcttgtgaaaccttgctgcaagcacagcccttatgcggttaattttgaagtgctgtttattaatcttagtgtatgattactggcctttttcatttatctataatttacctaagattacaaatcagaagtcatcttgctaccagtgggttaccggaggctcgaatttcgtaaatcatt

SEQ ID NO: 56010 - DNA, 934 bp, Homo sapiens
ccccaccaccctctctcccctctgcgccctctaactaagtctaggtacgaggcctgggtgttccgccctcgctctctcgcgctaccctcccgccgcccgcggtcctccgtcggttctctcgttagtccacggtctggtcttcagctacccgccttcgtctccgagtttgcgactcgcggaccggcgtccccggcgcgaagaggctggactcggattcgttgcctgagcaatggctgccatccggaagaaactggtgattgttggtgatggagcctgtggaaagacatgcttgctcatagtcttcagcaaggaccagttcccagaggtgtatgtgcccacagtgtttgagaactatgtggcagatatcgaggtggatggaaagcaggtagagttggctttgtgggacacagctgggcaggaagattatgatcgcctgaggcccctctcctacccagataccgatgttatactgatgtgtttttccatcgacagccctgatagtttagaaaacatcccagaaaagtggaccccagaagtcaagcatttctgtcccaacgtgcccatcatcctggttgggaataagaaggatcttcggaatgatgagcacacaaggcgggagctagccaagatgaagcaggagccggtgaaacctgaagaaggcagagatatggcaaacaggattggcgcttttgggtacatggagtgttcagcaaagaccaaagatggagtgagagaggtttttgaaatggctacgagagctgctctgcaagctagacgtgggaagaaaaaatctgggtgccttgtcttgtgaaaccttgctgcaagcacagcccttatgcggttaattttgaagtgctgtttattaatcttagtgtatgattactggcccgcgggccagtacggatgtggatatcgtggagcaggtctgaggggt

SEQ ID NO: 56011 - DNA, 1026 bp, Homo sapiens
ccccaccaccctctctcccctctgcgccctctaactaagtctaggtacgaggcctgggtgttccgccctcgctctctcgcgctaccctcccgccgcccgcggtcctccgtcggttctctcgttagtccacggtctggtcttcagctacccgccttcgtctccgagtttgcgactcgcggaccggcgtccccggcgcgaagaggctggactcggattcgttgcctgagcaatggctgccatccggaagaaactggtgattgttggtgatggagcctgtggaaagacatgcttgctcatagtcttcagcaaggaccagttcccagaggtgtatgtgcccacagtgtttgagaactatgtggcagatatcgaggtggatggaaagcaggtagagttggctttgtgggacacagctgggcaggaagattatgatcgcctgaggcccctctcctacccagataccgatgttatactgatgtgtttttccatcgacagccctgatagtttagaaaacatcccagaaaagtggaccccagaagtcaagcatttctgtcccaacgtgcccatcatcctggttgggaataagaaggatcttcggaatgatgagcacacaaggcgggagctagccaagatgaagcaggagccggtgaaacctgaagaaggcagagatatggcaaacaggattggcgcttttgggtacatggagtgttcagcaaagaccaaagatggagtggctggccgggctccaggtggaaatgcccaggtgaaaagggagacttggagttcaggaaagtaacctggactggagccataggtttaggtgtcagtggctcagagacagaagctcagcgtgtaggtgaaatcacccaggaggagaatggggatggaaaactgaggattgaattttgccaaatgcttcatacttccggggcaaaccaagaataaccacgcgcataagaaaggggtgccaggtaagaacgggcaagagaatcagagtcatgagaagcccgaagccccgcccagcatgag

SEQ ID NO: 56012 - DNA, 662 bp, Homo sapiens
ccccaccaccctctctcccctctgcgccctctaactaagtctaggtacgaggcctgggtgttccgccctcgctctctcgcgctaccctcccgccgcccgcggtcctccgtcggttctctcgttagtccacggtctggtcttcagctacccgccttcgtctccgagtttgcgactcgcggaccggcgtccccggcgcgaagaggctggactcggattcgttgcctgagcaatggctgccatccggaagaaactggtgattgttggtgatggagcctgtggaaagacatgcttgctcatagtcttcagcaaggaccagttcccagaggtgtatgtgcccacagtgtttgagaactatgtggcagatatcgaggtggatggaaagcaggtagagttggctttgtgggacacagctgggcaggaagattatgatcgcctgaggcccctctcctacccagataccgatgttatactgatgtgtttttccatcgacagccctgatagtttagaaaacatcccagaaaagtggaccccagaagtcaagcatttctgtcccaacgtgcccatcatcctggttgggaataagaaggatcttcggaatgatgagcacacaaggcgggagctagccaagatgaagcaggcatgatctggggcaggactgtctt

SEQ ID NO: 56013 - DNA, 1421 bp, Homo sapiens
agctgagacccactgggctgcattcccaggaagttaggcattcttagtcacaggatgagataggagattggctcaagataaggtcacaaagaccttgctgataaaacagtctgtggtaaagaagccagccaaaacccaccaaaaccaagacgggaatgaaagtgacctccggtcatcctcactgctcattatacgctagttataatgcattgacatgctaagagacactcccaccagcaccatgacagtttacaaatgccataacaacatcaggaagttaccctatatggtctaaaaaggggaggaaccctcagttctgagaatttccttgaaaattcatgaataatccaccccttgtttagcatatgatcaagaaataatcattaaaaaatagccaaccagcagctcatgctctgtcttgcctatggagtagccatcctttctttattaacctgctttcactttatggactcccctgaattcttctgcaggagatccaagaaccctctcttggagtcttaaccaggatccctttccagtaacttcagcaggatctgtgagtgccagtttccttctgtggtgcaaaactaggtgctaagtacactttttcccccctttcctctatttttaaaagaactttcagcccttttgaagtgggtacattgtctggagtacataccctggggttcattgttataggagaatttaggacacagacacacgaggagtttaggagcagaggtttaataggtaggaagagaagggaaagagaaacagcttcctctatagatgtctgcactgacaccgtggctttaaggcatggcccatgatgtgtctccgagtggaaaagactggttggtggtgaatgcgccaaattttatagtccggtttgaggaggtggtttctgattgggttgcatcattgtatgacgtttgcaaagtgcatgtggaaggctggtcgccccacccctaatcttatgcaaatgggctttcccagttgattgggtccatcttgtgtaacacgtggctggcagagaagggaagatgaagccacccatcttgaaaatgtctagtccttagtttctgctggcattcaccccatgcaagctgccagcttgtctatgtctgcagctcaactttacaggctgctctttgttagcaaatgatttggagcttcttttcattaaagaaaaaagccttaccgaggactcccatacccttgctttctgcttaagtgatttcttcttaactcctatgtcaattttatacagcatgaaataatgatgtatctataaatgagcctttgcaagattaccatttatcaaagaaaaccagtgatgtttagttaactgtttgtaaaaataaatggttagtagaatgtctaattcaataaatgtttcataaatgagtaaaaaaaaaaat

SEQ ID NO: 56014 - DNA, 440 bp, Homo sapiens
ggtggggacagagtgttgctctgtcacccaggctcgagtgtggggtggtgtgatctctgctcactgcaacacctgtaatcccagctacttgggaggctgagacaggaaaatcacttaaaacccaggaggcggaggttacagttagctgagattgcgccactgcagtccagcctgggtgacagagtgagactctgtctcaaaaaaaaagcgaagttacatgcaataaaatcacacagaaaaattatttttaataaaaaattaaaacaattgacagatatcagttatatgatttattgttccaactgttatatgtgtatttctgagtgccctttggcttcttgcccggtggtacttgaagtcataggataaacatggcatattttccttaagtgtcaatattactcaacaaatataggttaaaaaagcattctatctgatgt

SEQ ID NO: 56015 - DNA, 303 bp, Homo sapiens
ggaggactggctctaggtcctctcaggtgagaaggagagaaaccgtggcaagtcagggaactttctgatgggaaagctaaagtttggaggtgttcaggaagtcgcccgtgctgccggagaaaccgagactcgctcttgggacggttgcaaacagctccggagaaactcagcccgcagcacgccgcccgccgcccgccgcccgcttgtgcgcccgcaggttcctcgccgtggataatctgcccgagctgcttcgcaggcccggccgccaggcttggggatttagagccccatctgtttgcggcg

SEQ ID NO: 56016 - DNA, 263 bp, Homo sapiens
tatccttttctaggagaccctattctactgagaccactggcagggctgagtgtggtaaggctgaactatgacacaaacaggatatgaccaagtatgtttgttgtttagcttttgttgtttggcttttgtttacaaaaagcttaaaaataacaaaatttggttcttgtcctggtcctacagagttgattctaggccaactgtctctcttgcttttggtatggcattaccaaggtcaagcttgcagtctgatctccaccttagta

SEQ ID NO: 56017 - DNA, 2731 bp, Homo sapiens
gtatcccccaaattcctctgcagaggctcacaccccaaggtgactgtcgctggagataaggtctttaaggaggcaatcatggtaatatggcagcttaagggtgggaccctcatccaacaagactggtgtcctcctgagaacggaaaaacactgaagaccacacacacggaaaagaccaggtgaggcacagaatgggaagaagccaaacctgccagtgccttgatcatggactctcaacctccagaactgtgagaaaatacgtttgggcctcccagtctgtggtattttgtcgtggcagcccgagctgactaacgtaggcgccaagcccctccagagccacgtggcacccgtggctgatcagcctgccatgctggcagatctaccctgtagggccaaaaatgcttctacctgcaactgcccatcaataacatctgcatggctgtttgcagagggcaaccaaagaagaaagttcagtcccactgcaccaacccagctgatggaacagagtcccacatggcactctcctaaactgggcagcgacgccacttacttccagaatacagggaagattctgaagcctgccggggagctgagtggacccgcatgcactcactcatccactccacaggcatttgtcccagggtctccaggtatgatgggaagccagggtgcacagggccagaggcgacaaacacattcctgccgggtcccagagaacggaggctggccaggaatacgggcggcatgaactacgctcaggctgcaggtgccaagcacttacacttgtttcctttggagtaaagctagaggaaacagaggctccaaattcaaaaggctttcctgaaagcacacagctagaaagaagctgcaccagacttcacttgaggactcttcttagacatgacatatactgcctctcaacaagcagctgtactgtggaggagaaagtagaaaagtgccacaagagatttaaaaaaaataataataatgctcctgggcctgagacagggaaggagtacagcatttctgttttatttctgggggctggggagcagagcagaacattcaggaaagacattcattctgcaagcatttactggggatatactattcgccaggcatgcatgtaaaagaggagccacgtgcccagagggatgggaagacagcacgttccaaccatgaagtcggggagcagaaggaagcacaggtgagggagagtccatgggaactggcgggccagcagcagcagcagcagcagcagcagcagcagcagcagaggagcccatgcggcaggaacaggagcccatacctgagcactgaggcacccagccacctgtcacgatactcggaggactgggctacagaggccgcacaccccagcaaccaacttctccccgctcctagcaggcccttaagtcgctgttgctgagctcccctcacccccttaaatatctctttcccaccaagatgcaaaaggcaacaccatcctctagcatttgcccagctctgtgcgtgtttaatttccttactatttgcaagaagtcattcaaaatgttgacagcatcttaacagtttgcacatgatatatctgcacatcttacaggttagcatccgtgtcaaaagtcaccaatgaacacattacaatctctccatttccattctcttttaaaggctgcagaatgtctggttcaacactaagcagacttttttccgcaaaattacaaggaaacactgaacaagggcagatgcacaaaatgatacccatgacgcctgacaaacaactccgtgttgacagaacagctcgaggcccttccccattccagtggatcagcgctgttattgccagctcagtatctacgcccctgtctttcagagaaccttttcagtgttcctttgaggacctgccctgctcttctctctgctgccactctgatgaggctgtccatgaaaggcctcccctggccaagaagtggcagaatctgggccaataaaccactctccaggcaacccaagcagtgccctaaatacacaggcagcctgtgcctgtcccctgggcccatggttcagtccatcccaacgcctctatgctcaaagccacccccacatccttcgaataaaatccatgtctgcttgagtcagccagaatgggattctcatgtttccaaccaaggacccaaagagtcaacttaccacagtgcccagcttgaagggtaaacaagttctgacagttctaaaaggcaaagaccatctgcttaaggcaaacattacctaaatttaaggacttttttaatgccctaaattctgatggcaactcccaaagaaaagattcccaaaatggtggccatggcaacctcaatggcctgagtatacaagctccccaactgaccaatacggctgcaggccccttctctgggacatgagtcattgaacatctgatctaaacaccaggtatgttccttgttgctacacagactgtgccctacaagccagagtccatcccgcctccctcatgcagttaagctccatggagctctcaccacgtgtccagtcctggatgagacaccggggtttggttcctgagcaccttgagcccatgctggggagagacgtgcagcccacgtcacagcaaagtgcacaggccaccaggtggcaggccctggaatcgccagcaggagccatcggaatggccttggggaagcaggactcctgagctgggttgtgaaggcatcag

SEQ ID NO: 56018 - DNA, 233 bp, Homo sapiens
gcggtcttctagaggatcccggcacacgtgcgtataactggcagaaccacgcatccctacggttgttgaatctagtctatgatgtgactcccccagagcttgtggatctggtgatcacggagctggggatgatcccttgcagttctgtacctgttgttctacgagtcaagagcagtgaccagtgacgggggaaacacagggttaataaatgccatactccctaccctcagcaa

SEQ ID NO: 56019 - DNA, 1755 bp, Homo sapiens
agtccgattggggctgcgcgcttcgcttctgcggctcagcctccagcccaggtggcgctgtggaccctgcagccgcggagcgaggcagcggggcggctccgtgaccacggcgggcggagcctaggactgagggcgatggctgctgtggccgtggctgttcgcgaggactcgggatccgggatgaaggcggagcttccccctgggcctggggcagtggggagggaaatgaccaaagaagaaaagctgcagcttcggaaggaaaagaaacagcagaagaagaaacggaaggaagaaaagggggcagaaccagagactggctctgctgtatctgcagcccaatgtcaagtaggcccaaccagagaactgccagaatcgggcattcagttgggcactcctcgggagaaagttccagctggtcggagtaaggccgaacttcgggctgagcgtcgagccaagcaggaggccgagcgggccctgaaacaggcaagaaaaggggaacaaggaggaccacctcctaaggccagccccagcacagctggagaaaccccctcaggagtgaagcgtctccctgagtaccctcaggttgatgacctacttctgagaaggcttgttaaaaaaccagagcgtcaacaggttcctacacgaaaggattatggatccaaagtcagtctcttctctcacctaccccagtacagcagacaaaactctctgacccagtttatgagcatcccatcctctgtgatccacccagccatggtgcgactcggcctgcagtactcccagggcctggtcagtggctccaatgcccggtgtattgccctgcttcgtgccttgcagcaggtgattcaggattacacaacaccgcctaatgaagaactctccagggatctagtgaataaactaaaaccctacatgagcttcctgactcagtgccgtcccctgtcagcgagcatgcacaacgccatcaagttccttaacaaggaaatcaccagtgtgggcagttccaagcgggaagaggaggccaagtcagaacttcgagcagccattgatcggtatgtgcaagagaagattgtgctagcagctcaggcaatttcacgctttgcttaccagaagatcagtaatggagatgtgatcctggtatatggatgctcatctctggtatcacgaattcttcaggaggcttggacagagggccggcggtttcgggtggtagtggtggacagccggccatggctggaaggaaggcacacactacgttctctagtccatgctggtgtcccagcctcctacctgctgattcctgcagcctcctatgtgctcccagaggtttccaaggtgctattgggagctcatgcactcttggccaacgggtctgtgatgtcacgggtagggacagcacagttagccctggtggctcgagcccataatgtaccagtgctggtttgctgtgaaacatacaagttctgtgagcgtgtgcagactgatgcctttgtctctaatgagctagatgaccctgatgatctgcaatgtaagcggggagaacatgttgcgctggctaactggcagaaccacgcatccctacggttgttgaatctagtctatgatgtgactcccccagagcttgtggatctggtgatcacggagctggggatgatcccttgcagttctgtacctgttgttctacgagtcaagagcagtgaccagtgacgggggaaacacagggttaataaatgccatactccctaccctcagcaa

SEQ ID NO: 56020 - DNA, 1933 bp, Homo sapiens
agtccgattggggctgcgcgcttcgcttctgcggctcagcctccagcccaggtggcgctgtggaccctgcagccgcggagcgaggcagcggggcggctccgtgaccacggcgggcggagcctaggactgagggcgatggctgctgtggccgtggctgttcgcgagggtgagtgaagagccgggcctgcctactggtacgcggagccgacgagctccggacagctagtgccgggccttgagcgcctttgggccccgccgctccgttccagcgccacgctgggctccggtctacacagtctcgagcgcagtcccgcgccgcgcaccggctggttgctgtgaggaggactcgggatccgggatgaaggcggagcttccccctgggcctggggcagtggggagggaaatgaccaaagaagaaaagctgcagcttcggaaggaaaagaaacagcagaagaagaaacggaaggaagaaaagggggcagaaccagagactggctctgctgtatctgcagcccaatgtcaagtaggcccaaccagagaactgccagaatcgggcattcagttgggcactcctcgggagaaagttccagctggtcggagtaaggccgaacttcgggctgagcgtcgagccaagcaggaggccgagcgggccctgaaacaggcaagaaaaggggaacaaggaggaccacctcctaaggccagccccagcacagctggagaaaccccctcaggagtgaagcgtctccctgagtaccctcaggttgatgacctacttctgagaaggcttgttaaaaaaccagagcgtcaacaggttcctacacgaaaggattatggatccaaagtcagtctcttctctcacctaccccagtacagcagacaaaactctctgacccagtttatgagcatcccatcctctgtgatccacccagccatggtgcgactcggcctgcagtactcccagggcctggtcagtggctccaatgcccggtgtattgccctgcttcgtgccttgcagcaggtgattcaggattacacaacaccgcctaatgaagaactctccagggatctagtgaataaactaaaaccctacatgagcttcctgactcagtgccgtcccctgtcagcgagcatgcacaacgccatcaagttccttaacaaggaaatcaccagtgtgggcagttccaagcgggaagaggaggccaagtcagaacttcgagcagccattgatcggtatgtgcaagagaagattgtgctagcagctcaggcaatttcacgctttgcttaccagaagatcagtaatggagatgtgatcctggtatatggatgctcatctctggtatcacgaattcttcaggaggcttggacagagggccggcggtttcgggtggtagtggtggacagccggccatggctggaaggaaggcacacactacgttctctagtccatgctggtgtcccagcctcctacctgctgattcctgcagcctcctatgtgctcccagaggtttccaaggtgctattgggagctcatgcactcttggccaacgggtctgtgatgtcacgggtagggacagcacagttagccctggtggctcgagcccataatgtaccagtgctggtttgctgtgaaacatacaagttctgtgagcgtgtgcagactgatgcctttgtctctaatgagctagatgaccctgatgatctgcaatgtaagcggggagaacatgttgcgctggctaactggcagaaccacgcatccctacggttgttgaatctagtctatgatgtgactcccccagagcttgtggatctggtgatcacggagctggggatgatcccttgcagttctgtacctgttgttctacgagtcaagagcagtgaccagtgacgggggaaacacagggttaataaatgccatactccctaccctcagcaa

SEQ ID NO: 56021 - DNA, 2119 bp, Homo sapiens
agtccgattggggctgcgcgcttcgcttctgcggctcagcctccagcccaggtggcgctgtggaccctgcagccgcggagcgaggcagcggggcggctccgtgaccacggcgggcggagcctaggactgagggcgatggctgctgtggccgtggctgttcgcgagggtgagtgaagagccgggcctgcctactggtacgcggagccgacgagctccggacagctagtgccgggccttgagcgcctttgggccccgccgctccgttccagcgccacgctgggctccggtctacacagtctcgagcgcagtcccgcgccgcgcaccggctggttgctgtgaggagggtcggtgacccctccattcctttgatccgccgcgcagtgcgtccccacgcggatccctggctcgcctcgcgcctgccggcggatccgtggtcatgccaacccagcagccggctgcgccgagtactcgtgcccccaaaccctcccggagtctctctggctcactttgtgccctgttttctgatgcagactcgggatccgggatgaaggcggagcttccccctgggcctggggcagtggggagggaaatgaccaaagaagaaaagctgcagcttcggaaggaaaagaaacagcagaagaagaaacggaaggaagaaaagggggcagaaccagagactggctctgctgtatctgcagcccaatgtcaagtaggcccaaccagagaactgccagaatcgggcattcagttgggcactcctcgggagaaagttccagctggtcggagtaaggccgaacttcgggctgagcgtcgagccaagcaggaggccgagcgggccctgaaacaggcaagaaaaggggaacaaggaggaccacctcctaaggccagccccagcacagctggagaaaccccctcaggagtgaagcgtctccctgagtaccctcaggttgatgacctacttctgagaaggcttgttaaaaaaccagagcgtcaacaggttcctacacgaaaggattatggatccaaagtcagtctcttctctcacctaccccagtacagcagacaaaactctctgacccagtttatgagcatcccatcctctgtgatccacccagccatggtgcgactcggcctgcagtactcccagggcctggtcagtggctccaatgcccggtgtattgccctgcttcgtgccttgcagcaggtgattcaggattacacaacaccgcctaatgaagaactctccagggatctagtgaataaactaaaaccctacatgagcttcctgactcagtgccgtcccctgtcagcgagcatgcacaacgccatcaagttccttaacaaggaaatcaccagtgtgggcagttccaagcgggaagaggaggccaagtcagaacttcgagcagccattgatcggtatgtgcaagagaagattgtgctagcagctcaggcaatttcacgctttgcttaccagaagatcagtaatggagatgtgatcctggtatatggatgctcatctctggtatcacgaattcttcaggaggcttggacagagggccggcggtttcgggtggtagtggtggacagccggccatggctggaaggaaggcacacactacgttctctagtccatgctggtgtcccagcctcctacctgctgattcctgcagcctcctatgtgctcccagaggtttccaaggtgctattgggagctcatgcactcttggccaacgggtctgtgatgtcacgggtagggacagcacagttagccctggtggctcgagcccataatgtaccagtgctggtttgctgtgaaacatacaagttctgtgagcgtgtgcagactgatgcctttgtctctaatgagctagatgaccctgatgatctgcaatgtaagcggggagaacatgttgcgctggctaactggcagaaccacgcatccctacggttgttgaatctagtctatgatgtgactcccccagagcttgtggatctggtgatcacggagctggggatgatcccttgcagttctgtacctgttgttctacgagtcaagagcagtgaccagtgacgggggaaacacagggttaataaatgccatactccctaccctcagcaa

SEQ ID NO: 56022 - DNA, 1638 bp, Homo sapiens
cacgcgtcgcccacgcgtcgggctgctgtggccgtggctgttcgcgaggactcgggatccgggatgaaggcggagcttccccctgggcctggggcagtggggagggaaatgaccaaagaagaaaagctgcagcttcggaaggaaaagaaacagcagaagaagaaacggaaggaagaaaagggggcagaaccagagactggctctgctgtatctgcagcccaatgtcaagtaggcccaaccagagaactgccagaatcgggcattcagttgggcactcctcgggagaaagttccagctggtcggagtaaggccgaacttcgggctgagcgtcgagccaagcaggaggccgagcgggccctgaaacaggcaagaaaaggggaacaaggaggaccacctcctaaggccagccccagcacagctggagaaaccccctcaggagtgaagcgtctccctgagtaccctcaggttgatgacctacttctgagaaggcttgttaaaaaaccagagcgtcaacaggttcctacacgaaaggattatggatccaaagtcagtctcttctctcacctaccccagtacagcagacaaaactctctgacccagtttatgagcatcccatcctctgtgatccacccagccatggtgcgactcggcctgcagtactcccagggcctggtcagtggctccaatgcccggtgtattgccctgcttcgtgccttgcagcaggtgattcaggattacacaacaccgcctaatgaagaactctccagggatctagtgaataaactaaaaccctacatgagcttcctgactcagtgccgtcccctgtcagcgagcatgcacaacgccatcaagttccttaacaaggaaatcaccagtgtgggcagttccaagcgggaagaggaggccaagtcagaacttcgagcagccattgatcggtatgtgcaagagaagattgtgctagcagctcaggcaatttcacgctttgcttaccagaagatcagtaatggagatgtgatcctggtatatggatgctcatctctggtatcacgaattcttcaggaggcttggacagagggccggcggtttcgggtggtagtggtggacagccggccatggctggaaggaaggcacacactacgttctctagtccatgctggtgtcccagcctcctacctgctgattcctgcagcctcctatgtgctcccagaggtttccaaggtgctattgggagctcatgcactcttggccaacgggtctgtgatgtcacgggtagggacagcacagttagccctggtggctcgagcccataatgtaccagtgctggtttgctgtgaaacatacaagttctgtgagcgtgtgcagactgatgcctttgtctctaatgagctagatgaccctgatgatctgcaatgtaagcggggagaacatgttgcgctggctaactggcagaaccacgcatccctacggttgttgaatctagtctatgatgtgactcccccagagcttgtggatctggtgatcacggagctggggatgatcccttgcagttctgtacctgttgttctacgagtcaagagcagtgaccagtgacgggggaaacacagggttaataaatgccatactccctaccctcagcaa

SEQ ID NO: 56023 - DNA, 1662 bp, Homo sapiens
tgacataggctagtaggagcctggtggttaatcggccgagggatggctgctgtggccgtggctgttcgcgaggactcgggatccgggatgaaggcggagcttccccctgggcctggggcagtggggagggaaatgaccaaagaagaaaagctgcagcttcggaaggaaaagaaacagcagaagaagaaacggaaggaagaaaagggggcagaaccagagactggctctgctgtatctgcagcccaatgtcaagtaggcccaaccagagaactgccagaatcgggcattcagttgggcactcctcgggagaaagttccagctggtcggagtaaggccgaacttcgggctgagcgtcgagccaagcaggaggccgagcgggccctgaaacaggcaagaaaaggggaacaaggaggaccacctcctaaggccagccccagcacagctggagaaaccccctcaggagtgaagcgtctccctgagtaccctcaggttgatgacctacttctgagaaggcttgttaaaaaaccagagcgtcaacaggttcctacacgaaaggattatggatccaaagtcagtctcttctctcacctaccccagtacagcagacaaaactctctgacccagtttatgagcatcccatcctctgtgatccacccagccatggtgcgactcggcctgcagtactcccagggcctggtcagtggctccaatgcccggtgtattgccctgcttcgtgccttgcagcaggtgattcaggattacacaacaccgcctaatgaagaactctccagggatctagtgaataaactaaaaccctacatgagcttcctgactcagtgccgtcccctgtcagcgagcatgcacaacgccatcaagttccttaacaaggaaatcaccagtgtgggcagttccaagcgggaagaggaggccaagtcagaacttcgagcagccattgatcggtatgtgcaagagaagattgtgctagcagctcaggcaatttcacgctttgcttaccagaagatcagtaatggagatgtgatcctggtatatggatgctcatctctggtatcacgaattcttcaggaggcttggacagagggccggcggtttcgggtggtagtggtggacagccggccatggctggaaggaaggcacacactacgttctctagtccatgctggtgtcccagcctcctacctgctgattcctgcagcctcctatgtgctcccagaggtttccaaggtgctattgggagctcatgcactcttggccaacgggtctgtgatgtcacgggtagggacagcacagttagccctggtggctcgagcccataatgtaccagtgctggtttgctgtgaaacatacaagttctgtgagcgtgtgcagactgatgcctttgtctctaatgagctagatgaccctgatgatctgcaatgtaagcggggagaacatgttgcgctggctaactggcagaaccacgcatccctacggttgttgaatctagtctatgatgtgactcccccagagcttgtggatctggtgatcacggagctggggatgatcccttgcagttctgtacctgttgttctacgagtcaagagcagtgaccagtgacgggggaaacacagggttaataaatgccatactccctaccctcagcaa

SEQ ID NO: 56024 - DNA, 1946 bp, Homo sapiens
agtccgattggggctgcgcgcttcgcttctgcggctcagcctccagcccaggtggcgctgtggaccctgcagccgcggagcgaggcagcggggcggctccgtgaccacggcgggcggagcctaggactgagggcgatggctgctgtggccgtggctgttcgcgaggactcgggatccgggatgaaggcggagcttccccctgggcctggggcagtggggagggaaatgaccaaagaagaaaagctgcagcttcggaaggaaaagaaacagcagaagaagaaacggaaggaagaaaagggggcagaaccagagactggctctgctgtatctgcagcccaatgtcaagtaggcccaaccagagaactgccagaatcgggcattcagttgggcactcctcgggagaaagttccagctggtcggagtaaggccgaacttcgggctgagcgtcgagccaagcaggaggccgagcgggccctgaaacaggcaagaaaaggggaacaaggaggaccacctcctaaggccagccccagcacagctggagaaaccccctcaggagtgaagcgtctccctgagtaccctcaggttgatgacctacttctgagaaggcttgttaaaaaaccagagcgtcaacaggtaggaagtgggtttggtgcctggctagaaagagcctagggaaatggactggagggaggcaaaggtgctgggtgcaaagtgagaaggataggtgcttgggtcagagtagtcttactgttcacttcctttccagctttatcccatcctttttaaactctgggccattggtcctgttcccttgttttgtcaaggttcctacacgaaaggattatggatccaaagtcagtctcttctctcacctaccccagtacagcagacaaaactctctgacccagtttatgagcatcccatcctctgtgatccacccagccatggtgcgactcggcctgcagtactcccagggcctggtcagtggctccaatgcccggtgtattgccctgcttcgtgccttgcagcaggtgattcaggattacacaacaccgcctaatgaagaactctccagggatctagtgaataaactaaaaccctacatgagcttcctgactcagtgccgtcccctgtcagcgagcatgcacaacgccatcaagttccttaacaaggaaatcaccagtgtgggcagttccaagcgggaagaggaggccaagtcagaacttcgagcagccattgatcggtatgtgcaagagaagattgtgctagcagctcaggcaatttcacgctttgcttaccagaagatcagtaatggagatgtgatcctggtatatggatgctcatctctggtatcacgaattcttcaggaggcttggacagagggccggcggtttcgggtggtagtggtggacagccggccatggctggaaggaaggcacacactacgttctctagtccatgctggtgtcccagcctcctacctgctgattcctgcagcctcctatgtgctcccagaggtttccaaggtgctattgggagctcatgcactcttggccaacgggtctgtgatgtcacgggtagggacagcacagttagccctggtggctcgagcccataatgtaccagtgctggtttgctgtgaaacatacaagttctgtgagcgtgtgcagactgatgcctttgtctctaatgagctagatgaccctgatgatctgcaatgtaagcggggagaacatgttgcgctggctaactggcagaaccacgcatccctacggttgttgaatctagtctatgatgtgactcccccagagcttgtggatctggtgatcacggagctggggatgatcccttgcagttctgtacctgttgttctacgagtcaagagcagtgaccagtgacgggggaaacacagggttaataaatgccatactccctaccctcagcaa

SEQ ID NO: 56025 - DNA, 2178 bp, Homo sapiens
agtccgattggggctgcgcgcttcgcttctgcggctcagcctccagcccaggtggcgctgtggaccctgcagccgcggagcgaggcagcggggcggctccgtgaccacggcgggcggagcctaggactgagggcgatggctgctgtggccgtggctgttcgcgaggactcgggatccgggatgaaggcggagcttccccctgggcctggggcagtggggagggaaatgaccaaagaagaaaagctgcagcttcggaaggaaaagaaacagcagaagaagaaacggaaggaagaaaagggggcagaaccagagactggctctgctgtatctgcagcccaatgtcaagtaggcccaaccagagaactgccagaatcgggcattcagttgggcactcctcgggagaaagttccagctggtcggagtaaggccgaacttcgggctgagcgtcgagccaagcaggaggccgagcgggccctgaaacaggcaagaaaaggggaacaaggaggaccacctcctaaggccagccccagcacagctggagaaaccccctcaggagtgaagcgtctccctgagtaccctcaggttgatgacctacttctgagaaggcttgttaaaaaaccagagcgtcaacaggtaggaagtgggtttggtgcctggctagaaagagcctagggaaatggactggagggaggcaaaggtgctgggtgcaaagtgagaaggataggtgcttgggtcagagtagtcttactgttcacttcctttccagctttatcccatcctttttaaactctgggccattggtcctgttcccttgttttgtcaaggttcctacacgaaaggattatggatccaaagtcagtctcttctctcacctaccccagtacagcagacaaaactctctgacccagtttatgaggtaggatcctatgaaattgtcataacttttgagtctgaggagttttagtaagtcagtattgaaagtttctagtaatctgagatggactctgtaggaaaaagtatgaacccaaggcagaactgtagaggagtggggaaatctgctagtgaagggagttccttttcatcaggggcaggtgggcagtagatgctcaagctccctttcaaagtatgtgacaccgccatcccatcagcatcccatcctctgtgatccacccagccatggtgcgactcggcctgcagtactcccagggcctggtcagtggctccaatgcccggtgtattgccctgcttcgtgccttgcagcaggtgattcaggattacacaacaccgcctaatgaagaactctccagggatctagtgaataaactaaaaccctacatgagcttcctgactcagtgccgtcccctgtcagcgagcatgcacaacgccatcaagttccttaacaaggaaatcaccagtgtgggcagttccaagcgggaagaggaggccaagtcagaacttcgagcagccattgatcggtatgtgcaagagaagattgtgctagcagctcaggcaatttcacgctttgcttaccagaagatcagtaatggagatgtgatcctggtatatggatgctcatctctggtatcacgaattcttcaggaggcttggacagagggccggcggtttcgggtggtagtggtggacagccggccatggctggaaggaaggcacacactacgttctctagtccatgctggtgtcccagcctcctacctgctgattcctgcagcctcctatgtgctcccagaggtttccaaggtgctattgggagctcatgcactcttggccaacgggtctgtgatgtcacgggtagggacagcacagttagccctggtggctcgagcccataatgtaccagtgctggtttgctgtgaaacatacaagttctgtgagcgtgtgcagactgatgcctttgtctctaatgagctagatgaccctgatgatctgcaatgtaagcggggagaacatgttgcgctggctaactggcagaaccacgcatccctacggttgttgaatctagtctatgatgtgactcccccagagcttgtggatctggtgatcacggagctggggatgatcccttgcagttctgtacctgttgttctacgagtcaagagcagtgaccagtgacgggggaaacacagggttaataaatgccatactccctaccctcagcaa

SEQ ID NO: 56026 - DNA, 1711 bp, Homo sapiens
  misc_feature (1660)..(1660): n is a, c, g, or t
  misc_feature (1664)..(1664): n is a, c, g, or t
  misc_feature (1666)..(1666): n is a, c, g, or t
  misc_feature (1670)..(1670): n is a, c, g, or t
  misc_feature (1672)..(1672): n is a, c, g, or t
  misc_feature (1675)..(1675): n is a, c, g, or t
  misc_feature (1677)..(1677): n is a, c, g, or t
  misc_feature (1680)..(1680): n is a, c, g, or t
  misc_feature (1682)..(1682): n is a, c, g, or t
  misc_feature (1687)..(1687): n is a, c, g, or t
  misc_feature (1698)..(1698): n is a, c, g, or t
  misc_feature (1704)..(1704): n is a, c, g, or t
cacgcgtcgcccacgcgtcgggctgctgtggccgtggctgttcgcgaggactcgggatccgggatgaaggcggagcttccccctgggcctggggcagtggggagggaaatgaccaaagaagaaaagctgcagcttcggaaggaaaagaaacagcagaagaagaaacggaaggaagaaaagggggcagaaccagagactggctctgctgtatctgcagcccaatgtcaagtaggcccaaccagagaactgccagaatcgggcattcagttgggcactcctcgggagaaagttccagctggtcggagtaaggccgaacttcgggctgagcgtcgagccaagcaggaggccgagcgggccctgaaacaggcaagaaaaggggaacaaggaggaccacctcctaaggccagccccagcacagctggagaaaccccctcaggagtgaagcgtctccctgagtaccctcaggttgatgacctacttctgagaaggcttgttaaaaaaccagagcgtcaacaggttcctacacgaaaggattatggatccaaagtcagtctcttctctcacctaccccagtacagcagacaaaactctctgacccagtttatgagcatcccatcctctgtgatccacccagccatggtgcgactcggcctgcagtactcccagggcctggtcagtggctccaatgcccggtgtattgccctgcttcgtgccttgcagcaggtgattcaggattacacaacaccgcctaatgaagaactctccagggatctagtgaataaactaaaaccctacatgagcttcctgactcagtgccgtcccctgtcagcgagcatgcacaacgccatcaagttccttaacaaggaaatcaccagtgtgggcagttccaagcgggaagaggaggccaagtcagaacttcgagcagccattgatcggtatgtgcaagagaagattgtgctagcagctcaggcaatttcacgctttgcttaccagaagatcagtaatggagatgtgatcctggtatatggatgctcatctctggtatcacgaattcttcaggaggcttggacagagggccggcggtttcgggtggtagtggtggacagccggccatggctggaaggaaggcacacactacgttctctagtccatgctggtgtcccagcctcctacctgctgattcctgcagcctcctatgtgctcccagaggtttccaaggtgctattgggagctcatgcactcttggccaacgggtctgtgatgtcacgggtagggacagcacagttagccctggtggctcgagcccataatgtaccagtgctggtttgctgtgaaacatacaagttctgtgagcgtgtgcagactgatgcctttgtctctaatgagctagatgaccctgatgatctgcaatgtaagcggggagaacatgttgcgctggctaactggcagaaccacgcatccctacggttgttgaatctagtctatgatgtgactcccccagagcttgtggatctggtgatcacggagctggggatgatcccttgcagttctgtacctgttgttctacgagtcaagagcagtgaccagtgacgggggaaacacagggttaataaatgccatactccctaccctcagcaaaaaaaaaaaaaaaaaaaaaagnaaananaaananaananagnanacaanaagaaaaaaanaaaagnggggggg

SEQ ID NO: 56027 - DNA, 1776 bp, Homo sapiens
cacgcgtcgcccacgcgtcgggctgctgtggccgtggctgttcgcgaggactcgggatccgggatgaaggcggagcttccccctgggcctggggcagtggggagggaaatgaccaaagaagaaaagctgcagcttcggaaggaaaagaaacagcagaagaagaaacggaaggaagaaaagggggcagaaccagagactggctctgctgtatctgcagcccaatgtcaagtaggcccaaccagagaactgccagaatcgggcattcagttgggcactcctcgggagaaagttccagctggtcggagtaaggccgaacttcgggctgagcgtcgagccaagcaggaggccgagcgggccctgaaacaggcaagaaaaggggaacaaggaggaccacctcctaaggccagccccagcacagctggagaaaccccctcaggagtgaagcgtctccctgagtaccctcaggttgatgacctacttctgagaaggcttgttaaaaaaccagagcgtcaacaggttcctacacgaaaggattatggatccaaagtcagtctcttctctcacctaccccagtacagcagacaaaactctctgacccagtttatgagcatcccatcctctgtgatccacccagccatggtgcgactcggcctgcagtactcccagggcctggtcagtggctccaatgcccggtgtattgccctgcttcgtgccttgcagcaggtgattcaggattacacaacaccgcctaatgaagaactctccagggatctagtgaataaactaaaaccctacatgagcttcctgactcagtgccgtcccctgtcagcgagcatgcacaacgccatcaagttccttaacaaggaaatcaccagtgtgggcagttccaagcgggaagaggaggccaagtcagaacttcgagcagccattgatcggtatgtgcaagagaagattgtgctagcagctcaggcaatttcacgctttgcttaccagaagatcagtaatggagatgtgatcctggtatatggatggtatggtccagaccttgtgactgagcagattgggagtatggaatgatctgaagaagggactacccacttgcctttgggaataagttagtcatcagttactgacatttataactgaatcctcctcttcattcactctagctcatctctggtatcacgaattcttcaggaggcttggacagagggccggcggtttcgggtggtagtggtggacagccggccatggctggaaggaaggcacacactacgttctctagtccatgctggtgtcccagcctcctacctgctgattcctgcagcctcctatgtgctcccagaggtttccaaggtgctattgggagctcatgcactcttggccaacgggtctgtgatgtcacgggtagggacagcacagttagccctggtggctcgagcccataatgtaccagtgctggtttgctgtgaaacatacaagttctgtgagcgtgtgcagactgatgcctttgtctctaatgagctagatgaccctgatgatctgcaatgtaagcggggagaacatgttgcgctggctaactggcagaaccacgcatccctacggttgttgaatctagtctatgatgtgactcccccagagcttgtggatctggtgatcacggagctggggatgatcccttgcagttctgtacctgttgttctacgagtcaagagcagtgaccagtgacgggggaaacacagggttaataaatgccatactccctaccctcagcaa

SEQ ID NO: 56028 - DNA, 2031 bp, Homo sapiens
cacgcgtcgcccacgcgtcgggctgctgtggccgtggctgttcgcgaggactcgggatccgggatgaaggcggagcttccccctgggcctggggcagtggggagggaaatgaccaaagaagaaaagctgcagcttcggaaggaaaagaaacagcagaagaagaaacggaaggaagaaaagggggcagaaccagagactggctctgctgtatctgcagcccaatgtcaagtaggcccaaccagagaactgccagaatcgggcattcagttgggcactcctcgggagaaagttccagctggtcggagtaaggccgaacttcgggctgagcgtcgagccaagcaggaggccgagcgggccctgaaacaggcaagaaaaggggaacaaggaggaccacctcctaaggccagccccagcacagctggagaaaccccctcaggagtgaagcgtctccctgagtaccctcaggttgatgacctacttctgagaaggcttgttaaaaaaccagagcgtcaacaggttcctacacgaaaggattatggatccaaagtcagtctcttctctcacctaccccagtacagcagacaaaactctctgacccagtttatgagcatcccatcctctgtgatccacccagccatggtgcgactcggcctgcagtactcccagggcctggtcagtggctccaatgcccggtgtattgccctgcttcgtgccttgcagcaggtgattcaggattacacaacaccgcctaatgaagaactctccagggatctagtgaataaactaaaaccctacatgagcttcctgactcagtgccgtcccctgtcagcgagcatgcacaacgccatcaagttccttaacaaggaaatcaccagtgtgggcagttccaagcgggaagaggaggtgatgagtatgagaaataaggaaggcatgcacctgtgggtaaaattaagaaacatgttaaaaactcccgggaaggccaacgtaagcctttttttgccctagtcaagggttaaggaatggtttggccattctgacttgtgccatctctgagccctctataggcttgtcatcatacacatattcaagcacctggcatgatcatcagagggataaaagtgtccatttcttgttcactaaggattttactccatttaggccaagtcagaacttcgagcagccattgatcggtatgtgcaagagaagattgtgctagcagctcaggcaatttcacgctttgcttaccagaagatcagtaatggagatgtgatcctggtatatggatggtatggtccagaccttgtgactgagcagattgggagtatggaatgatctgaagaagggactacccacttgcctttgggaataagttagtcatcagttactgacatttataactgaatcctcctcttcattcactctagctcatctctggtatcacgaattcttcaggaggcttggacagagggccggcggtttcgggtggtagtggtggacagccggccatggctggaaggaaggcacacactacgttctctagtccatgctggtgtcccagcctcctacctgctgattcctgcagcctcctatgtgctcccagaggtttccaaggtgctattgggagctcatgcactcttggccaacgggtctgtgatgtcacgggtagggacagcacagttagccctggtggctcgagcccataatgtaccagtgctggtttgctgtgaaacatacaagttctgtgagcgtgtgcagactgatgcctttgtctctaatgagctagatgaccctgatgatctgcaatgtaagcggggagaacatgttgcgctggctaactggcagaaccacgcatccctacggttgttgaatctagtctatgatgtgactcccccagagcttgtggatctggtgatcacggagctggggatgatcccttgcagttctgtacctgttgttctacgagtcaagagcagtgaccagtgacgggggaaacacagggttaataaatgccatactccctaccctcagcaa

SEQ ID NO: 56029 - DNA, 1542 bp, Homo sapiens
cacgcgtcgcccacgcgtcgggctgctgtggccgtggctgttcgcgaggactcgggatccgggatgaaggcggagcttccccctgggcctggggcagtggggagggaaatgaccaaagaagaaaagctgcagcttcggaaggaaaagaaacagcagaagaagaaacggaaggaagaaaagggggcagaaccagagactggctctgctgtatctgcagcccaatgtcaagtaggcccaaccagagaactgccagaatcgggcattcagttgggcactcctcgggagaaagttccagctggtcggagtaaggccgaacttcgggctgagcgtcgagccaagcaggaggccgagcgggccctgaaacaggcaagaaaaggggaacaaggaggaccacctcctaaggccagccccagcacagctggagaaaccccctcaggagtgaagcgtctccctgagtaccctcaggttgatgacctacttctgagaaggcttgttaaaaaaccagagcgtcaacaggttcctacacgaaaggattatggatccaaagtcagtctcttctctcacctaccccagtacagcagacaaaactctctgacccagtttatgagcatcccatcctctgtgatccacccagccatggtgcgactcggcctgcagtactcccagggcctggtcagtggctccaatgcccggtgtattgccctgcttcgtgccttgcagcaggtgattcaggattacacaacaccgcctaatgaagaactctccagggatctagtgaataaactaaaaccctacatgagcttcctgactcagtgccgtcccctgtcagcgagcatgcacaacgccatcaagttccttaacaaggaaatcaccagtgtgggcagttccaagcgggaagaggaggccaagtcagaacttcgagcagccattgatcgctcatctctggtatcacgaattcttcaggaggcttggacagagggccggcggtttcgggtggtagtggtggacagccggccatggctggaaggaaggcacacactacgttctctagtccatgctggtgtcccagcctcctacctgctgattcctgcagcctcctatgtgctcccagaggtttccaaggtgctattgggagctcatgcactcttggccaacgggtctgtgatgtcacgggtagggacagcacagttagccctggtggctcgagcccataatgtaccagtgctggtttgctgtgaaacatacaagttctgtgagcgtgtgcagactgatgcctttgtctctaatgagctagatgaccctgatgatctgcaatgtaagcggggagaacatgttgcgctggctaactggcagaaccacgcatccctacggttgttgaatctagtctatgatgtgactcccccagagcttgtggatctggtgatcacggagctggggatgatcccttgcagttctgtacctgttgttctacgagtcaagagcagtgaccagtgacgggggaaacacagggttaataaatgccatactccctaccctcagcaa

SEQ ID NO: 56030 - DNA, 1635 bp, Homo sapiens
tgacataggctagtaggagcctggtggttaatcggccgagggatggctgctgtggccgtggctgttcgcgaggactcgggatccgggatgaaggcggagcttccccctgggcctggggcagtggggagggaaatgaccaaagaagaaaagctgcagcttcggaaggaaaagaaacagcagaagaagaaacggaaggaagaaaagggggcagaaccagagactggctctgctgtatctgcagcccaatgtcaagtaggcccaaccagagaactgccagaatcgggcattcagttgggcactcctcgggagaaagttccagctggtcggagtaaggccgaacttcgggctgagcgtcgagccaagcaggaggccgagcgggccctgaaacaggcaagaaaaggggaacaaggaggaccacctcctaaggccagccccagcacagctggagaaaccccctcaggagtgaagcgtctccctgagtaccctcaggttgatgacctacttctgagaaggcttgttaaaaaaccagagcgtcaacaggttcctacacgaaaggattatggatccaaagtcagtctcttctctcacctaccccagtacagcagacaaaactctctgacccagtttatgagcatggtgcgactcggcctgcagtactcccagggcctggtcagtggctccaatgcccggtgtattgccctgcttcgtgccttgcagcaggtgattcaggattacacaacaccgcctaatgaagaactctccagggatctagtgaataaactaaaaccctacatgagcttcctgactcagtgccgtcccctgtcagcgagcatgcacaacgccatcaagttccttaacaaggaaatcaccagtgtgggcagttccaagcgggaagaggaggccaagtcagaacttcgagcagccattgatcggtatgtgcaagagaagattgtgctagcagctcaggcaatttcacgctttgcttaccagaagatcagtaatggagatgtgatcctggtatatggatgctcatctctggtatcacgaattcttcaggaggcttggacagagggccggcggtttcgggtggtagtggtggacagccggccatggctggaaggaaggcacacactacgttctctagtccatgctggtgtcccagcctcctacctgctgattcctgcagcctcctatgtgctcccagaggtttccaaggtgctattgggagctcatgcactcttggccaacgggtctgtgatgtcacgggtagggacagcacagttagccctggtggctcgagcccataatgtaccagtgctggtttgctgtgaaacatacaagttctgtgagcgtgtgcagactgatgcctttgtctctaatgagctagatgaccctgatgatctgcaatgtaagcggggagaacatgttgcgctggctaactggcagaaccacgcatccctacggttgttgaatctagtctatgatgtgactcccccagagcttgtggatctggtgatcacggagctggggatgatcccttgcagttctgtacctgttgttctacgagtcaagagcagtgaccagtgacgggggaaacacagggttaataaatgccatactccctaccctcagcaa

SEQ ID NO: 56031 - DNA, 2079 bp, Homo sapiens
cacgcgtcgcccacgcgtcgggctgctgtggccgtggctgttcgcgaggactcgggatccgggatgaaggcggagcttccccctgggcctggggcagtggggagggaaatgaccaaagaagaaaagctgcagcttcggaaggaaaagaaacagcagaagaagaaacggaaggaagaaaagggggcagaaccagagactggctctgctgtatctgcagcccaatgtcaagtaggcccaaccagagaactgccagaatcgggcattcagttgggcactcctcgggagaaagttccagctggtcggagtaaggccgaacttcgggctgagcgtcgagccaagcaggaggccgagcgggccctgaaacaggcaagaaaaggggaacaaggaggaccacctcctaaggccagccccagcacagctggagaaaccccctcaggagtgaagcgtctccctgagtaccctcaggttgatgacctacttctgagaaggcttgttaaaaaaccagagcgtcaacaggttcctacacgaaaggattatggatccaaagtcagtctcttctctcacctaccccagtacagcagacaaaactctctgacccagtttatgagcatcccatcctctgtgatccacccagccatggtgcgactcggcctgcagtactcccagggcctggtcagtggctccaatgcccggtgtattgccctgcttcgtgccttgcagcaggtgattcaggattacacaacaccgcctaatgaagaactctccagggatctagtgaataaactaaaaccctacatgaggtagggacaacactataagtccactcccagctcgcccaatctttgtcttgtactctttttcctgcttttctatctctcttttcattttgtgttctattttctttttaaagactttttttttaaatgtgaaggctttgtaagttgtgaagagttgcgcagatataaggtattgctgttgtattatagcttcctgactcagtgccgtcccctgtcagcgagcatgcacaacgccatcaagttccttaacaaggaaatcaccagtgtgggcagttccaagcgggaagaggaggtgatgagtatgagaaataaggaaggcatgcacctgtgggtaaaattaagaaacatgttaaaaactcccgggaaggccaacgtaagcctttttttgccctagtcaagggttaaggaatggtttggccattctgacttgtgccatctctgagccctctataggcttgtcatcatacacatattcaagcacctggcatgatcatcagagggataaaagtgtccatttcttgttcactaaggattttactccatttaggccaagtcagaacttcgagcagccattgatcggtatgtgcaagagaagattgtgctagcagctcaggcaatttcacgctttgcttaccagaagatcagtaatggagatgtgatcctggtatatggatgctcatctctggtatcacgaattcttcaggaggcttggacagagggccggcggtttcgggtggtagtggtggacagccggccatggctggaaggaaggcacacactacgttctctagtccatgctggtgtcccagcctcctacctgctgattcctgcagcctcctatgtgctcccagaggtttccaaggtgctattgggagctcatgcactcttggccaacgggtctgtgatgtcacgggtagggacagcacagttagccctggtggctcgagcccataatgtaccagtgctggtttgctgtgaaacatacaagttctgtgagcgtgtgcagactgatgcctttgtctctaatgagctagatgaccctgatgatctgcaatgtaagcggggagaacatgttgcgctggctaactggcagaaccacgcatccctacggttgttgaatctagtctatgatgtgactcccccagagcttgtggatctggtgatcacggagctggggatgatcccttgcagttctgtacctgttgttctacgagtcaagagcagtgaccagtgacgggggaaacacagggttaataaatgccatactccctaccctcagcaa

SEQ ID NO: 56032 - DNA, 2123 bp, Homo sapiens
cacgcgtcgcccacgcgtcgggctgctgtggccgtggctgttcgcgaggactcgggatccgggatgaaggcggagcttccccctgggcctggggcagtggggagggaaatgaccaaagaagaaaagctgcagcttcggaaggaaaagaaacagcagaagaagaaacggaaggaagaaaagggggcagaaccagagactggctctgctgtatctgcagcccaatgtcaagtaggcccaaccagagaactgccagaatcgggcattcagttgggcactcctcgggagaaagttccagctggtcggagtaaggccgaacttcgggctgagcgtcgagccaagcaggaggccgagcgggccctgaaacaggcaagaaaaggggaacaaggaggaccacctcctaaggccagccccagcacagctggagaaaccccctcaggagtgaagcgtctccctgagtaccctcaggttgatgacctacttctgagaaggcttgttaaaaaaccagagcgtcaacaggttcctacacgaaaggattatggatccaaagtcagtctcttctctcacctaccccagtacagcagacaaaactctctgacccagtttatgagcatcccatcctctgtgatccacccagccatggtgcgactcggcctgcagtactcccagggcctggtcagtggctccaatgcccggtgtattgccctgcttcgtgccttgcagcaggtgattcaggattacacaacaccgcctaatgaagaactctccagggatctagtgaataaactaaaaccctacatgagcttcctgactcagtgccgtcccctgtcagcgagcatgcacaacgccatcaagttccttaacaaggaaatcaccagtgtgggcagttccaagcgggaagaggaggccaagtcagaacttcgagcagccattgatcggtatgtgcaagagaagattgtgctagcagctcaggcaatttcacgctttgcttaccagaagatcagtaatggagatgtgatcctggtatatggatgctcatctctggtatcacgaattcttcaggaggcttggacagagggccggcggtttcgggtggtagtggtggacagccggccatggctggaaggaaggcacacactacgttctctagtccatgctggtgtcccagcctcctacctgctgattcctgcagcctcctatgtgctcccagaggtttccaaggtgctattgggagctcatgcactcttggccaacgggtctgtgatgtcacgggtagggacagcacagttagccctggtggctcgagcccataatgtaccagtgctggtttgctgtgaaacatacaagttctgtgagcgtgtgcagactgatgcctttgtctctaatgagctagatgaccctgatgatctgcaatgtaagcggggagaacatgttgcgctggctaactggcagaaccacgcatccctacggttgttgaatctagtctatgatgtgactcccccagagcttgtggatctggtgatcacggagctggggatgatcccttgcagttctgtacctgttgttctacgagtcaagagcagtgaccagtgacgggggaaacacagggttaataaatgccatactccctaccctcagcaaactctgctgcctttgtttctcttttagcatctccaccacttaagttaggagtccagacttcacaaccccttttatcacctgctactcagacctttgtgaagacctgctcaagtaactagctccatgccagtacattgggactaacctgaagacccgtataaagaaccaaaactacccaaatcaatcattcactgagcatctacatgccagacactaaactgggtgtgaggaggaatatgaaaacaaatagtcctgggctgagtgcagtgactcattcctgtaatctcagcattttgggaggctaaggcaggaggattgtttgagcccagaggtttgagaccagcctgggcaacatggcaatccggtctctacaaaaaataaaaattagctgggcatggttgtgctcatctgttgttccagctactcaggaggctgaagccagaggattgcttgagtccaggaggtagaggctgcagtaagccatg

SEQ ID NO: 56033 - DNA, 1724 bp, Homo sapiens
cacgcgtcgcccacgcgtcgggctgctgtggccgtggctgttcgcgaggactcgggatccgggatgaaggcggagcttccccctgggcctggggcagtggggagggaaatgaccaaagaagaaaagctgcagcttcggaaggaaaagaaacagcagaagaagaaacggaaggaagaaaagggggcagaaccagagactggctctgctgtatctgcagcccaatgtcaagtaggcccaaccagagaactgccagaatcgggcattcagttgggcactcctcgggagaaagttccagctggtcggagtaaggccgaacttcgggctgagcgtcgagccaagcaggaggccgagcgggccctgaaacaggcaagaaaaggggaacaaggaggaccacctcctaaggccagccccagcacagctggagaaaccccctcaggagtgaagcgtctccctgagtaccctcaggttgatgacctacttctgagaaggcttgttaaaaaaccagagcgtcaacaggttcctacacgaaaggattatggatccaaagtcagtctcttctctcacctaccccagtacagcagacaaaactctctgacccagtttatgagcatcccatcctctgtgatccacccagccatggtgcgactcggcctgcagtactcccagggcctggtcagtggctccaatgcccggtgtattgccctgcttcgtgccttgcagcaggtgattcaggattacacaacaccgcctaatgaagaactctccagggatctagtgaataaactaaaaccctacatgagcttcctgactcagtgccgtcccctgtcagcgagcatgcacaacgccatcaagttccttaacaaggaaatcaccagtgtgggcagttccaagcgggaagaggaggccaagtcagaacttcgagcagccattgatcggtatgtgcaagagaagattgtgctagcagctcaggcaatttcacgctttgcttaccagaagatcagtaatggagatgtgatcctggtatatggatgctcatctctggtatcacgaattcttcaggaggcttggacagagggccggcggtttcgggtggtagtggtggacagccggccatggctggaaggaaggcacacactacgttctctagtccatgctggtgtcccagcctcctacctgctgattcctgcagcctcctatgtgctcccagaggtttccaaggtgctattgggagctcatgcactcttggccaacgggtctgtgatgtcacgggtagggacagcacagttagccctggtggctcgagcccataatgtaccagtgctggtttgctgtgaaacatacaagttctgtgagcgtgtgcagactgatgcctttgtctctaatgagctagatgaccctgatgatctgcaatgtaagcggggagaacatgttgcgctggctaactggcagaaccacgcatccctacggttgttgaatctagtctatgatgtgactcccccagagcttgtggatctggtgatcacggagctggggatgatcccttgcagttctgtacctgttgttctacgagtcaagagcagtgaccagtgacgggggaaacacagggttaataaatgccatactccctaccctcagcaaaaaaaaagaaaaacgataacagatagagaaacgaggacatgtacagagctcgagaaagtactagtgggcacgtgggccgtgcacct

SEQ ID NO: 56034 - DNA, 2022 bp, Homo sapiens
agtccgattggggctgcgcgcttcgcttctgcggctcagcctccagcccaggtggcgctgtggaccctgcagccgcggagcgaggcagcggggcggctccgtgaccacggcgggcggagcctaggactgagggcgatggctgctgtggccgtggctgttcgcgagggtgagtgaagagccgggcctgcctactggtacgcggagccgacgagctccggacagctagtgccgggccttgagcgcctttgggccccgccgctccgttccagcgccacgctgggctccggtctacacagtctcgagcgcagtcccgcgccgcgcaccggctggttgctgtgaggagggtcggtgacccctccattcctttgatccgccgcgcagtgcgtccccacgcggatccctggctcgcctcgcgcctgccggcggatccgtggtcatgccaacccagcagccggctgcgccgagtactcgtgcccccaaaccctcccggagtctctctggctcactttgtgccctgttttctgatgcagactcgggatccgggatgaaggcggagcttccccctgggcctggggcagtggggagggaaatgaccaaagaagaaaagctgcagcttcggaaggaaaagaaacagcagaagaagaaacggaaggaagaaaagggggcagaaccagagactggctctgctgtatctgcagcccaatgtcaagtaggcccaaccagagaactgccagaatcgggcattcagttgggcactcctcgggagaaagttccagctggtcggagtaaggccgaacttcgggctgagcgtcgagccaagcaggaggccgagcgggccctgaaacaggagtgaagcgtctccctgagtaccctcaggttgatgacctacttctgagaaggcttgttaaaaaaccagagcgtcaacaggttcctacacgaaaggattatggatccaaagtcagtctcttctctcacctaccccagtacagcagacaaaactctctgacccagtttatgagcatggtgcgactcggcctgcagtactcccagggcctggtcagtggctccaatgcccggtgtattgccctgcttcgtgccttgcagcaggtgattcaggattacacaacaccgcctaatgaagaactctccagggatctagtgaataaactaaaaccctacatgagcttcctgactcagtgccgtcccctgtcagcgagcatgcacaacgccatcaagttccttaacaaggaaatcaccagtgtgggcagttccaagcgggaagaggaggccaagtcagaacttcgagcagccattgatcggtatgtgcaagagaagattgtgctagcagctcaggcaatttcacgctttgcttaccagaagatcagtaatggagatgtgatcctggtatatggatgctcatctctggtatcacgaattcttcaggaggcttggacagagggccggcggtttcgggtggtagtggtggacagccggccatggctggaaggaaggcacacactacgttctctagtccatgctggtgtcccagcctcctacctgctgattcctgcagcctcctatgtgctcccagaggtttccaaggtgctattgggagctcatgcactcttggccaacgggtctgtgatgtcacgggtagggacagcacagttagccctggtggctcgagcccataatgtaccagtgctggtttgctgtgaaacatacaagttctgtgagcgtgtgcagactgatgcctttgtctctaatgagctagatgaccctgatgatctgcaatgtaagcggggagaacatgttgcgctggctaactggcagaaccacgcatccctacggttgttgaatctagtctatgatgtgactcccccagagcttgtggatctggtgatcacggagctggggatgatcccttgcagttctgtacctgttgttctacgagtcaagagcagtgaccagtgacgggggaaacacagggttaataaatgccatactccctaccctcagcaa

SEQ ID NO: 56035 - DNA, 2762 bp, Homo sapiens
agtccgattggggctgcgcgcttcgcttctgcggctcagcctccagcccaggtggcgctgtggaccctgcagccgcggagcgaggcagcggggcggctccgtgaccacggcgggcggagcctaggactgagggcgatggctgctgtggccgtggctgttcgcgagggtgagtgaagagccgggcctgcctactggtacgcggagccgacgagctccggacagctagtgccgggccttgagcgcctttgggccccgccgctccgttccagcgccacgctgggctccggtctacacagtctcgagcgcagtcccgcgccgcgcaccggctggttgctgtgaggagggtcggtgacccctccattcctttgatccgccgcgcagtgcgtccccacgcggatccctggctcgcctcgcgcctgccggcggatccgtggtcatgccaacccagcagccggctgcgccgagtactcgtgcccccaaaccctcccggagtctctctggctcactttgtgccctgttttctgatgcagactcgggatccgggatgaaggcggagcttccccctgggcctggggcagtggggagggaaatgaccaaagaagaaaagctgcagcttcggaaggaaaagaaacagcagaagaagaaacggaaggaagaaaagggggcagaaccagagactggctctgctgtatctgcagcccaatgtcaagtaggcccaaccagagaactgccagaatcgggcattcagttgggcactcctcgggagaaagttccagctggtcggagtaaggccgaacttcgggctgagcgtcgagccaagcaggaggccgagcgggccctgaaacaggcaagaaaaggggaacaaggaggaccacctcctaaggccagccccagcacagctggagaaaccccctcaggagtgaagcgtctccctgagtaccctcaggttgatgacctacttctgagaaggcttgttaaaaaaccagagcgtcaacaggttcctacacgaaaggattatggatccaaagtcagtctcttctctcacctaccccagtacagcagacaaaactctctgacccagtttatgagcatcccatcctctgtgatccacccagccatggtgcgactcggcctgcagtactcccagggcctggtcagtggctccaatgcccggtgtattgccctgcttcgtgccttgcagcaggtatgtcccatcctgttctctcttatgatccaaccccacctcccccaatactaccccagcttctgtcacccaaggtcatctctgggggacagagggaatactcctaccctcagaacattttcctcagtgaagcttacccccagcccccgttcagagatctttattaaggggtattttgcagatcaccttgtgtaccctataggtgattcaggattacacaacaccgcctaatgaagaactctccagggatctagtgaataaactaaaaccctacatgaggtagggacaacactataagtccactcccagctcgcccaatctttgtcttgtactctttttcctgcttttctatctctcttttcattttgtgttctattttctttttaaagactttttttttaaatgtgaaggctttgtaagttgtgaagagttgcgcagatataaggtattgctgttgtattatagcttcctgactcagtgccgtcccctgtcagcgagcatgcacaacgccatcaagttccttaacaaggaaatcaccagtgtgggcagttccaagcgggaagaggaggtgatgagtatgagaaataaggaaggcatgcacctgtgggtaaaattaagaaacatgttaaaaactcccgggaaggccaacgtaagcctttttttgccctagtcaagggttaaggaatggtttggccattctgacttgtgccatctctgagccctctataggcttgtcatcatacacatattcaagcacctggcatgatcatcagagggataaaagtgtccatttcttgttcactaaggattttactccatttaggccaagtcagaacttcgagcagccattgatcggtatgtgcaagagaagattgtgctagcagctcaggcaatttcacgctttgcttaccagaagatcagtaatggagatgtgatcctggtatatggatgctcatctctggtatcacgaattcttcaggaggcttggacagagggccggcggtttcgggtggtagtggtggacagccggccatggctggaaggaaggcacacactacgttctctagtccatgctggtgtcccagcctcctacctgctgattcctgcagcctcctatgtgctcccagaggtttccaaggtgctattgggagctcatgcactcttggccaacgggtctgtgatgtcacgggtagggacagcacagttagccctggtggctcgagcccataatgtaccagtgctggtttgctgtgaaacatacaagttctgtgagcgtgtgcagactgatgcctttgtctctaatgagctagatgaccctgatgatctgcaatgtaagcggggagaacatgttgcgctggctaactggcagaaccacgcatccctacggttgttgaatctagtctatgatgtgactcccccagagcttgtggatctggtgatcacggagctggggatgatcccttgcagttctgtacctgttgttctacgagtcaagagcagtgaccagtgacgggggaaacacagggttaataaatgccatactccctaccctcagcaa

SEQ ID NO: 56036 - DNA, 2576 bp, Homo sapiens
agtccgattggggctgcgcgcttcgcttctgcggctcagcctccagcccaggtggcgctgtggaccctgcagccgcggagcgaggcagcggggcggctccgtgaccacggcgggcggagcctaggactgagggcgatggctgctgtggccgtggctgttcgcgagggtgagtgaagagccgggcctgcctactggtacgcggagccgacgagctccggacagctagtgccgggccttgagcgcctttgggccccgccgctccgttccagcgccacgctgggctccggtctacacagtctcgagcgcagtcccgcgccgcgcaccggctggttgctgtgaggagggtcggtgacccctccattcctttgatccgccgcgcagtgcgtccccacgcggatccctggctcgcctcgcgcctgccggcggatccgtggtcatgccaacccagcagccggctgcgccgagtactcgtgcccccaaaccctcccggagtctctctggctcactttgtgccctgttttctgatgcagactcgggatccgggatgaaggcggagcttccccctgggcctggggcagtggggagggaaatgaccaaagaagaaaagctgcagcttcggaaggaaaagaaacagcagaagaagaaacggaaggaagaaaagggggcagaaccagagactggctctgctgtatctgcagcccaatgtcaagtaggcccaaccagagaactgccagaatcgggcattcagttgggcactcctcgggagaaagttccagctggtcggagtaaggccgaacttcgggctgagcgtcgagccaagcaggaggccgagcgggccctgaaacaggcaagaaaaggggaacaaggaggaccacctcctaaggccagccccagcacagctggagaaaccccctcaggagtgaagcgtctccctgagtaccctcaggttgatgacctacttctgagaaggcttgttaaaaaaccagagcgtcaacaggttcctacacgaaaggattatggatccaaagtcagtctcttctctcacctaccccagtacagcagacaaaactctctgacccagtttatgagcatcccatcctctgtgatccacccagccatggtgcgactcggcctgcagtactcccagggcctggtcagtggctccaatgcccggtgtattgccctgcttcgtgccttgcagcaggtatgtcccatcctgttctctcttatgatccaaccccacctcccccaatactaccccagcttctgtcacccaaggtcatctctgggggacagagggaatactcctaccctcagaacattttcctcagtgaagcttacccccagcccccgttcagagatctttattaaggggtattttgcagatcaccttgtgtaccctataggtgattcaggattacacaacaccgcctaatgaagaactctccagggatctagtgaataaactaaaaccctacatgagcttcctgactcagtgccgtcccctgtcagcgagcatgcacaacgccatcaagttccttaacaaggaaatcaccagtgtgggcagttccaagcgggaagaggaggtgatgagtatgagaaataaggaaggcatgcacctgtgggtaaaattaagaaacatgttaaaaactcccgggaaggccaacgtaagcctttttttgccctagtcaagggttaaggaatggtttggccattctgacttgtgccatctctgagccctctataggcttgtcatcatacacatattcaagcacctggcatgatcatcagagggataaaagtgtccatttcttgttcactaaggattttactccatttaggccaagtcagaacttcgagcagccattgatcggtatgtgcaagagaagattgtgctagcagctcaggcaatttcacgctttgcttaccagaagatcagtaatggagatgtgatcctggtatatggatgctcatctctggtatcacgaattcttcaggaggcttggacagagggccggcggtttcgggtggtagtggtggacagccggccatggctggaaggaaggcacacactacgttctctagtccatgctggtgtcccagcctcctacctgctgattcctgcagcctcctatgtgctcccagaggtttccaaggtgctattgggagctcatgcactcttggccaacgggtctgtgatgtcacgggtagggacagcacagttagccctggtggctcgagcccataatgtaccagtgctggtttgctgtgaaacatacaagttctgtgagcgtgtgcagactgatgcctttgtctctaatgagctagatgaccctgatgatctgcaatgtaagcggggagaacatgttgcgctggctaactggcagaaccacgcatccctacggttgttgaatctagtctatgatgtgactcccccagagcttgtggatctggtgatcacggagctggggatgatcccttgcagttctgtacctgttgttctacgagtcaagagcagtgaccagtgacgggggaaacacagggttaataaatgccatactccctaccctcagcaa

SEQ ID NO: 56037 - DNA, 937 bp, Homo sapiens
cggacgcgtgggtccggacgcgtgggtccggacgcgtgggtccggacgcgtgggtcgacccacgcgtccgctagtgaataaactaaaaccctacatgagcttcctgactcagtgccgtcccctgtcagcgagcatgcacaacgccatcaagttccttaacaaggaaatcaccagtgtgggcagttccaagcgggaagaggaggccaagtcagaacttcgagcagccattgatcggtatgtgcaagagaagattgtgctagcagctcaggcaatttcacgctttgcttaccagaagatcagtaatggagatgtgatcctggtatatggatgctcatctctggtatcacgaattcttcaggaggcttggacagagggccggcggtttcgggtggtagtggtggacagccggccatggctggaaggaaggcacacactacgttctctagtccatgctggtgtcccagcctcctacctgctgattcctgcagcctcctatgtgctcccagaggtttccaaggtgctattgggagctcatgcactcttggccaacgggtctgtgatgtcacgggtagggacagcacagttagccctggtggctcgagcccataatgtaccagtgctggtttgctgtgaaacatacaagttctgtgagcgtgtgcagactgatgcctttgtctctaatgagctagatgaccctgatgatctgcaatgtaagcggggagaacatgttgcgctggctaactggcagaaccacgcatccctacggttgttgaatctagtctatgatgtgactcccccagagcttgtggatctggtgatcacggagctggggatgatcccttgcagttctgtacctgttgttctacgagtcaagagcagtgaccagtgacgggggaaacacagggttaataaatgccatactccctaccctcagcaa

SEQ ID NO: 56038 - DNA, 1730 bp, Homo sapiens
  misc_feature (1585)..(1585): n is a, c, g, or t
cacgcgtcgcccacgcgtcgggctgctgtggccgtggctgttcgcgaggactcgggatccgggatgaaggcggagcttccccctgggcctggggcagtggggagggaaatgaccaaagaagaaaagctgcagcttcggaaggaaaagaaacagcagaagaagaaacggaaggaagaaaagggggcagaaccagagactggctctgctgtatctgcagcccaatgtcaagtaggcccaaccagagaactgccagaatcgggcattcagttgggcactcctcgggagaaagttccagctggtcggagtaaggccgaacttcgggctgagcgtcgagccaagcaggaggccgagcgggccctgaaacaggcaagaaaaggggaacaaggaggaccacctcctaaggccagccccagcacagctggagaaaccccctcaggagtgaagcgtctccctgagtaccctcaggttgatgacctacttctgagaaggcttgttaaaaaaccagagcgtcaacaggttcctacacgaaaggattatggatccaaagtcagtctcttctctcacctaccccagtacagcagacaaaactctctgacccagtttatgagcatcccatcctctgtgatccacccagccatggtgcgactcggcctgcagtactcccagggcctggtcagtggctccaatgcccggtgtattgccctgcttcgtgccttgcagcaggtgattcaggattacacaacaccgcctaatgaagaactctccagggatctagtgaataaactaaaaccctacatgagcttcctgactcagtgccgtcccctgtcagcgagcatgcacaacgccatcaagttccttaacaaggaaatcaccagtgtgggcagttccaagcgggaagaggaggccaagtcagaacttcgagcagccattgatcggtatgtgcaagagaagattgtgctagcagctcaggcaatttcacgctttgcttaccagaagatcagtaatggagatgtgatcctggtatatggatgctcatctctggtatcacgaattcttcaggaggcttggacagagggccggcggtttcgggtggtagtggtggacagccggccatggctggaaggaaggcacacactacgttctctagtccatgctggtgtcccagcctcctacctgctgattcctgcagcctcctatgtgctcccagaggtaagtacagaggaaaaggactccaaagttggcggtgaaaaggtgtagtagtatagacataatctcaccttcccaaagttaaacagttttgtttttgttttgagataaggatggagtgcagcgacgtgatcacagctcgctgcagtcttgacctcctgggctcaggtgatcttcccgcctccgcctctgagtggctgggactactggtgtgtgccaccatgcccagctagttttttatttttcttgtagagatgggatatcgctacattgcccaggctggaactcctgggctcaagcagttccccctgtctcggcctcccaaagtactgggatcataggcatgagccactgtgcccagccacaattatttaaaaantattagaattatatagccctggcttggtgccatggctcaatgcctgcaatctcagcactaaggcaggaggatcacttgagcccaggagttcaagaccagcctgtcaacataatgagacctgtacacacacacacacacacacaca

SEQ ID NO: 56039 - DNA, 1503 bp, Homo sapiens
cacgcgtcgcccacgcgtcgggctgctgtggccgtggctgttcgcgaggactcgggatccgggatgaaggcggagcttccccctgggcctggggcagtggggagggaaatgaccaaagaagaaaagctgcagcttcggaaggaaaagaaacagcagaagaagaaacggaaggaagaaaagggggcagaaccagagactggctctgctgtatctgcagcccaatgtcaagtaggcccaaccagagaactgccagaatcgggcattcagttgggcactcctcgggagaaagttccagctggtcggagtaaggccgaacttcgggctgagcgtcgagccaagcaggaggccgagcgggccctgaaacaggcaagaaaaggggaacaaggaggaccacctcctaaggccagccccagcacagctggagaaaccccctcaggagtgaagcgtctccctgagtaccctcaggttgatgacctacttctgagaaggcttgttaaaaaaccagagcgtcaacaggttcctacacgaaaggattatggatccaaagtcagtctcttctctcacctaccccagtacagcagacaaaactctctgacccagtttatgagcatcccatcctctgtgatccacccagccatggtgcgactcggcctgcagtactcccagggcctggtcagtggctccaatgcccggtgtattgccctgcttcgtgccttgcagcaggtgattcaggattacacaacaccgcctaatgaagaactctccagggatctagtgaataaactaaaaccctacatgaggtagggacaacactataagtccactcccagctcgcccaatctttgtcttgtactctttttcctgcttttctatctctcttttcattttgtgttctattttctttttaaagactttttttttaaatgtgaaggctttgtaagttgtgaagagttgcgcagatataaggtattgctgttgtattatagcttcctgactcagtgccgtcccctgtcagcgagcatgcacaacgccatcaagttccttaacaaggaaatcaccagtgtgggcagttccaagcgggaagaggaggtgatgagtatgagaaataaggaaggcatgcacacctgtgatctcagcacttgggaaagccaagggtgggaagatcatgggaggattgcttgaagctaggagttcaagaccagccggggcaacgtagcgagacccatctctaccaaaaaaaaaaaccctacttgggggataaaggataatggggtactccgggattgggaggcaatcaggggacagcatggaagaatgtgtgctcgggcccggataagagatggggacatcattccagtacactagttgggatgggcccaagggtctcttcacagacgcttctggtaagccagagtgggacccttggtaacataccttatgatacgaatggtttcaagaataaatggttttcaccagtgtgttacacaaaaaacaaaaacaagg

SEQ ID NO: 56040 - DNA, 428 bp, Homo sapiens
ccagagaatcgagccggtaccggcatgtgctcttggccaacgggtctgtgatgtcacgggtagggacagcacagttagccctggtggctcgagcccataatgtaccagtgctggtttgctgtgaaacatacaagttctgtgagcgtgtgcagactgatgcctttgtctctaatgagctagatgaccctgatgatctgcaatgtaagcggggagaacatgttgcgctggctaactggcagaaccacgcatccctacggttgttgaatctagtctatgatgtgactcccccagagcttgtggatctggtgatcacggagctggggatgatcccttgcagttctgtacctgttgttctacgagtcaagagcagtgaccagtgacgggggaaacacagggttaataaatgccatactccctaccctcagcaa

SEQ ID NO: 56041 - DNA, 965 bp, Homo sapiens
  misc_feature (926)..(926): n is a, c, g, or t
  misc_feature (933)..(933): n is a, c, g, or t
  misc_feature (953)..(953): n is a, c, g, or t
agtccgattggggctgcgcgcttcgcttctgcggctcagcctccagcccaggtggcgctgtggaccctgcagccgcggagcgaggcagcggggcggctccgtgaccacggcgggcggagcctaggactgagggcgatggctgctgtggccgtggctgttcgcgagggtgagtgaagagccgggcctgcctactggtacgcggagccgacgagctccggacagctagtgccgggccttgagcgcctttgggccccgccgctccgttccagcgccacgctgggctccggtctacacagtctcgagcgcagtcccgcgccgcgcaccggctggttgctgtgaggagggtcggtgacccctccattcctttgatccgccgcgcagtgcgtccccacgcggatccctggctcgcctcgcgcctgccggcggatccgtggtcatgccaacccagcagccggctgcgccgagtactcgtgcccccaaaccctcccggagtctctctggctcactttgtgccctgttttctgatgcagactcgggatccgggatgaaggcggagcttccccctgggcctggggcagtggggagggaaatgaccaaagaagaaaagctgcagcttcggaaggaaaagaaacagcagaagaagaaacggaaggaagaaaagggggcagaaccagagactggctctgctgtatctgcagcccaatgtcaagtaggcccaaccagagaactgccagaatcgggcattcagttgggcactcctcgggagaaagttccagctggtcggagtaaggccgaacttcgggctgagcgtcgagccaagcaggaggccgagcgggccctgaaacaggcaagaaaaggggaacaaggaggaccacctcctaaggccagccccagcacagctggagaaaccccctcagccttaaggnagttaangggttcttccctttaagttnccctttaaggtt

SEQ ID NO: 56042 - DNA, 1292 bp, Homo sapiens
agtccgattggggctgcgcgcttcgcttctgcggctcagcctccagcccaggtggcgctgtggaccctgcagccgcggagcgaggcagcggggcggctccgtgaccacggcgggcggagcctaggactgagggcgatggctgctgtggccgtggctgttcgcgagggtgagtgaagagccgggcctgcctactggtacgcggagccgacgagctccggacagctagtgccgggccttgagcgcctttgggccccgccgctccgttccagcgccacgctgggctccggtctacacagtctcgagcgcagtcccgcgccgcgcaccggctggttgctgtgaggagggtcggtgacccctccattcctttgatccgccgcgcagtgcgtccccacgcggatccctggctcgcctcgcgcctgccggcggatccgtggtcatgccaacccagcagccggctgcgccgagtactcgtgcccccaaaccctcccggagtctctctggctcactttgtgccctgttttctgatgcagactcgggatccgggatgaaggcggagcttccccctgggcctggggcagtggggagggaaatgaccaaagaagaaaagctgcagcttcggaaggaaaagaaacagcagaagaagaaacggaaggaagaaaagggggcagaaccagagactggctctgctgtatctgcagcccaatgtcaagtaggcccaaccagagaactgccagaatcgggcattcagttgggcactcctcgggagaaagttccagctggtcggagtaaggccgaacttcgggctgagcgtcgacccataatgtaccagtgctggtttgctgtgaaacatacaagttctgtgagcgtgtgcagactgatgcctttgtctctaatgagctagatgaccctgatgatctgcaatgtaagcggggagaacatgttgcgctggctaactggcagaaccacgcatccctacggttgttgaatctagtctatgatgtgactcccccagagcttgtggatctggtgatcacggagctggggatgatcccttgcagttctgtacctgttgttctacgagtcaagagcagtgaccagtgacgggggaaacacagggttaataaatgccatactccctaccctcagcaaaaaaaaaaaaaaaataaaaaaaatccgggggttttattgggggggggaaaaaggggtataaaaggggccgggcattgttttccgacccctttttgtaaggggaaatgcggggcccaaaggagggatataataaagcggatctt

SEQ ID NO: 56043 - DNA, 390 bp, Homo sapiens
gtggaggaataaacactttgttcaacttttttggttaagaaaagcagctgaggatccaattctcagctccttctctgatctcagagtgagaatagcccagaatggagatgtttgttcaaaagagttaaatttcctttgtataataaagtaacagtaatcagatattttcagggagaggtggagggcagtagagagatggagggaaaggattggggaaagggagaaatggctgcaggcagggctctgggaggcagagcagccaggaaaaagggtgctgggcacgctagtgtgacgattttcagcacttcctggtccgagtggtgctgtcacaatcctatgttgccctgacctttagttaaagtcttccaggcaaaatgaccttaagtcctg

SEQ ID NO: 56044 - DNA, 207 bp, Homo sapiens
tataaggacaggaaatgtcaaatgacttacccagaatctcacggataatcattatgggatttgaactttaaacctaggtctttcttattccactacgtctccacactgccatataacacacagttccaacaccaaaggaacttcagagctatctggagaggtgtgatgtgaaccaagtaagtttcagtgtgttccctggagaatgag

SEQ ID NO: 56045 - DNA, 633 bp, Homo sapiens
actaatttccgtttcagaatctacttcccagggaatccaacctgtgatgccccttgagaaaaactatacctggaggattagaatgtgtgtcccctgtggccagcagccacgaggaggaagggtggcagaaactagcatgcccagtttgtcctttccaaatttacaaatcataggtcattccaccttccctgagatagaatggttaagtatgtggacatatgccaggatttacaccacctgtgtttcttcaataaagtgggaaacattgagataatatccagtgatattaaggagctagattcactaggaataaatgtattagatatagttgaggaaaaatagcgccagtcaagaattaccgatgggtcttaggtaactgagtaggtggtagtgtcgtttaccgagattaaaaaaacaagcctggagggatctatgagtttcatttgaaatgcctttgggatgtcaaagcaacttgttcactaggcaattaaagatataaatctggagtccaggaacatgacctagagaactgatatgaatgtatatacatacctatcagcatacacccagtaatgactggtatcccgcaaggccgacagatataacttagggaacagaagtcagttaaaaaaa

SEQ ID NO: 56046 - DNA, 120 bp, Homo sapiens
cttttcctcataatgacttacctatgcaccaaattgatacttttataactatcttttattactgtccttagaagaaaattgtttccctttgaatgatatttcagaaggatttttttgaag

SEQ ID NO: 56047 - DNA, 380 bp, Homo sapiens
gccaatatgaactttaatagggaaagatgtaaagaaaaatgtcagttctctccaaattaatctctgtattcagtgtacttccagtcataattacaaggaaatttttcatggatcttgaaaaactgattgtaaaattgatatagacaagtaaatactcaagaataatcaagagaaccctagaaaaatgtattgcatctgacagcaagatttactacaaaatcataataggacagtatgggtttgatgctaggatggacaattaggtcagtggagcgtaatgggaaagcccagaaacacattgagatccttgtgaaattttaatatataggaaagagacccctacaaatcaacatttatttaataatactgagtgagcctct

SEQ ID NO: 56048 - DNA, 300 bp, Homo sapiens
attctttgtgcgtgtgtgtgtgtgtgtgtgtgtgtgtgttttgctgtggagttgagtttctttgtaaattctggatattagtttcttgttagatgaatagtttgtgaatatgttctcccattcaacaggttgcctcttcattctgttgattgtttcctttgatgtgcaaaaactttttactttaatatagttctatttgtttaattctgtttttcttacccatgcttctgagatcttagccataaaatgtttgcctagaacaatgccctggagtgtttcccctgagttttcttctggtag

SEQ ID NO: 56049 - DNA, 1122 bp, Homo sapiens
aaatctagatggtatagctttgtacacacccaggccatatggtatggcctattgctcataggctataaacctgtacaacctgttactgtactggacactgtaggcaactgtaacacaacagtaaatatttgtgtatttaagcatatctaaacctggaaaagtatcaggaaaaatgtggcataaaagctccattataatatgggtccactgtcatatgtgtggctcattgttgactgaaatgtcattttgttgcaaataatgatactatcacattgatgattaagttttaacatatgaattttgtgtgtgggggtgacacattcagaccatagtacccagcaacaattaatgtatgaatagacaaaataaatgtagtatatcctttcaatggaatgttatccaaccataaaaaagaataagttactggtatatgctgtaatatggatgaaccttaaaaacattatgctaaatgaaaaaataagctagatacaaaaggacatatattgtatgattccatttatgttatgtgaaatatttagaatagataaaatcataaagacaaaaggcagattggtgaatgccaggggctgagggagggagaaatgaggagtgactgcttaatgagaatagtgtttctttttggggtgatgaaaacattttggaactagatagaggtgatggttgcccattatgaaatgtactaaatgccactgaattgtacactttaaaatggttagttttatggtatgtgaattttacctcaattttttaaagttcagaaaaaaaaagctttgagtctgtgaaacaaacaaaccccaaaatcaaccaaacaaaaagtaagttaaaaaaattagggatgagtttccaatatgacagtcactggccacatttagttggctgttgagcacaggaaatgtgcctagcccaaactgaggcttgttgtgagtgtgaaatttacactgatcttcaaggctttggtatgaacaaaataatgtaaactaggctggacgcggtgactcatgcctataatcccagcattttgggaggctgaggcaggaggattgcttgaggccagcagtgtgagatcagcctgggcaacatagtgagaccaccatctctacc

SEQ ID NO: 56050 - DNA, 551 bp, Homo sapiens
cccactctctctttccggtgtggagtctggagacgacgtgcagtgcagaaatggcacctcgaaaggggaaggaaaagaaggaagaacaggtcatcagcctcggacctcaggtggctgaaggagagaatgtatttggtgtctgccatatctttgcatccttcaatgacacttttgtccatgtcactgatctttctggcaaggaaaccatctgccgtgtgactggtgggatgaaggtaaaggcagaccgagatgaatcctcaccatatgctgctatgttggctgcccaggatgtggcccagaggtgcaaggagctgggtatcaccgccctacacatcaaactccgggccacaggaggaaataggaccaagacccctggacctggggcccagtcggccctcagagcccttgcccgctcgggtatgaagatcgggcggattgaggatgtcacccccatcccctctgacagcactcgcaggaaggggggtcgccgtggtcgccgtctgtgaacaagattcctcaaaatattttctgttaataaattgccttcatgt

SEQ ID NO: 56051 - DNA, 2735 bp, Homo sapiens
ttaccatttatttgcagaattaacagtataataaactgctctacaagattttctatcaaggagtatttagaagagagatataaactgtaagcttataaaagtggtttctagagaaagtaagcaataataaaccctctcatataagttaggcatgtatttaaatttataagatacatttcttttgcttgatacaaatctcatcttaaatatacggctaaggaacagaaaaaaattcaaactgagacactcctgtaactctgggaaaattacacttatcaaattttacatataaatttagaatgactaatgaatgtttcagaaatacattaattaccaagatgctctgaaaagtacattactgtacatacagcctgaagttaacctttctatgttaaatgaaaaaactttgtcattcatcaggtcacagaaaccaaaaactaaacaatgcaaaaaaaaaaaaaatctaaaaataaaagaattttatatttgaagttattctggatattcgcaccattttagcttctgaaaaaaatgcaactatgaaatgaagacctcatatattttcatttatcaatataatgttaaaagtttcattccacccggtgtggagtctggagacgacgtgcagaaatggcacctcgaaaggggaaggaaaagaaggaagaacaggtcatcagcctcggacctcaggtggctgaaggagagaatgtatttggtgtctgccatatctttgcatccttcaatgacacttttgtccatgtcactgatctttctggcaaggaaaccatctgccgtgtgactggtgggatgaaggtaaaggcagaccgagatgaatcctcaccatatgctgctatgttggctgcccaggatgtggcccagaggtgcaaggagctgggtatcaccgccctacacatcaaactccgggccacaggaggaaataggaccaagacccctggacctggggcccagtcggccctcagagcccttgcccgctcgggtatgaagatcgggcggattgaggatgtcacccccatcccctctgacagcactcgcaggaaggggggtcgccgtggtcgccgtctgtgaacaagattcctcaaaatattttctgttaataaattgccttcatgtaaactgtttcaactccagccttctctccttcatcaggggctactcaggcatttgatttcttcctcctatttggcttcttgggagaaaggagcctgaggagagctgagatcctggtgctgcatttggggtcttttccatgctacttgcggcattaagttgccttggtcatctaaagcagaccaaggcgttggagacctcgttttgagtggagatgctggttctaaatatggaccaattcttaaagagccagagtgggaactgttgatccaagtgtagcctgaagcgaaagaggagccttccagacccatgccatatataaacacacgtgggtgtgcattctccccccacaccttctgtgcaaagctgggagctcactccactgcgtcttgctttttttcacttggcagatcttggagattgttccacatcagtacataaagtacataaagattgtcaccccacaaatacacaccaagtcctattttcatcagcgataaaaaagaaaagttcttgctttccggaagcttgcatgcggctctgagtacccagtgacaccagatggtactcagcgttttgcaagggattaccacaaggccccgtgatggtgcctgccatggttaggacaggctggtggctgggtagggttagtgagacccagtggagaggatgctgtgtgtcacaggctggagaggtgagaccattgaggtagtcagttgtagaggaaagaaaccagcaagaggggaaaatctgttgggatgctgcttttagcctttgatggcgtgttccaggcagagggaataagcaaataaatgggtcctgagacaaggggttactgtgatgaggcggcgttggttacatgccaaaccttgctagggattttaataacaacattgaatcttaacctgatgaaataacagtactcctggggaggcgggagggatagcattaggagatatacctaatgctaaatgacgagttaatgggtgcagcacaccaacatggcacatgtatacatatgtaacaaacctgcacgttgtgcacatgtaccctaaaacttaaagtataataaaaaaaaaaagcttgcaaaaaaaatataacagtactccttaaattgttaaaagtcatgaaagtcaaggacaggagattaaggaggcgtgaaaactaaatgcccattgtggtatcctggattggattctggaaccagaatagggtattagtataaaaactagtgaaataggataaaggcagggcacagtggttcacgcctataatcccaacactttgggaagccgagacaggaggacggattgagcccaggagtttgagaccagcctgggcaacacagggagaccccgtctctacaaaaaataaaaaattagctgggcatggtggcacacgtctgtactgccagctacttgggaggctgaggtgggagaattgcctgagcctgggaagtggaggccgcagtgagctgtgattgcatcactacattcagcctgggtcacagagcaagatcctatctcaaaaactaaataagtaaataataaattaaaaaatatgaataaagtctggagttaaagtctggaataaagctagtagtaatg

SEQ ID NO: 56052 - DNA, 552 bp, Homo sapiens
  misc_feature (6)..(6): n is a, c, g, or t
  misc_feature (8)..(8): n is a, c, g, or t
  misc_feature (26)..(26): n is a, c, g, or t
aaaccntnggctaggtacgaggctgngtggtgctggagacgacgtgcagaaatggcacctcgaaaggggaaggaaaagaaggaagaacaggtcatcagcctcggacctcaggtggctgaaggagagaatgtatttggtgtctgccatatctttgcatccttcaatgacacttttgtccatgtcactgatctttctggcaaggaaaccatctgccgtgtgactggtgggatgaaggtaaaggcagaccgagatgaatcctcaccatatgctgctatgttggctgcccaggatgtggcccagaggtgcaaggagctgggtatcaccgccctacacatcaaactccgggccacaggaggaaataggaccaagacccctggacctggggcccagtcggccctcagagcccttgcccgctcgggtatgaagatcgggcggattgaggatgtcacccccatcccctctgacagcactcgcaggaaggggggtcgccgtggtcgccgtctgtgaacaagattcctcaaaatattttctgttaataaattgccttcatgt

SEQ ID NO: 56053 - DNA, 565 bp, Homo sapiens
gcctgcggccgctactactactactaaattcgcggccgcgtcgacactggagacgcgtgcagaaatggcacctcgaaaggggaaggaaaagaaggaagaacaggtcatcagcctcggacctcaggtggctgaaggagagaatgtatttggtgtctgccatatctttgcatccttcaatgacacttttgtccatgtcactgatctttctggcaaggaaaccatctgccgtgtgactggtgggatgaaggtaaaggcagaccgagatgaatcctcaccatatgctgctatgttggctgcccaggatgtggcccagaggtgcaaggagctgggtatcaccgccctacacatcaaactccgggccacaggaggaaataggaccaagacccctggacctggggcccagtcggccctcagagcccttgcccgctcgggtatgaagatcgggcggattgaggatgtcacccccatcccctctgacagcactcgcaggaaggggggtcgccgtggtcgccgtctgtgaacaagattcctcaaaatattttctgttaataaattgccttcatgt

SEQ ID NO: 56054 - DNA, 554 bp, Homo sapiens
aattacggctaggtacgaggctgggtggtggagtctggagacgacgtgcagaaatggcacctcgaaaggggaaggaaaagaaggaagaacaggtcatcagcctcggacctcaggtggctgaaggagagaatgtatttggtgtctgccatatctttgcatccttcaatgacacttttgtccatgtcactgatctttctggcaaggaaaccatctgccgtgtgactggtgggatgaaggtaaaggcagaccgagatgaatcctcaccatatgctgctatgttggctgcccaggatgtggcccagaggtgcaaggagctgggtatcaccgccctacacatcaaactccgggccacaggaggaaataggaccaagacccctggacctggggcccagtcggccctcagagcccttgcccgctcgggtatgaagatcgggcggattgaggatgtcacccccatcccctctgacagcactcgcaggaaggggggtcgccgtggtcgccgtctgtgaacaagattcctcaaaatattttctgttaataaattgccttcatgt

SEQ ID NO: 56055 - DNA, 544 bp, Homo sapiens
agacgacagaagggccccgggagtctggagacgacgtgcagaaatggcacctcgaaaggggaaggaaaagaaggaagaacaggtcatcagcctcggacctcaggtggctgaaggagagaatgtatttggtgtctgccatatctttgcatccttcaatgacacttttgtccatgtcactgatctttctggcaaggaaaccatctgccgtgtgactggtgggatgaaggtaaaggcagaccgagatgaatcctcaccatatgctgctatgttggctgcccaggatgtggcccagaggtgcaaggagctgggtatcaccgccctacacatcaaactccgggccacaggaggaaataggaccaagacccctggacctggggcccagtcggccctcagagcccttgcccgctcgggtatgaagatcgggcggattgaggatgtcacccccatcccctctgacagcactcgcaggaaggggggtcgccgtggtcgccgtctgtgaacaagattcctcaaaatattttctgttaataaattgccttcatgt

SEQ ID NO: 56056 - DNA, 567 bp, Homo sapiens
cacgcgtcgccacgcgtcgcggacgcgtgggtcgacccacgcgtcggctggagacgacgtgcagaaatggcacctcgaaaggggaaggaaaagaaggaagaacaggtcatcagcctcggacctcaggtggctgaaggagagaatgtatttggtgtctgccatatctttgcatccttcaatgacacttttgtccatgtcactgatctttctggcaaggaaaccatctgccgtgtgactggtgggatgaaggtaaaggcagaccgagatgaatcctcaccatatgctgctatgttggctgcccaggatgtggcccagaggtgcaaggagctgggtatcaccgccctacacatcaaactccgggccacaggaggaaataggaccaagacccctggacctggggcccagtcggccctcagagcccttgcccgctcgggtatgaagatcgggcggattgaggatgtcacccccatcccctctgacagcactcgcaggaaggggggtcgccgtggtcgccgtctgtgaacaagattcctcaaaatattttctgttaataaattgccttcatgt

SEQ ID NO: 56057 - DNA, 561 bp, Homo sapiens
  misc_feature (7)..(7): n is a, c, g, or t
  misc_feature (21)..(21): n is a, c, g, or t
  misc_feature (48)..(48): n is a, c, g, or t
acccgcncgaaccgccgctcnacccggttgcgagaagacgacgaaggncgaagtgcagaaatggcacctcgaaaggggaaggaaaagaaggaagaacaggtcatcagcctcggacctcaggtggctgaaggagagaatgtatttggtgtctgccatatctttgcatccttcaatgacacttttgtccatgtcactgatctttctggcaaggaaaccatctgccgtgtgactggtgggatgaaggtaaaggcagaccgagatgaatcctcaccatatgctgctatgttggctgcccaggatgtggcccagaggtgcaaggagctgggtatcaccgccctacacatcaaactccgggccacaggaggaaataggaccaagacccctggacctggggcccagtcggccctcagagcccttgcccgctcgggtatgaagatcgggcggattgaggatgtcacccccatcccctctgacagcactcgcaggaaggggggtcgccgtggtcgccgtctgtgaacaagattcctcaaaatattttctgttaataaattgccttcatgt

SEQ ID NO: 56058 - DNA, 774 bp, Homo sapiens
  misc_feature (251)..(251): n is a, c, g, or t
cggtcctcaggtcctccatgtgtgccacatgcctccccctaaagggtacagggtctgcggaaatcgcgcattccacaaaggcggcccgttcatggagttggtttccattctttaccgcgatccccaactgtttgtgtagaccagtcatccgaggaccagacatcacagaaacttggctttcttgaagaagtgtatcttttgaatttgtgggggcttattcgtttgaccacccttaggagttcttgggggtngatctggagacgacgtgcagaaatggcacctcgaaaggggaaggaaaagaaggaagaacaggtcatcagcctcggacctcaggtggctgaaggagagaatgtatttggtgtctgccatatctttgcatccttcaatgacacttttgtccatgtcactgatctttctggcaaggaaaccatctgccgtgtgactggtgggatgaaggtaaaggcagaccgagatgaatcctcaccatatgctgctatgttggctgcccaggatgtggcccagaggtgcaaggagctgggtatcaccgccctacacatcaaactccgggccacaggaggaaataggaccaagacccctggacctggggcccagtcggccctcagagcccttgcccgctcgggtatgaagatcgggcggattgaggatgtcacccccatcccctctgacagcactcgcaggaaggggggtcgccgtggtcgccgtctgtgaacaagattcctcaaaatattttctgttaataaattgccttcatgt

SEQ ID NO: 56059 - DNA, 557 bp, Homo sapiens
cgcaaaagatagtgtactaggtgcgtgcccgggtgtgacttagtcgacgtgcagaaatggcacctcgaaaggggaaggaaaagaaggaagaacaggtcatcagcctcggacctcaggtggctgaaggagagaatgtatttggtgtctgccatatctttgcatccttcaatgacacttttgtccatgtcactgatctttctggcaaggaaaccatctgccgtgtgactggtgggatgaaggtaaaggcagaccgagatgaatcctcaccatatgctgctatgttggctgcccaggatgtggcccagaggtgcaaggagctgggtatcaccgccctacacatcaaactccgggccacaggaggaaataggaccaagacccctggacctggggcccagtcggccctcagagcccttgcccgctcgggtatgaagatcgggcggattgaggatgtcacccccatcccctctgacagcactcgcaggaaggggggtcgccgtggtcgccgtctgtgaacaagattcctcaaaatattttctgttaataaattgccttcatgt

SEQ ID NO: 56060 - DNA, 557 bp, Homo sapiens
gcgacaagacgacagaaggggctctcccgggtggagtctggagacgacgtgcagaaatggcacctcgaaaggggaaggaaaagaaggaagaacaggtcatcagcctcggacctcaggtggctgaaggagagaatgtatttggtgtctgccatatctttgcatccttcaatgacacttttgtccatgtcactgatctttctggcaaggaaaccatctgccgtgtgactggtgggatgaaggtaaaggcagaccgagatgaatcctcaccatatgctgctatgttggctgcccaggatgtggcccagaggtgcaaggagctgggtatcaccgccctacacatcaaactccgggccacaggaggaaataggaccaagacccctggacctggggcccagtcggccctcagagcccttgcccgctcgggtatgaagatcgggcggattgaggatgtcacccccatcccctctgacagcactcgcaggaaggggggtcgccgtggtcgccgtctgtgaacaagattcctcaaaatattttctgttaataaattgccttcatgt

SEQ ID NO: 56061 - DNA, 564 bp, Homo sapiens
  misc_feature (25)..(25): n is a, c, g, or t
aaaataggctaggtacgaggctgtngtgtttgaattcggcgaggctggagacgacgtgcagaaatggcacctcgaaaggggaaggaaaagaaggaagaacaggtcatcagcctcggacctcaggtggctgaaggagagaatgtatttggtgtctgccatatctttgcatccttcaatgacacttttgtccatgtcactgatctttctggcaaggaaaccatctgccgtgtgactggtgggatgaaggtaaaggcagaccgagatgaatcctcaccatatgctgctatgttggctgcccaggatgtggcccagaggtgcaaggagctgggtatcaccgccctacacatcaaactccgggccacaggaggaaataggaccaagacccctggacctggggcccagtcggccctcagagcccttgcccgctcgggtatgaagatcgggcggattgaggatgtcacccccatcccctctgacagcactcgcaggaaggggggtcgccgtggtcgccgtctgtgaacaagattcctcaaaatattttctgttaataaattgccttcatgt

SEQ ID NO: 56062 - DNA, 754 bp, Homo sapiens
  misc_feature (642)..(642): n is a, c, g, or t
  misc_feature (665)..(665): n is a, c, g, or t
  misc_feature (673)..(673): n is a, c, g, or t
  misc_feature (676)..(676): n is a, c, g, or t
  misc_feature (678)..(678): n is a, c, g, or t
  misc_feature (680)..(680): n is a, c, g, or t
  misc_feature (692)..(692): n is a, c, g, or t
  misc_feature (694)..(694): n is a, c, g, or t
  misc_feature (708)..(708): n is a, c, g, or t
  misc_feature (723)..(723): n is a, c, g, or t
cccactctctctttccggtgtggagtctggagacgacgtgcagtgcagaaatggcacctcgaaaggggaaggaaaagaaggaagaacaggtcatcagcctcggacctcaggtggctgaaggagagaatgtatttggtgtctgccatatctttgcatccttcaatgacacttttgtccatgtcactgatctttctggcaaggaaaccatctgccgtgtgactggtgggatgaaggtaaaggcagaccgagatgaatcctcaccatatgctgctatgttggctgcccaggatgtggcccagaggtgcaaggagctgggtatcaccgccctacacatcaaactccgggccacaggaggaaataggaccaagacccctggacctggggcccagtcggccctcagagcccttgcccgctcgggtatgaagatcgggcggattgaggatgtcacccccatcccctctgacagcactcgcaggaaggggggtcgccgtggtcgccgtctgtgaacaagattcctcaaaatattttctgttaataaattgccttcatgtaaaaaaacaaaaaaaaaaaaaaaaaaaaaaaaaaaaaaaaaaaggggggggataaatggggggggggggaaaaagggggtatggaacgggnccatgggccaaaaggcggttccnggacccangtntntntggtccaagggngnaaatcggcagggtncccaatagggagcgnaataatggcggaaagccgagttaccggataa

SEQ ID NO: 56063 - DNA, 738 bp, Homo sapiens
  misc_feature (626)..(626): n is a, c, g, or t
  misc_feature (649)..(649): n is a, c, g, or t
  misc_feature (657)..(657): n is a, c, g, or t
  misc_feature (660)..(660): n is a, c, g, or t
  misc_feature (662)..(662): n is a, c, g, or t
  misc_feature (664)..(664): n is a, c, g, or t
  misc_feature (676)..(676): n is a, c, g, or t
  misc_feature (678)..(678): n is a, c, g, or t
  misc_feature (692)..(692): n is a, c, g, or t
  misc_feature (707)..(707): n is a, c, g, or t
aattacggctaggtacgaggctgggtggtggagtctggagacgacgtgcagaaatggcacctcgaaaggggaaggaaaagaaggaagaacaggtcatcagcctcggacctcaggtggctgaaggagagaatgtatttggtgtctgccatatctttgcatccttcaatgacacttttgtccatgtcactgatctttctggcaaggaaaccatctgccgtgtgactggtgggatgaaggtaaaggcagaccgagatgaatcctcaccatatgctgctatgttggctgcccaggatgtggcccagaggtgcaaggagctgggtatcaccgccctacacatcaaactccgggccacaggaggaaataggaccaagacccctggacctggggcccagtcggccctcagagcccttgcccgctcgggtatgaagatcgggcggattgaggatgtcacccccatcccctctgacagcactcgcaggaaggggggtcgccgtggtcgccgtctgtgaacaagattcctcaaaatattttctgttaataaattgccttcatgtaaaaaaaaacaaaaaaaaaaaaattcggggggataaatggggggggggggaaaaagggggtatggaacgggnccatgggccaaaaggcggttccnggacccangtntntntggtccaagggngnaaatcggcagggtncccaatagggagcgnaataatggcggaaagccgagttaccggataa

SEQ ID NO: 56064 - DNA, 701 bp, Homo sapiens
  misc_feature (574)..(574): n is a, c, g, or t
  misc_feature (588)..(589): n is a, c, g, or t
  misc_feature (609)..(609): n is a, c, g, or t
  misc_feature (611)..(611): n is a, c, g, or t
  misc_feature (640)..(640): n is a, c, g, or t
  misc_feature (644)..(644): n is a, c, g, or t
  misc_feature (647)..(648): n is a, c, g, or t
  misc_feature (651)..(651): n is a, c, g, or t
  misc_feature (654)..(654): n is a, c, g, or t
  misc_feature (657)..(657): n is a, c, g, or t
cccactctctctttccggtgtggagtctggagacgacgtgcagtgcagaaatggcacctcgaaaggggaaggaaaagaaggaagaacaggtcatcagcctcggacctcaggtggctgaaggagagaatgtatttggtgtctgccatatctttgcatccttcaatgacacttttgtccatgtcactgatctttctggcaaggaaaccatctgccgtgtgactggtgggatgaaggtaaaggcagaccgagatgaatcctcaccatatgctgctatgttggctgcccaggatgtggcccagaggtgcaaggagctgggtatcaccgccctacacatcaaactccgggccacaggaggaaataggaccaagacccctggacctggggcccagtcggccctcagagcccttgcccgctcgggtatgaagatcgggcggattgaggatgtcacccccatcccctctgacagcactcgcaggaaggggggtcgccgtggtcgccgtctgtgaacaagattcctcaaaatattttctgttaataaattgccttcatgtaaaaaaaacaaaaaaaaaaaccncgggccgaattcgnnacaggcccaaaagaaggggngntccagaagccctaggtcccagggtccgcncaanggnnggncanaangggggccgggcgagcattccttcaaggaacgacccgggggagac

SEQ ID NO: 56065 - DNA, 877 bp, Homo sapiens
  misc_feature (585)..(585): n is a, c, g, or t
cacgcgtcgccacgcgtcgcggacgcgtgggtcgacccacgcgtcggctggagacgacgtgcagaaatggcacctcgaaaggggaaggaaaagaaggaagaacaggtcatcagcctcggacctcaggtggctgaaggagagaatgtatttggtgtctgccatatctttgcatccttcaatgacacttttgtccatgtcactgatctttctggcaaggaaaccatctgccgtgtgactggtgggatgaaggtaaaggcagaccgagatgaatcctcaccatatgctgctatgttggctgcccaggatgtggcccagaggtgcaaggagctgggtatcaccgccctacacatcaaactccgggccacaggaggaaataggaccaagacccctggacctggggcccagtcggccctcagagcccttgcccgctcgggtatgaagatcgggcggattgaggatgtcacccccatcccctctgacagcactcgcaggaaggggggtcgccgtggtcgccgtctgtgaacaagattcctcaaaatattttctgttaataaattgccttcatgtacaaaaaaaaaaaaaacnggggggggggggaaaaacccggggaggtttccagggttcgcggaccccagcggcgcggatggtggaaatcctcccttgaagggagtcctaatagcatcgttcgcacaagaaaaggaggggtcaccccagggcacatcacaggcaagccgaccaggcggtcctaagctgaagccgggggggcacagtgaaattccagggctcccccatgtggtaatacgggccgggcccggggggccgaagcctacacctgaaaaccagggcgggcatcacagggcacacttcgcgaatcacc

SEQ ID NO: 56066 - DNA, 629 bp, Homo sapiens
gcctgcggccgctactactactactaaattcgcggccgcgtcgacactggagacgcgtgcagaaatggcacctcgaaaggggaaggaaaagaaggaagaacaggtcatcagcctcggacctcaggtggctgaaggagagaatgtatttggtgtctgccatatctttgcatccttcaatgacacttttgtccatgtcactgatctttctggcaaggaaaccatctgccgtgtgactggtgggatgaaggtaaaggcagaccgagatgaatcctcaccatatgctgctatgttggctgcccaggatgtggcccagaggtgcaaggagctgggtatcaccgccctacacatcaaactccgggccacaggaggaaataggaccaagacccctggacctggggcccagtcggccctcagagcccttgcccgctcgggtatgaagatcgggcggattgaggatgtcacccccatcccctctgacagcactcgcaggaaggggggtcgccgtggtcgccgtctgtgaacaagattcctcaaaatattttctgttaataaattgccttcatgtcaaccctcatttttttagggtaacagatttacaccccatgagaataagggctcctggtcccccg

SEQ ID NO: 56067 - DNA, 906 bp, Homo sapiens
cccactctctctttccggtgtggagtctggagacgacgtgcagtgcagaaatggcacctcgaaaggggaaggaaaagaaggaagaacaggtcatcagcctcggacctcaggtggctgaaggagagaatgtatttggtgtctgccatatctttgcatccttcaatgacacttttgtccatgtcactgatctttctggcaaggaaaccatctgccgtgtgactggtgggatgaaggtaaaggcagaccgagatgaatcctcaccatatgctgctatgttggctgcccaggatgtggcccagaggtgcaaggagctgggtatcaccgccctacacatcaaactccgggccacaggaggaaataggaccaagacccctggacctggggcccagtcggccctcagagcccttgcccgctcgggtatgaagatcgggcggattgaggatgtcacccccatcccctctgacagcactcgcaggaaggggggtcgccgtggtcgccgtctgtgaacaagattcctcaaaatattttctgttaataaattgccttcatgtaaaaaaaaaaaaaaaaaccggagggtcttatggggggggggaaaaaagggttggaagggcaggtcataggcggttccctgacccggttttttggtacaagggggaagaatctgggggtccccaaagggagggcgattaaattcgaaagccgggtaactgtagtatatgggcaaaaacggggagcgatagaagcaggagacacgcaagacgacgagagggacaaacagctgtagacaaaaccaggccaagaaacagcaaagcagggcatacagagtcacccaccaccacacagagacacgaaaaccaaccacaccccaccgacacatcaaacaccgcacagaacgaagcacgacag

SEQ ID NO: 56068 - DNA, 573 bp, Homo sapiens
agacgacagaagggccccgggagtctggagacgacgtgcagaaatggcacctcgaaaggggaaggaaaagaaggaagaacaggtcatcagcctcggacctcaggtggctgaaggagagaatgtatttggtgtctgccatatctttgcatccttcaatgacacttttgtccatgtcactgatctttctggcaaggaaaccatctgccgtgtgactggtgggatgaaggtaaaggcagaccgagatgaatcctcaccatatgctgctatgttggctgcccaggatgtggcccagaggtgcaaggagctgggtatcaccgccctacacatcaaactccgggccacaggaggaaataggaccaagacccctggacctggggcccagtcggccctcagagcccttgcccgctcgggtatgaagatcgggcggattgaggatgtcacccccatcccctctgacagcactcgcaggaaggggggtcgccgtggtcgccgtctgtgaacaagattcctcaaaatattttctgttaataaattgccttcatgtagcggacgagcattccgctgatgggggct

SEQ ID NO: 56069 - DNA, 661 bp, Homo sapiens
  misc_feature (6)..(6): n is a, c, g, or t
  misc_feature (8)..(8): n is a, c, g, or t
  misc_feature (26)..(26): n is a, c, g, or t
aaaccntnggctaggtacgaggctgngtggtgctggagacgacgtgcagaaatggcacctcgaaaggggaaggaaaagaaggaagaacaggtcatcagcctcggacctcaggtggctgaaggagagaatgtatttggtgtctgccatatctttgcatccttcaatgacacttttgtccatgtcactgatctttctggcaaggaaaccatctgccgtgtgactggtgggatgaaggtaaaggcagaccgagatgaatcctcaccatatgctgctatgttggctgcccaggatgtggcccagaggtgcaaggagctgggtatcaccgccctacacatcaaactccgggccacaggaggaaataggaccaagacccctggacctggggcccagtcggccctcagagcccttgcccgctcgggtatgaagatcgggcggattgaggatgtcacccccatcccctctgacagcactcgcaggaaggggggtcgccgtggtcgccgtctgtgaacaagattcctcaaaatattttctgttaataaattgccttcatgtacatgacgaacttcttgctttaactctaggtggtgccaggtacctaattcggcctatagtgagacgaattacaattcactggccctcgctttacaacgtcgtgactgtg

SEQ ID NO: 56070 - DNA, 1016 bp, Homo sapiens
  misc_feature (25)..(25): n is a, c, g, or t
  misc_feature (611)..(611): n is a, c, g, or t
aaaataggctaggtacgaggctgtngtgtttgaattcggcgaggctggagacgacgtgcagaaatggcacctcgaaaggggaaggaaaagaaggaagaacaggtcatcagcctcggacctcaggtggctgaaggagagaatgtatttggtgtctgccatatctttgcatccttcaatgacacttttgtccatgtcactgatctttctggcaaggaaaccatctgccgtgtgactggtgggatgaaggtaaaggcagaccgagatgaatcctcaccatatgctgctatgttggctgcccaggatgtggcccagaggtgcaaggagctgggtatcaccgccctacacatcaaactccgggccacaggaggaaataggaccaagacccctggacctggggcccagtcggccctcagagcccttgcccgctcgggtatgaagatcgggcggattgaggatgtcacccccatcccctctgacagcactcgcaggaaggggggtcgccgtggtcgccgtctgtgaacaagattcctcaaaatattttctgttaataaattgccttcatgtaaaaaaaaaaaaaaaaaaataaaaaaaagacaaaaaaaaaaaaaacnggggggggggggcctaaaatttcccccggggggccccaaatttcggcttcccccccgtttgttgtggacacaggggtgggccccccataggagaacgcgacaataaaacacacaagagaagagggacgacgattataaaacaccagcggggcgaaatgtgaaaaaagccattccacggggaagaacatctttggggaaagaaccccacatatttgcgtggggggaggaaccattgtggggccgcaaaccaccccctcagagatattataaagcctccggggggagaattaaacacacgtgtgcacgtgatattatgttggtgttaacaccaccgtgcaaaatgttgatgcgcctcgagaaaaaatttggtcacgacgagttattttatgaaccaattataccgga

SEQ ID NO: 56071 - DNA, 593 bp, Homo sapiens
cgcaaaagatagtgtactaggtgcgtgcccgggtgtgacttagtcgacgtgcagaaatggcacctcgaaaggggaaggaaaagaaggaagaacaggtcatcagcctcggacctcaggtggctgaaggagagaatgtatttggtgtctgccatatctttgcatccttcaatgacacttttgtccatgtcactgatctttctggcaaggaaaccatctgccgtgtgactggtgggatgaaggtaaaggcagaccgagatgaatcctcaccatatgctgctatgttggctgcccaggatgtggcccagaggtgcaaggagctgggtatcaccgccctacacatcaaactccgggccacaggaggaaataggaccaagacccctggacctggggcccagtcggccctcagagcccttgcccgctcgggtatgaagatcgggcggattgaggatgtcacccccatcccctctgacagcactcgcaggaaggggggtcgccgtggtcgccgtctgtgaacaagattcctcaaaatattttctgttaataaattgccttcatgttctcatggttttctgtggtgcttctttcggtgttcg

SEQ ID NO: 56072 - DNA, 589 bp, Homo sapiens
  misc_feature (7)..(7): n is a, c, g, or t
  misc_feature (21)..(21): n is a, c, g, or t
  misc_feature (48)..(48): n is a, c, g, or t
acccgcncgaaccgccgctcnacccggttgcgagaagacgacgaaggncgaagtgcagaaatggcacctcgaaaggggaaggaaaagaaggaagaacaggtcatcagcctcggacctcaggtggctgaaggagagaatgtatttggtgtctgccatatctttgcatccttcaatgacacttttgtccatgtcactgatctttctggcaaggaaaccatctgccgtgtgactggtgggatgaaggtaaaggcagaccgagatgaatcctcaccatatgctgctatgttggctgcccaggatgtggcccagaggtgcaaggagctgggtatcaccgccctacacatcaaactccgggccacaggaggaaataggaccaagacccctggacctggggcccagtcggccctcagagcccttgcccgctcgggtatgaagatcgggcggattgaggatgtcacccccatcccctctgacagcactcgcaggaaggggggtcgccgtggtcgccgtctgtgaacaagattcctcaaaatattttctgttaataaattgccttcatgtatatctctcgctcgggggaggggtggtc

SEQ ID NO: 56073 - DNA, 728 bp, Homo sapiens
gcctgcggccgctactactactactaaattcgcggccgcgtcgacactggagacgcgtgcagaaatggcacctcgaaaggggaaggaaaagaaggaagaacaggtcatcagcctcggacctcaggtggctgaaggagagaatgtatttggtgtctgccatatctttgcatccttcaatgacacttttgtccatgtcactgatctttctggcaaggaaaccatctgccgtgtgactggtgggatgaaggtaaaggcagaccgagatgaatcctcaccatatgctgctatgttggctgcccaggatgtggcccagaggtgcaaggagctgggtatcaccgccctacacatcaaactccgggccacaggaggaaataggaccaagacccctggacctggggcccagtcggccctcagagcccttgcccgctcgggtatgaagatcgggcggattgagaagacggtgggctagatgtcagaacctggatttgtcctgtgcctctgacatcttgcgcacagctcagcctgtttccctttctggaaagtgagttaagaccacgtcaggaaattcgaggaactggcagatggggccacttcatgttcacatccatctgttagaggatgtcacccccatcccctctgacagcactcgcaggaaggggggtcgccgtggtcgccgtctgtgaacaagattcctcaaaatattttctgttaataaattgccttcatgt

SEQ ID NO: 56074 - DNA, 640 bp, Homo sapiens
gtcccgtgccatagcttgacatgcctcgccaggtccgaactcctagaggactcccctggtggtcctactggtaggtagctccctccctccctccttgtagcgaaggctcttctccctgatctcccctgagctgaactcactatgaagtgcacctccgtaggggatattaatgccttctcctcatagcggattcttatgtagttactctccaactcgagaacgagctacttactagacaggttccgtgtttacctttttcctgtccatgtcaccgatctttctggccaaggaaaccatctgccgtgtgactggtgggatgaaggtaaaggcagaccgagatgaatcctcaccatatgctgctatgttggctgcccaggatgtggcccagaggtgcaaggagctgggtatcaccgccctacacatcaaactccgggccacaggaggaaataggaccaagacccctggacctggggcccagtcggccctcagagcccttgcccgctcgggtatgaagatcgggcggattgaggatgtcacccccatcccctctgacagcactcgcaggaaggggggtcgccgtggtcgccgtctgtgaacaagattcctcaaaatattttctgttaataaattgccttcatgt

SEQ ID NO: 56075 - DNA, 406 bp, Homo sapiens
tcgaattcaagcttctaacgatgtacggggacatgtcactgatctttctggcaaggaaaccatctgccgtgtgactggtgggatgaaggtaaaggcagaccgagatgaatcctcaccatatgctgctatgttggctgcccaggatgtggcccagaggtgcaaggagctgggtatcaccgccctacacatcaaactccgggccacaggaggaaataggaccaagacccctggacctggggcccagtcggccctcagagcccttgcccgctcgggtatgaagatcgggcggattgaggatgtcacccccatcccctctgacagcactcgcaggaaggggggtcgccgtggtcgccgtctgtgaacaagattcctcaaaatattttctgttaataaattgccttcatgt

SEQ ID NO: 56076 - DNA, 414 bp, Homo sapiens
  misc_feature (9)..(9): n is a, c, g, or t
  misc_feature (350)..(351): n is a, c, g, or t
  misc_feature (364)..(364): n is a, c, g, or t
  misc_feature (375)..(375): n is a, c, g, or t
ctgcagganttcggcacgaggacgtgcagaaatggcacctcgaaaggggaaggaaaagaaggaagaacaggtcatcagcctcggacctcaggtggctgaaggagagaatgtatttggtgtctgccatatctttgcatccttcaatgacacttttgtccatgtcactgatctttctggcaaggaaaccatctgccgtgtgactggtgggatgaaggtaaaggcagaccgagatgaatcctcaccatatgctgctatgttggctgcccaggatgtggcccagaggtgcaaggagctgggtatcaccgccctacacatcaaactccgggccacaggaggaaatagtagaccanncccctgacctggnccagtcgcctnaagcctcgcccctcgtattaagtcgccgattagattaac

SEQ ID NO: 56077 - DNA, 1646 bp, Homo sapiens
ttccaattctacacattgtgtacagaccgacttttttttttttaaatggagggaaagacagtaggacaagaacatcagaatagaagagagtacagtgtagaaattggacatttggcttcttgggagaaaggagcctgaggagagctgagatcctggtgctgcatttggggtcttttccatgctacttgcggcattaagttgccttggtcatctaaagcagaccaaggcgttggagacctcgttttgagtggagatgctggttctaaatatggaccaattcttaaagagccagagtgggaactgttgatccaagtgtagcctgaagcgaaagaggagccttccagacccatgccatatataaacacacgtgggtgtgcattctccccccacaccttctgtgcaaagctgggagctcactccactgcgtcttgctttttttcacttggcagatcttggagattgttccacatcagtacataaagtacataaagattgtcaccccacaaatacacaccaagtcctattttcatcagcgataaaaaagaaaagttcttgctttccggaagcttgcatgcggctctgagtacccagtgacaccagatggtactcagcgttttgcaagggattaccacaaggccccgtgatggtgcctgccatggttaggacaggctggtggctgggtagggttagtgagacccagtggagaggatgctgtgtgtcacaggctggagaggtgagaccattgaggtagtcagttgtagaggaaagaaaccagcaagaggggaaaatctgttgggatgctgcttttagcctttgatggcgtgttccaggcagagggaataagcaaataaatgggtcctgagacaaggggttactgtgatgaggcggcgttggttacatgccaaaccttgctagggattttaataacaacattgaatcttaacctgatgaaataacagtactcctggggaggcgggagggatagcattaggagatatacctaatgctaaatgacgagttaatgggtgcagcacaccaacatggcacatgtatacatatgtaacaaacctgcacgttgtgcacatgtaccctaaaacttaaagtataataaaaaaaaaaagcttgcaaaaaaaatataacagtactccttaaattgttaaaagtcatgaaagtcaaggacaggagattaaggaggcgtgaaaactaaatgcccattgtggtatcctggattggattctggaaccagaatagggtattagtataaaaactagtgaaataggataaaggcagggcacagtggttcacgcctataatcccaacactttgggaagccgagacaggaggacggattgagcccaggagtttgagaccagcctgggcaacacagggagaccccgtctctacaaaaaataaaaaattagctgggcatggtggcacacgtctgtactgccagctacttgggaggctgaggtgggagaattgcctgagcctgggaagtggaggccgcagtgagctgtgattgcatcactacattcagcctgggtcacagagcaagatcctatctcaaaaactaaataagtaaataataaattaaaaaatatgaataaagtctggagttaaagtctggaataaagctagtagtaatg

SEQ ID NO: 56078 - DNA, 511 bp, Homo sapiens
gcctgcggccgctactactactactaaattcgcggccgcgtcgacactggagacgcgttgcatccttcaatgacacttttgtccatgtcactgatctttctggcaaggaaaccatctgccgtgtgactggtgggatgaaggtaaaggcagaccgagatgaatcctcaccatatgctgctatgttggctgcccaggatgtggcccagaggtgcaaggagctgggtatcaccgccctacacatcaaactccgggccacaggaggaaataggaccaagacccctggacctggggcccagtcggccctcagagcccttgcccgctcgggtatgaagatcgggcggattgaggatgtcacccccatcccctctgacagcactcgcaggaaggggggtcgccgtggtcgccgtctgtgaacaagattcctcaaaatattttctgttaataaattgccttcatgttttttacatgaaggcaatttattaacagaaaatatgtcgacgcggccgcgaat

SEQ ID NO: 56079 - DNA, 247 bp, Homo sapiens
gcctgcggccgctactactactactaaattcgcggccgcgtcgacactggagacgcggaccaagacccctggacctggggcccagtcggccctcagagcccttgcccgctcgggtatgaagatcgggcggattgaggatgtcacccccatcccctctgacagcactcgcaggaaggggggtcgccgtggtcgccgtctgtgaacaagattcctcaaaatattttctgttaataaattgccttcatgt

SEQ ID NO: 56080 - DNA, 331 bp, Homo sapiens
  misc_feature (192)..(192): n is a, c, g, or t
  misc_feature (208)..(208): n is a, c, g, or t
  misc_feature (217)..(217): n is a, c, g, or t
  misc_feature (220)..(220): n is a, c, g, or t
  misc_feature (239)..(240): n is a, c, g, or t
  misc_feature (264)..(264): n is a, c, g, or t
  misc_feature (269)..(269): n is a, c, g, or t
  misc_feature (274)..(274): n is a, c, g, or t
gatccaaagaattcggcacgaggagacgacgtgcagaaatggcacctcgaaaggggaaggaaaagaaggaagaacaggtcatcagcctcggacctcaggtggctgaaggagagaatgtatttggtgtctgccatatctttgcatccttcaatgacacttttgtccatgtcactgatctttctggcaaggaancatctgccgttgactnggggatganggnaaggagaccagatgatccnnaccatatctgcattgtggctccangagtngccanaggtcaagacttggtatccccccctaaaacaactcggccaagggaaatgccagccct

SEQ ID NO: 56081 - DNA, 418 bp, Homo sapiens
tcctttttctccacattctcaccagcatttgtcattgcctgtcttttgtatagagtccattttaactgggtgagatggtatcacattgtagtttgatatacactactctgatgatgaatgatgttgagcacattttcgtatgcctgtttctcatttgcacatcttgttttgagaaatggctattcaaatattttaccatttttaaattggattatgatatttctttcctatacagcttcttgagctcctcatatactctggttattaatccctcatcaaatgggtagtttgcaaatatttcccacaggatgtcacccccatcccctctgacagcactcgcaggaaggggggtcgccgtggtcgccgtctgtgaacaagattcctcaaaatattttctgttaataaattgccttcatgt

SEQ ID NO: 56082 - DNA, 173 bp, Homo sapiens
caggagtcttagtcctatttcctcttgctggcccggagtttgatgtgtagggcggtgatgaggatgtcacccccatcccctctgacagcactcgcaggaaggggggtcgccgtggtcgccgtctgtgaacaagattcctcaaaatattttctgttaataaattgccttcatgt

SEQ ID NO: 56083 - DNA, 171 bp, Homo sapiens
taaaaaacaaagatcagttaaattttattgggagccggggtggaggtcgggcggattgaggatgtcacccccatcccctctgacagcactcgcaggaaggggggtcgccgtggtcgccgtctgtgaacaagattcctcaaaatattttctgttaataaattgccttcatgt

SEQ ID NO: 56084 - DNA, 228 bp, Homo sapiens
caggagtcttagtcctatttcctcttgctggcccggagtttgatgtgtagggcggtgatgaggatgtcacccccatcccctctgacagcactcgcaggaaggggggtcgccgtggtcgccgtctgtgaacaagattcctcaaaatattttctgttaataaattgccttcatgtaaacaaaaacaaaaaaagtcgaccggccgctaatttagtagtagtaggcggccgc

SEQ ID NO: 56085 - DNA, 2372 bp, Homo sapiens
cccactctctctttccggtgtggagtctggagacgacgtgcaggtaggaggcccgggcgcgacaatcggggggcatcctgcggcgaggggaccctgtggggcttgggacgagagacgggggtctttccgtgggaaccgagctaggtgccgggcaagagacgcgcggctggcccacctggatcctggccaactcgggattgagttcgttcctggtctcagaaggcccgttttgctttcagggaggagcttgtgaagtaaggtgcagaaatggcacctcgaaaggggaaggaaaagaaggaagaacaggtcatcagcctcggacctcaggtggctgaaggagagaatgtatttggtgtctgccatatctttgcatccttcaatgacacttttgtccatgtcactgatctttctggcaaggaaaccatctgccgtgtgactggtgggatgaaggtaaaggcagaccgagatgaatcctcaccatatgctgctatgttggctgcccaggatgtggcccagaggtgcaaggagctgggtatcaccgccctacacatcaaactccgggccacaggaggaaataggaccaagacccctggacctggggcccagtcggccctcagagcccttgcccgctcgggtatgaagatcgggcggattgaggatgtcacccccatcccctctgacagcactcgcaggaaggggggtcgccgtggtcgccgtctgtgaacaagattcctcaaaatattttctgttaataaattgccttcatgtaaactgtttcaactccagccttctctccttcatcaggggctactcaggcatttgatttcttcctcctatttggcttcttgggagaaaggagcctgaggagagctgagatcctggtgctgcatttggggtcttttccatgctacttgcggcattaagttgccttggtcatctaaagcagaccaaggcgttggagacctcgttttgagtggagatgctggttctaaatatggaccaattcttaaagagccagagtgggaactgttgatccaagtgtagcctgaagcgaaagaggagccttccagacccatgccatatataaacacacgtgggtgtgcattctccccccacaccttctgtgcaaagctgggagctcactccactgcgtcttgctttttttcacttggcagatcttggagattgttccacatcagtacataaagtacataaagattgtcaccccacaaatacacaccaagtcctattttcatcagcgataaaaaagaaaagttcttgctttccggaagcttgcatgcggctctgagtacccagtgacaccagatggtactcagcgttttgcaagggattaccacaaggccccgtgatggtgcctgccatggttaggacaggctggtggctgggtagggttagtgagacccagtggagaggatgctgtgtgtcacaggctggagaggtgagaccattgaggtagtcagttgtagaggaaagaaaccagcaagaggggaaaatctgttgggatgctgcttttagcctttgatggcgtgttccaggcagagggaataagcaaataaatgggtcctgagacaaggggttactgtgatgaggcggcgttggttacatgccaaaccttgctagggattttaataacaacattgaatcttaacctgatgaaataacagtactcctggggaggcgggagggatagcattaggagatatacctaatgctaaatgacgagttaatgggtgcagcacaccaacatggcacatgtatacatatgtaacaaacctgcacgttgtgcacatgtaccctaaaacttaaagtataataaaaaaaaaaagcttgcaaaaaaaatataacagtactccttaaattgttaaaagtcatgaaagtcaaggacaggagattaaggaggcgtgaaaactaaatgcccattgtggtatcctggattggattctggaaccagaatagggtattagtataaaaactagtgaaataggataaaggcagggcacagtggttcacgcctataatcccaacactttgggaagccgagacaggaggacggattgagcccaggagtttgagaccagcctgggcaacacagggagaccccgtctctacaaaaaataaaaaattagctgggcatggtggcacacgtctgtactgccagctacttgggaggctgaggtgggagaattgcctgagcctgggaagtggaggccgcagtgagctgtgattgcatcactacattcagcctgggtcacagagcaagatcctatctcaaaaactaaataagtaaataataaattaaaaaatatgaataaagtctggagttaaagtctggaataaagctagtagtaatg

SEQ ID NO: 56086 - DNA, 2169 bp, Homo sapiens
gcctgcggccgctactactactactaaattcgcggccgcgtcgacactggagacgcgtgcagaaatggcacctcgaaaggggaaggaaaagaaggaagaacaggtcatcagcctcggacctcaggtggctgaaggagagaatgtatttggtgtctgccatatctttgcatccttcaatgacacttttgtccatgtcactgatctttctggcaaggaaaccatctgccgtgtgactggtgggatgaaggtaaaggcagaccgagatgaatcctcaccatatgctgctatgttggctgcccaggatgtggcccagaggtgcaaggagctgggtatcaccgccctacacatcaaactccgggccacaggaggaaataggaccaagacccctggacctggggcccagtcggccctcagagcccttgcccgctcgggtatgaagatcgggcggattgaggatgtcacccccatcccctctgacagcactcgcaggaaggggggtcgccgtggtcgccgtctgtgaacaagattcctcaaaatattttctgttaataaattgccttcatgtaaactgtttcaactccagccttctctccttcatcaggggctactcaggcatttgatttcttcctcctatttggcttcttgggagaaaggagcctgaggagagctgagatcctggtgctgcatttggggtcttttccatgctacttgcggcattaagttgccttggtcatctaaagcagaccaaggcgttggagacctcgttttgagtggagatgctggttctaaatatggaccaattcttaaagagccagagtgggaactgttgatccaagtgtagcctgaagcgaaagaggagccttccagacccatgccatatataaacacacgtgggtgtgcattctccccccacaccttctgtgcaaagctgggagctcactccactgcgtcttgctttttttcacttggcagatcttggagattgttccacatcagtacataaagtacataaagattgtcaccccacaaatacacaccaagtcctattttcatcagcgataaaaaagaaaagttcttgctttccggaagcttgcatgcggctctgagtacccagtgacaccagatggtactcagcgttttgcaagggattaccacaaggccccgtgatggtgcctgccatggttaggacaggctggtggctgggtagggttagtgagacccagtggagaggatgctgtgtgtcacaggctggagaggtgagaccattgaggtagtcagttgtagaggaaagaaaccagcaagaggggaaaatctgttgggatgctgcttttagcctttgatggcgtgttccaggcagagggaataagcaaataaatgggtcctgagacaaggggttactgtgatgaggcggcgttggttacatgccaaaccttgctagggattttaataacaacattgaatcttaacctgatgaaataacagtactcctggggaggcgggagggatagcattaggagatatacctaatgctaaatgacgagttaatgggtgcagcacaccaacatggcacatgtatacatatgtaacaaacctgcacgttgtgcacatgtaccctaaaacttaaagtataataaaaaaaaaaagcttgcaaaaaaaatataacagtactccttaaattgttaaaagtcatgaaagtcaaggacaggagattaaggaggcgtgaaaactaaatgcccattgtggtatcctggattggattctggaaccagaatagggtattagtataaaaactagtgaaataggataaaggcagggcacagtggttcacgcctataatcccaacactttgggaagccgagacaggaggacggattgagcccaggagtttgagaccagcctgggcaacacagggagaccccgtctctacaaaaaataaaaaattagctgggcatggtggcacacgtctgtactgccagctacttgggaggctgaggtgggagaattgcctgagcctgggaagtggaggccgcagtgagctgtgattgcatcactacattcagcctgggtcacagagcaagatcctatctcaaaaactaaataagtaaataataaattaaaaaatatgaataaagtctggagttaaagtctggaataaagctagtagtaatg

SEQ ID NO: 56087 - DNA, 2155 bp, Homo sapiens
cccactctctctttccggtgtggagtctggagacgacgtgcagtgcagaaatggcacctcgaaaggggaaggaaaagaaggaagaacaggtcatcagcctcggacctcaggtggctgaaggagagaatgtatttggtgtctgccatatctttgcatccttcaatgacacttttgtccatgtcactgatctttctggcaaggaaaccatctgccgtgtgactggtgggatgaaggtaaaggcagaccgagatgaatcctcaccatatgctgctatgttggctgcccaggatgtggcccagaggtgcaaggagctgggtatcaccgccctacacatcaaactccgggccacaggaggaaataggaccaagacccctggacctggggcccagtcggccctcagagcccttgcccgctcgggtatgaagatcgggcggattgaggatgtcacccccatcccctctgacagcactcgcaggaaggggggtcgccgtggtcgccgtctgtgaacaagattcctcaaaatattttctgttaataaattgccttcatgtaaactgtttcaactccagccttctctccttcatcaggggctactcaggcatttgatttcttcctcctatttggcttcttgggagaaaggagcctgaggagagctgagatcctggtgctgcatttggggtcttttccatgctacttgcggcattaagttgccttggtcatctaaagcagaccaaggcgttggagacctcgttttgagtggagatgctggttctaaatatggaccaattcttaaagagccagagtgggaactgttgatccaagtgtagcctgaagcgaaagaggagccttccagacccatgccatatataaacacacgtgggtgtgcattctccccccacaccttctgtgcaaagctgggagctcactccactgcgtcttgctttttttcacttggcagatcttggagattgttccacatcagtacataaagtacataaagattgtcaccccacaaatacacaccaagtcctattttcatcagcgataaaaaagaaaagttcttgctttccggaagcttgcatgcggctctgagtacccagtgacaccagatggtactcagcgttttgcaagggattaccacaaggccccgtgatggtgcctgccatggttaggacaggctggtggctgggtagggttagtgagacccagtggagaggatgctgtgtgtcacaggctggagaggtgagaccattgaggtagtcagttgtagaggaaagaaaccagcaagaggggaaaatctgttgggatgctgcttttagcctttgatggcgtgttccaggcagagggaataagcaaataaatgggtcctgagacaaggggttactgtgatgaggcggcgttggttacatgccaaaccttgctagggattttaataacaacattgaatcttaacctgatgaaataacagtactcctggggaggcgggagggatagcattaggagatatacctaatgctaaatgacgagttaatgggtgcagcacaccaacatggcacatgtatacatatgtaacaaacctgcacgttgtgcacatgtaccctaaaacttaaagtataataaaaaaaaaaagcttgcaaaaaaaatataacagtactccttaaattgttaaaagtcatgaaagtcaaggacaggagattaaggaggcgtgaaaactaaatgcccattgtggtatcctggattggattctggaaccagaatagggtattagtataaaaactagtgaaataggataaaggcagggcacagtggttcacgcctataatcccaacactttgggaagccgagacaggaggacggattgagcccaggagtttgagaccagcctgggcaacacagggagaccccgtctctacaaaaaataaaaaattagctgggcatggtggcacacgtctgtactgccagctacttgggaggctgaggtgggagaattgcctgagcctgggaagtggaggccgcagtgagctgtgattgcatcactacattcagcctgggtcacagagcaagatcctatctcaaaaactaaataagtaaataataaattaaaaaatatgaataaagtctggagttaaagtctggaataaagctagtagtaatg

SEQ ID NO: 56088 - DNA, 2158 bp, Homo sapiens
aattacggctaggtacgaggctgggtggtggagtctggagacgacgtgcagaaatggcacctcgaaaggggaaggaaaagaaggaagaacaggtcatcagcctcggacctcaggtggctgaaggagagaatgtatttggtgtctgccatatctttgcatccttcaatgacacttttgtccatgtcactgatctttctggcaaggaaaccatctgccgtgtgactggtgggatgaaggtaaaggcagaccgagatgaatcctcaccatatgctgctatgttggctgcccaggatgtggcccagaggtgcaaggagctgggtatcaccgccctacacatcaaactccgggccacaggaggaaataggaccaagacccctggacctggggcccagtcggccctcagagcccttgcccgctcgggtatgaagatcgggcggattgaggatgtcacccccatcccctctgacagcactcgcaggaaggggggtcgccgtggtcgccgtctgtgaacaagattcctcaaaatattttctgttaataaattgccttcatgtaaactgtttcaactccagccttctctccttcatcaggggctactcaggcatttgatttcttcctcctatttggcttcttgggagaaaggagcctgaggagagctgagatcctggtgctgcatttggggtcttttccatgctacttgcggcattaagttgccttggtcatctaaagcagaccaaggcgttggagacctcgttttgagtggagatgctggttctaaatatggaccaattcttaaagagccagagtgggaactgttgatccaagtgtagcctgaagcgaaagaggagccttccagacccatgccatatataaacacacgtgggtgtgcattctccccccacaccttctgtgcaaagctgggagctcactccactgcgtcttgctttttttcacttggcagatcttggagattgttccacatcagtacataaagtacataaagattgtcaccccacaaatacacaccaagtcctattttcatcagcgataaaaaagaaaagttcttgctttccggaagcttgcatgcggctctgagtacccagtgacaccagatggtactcagcgttttgcaagggattaccacaaggccccgtgatggtgcctgccatggttaggacaggctggtggctgggtagggttagtgagacccagtggagaggatgctgtgtgtcacaggctggagaggtgagaccattgaggtagtcagttgtagaggaaagaaaccagcaagaggggaaaatctgttgggatgctgcttttagcctttgatggcgtgttccaggcagagggaataagcaaataaatgggtcctgagacaaggggttactgtgatgaggcggcgttggttacatgccaaaccttgctagggattttaataacaacattgaatcttaacctgatgaaataacagtactcctggggaggcgggagggatagcattaggagatatacctaatgctaaatgacgagttaatgggtgcagcacaccaacatggcacatgtatacatatgtaacaaacctgcacgttgtgcacatgtaccctaaaacttaaagtataataaaaaaaaaaagcttgcaaaaaaaatataacagtactccttaaattgttaaaagtcatgaaagtcaaggacaggagattaaggaggcgtgaaaactaaatgcccattgtggtatcctggattggattctggaaccagaatagggtattagtataaaaactagtgaaataggataaaggcagggcacagtggttcacgcctataatcccaacactttgggaagccgagacaggaggacggattgagcccaggagtttgagaccagcctgggcaacacagggagaccccgtctctacaaaaaataaaaaattagctgggcatggtggcacacgtctgtactgccagctacttgggaggctgaggtgggagaattgcctgagcctgggaagtggaggccgcagtgagctgtgattgcatcactacattcagcctgggtcacagagcaagatcctatctcaaaaactaaataagtaaataataaattaaaaaatatgaataaagtctggagttaaagtctggaataaagctagtagtaatg

SEQ ID NO: 56089 - DNA, 2171 bp, Homo sapiens
cacgcgtcgccacgcgtcgcggacgcgtgggtcgacccacgcgtcggctggagacgacgtgcagaaatggcacctcgaaaggggaaggaaaagaaggaagaacaggtcatcagcctcggacctcaggtggctgaaggagagaatgtatttggtgtctgccatatctttgcatccttcaatgacacttttgtccatgtcactgatctttctggcaaggaaaccatctgccgtgtgactggtgggatgaaggtaaaggcagaccgagatgaatcctcaccatatgctgctatgttggctgcccaggatgtggcccagaggtgcaaggagctgggtatcaccgccctacacatcaaactccgggccacaggaggaaataggaccaagacccctggacctggggcccagtcggccctcagagcccttgcccgctcgggtatgaagatcgggcggattgaggatgtcacccccatcccctctgacagcactcgcaggaaggggggtcgccgtggtcgccgtctgtgaacaagattcctcaaaatattttctgttaataaattgccttcatgtaaactgtttcaactccagccttctctccttcatcaggggctactcaggcatttgatttcttcctcctatttggcttcttgggagaaaggagcctgaggagagctgagatcctggtgctgcatttggggtcttttccatgctacttgcggcattaagttgccttggtcatctaaagcagaccaaggcgttggagacctcgttttgagtggagatgctggttctaaatatggaccaattcttaaagagccagagtgggaactgttgatccaagtgtagcctgaagcgaaagaggagccttccagacccatgccatatataaacacacgtgggtgtgcattctccccccacaccttctgtgcaaagctgggagctcactccactgcgtcttgctttttttcacttggcagatcttggagattgttccacatcagtacataaagtacataaagattgtcaccccacaaatacacaccaagtcctattttcatcagcgataaaaaagaaaagttcttgctttccggaagcttgcatgcggctctgagtacccagtgacaccagatggtactcagcgttttgcaagggattaccacaaggccccgtgatggtgcctgccatggttaggacaggctggtggctgggtagggttagtgagacccagtggagaggatgctgtgtgtcacaggctggagaggtgagaccattgaggtagtcagttgtagaggaaagaaaccagcaagaggggaaaatctgttgggatgctgcttttagcctttgatggcgtgttccaggcagagggaataagcaaataaatgggtcctgagacaaggggttactgtgatgaggcggcgttggttacatgccaaaccttgctagggattttaataacaacattgaatcttaacctgatgaaataacagtactcctggggaggcgggagggatagcattaggagatatacctaatgctaaatgacgagttaatgggtgcagcacaccaacatggcacatgtatacatatgtaacaaacctgcacgttgtgcacatgtaccctaaaacttaaagtataataaaaaaaaaaagcttgcaaaaaaaatataacagtactccttaaattgttaaaagtcatgaaagtcaaggacaggagattaaggaggcgtgaaaactaaatgcccattgtggtatcctggattggattctggaaccagaatagggtattagtataaaaactagtgaaataggataaaggcagggcacagtggttcacgcctataatcccaacactttgggaagccgagacaggaggacggattgagcccaggagtttgagaccagcctgggcaacacagggagaccccgtctctacaaaaaataaaaaattagctgggcatggtggcacacgtctgtactgccagctacttgggaggctgaggtgggagaattgcctgagcctgggaagtggaggccgcagtgagctgtgattgcatcactacattcagcctgggtcacagagcaagatcctatctcaaaaactaaataagtaaataataaattaaaaaatatgaataaagtctggagttaaagtctggaataaagctagtagtaatg

SEQ ID NO: 56090 - DNA, 2148 bp, Homo sapiens
agacgacagaagggccccgggagtctggagacgacgtgcagaaatggcacctcgaaaggggaaggaaaagaaggaagaacaggtcatcagcctcggacctcaggtggctgaaggagagaatgtatttggtgtctgccatatctttgcatccttcaatgacacttttgtccatgtcactgatctttctggcaaggaaaccatctgccgtgtgactggtgggatgaaggtaaaggcagaccgagatgaatcctcaccatatgctgctatgttggctgcccaggatgtggcccagaggtgcaaggagctgggtatcaccgccctacacatcaaactccgggccacaggaggaaataggaccaagacccctggacctggggcccagtcggccctcagagcccttgcccgctcgggtatgaagatcgggcggattgaggatgtcacccccatcccctctgacagcactcgcaggaaggggggtcgccgtggtcgccgtctgtgaacaagattcctcaaaatattttctgttaataaattgccttcatgtaaactgtttcaactccagccttctctccttcatcaggggctactcaggcatttgatttcttcctcctatttggcttcttgggagaaaggagcctgaggagagctgagatcctggtgctgcatttggggtcttttccatgctacttgcggcattaagttgccttggtcatctaaagcagaccaaggcgttggagacctcgttttgagtggagatgctggttctaaatatggaccaattcttaaagagccagagtgggaactgttgatccaagtgtagcctgaagcgaaagaggagccttccagacccatgccatatataaacacacgtgggtgtgcattctccccccacaccttctgtgcaaagctgggagctcactccactgcgtcttgctttttttcacttggcagatcttggagattgttccacatcagtacataaagtacataaagattgtcaccccacaaatacacaccaagtcctattttcatcagcgataaaaaagaaaagttcttgctttccggaagcttgcatgcggctctgagtacccagtgacaccagatggtactcagcgttttgcaagggattaccacaaggccccgtgatggtgcctgccatggttaggacaggctggtggctgggtagggttagtgagacccagtggagaggatgctgtgtgtcacaggctggagaggtgagaccattgaggtagtcagttgtagaggaaagaaaccagcaagaggggaaaatctgttgggatgctgcttttagcctttgatggcgtgttccaggcagagggaataagcaaataaatgggtcctgagacaaggggttactgtgatgaggcggcgttggttacatgccaaaccttgctagggattttaataacaacattgaatcttaacctgatgaaataacagtactcctggggaggcgggagggatagcattaggagatatacctaatgctaaatgacgagttaatgggtgcagcacaccaacatggcacatgtatacatatgtaacaaacctgcacgttgtgcacatgtaccctaaaacttaaagtataataaaaaaaaaaagcttgcaaaaaaaatataacagtactccttaaattgttaaaagtcatgaaagtcaaggacaggagattaaggaggcgtgaaaactaaatgcccattgtggtatcctggattggattctggaaccagaatagggtattagtataaaaactagtgaaataggataaaggcagggcacagtggttcacgcctataatcccaacactttgggaagccgagacaggaggacggattgagcccaggagtttgagaccagcctgggcaacacagggagaccccgtctctacaaaaaataaaaaattagctgggcatggtggcacacgtctgtactgccagctacttgggaggctgaggtgggagaattgcctgagcctgggaagtggaggccgcagtgagctgtgattgcatcactacattcagcctgggtcacagagcaagatcctatctcaaaaactaaataagtaaataataaattaaaaaatatgaataaagtctggagttaaagtctggaataaagctagtagtaatg

SEQ ID NO: 56091 - DNA, 2378 bp, Homo sapiens
  misc_feature (251)..(251): n is a, c, g, or t
cggtcctcaggtcctccatgtgtgccacatgcctccccctaaagggtacagggtctgcggaaatcgcgcattccacaaaggcggcccgttcatggagttggtttccattctttaccgcgatccccaactgtttgtgtagaccagtcatccgaggaccagacatcacagaaacttggctttcttgaagaagtgtatcttttgaatttgtgggggcttattcgtttgaccacccttaggagttcttgggggtngatctggagacgacgtgcagaaatggcacctcgaaaggggaaggaaaagaaggaagaacaggtcatcagcctcggacctcaggtggctgaaggagagaatgtatttggtgtctgccatatctttgcatccttcaatgacacttttgtccatgtcactgatctttctggcaaggaaaccatctgccgtgtgactggtgggatgaaggtaaaggcagaccgagatgaatcctcaccatatgctgctatgttggctgcccaggatgtggcccagaggtgcaaggagctgggtatcaccgccctacacatcaaactccgggccacaggaggaaataggaccaagacccctggacctggggcccagtcggccctcagagcccttgcccgctcgggtatgaagatcgggcggattgaggatgtcacccccatcccctctgacagcactcgcaggaaggggggtcgccgtggtcgccgtctgtgaacaagattcctcaaaatattttctgttaataaattgccttcatgtaaactgtttcaactccagccttctctccttcatcaggggctactcaggcatttgatttcttcctcctatttggcttcttgggagaaaggagcctgaggagagctgagatcctggtgctgcatttggggtcttttccatgctacttgcggcattaagttgccttggtcatctaaagcagaccaaggcgttggagacctcgttttgagtggagatgctggttctaaatatggaccaattcttaaagagccagagtgggaactgttgatccaagtgtagcctgaagcgaaagaggagccttccagacccatgccatatataaacacacgtgggtgtgcattctccccccacaccttctgtgcaaagctgggagctcactccactgcgtcttgctttttttcacttggcagatcttggagattgttccacatcagtacataaagtacataaagattgtcaccccacaaatacacaccaagtcctattttcatcagcgataaaaaagaaaagttcttgctttccggaagcttgcatgcggctctgagtacccagtgacaccagatggtactcagcgttttgcaagggattaccacaaggccccgtgatggtgcctgccatggttaggacaggctggtggctgggtagggttagtgagacccagtggagaggatgctgtgtgtcacaggctggagaggtgagaccattgaggtagtcagttgtagaggaaagaaaccagcaagaggggaaaatctgttgggatgctgcttttagcctttgatggcgtgttccaggcagagggaataagcaaataaatgggtcctgagacaaggggttactgtgatgaggcggcgttggttacatgccaaaccttgctagggattttaataacaacattgaatcttaacctgatgaaataacagtactcctggggaggcgggagggatagcattaggagatatacctaatgctaaatgacgagttaatgggtgcagcacaccaacatggcacatgtatacatatgtaacaaacctgcacgttgtgcacatgtaccctaaaacttaaagtataataaaaaaaaaaagcttgcaaaaaaaatataacagtactccttaaattgttaaaagtcatgaaagtcaaggacaggagattaaggaggcgtgaaaactaaatgcccattgtggtatcctggattggattctggaaccagaatagggtattagtataaaaactagtgaaataggataaaggcagggcacagtggttcacgcctataatcccaacactttgggaagccgagacaggaggacggattgagcccaggagtttgagaccagcctgggcaacacagggagaccccgtctctacaaaaaataaaaaattagctgggcatggtggcacacgtctgtactgccagctacttgggaggctgaggtgggagaattgcctgagcctgggaagtggaggccgcagtgagctgtgattgcatcactacattcagcctgggtcacagagcaagatcctatctcaaaaactaaataagtaaataataaattaaaaaatatgaataaagtctggagttaaagtctggaataaagctagtagtaatg

SEQ ID NO: 56092 - DNA, 2137 bp, Homo sapiens
tagttctagatcgcgatctagaacttgcagaaatggcacctcgaaaggggaaggaaaagaaggaagaacaggtcatcagcctcggacctcaggtggctgaaggagagaatgtatttggtgtctgccatatctttgcatccttcaatgacacttttgtccatgtcactgatctttctggcaaggaaaccatctgccgtgtgactggtgggatgaaggtaaaggcagaccgagatgaatcctcaccatatgctgctatgttggctgcccaggatgtggcccagaggtgcaaggagctgggtatcaccgccctacacatcaaactccgggccacaggaggaaataggaccaagacccctggacctggggcccagtcggccctcagagcccttgcccgctcgggtatgaagatcgggcggattgaggatgtcacccccatcccctctgacagcactcgcaggaaggggggtcgccgtggtcgccgtctgtgaacaagattcctcaaaatattttctgttaataaattgccttcatgtaaactgtttcaactccagccttctctccttcatcaggggctactcaggcatttgatttcttcctcctatttggcttcttgggagaaaggagcctgaggagagctgagatcctggtgctgcatttggggtcttttccatgctacttgcggcattaagttgccttggtcatctaaagcagaccaaggcgttggagacctcgttttgagtggagatgctggttctaaatatggaccaattcttaaagagccagagtgggaactgttgatccaagtgtagcctgaagcgaaagaggagccttccagacccatgccatatataaacacacgtgggtgtgcattctccccccacaccttctgtgcaaagctgggagctcactccactgcgtcttgctttttttcacttggcagatcttggagattgttccacatcagtacataaagtacataaagattgtcaccccacaaatacacaccaagtcctattttcatcagcgataaaaaagaaaagttcttgctttccggaagcttgcatgcggctctgagtacccagtgacaccagatggtactcagcgttttgcaagggattaccacaaggccccgtgatggtgcctgccatggttaggacaggctggtggctgggtagggttagtgagacccagtggagaggatgctgtgtgtcacaggctggagaggtgagaccattgaggtagtcagttgtagaggaaagaaaccagcaagaggggaaaatctgttgggatgctgcttttagcctttgatggcgtgttccaggcagagggaataagcaaataaatgggtcctgagacaaggggttactgtgatgaggcggcgttggttacatgccaaaccttgctagggattttaataacaacattgaatcttaacctgatgaaataacagtactcctggggaggcgggagggatagcattaggagatatacctaatgctaaatgacgagttaatgggtgcagcacaccaacatggcacatgtatacatatgtaacaaacctgcacgttgtgcacatgtaccctaaaacttaaagtataataaaaaaaaaaagcttgcaaaaaaaatataacagtactccttaaattgttaaaagtcatgaaagtcaaggacaggagattaaggaggcgtgaaaactaaatgcccattgtggtatcctggattggattctggaaccagaatagggtattagtataaaaactagtgaaataggataaaggcagggcacagtggttcacgcctataatcccaacactttgggaagccgagacaggaggacggattgagcccaggagtttgagaccagcctgggcaacacagggagaccccgtctctacaaaaaataaaaaattagctgggcatggtggcacacgtctgtactgccagctacttgggaggctgaggtgggagaattgcctgagcctgggaagtggaggccgcagtgagctgtgattgcatcactacattcagcctgggtcacagagcaagatcctatctcaaaaactaaataagtaaataataaattaaaaaatatgaataaagtctggagttaaagtctggaataaagctagtagtaatg

SEQ ID NO: 56093 - DNA, 2136 bp, Homo sapiens
  misc_feature (9)..(9): n is a, c, g, or t
ctgcagganttcggcacgaggacgtgcagaaatggcacctcgaaaggggaaggaaaagaaggaagaacaggtcatcagcctcggacctcaggtggctgaaggagagaatgtatttggtgtctgccatatctttgcatccttcaatgacacttttgtccatgtcactgatctttctggcaaggaaaccatctgccgtgtgactggtgggatgaaggtaaaggcagaccgagatgaatcctcaccatatgctgctatgttggctgcccaggatgtggcccagaggtgcaaggagctgggtatcaccgccctacacatcaaactccgggccacaggaggaaataggaccaagacccctggacctggggcccagtcggccctcagagcccttgcccgctcgggtatgaagatcgggcggattgaggatgtcacccccatcccctctgacagcactcgcaggaaggggggtcgccgtggtcgccgtctgtgaacaagattcctcaaaatattttctgttaataaattgccttcatgtaaactgtttcaactccagccttctctccttcatcaggggctactcaggcatttgatttcttcctcctatttggcttcttgggagaaaggagcctgaggagagctgagatcctggtgctgcatttggggtcttttccatgctacttgcggcattaagttgccttggtcatctaaagcagaccaaggcgttggagacctcgttttgagtggagatgctggttctaaatatggaccaattcttaaagagccagagtgggaactgttgatccaagtgtagcctgaagcgaaagaggagccttccagacccatgccatatataaacacacgtgggtgtgcattctccccccacaccttctgtgcaaagctgggagctcactccactgcgtcttgctttttttcacttggcagatcttggagattgttccacatcagtacataaagtacataaagattgtcaccccacaaatacacaccaagtcctattttcatcagcgataaaaaagaaaagttcttgctttccggaagcttgcatgcggctctgagtacccagtgacaccagatggtactcagcgttttgcaagggattaccacaaggccccgtgatggtgcctgccatggttaggacaggctggtggctgggtagggttagtgagacccagtggagaggatgctgtgtgtcacaggctggagaggtgagaccattgaggtagtcagttgtagaggaaagaaaccagcaagaggggaaaatctgttgggatgctgcttttagcctttgatggcgtgttccaggcagagggaataagcaaataaatgggtcctgagacaaggggttactgtgatgaggcggcgttggttacatgccaaaccttgctagggattttaataacaacattgaatcttaacctgatgaaataacagtactcctggggaggcgggagggatagcattaggagatatacctaatgctaaatgacgagttaatgggtgcagcacaccaacatggcacatgtatacatatgtaacaaacctgcacgttgtgcacatgtaccctaaaacttaaagtataataaaaaaaaaaagcttgcaaaaaaaatataacagtactccttaaattgttaaaagtcatgaaagtcaaggacaggagattaaggaggcgtgaaaactaaatgcccattgtggtatcctggattggattctggaaccagaatagggtattagtataaaaactagtgaaataggataaaggcagggcacagtggttcacgcctataatcccaacactttgggaagccgagacaggaggacggattgagcccaggagtttgagaccagcctgggcaacacagggagaccccgtctctacaaaaaataaaaaattagctgggcatggtggcacacgtctgtactgccagctacttgggaggctgaggtgggagaattgcctgagcctgggaagtggaggccgcagtgagctgtgattgcatcactacattcagcctgggtcacagagcaagatcctatctcaaaaactaaataagtaaataataaattaaaaaatatgaataaagtctggagttaaagtctggaataaagctagtagtaatg

SEQ ID NO: 56094 - DNA, 2156 bp, Homo sapiens
  misc_feature (6)..(6): n is a, c, g, or t
  misc_feature (8)..(8): n is a, c, g, or t
  misc_feature (26)..(26): n is a, c, g, or t
aaaccntnggctaggtacgaggctgngtggtgctggagacgacgtgcagaaatggcacctcgaaaggggaaggaaaagaaggaagaacaggtcatcagcctcggacctcaggtggctgaaggagagaatgtatttggtgtctgccatatctttgcatccttcaatgacacttttgtccatgtcactgatctttctggcaaggaaaccatctgccgtgtgactggtgggatgaaggtaaaggcagaccgagatgaatcctcaccatatgctgctatgttggctgcccaggatgtggcccagaggtgcaaggagctgggtatcaccgccctacacatcaaactccgggccacaggaggaaataggaccaagacccctggacctggggcccagtcggccctcagagcccttgcccgctcgggtatgaagatcgggcggattgaggatgtcacccccatcccctctgacagcactcgcaggaaggggggtcgccgtggtcgccgtctgtgaacaagattcctcaaaatattttctgttaataaattgccttcatgtaaactgtttcaactccagccttctctccttcatcaggggctactcaggcatttgatttcttcctcctatttggcttcttgggagaaaggagcctgaggagagctgagatcctggtgctgcatttggggtcttttccatgctacttgcggcattaagttgccttggtcatctaaagcagaccaaggcgttggagacctcgttttgagtggagatgctggttctaaatatggaccaattcttaaagagccagagtgggaactgttgatccaagtgtagcctgaagcgaaagaggagccttccagacccatgccatatataaacacacgtgggtgtgcattctccccccacaccttctgtgcaaagctgggagctcactccactgcgtcttgctttttttcacttggcagatcttggagattgttccacatcagtacataaagtacataaagattgtcaccccacaaatacacaccaagtcctattttcatcagcgataaaaaagaaaagttcttgctttccggaagcttgcatgcggctctgagtacccagtgacaccagatggtactcagcgttttgcaagggattaccacaaggccccgtgatggtgcctgccatggttaggacaggctggtggctgggtagggttagtgagacccagtggagaggatgctgtgtgtcacaggctggagaggtgagaccattgaggtagtcagttgtagaggaaagaaaccagcaagaggggaaaatctgttgggatgctgcttttagcctttgatggcgtgttccaggcagagggaataagcaaataaatgggtcctgagacaaggggttactgtgatgaggcggcgttggttacatgccaaaccttgctagggattttaataacaacattgaatcttaacctgatgaaataacagtactcctggggaggcgggagggatagcattaggagatatacctaatgctaaatgacgagttaatgggtgcagcacaccaacatggcacatgtatacatatgtaacaaacctgcacgttgtgcacatgtaccctaaaacttaaagtataataaaaaaaaaaagcttgcaaaaaaaatataacagtactccttaaattgttaaaagtcatgaaagtcaaggacaggagattaaggaggcgtgaaaactaaatgcccattgtggtatcctggattggattctggaaccagaatagggtattagtataaaaactagtgaaataggataaaggcagggcacagtggttcacgcctataatcccaacactttgggaagccgagacaggaggacggattgagcccaggagtttgagaccagcctgggcaacacagggagaccccgtctctacaaaaaataaaaaattagctgggcatggtggcacacgtctgtactgccagctacttgggaggctgaggtgggagaattgcctgagcctgggaagtggaggccgcagtgagctgtgattgcatcactacattcagcctgggtcacagagcaagatcctatctcaaaaactaaataagtaaataataaattaaaaaatatgaataaagtctggagttaaagtctggaataaagctagtagtaatg

SEQ ID NO: 56095 - DNA, 768 bp, Homo sapiens
cccactctctctttccggtgtggagtctggagacgacgtgcaggtaggaggcccgggcgcgacaatcggggggcatcctgcggcgaggggaccctgtggggcttgggacgagagacgggggtctttccgtgggaaccgagctaggtgccgggcaagagacgcgcggctggcccacctggatcctggccaactcgggattgagttcgttcctggtctcagaaggcccgttttgctttcagggaggagcttgtgaagtaaggtgcagaaatggcacctcgaaaggggaaggaaaagaaggaagaacaggtcatcagcctcggacctcaggtggctgaaggagagaatgtatttggtgtctgccatatctttgcatccttcaatgacacttttgtccatgtcactgatctttctggcaaggaaaccatctgccgtgtgactggtgggatgaaggtaaaggcagaccgagatgaatcctcaccatatgctgctatgttggctgcccaggatgtggcccagaggtgcaaggagctgggtatcaccgccctacacatcaaactccgggccacaggaggaaataggaccaagacccctggacctggggcccagtcggccctcagagcccttgcccgctcgggtatgaagatcgggcggattgaggatgtcacccccatcccctctgacagcactcgcaggaaggggggtcgccgtggtcgccgtctgtgaacaagattcctcaaaatattttctgttaataaattgccttcatgt

SEQ ID NO: 56096 - DNA, 1666 bp, Homo sapiens
ttaccatttatttgcagaattaacagtataataaactgctctacaagattttctatcaaggagtatttagaagagagatataaactgtaagcttataaaagtggtttctagagaaagtaagcaataataaaccctctcatataagttaggcatgtatttaaatttataagatacatttcttttgcttgatacaaatctcatcttaaatatacggctaaggaacagaaaaaaattcaaactgagacactcctgtaactctgggaaaattacacttatcaaattttacatataaatttagaatgactaatgaatgtttcagaaatacattaattaccaagatgctctgaaaagtacattactgtacatacagcctgaagttaacctttctatgttaaatgaaaaaactttgtcattcatcaggtcacagaaaccaaaaactaaacaatgcaaaaaaaaaaaaaatctaaaaataaaagaattttatatttgaagttattctggatattcgcaccattttagcttctgaaaaaaatgcaactatgaaatgaagacctcatatattttcatttatcaatataatgttaaaagtttcattccacccggtgtggagtctggagacgacgtgcagaaatggcacctcgaaaggggaaggaaaagaaggaagaacaggtcatcagcctcggacctcaggtggctgaaggagagaatgtatttggtgtctgccatatctttgcatccttcaatgacacttttgtccatgtcactgatctttctggcaaggaaaccatctgccgtgtgactggtgggatgaaggtaaaggcagaccgagatgaatcctcaccatatgctgctatgttggctgcccaggatgtggcccagaggtgcaaggagctgggtatcaccgccctacacatcaaactccgggccacaggaggaaataggaccaagacccctggacctggggcccagtcggccctcagagcccttgcccgctcgggtatgaagatcgggcggattgaggatgtcacccccatcccctctgacagcactcgcaggaaggggggtcgccgtggtcgccgtctgtgaacaagattcctcaaaatattttctgttaataaattgccttcatgtaaaaaaaaaaaaaaaaaaggcgagatagttctctcggcttcgccggtaatcccaacacttggggaggccaggacagatcactggaggtcaggagttcgagaccagcccagccaacatggcgaaaccatgtctctactaaaaatacaaaccttttggggacgcctgctgtagtcccagctactcgggaggctgaggcaggaggatcgttgaacccaggaagtgagactgcggtgagccgatatcggcacccacagggctcagcctggtcgacgggagggagaactccatctcaaggaaaacattaacacttaagtggtctcgaagaagcaatgtctcatccagttaggggcacactcggcggcgataggggggtcagtcaaattgggtcacccatatcacagaccacagctctactaggcgagccacacgtttttcaattaagaaaggccctggggcgcgaataaagggcattcttcatctggcgacggcagggctacgtagggaggaccttgggcagtaaacgaagctgtagtag

SEQ ID NO: 56097 - DNA, 1334 bp, Homo sapiens
  misc_feature (1222)..(1222): n is a, c, g, or t
  misc_feature (1245)..(1245): n is a, c, g, or t
  misc_feature (1253)..(1253): n is a, c, g, or t
  misc_feature (1256)..(1256): n is a, c, g, or t
  misc_feature (1258)..(1258): n is a, c, g, or t
  misc_feature (1260)..(1260): n is a, c, g, or t
  misc_feature (1272)..(1272): n is a, c, g, or t
  misc_feature (1274)..(1274): n is a, c, g, or t
  misc_feature (1288)..(1288): n is a, c, g, or t
  misc_feature (1303)..(1303): n is a, c, g, or t
ttaccatttatttgcagaattaacagtataataaactgctctacaagattttctatcaaggagtatttagaagagagatataaactgtaagcttataaaagtggtttctagagaaagtaagcaataataaaccctctcatataagttaggcatgtatttaaatttataagatacatttcttttgcttgatacaaatctcatcttaaatatacggctaaggaacagaaaaaaattcaaactgagacactcctgtaactctgggaaaattacacttatcaaattttacatataaatttagaatgactaatgaatgtttcagaaatacattaattaccaagatgctctgaaaagtacattactgtacatacagcctgaagttaacctttctatgttaaatgaaaaaactttgtcattcatcaggtcacagaaaccaaaaactaaacaatgcaaaaaaaaaaaaaatctaaaaataaaagaattttatatttgaagttattctggatattcgcaccattttagcttctgaaaaaaatgcaactatgaaatgaagacctcatatattttcatttatcaatataatgttaaaagtttcattccacccggtgtggagtctggagacgacgtgcagaaatggcacctcgaaaggggaaggaaaagaaggaagaacaggtcatcagcctcggacctcaggtggctgaaggagagaatgtatttggtgtctgccatatctttgcatccttcaatgacacttttgtccatgtcactgatctttctggcaaggaaaccatctgccgtgtgactggtgggatgaaggtaaaggcagaccgagatgaatcctcaccatatgctgctatgttggctgcccaggatgtggcccagaggtgcaaggagctgggtatcaccgccctacacatcaaactccgggccacaggaggaaataggaccaagacccctggacctggggcccagtcggccctcagagcccttgcccgctcgggtatgaagatcgggcggattgaggatgtcacccccatcccctctgacagcactcgcaggaaggggggtcgccgtggtcgccgtctgtgaacaagattcctcaaaatattttctgttaataaattgccttcatgtaaaaaaacaaaaaaaaaaaaaaaaaaaaaaaaaaaaaaaaaaaggggggggataaatggggggggggggaaaaagggggtatggaacgggnccatgggccaaaaggcggttccnggacccangtntntntggtccaagggngnaaatcggcagggtncccaatagggagcgnaataatggcggaaagccgagttaccggataa

SEQ ID NO: 56098 - DNA, 1281 bp, Homo sapiens
  misc_feature (1154)..(1154): n is a, c, g, or t
  misc_feature (1168)..(1169): n is a, c, g, or t
  misc_feature (1189)..(1189): n is a, c, g, or t
  misc_feature (1191)..(1191): n is a, c, g, or t
  misc_feature (1220)..(1220): n is a, c, g, or t
  misc_feature (1224)..(1224): n is a, c, g, or t
  misc_feature (1227)..(1228): n is a, c, g, or t
  misc_feature (1231)..(1231): n is a, c, g, or t
  misc_feature (1234)..(1234): n is a, c, g, or t
  misc_feature (1237)..(1237): n is a, c, g, or t
ttaccatttatttgcagaattaacagtataataaactgctctacaagattttctatcaaggagtatttagaagagagatataaactgtaagcttataaaagtggtttctagagaaagtaagcaataataaaccctctcatataagttaggcatgtatttaaatttataagatacatttcttttgcttgatacaaatctcatcttaaatatacggctaaggaacagaaaaaaattcaaactgagacactcctgtaactctgggaaaattacacttatcaaattttacatataaatttagaatgactaatgaatgtttcagaaatacattaattaccaagatgctctgaaaagtacattactgtacatacagcctgaagttaacctttctatgttaaatgaaaaaactttgtcattcatcaggtcacagaaaccaaaaactaaacaatgcaaaaaaaaaaaaaatctaaaaataaaagaattttatatttgaagttattctggatattcgcaccattttagcttctgaaaaaaatgcaactatgaaatgaagacctcatatattttcatttatcaatataatgttaaaagtttcattccacccggtgtggagtctggagacgacgtgcagaaatggcacctcgaaaggggaaggaaaagaaggaagaacaggtcatcagcctcggacctcaggtggctgaaggagagaatgtatttggtgtctgccatatctttgcatccttcaatgacacttttgtccatgtcactgatctttctggcaaggaaaccatctgccgtgtgactggtgggatgaaggtaaaggcagaccgagatgaatcctcaccatatgctgctatgttggctgcccaggatgtggcccagaggtgcaaggagctgggtatcaccgccctacacatcaaactccgggccacaggaggaaataggaccaagacccctggacctggggcccagtcggccctcagagcccttgcccgctcgggtatgaagatcgggcggattgaggatgtcacccccatcccctctgacagcactcgcaggaaggggggtcgccgtggtcgccgtctgtgaacaagattcctcaaaatattttctgttaataaattgccttcatgtaaaaaaaacaaaaaaaaaaaccncgggccgaattcgnnacaggcccaaaagaaggggngntccagaagccctaggtcccagggtccgcncaanggnnggncanaangggggccgggcgagcattccttcaaggaacgacccgggggagac

SEQ ID NO: 56099 - DNA, 1160 bp, Homo sapiens
ttaccatttatttgcagaattaacagtataataaactgctctacaagattttctatcaaggagtatttagaagagagatataaactgtaagcttataaaagtggtttctagagaaagtaagcaataataaaccctctcatataagttaggcatgtatttaaatttataagatacatttcttttgcttgatacaaatctcatcttaaatatacggctaaggaacagaaaaaaattcaaactgagacactcctgtaactctgggaaaattacacttatcaaattttacatataaatttagaatgactaatgaatgtttcagaaatacattaattaccaagatgctctgaaaagtacattactgtacatacagcctgaagttaacctttctatgttaaatgaaaaaactttgtcattcatcaggtcacagaaaccaaaaactaaacaatgcaaaaaaaaaaaaaatctaaaaataaaagaattttatatttgaagttattctggatattcgcaccattttagcttctgaaaaaaatgcaactatgaaatgaagacctcatatattttcatttatcaatataatgttaaaagtttcattccacccggtgtggagtctggagacgacgtgcagaaatggcacctcgaaaggggaaggaaaagaaggaagaacaggtcatcagcctcggacctcaggtggctgaaggagagaatgtatttggtgtctgccatatctttgcatccttcaatgacacttttgtccatgtcactgatctttctggcaaggaaaccatctgccgtgtgactggtgggatgaaggtaaaggcagaccgagatgaatcctcaccatatgctgctatgttggctgcccaggatgtggcccagaggtgcaaggagctgggtatcaccgccctacacatcaaactccgggccacaggaggaaataggaccaagacccctggacctggggcccagtcggccctcagagcccttgcccgctcgggtatgaagatcgggcggattgaggatgtcacccccatcccctctgacagcactcgcaggaaggggggtcgccgtggtcgccgtctgtgaacaagattcctcaaaatattttctgttaataaattgccttcatgtagcggacgagcattccgctgatgggggct

SEQ ID NO: 56100 - DNA, 1346 bp, Homo sapiens
  misc_feature (1234)..(1234): n is a, c, g, or t
  misc_feature (1257)..(1257): n is a, c, g, or t
  misc_feature (1265)..(1265): n is a, c, g, or t
  misc_feature (1268)..(1268): n is a, c, g, or t
  misc_feature (1270)..(1270): n is a, c, g, or t
  misc_feature (1272)..(1272): n is a, c, g, or t
  misc_feature (1284)..(1284): n is a, c, g, or t
  misc_feature (1286)..(1286): n is a, c, g, or t
  misc_feature (1300)..(1300): n is a, c, g, or t
  misc_feature (1315)..(1315): n is a, c, g, or t
ttaccatttatttgcagaattaacagtataataaactgctctacaagattttctatcaaggagtatttagaagagagatataaactgtaagcttataaaagtggtttctagagaaagtaagcaataataaaccctctcatataagttaggcatgtatttaaatttataagatacatttcttttgcttgatacaaatctcatcttaaatatacggctaaggaacagaaaaaaattcaaactgagacactcctgtaactctgggaaaattacacttatcaaattttacatataaatttagaatgactaatgaatgtttcagaaatacattaattaccaagatgctctgaaaagtacattactgtacatacagcctgaagttaacctttctatgttaaatgaaaaaactttgtcattcatcaggtcacagaaaccaaaaactaaacaatgcaaaaaaaaaaaaaatctaaaaataaaagaattttatatttgaagttattctggatattcgcaccattttagcttctgaaaaaaatgcaactatgaaatgaagacctcatatattttcatttatcaatataatgttaaaagtttcattccacccggtgtggagtctggagacgacgtgcagaaatggcacctcgaaaggggaaggaaaagaaggaagaacaggtcatcagcctcggacctcaggtggctgaaggagagaatgtatttggtgtctgccatatctttgcatccttcaatgacacttttgtccatgtcactgatctttctggcaaggaaaccatctgccgtgtgactggtgggatgaaggtaaaggcagaccgagatgaatcctcaccatatgctgctatgttggctgcccaggatgtggcccagaggtgcaaggagctgggtatcaccgccctacacatcaaactccgggccacaggaggaaataggaccaagacccctggacctggggcccagtcggccctcagagcccttgcccgctcgggtatgaagatcgggcggattgaggatgtcacccccatcccctctgacagcactcgcaggaaggggggtcgccgtggtcgccgtctgtgaacaagattcctcaaaatattttctgttaataaattgccttcatgtaaaaaaaaaaaaaaagaaaaaaaaaaaaagaaaaaacaaaaaaaaaaaaaaaaaaggggggggataaatggggggggggggaaaaagggggtatggaacgggnccatgggccaaaaggcggttccnggacccangtntntntggtccaagggngnaaatcggcagggtncccaatagggagcgnaataatggcggaaagccgagttaccggataa

SEQ ID NO: 56101 - DNA, 1537 bp, Homo sapiens
ttaccatttatttgcagaattaacagtataataaactgctctacaagattttctatcaaggagtatttagaagagagatataaactgtaagcttataaaagtggtttctagagaaagtaagcaataataaaccctctcatataagttaggcatgtatttaaatttataagatacatttcttttgcttgatacaaatctcatcttaaatatacggctaaggaacagaaaaaaattcaaactgagacactcctgtaactctgggaaaattacacttatcaaattttacatataaatttagaatgactaatgaatgtttcagaaatacattaattaccaagatgctctgaaaagtacattactgtacatacagcctgaagttaacctttctatgttaaatgaaaaaactttgtcattcatcaggtcacagaaaccaaaaactaaacaatgcaaaaaaaaaaaaaatctaaaaataaaagaattttatatttgaagttattctggatattcgcaccattttagcttctgaaaaaaatgcaactatgaaatgaagacctcatatattttcatttatcaatataatgttaaaagtttcattccacccggtgtggagtctggagacgacgtgcagaaatggcacctcgaaaggggaaggaaaagaaggaagaacaggtcatcagcctcggacctcaggtggctgaaggagagaatgtatttggtgtctgccatatctttgcatccttcaatgacacttttgtccatgtcactgatctttctggcaaggaaaccatctgccgtgtgactggtgggatgaaggtaaaggcagaccgagatgaatcctcaccatatgctgctatgttggctgcccaggatgtggcccagaggtgcaaggagctgggtatcaccgccctacacatcaaactccgggccacaggaggaaataggaccaagacccctggacctggggcccagtcggccctcagagcccttgcccgctcgggtatgaagatcgggcggattgaggatgtcacccccatcccctctgacagcactcgcaggaaggggggtcgccgtggtcgccgtctgtgaacaagattcctcaaaatattttctgttaataaattgccttcatgttaaaacaacaaaaaaaaaaaaaaaaaaaaaaaaaaaaaaaataaaaaaaagagaggggcgcgcgcgcgccctcaaaatattatccccgcgggggggcccccaagttaaggcgttacccaggttttctgtgtgacacaaggggggcccccaaatagtagggaggaggcgttatttataacagcctgggacggtggccgcggggttttaacacaagcgttctggacgtcgtggtggaaacacttgcgtacccatggagagcacctttgtggaagagaaggacaccctcaatccctgggaggagagagaacaacatcttgcggccacaagtaccctaatagagaagatttatagagcccctatgagggcgaaacctaaaaaaatctcaaacagcggttataaggggcac

SEQ ID NO: 56102 - DNA, 1385 bp, Homo sapiens
  misc_feature (1273)..(1273): n is a, c, g, or t
  misc_feature (1296)..(1296): n is a, c, g, or t
  misc_feature (1304)..(1304): n is a, c, g, or t
  misc_feature (1307)..(1307): n is a, c, g, or t
  misc_feature (1309)..(1309): n is a, c, g, or t
  misc_feature (1311)..(1311): n is a, c, g, or t
  misc_feature (1323)..(1323): n is a, c, g, or t
  misc_feature (1325)..(1325): n is a, c, g, or t
  misc_feature (1339)..(1339): n is a, c, g, or t
  misc_feature (1354)..(1354): n is a, c, g, or t
ttaccatttatttgcagaattaacagtataataaactgctctacaagattttctatcaaggagtatttagaagagagatataaactgtaagcttataaaagtggtttctagagaaagtaagcaataataaaccctctcatataagttaggcatgtatttaaatttataagatacatttcttttgcttgatacaaatctcatcttaaatatacggctaaggaacagaaaaaaattcaaactgagacactcctgtaactctgggaaaattacacttatcaaattttacatataaatttagaatgactaatgaatgtttcagaaatacattaattaccaagatgctctgaaaagtacattactgtacatacagcctgaagttaacctttctatgttaaatgaaaaaactttgtcattcatcaggtcacagaaaccaaaaactaaacaatgcaaaaaaaaaaaaaatctaaaaataaaagaattttatatttgaagttattctggatattcgcaccattttagcttctgaaaaaaatgcaactatgaaatgaagacctcatatattttcatttatcaatataatgttaaaagtttcattccacccggtgtggagtctggagacgacgtgcagaaatggcacctcgaaaggggaaggaaaagaaggaagaacaggtcatcagcctcggacctcaggtggctgaaggagagaatgtatttggtgtctgccatatctttgcatccttcaatgacacttttgtccatgtcactgatctttctggcaaggaaaccatctgccgtgtgactggtgggatgaaggtaaaggcagaccgagatgaatcctcaccatatgctgctatgttggctgcccaggatgtggcccagaggtgcaaggagctgggtatcaccgccctacacatcaaactccgggccacaggaggaaataggaccaagacccctggacctggggcccagtcggccctcagagcccttgcccgctcgggtatgaagatcgggcggattgaggatgtcacccccatcccctctgacagcactcgcaggaaggggggtcgccgtggtcgccgtctgtgaacaagattcctcaaaatattttctgttaataaattgccttcatgtacaaaaaaaaaaaaaaaaaaaaaaaaaaaaaaaaaaaaaaaaaaaaaaaaaaaagaaaaaaaaaaaaagaaaaaacaaaaaaaaaaaaaaaaaaggggggggataaatggggggggggggaaaaagggggtatggaacgggnccatgggccaaaaggcggttccnggacccangtntntntggtccaagggngnaaatcggcagggtncccaatagggagcgnaataatggcggaaagccgagttaccggataa

SEQ ID NO: 56103 - DNA, 1240 bp, Homo sapiens
ttaccatttatttgcagaattaacagtataataaactgctctacaagattttctatcaaggagtatttagaagagagatataaactgtaagcttataaaagtggtttctagagaaagtaagcaataataaaccctctcatataagttaggcatgtatttaaatttataagatacatttcttttgcttgatacaaatctcatcttaaatatacggctaaggaacagaaaaaaattcaaactgagacactcctgtaactctgggaaaattacacttatcaaattttacatataaatttagaatgactaatgaatgtttcagaaatacattaattaccaagatgctctgaaaagtacattactgtacatacagcctgaagttaacctttctatgttaaatgaaaaaactttgtcattcatcaggtcacagaaaccaaaaactaaacaatgcaaaaaaaaaaaaaatctaaaaataaaagaattttatatttgaagttattctggatattcgcaccattttagcttctgaaaaaaatgcaactatgaaatgaagacctcatatattttcatttatcaatataatgttaaaagtttcattccacccggtgtggagtctggagacgacgtgcagaaatggcacctcgaaaggggaaggaaaagaaggaagaacaggtcatcagcctcggacctcaggtggctgaaggagagaatgtatttggtgtctgccatatctttgcatccttcaatgacacttttgtccatgtcactgatctttctggcaaggaaaccatctgccgtgtgactggtgggatgaaggtaaaggcagaccgagatgaatcctcaccatatgctgctatgttggctgcccaggatgtggcccagaggtgcaaggagctgggtatcaccgccctacacatcaaactccgggccacaggaggaaataggaccaagacccctggacctggggcccagtcggccctcagagcccttgcccgctcgggtatgaagatcgggcggattgaggatgtcacccccatcccctctgacagcactcgcaggaaggggggtcgccgtggtcgccgtctgtgaacaagattcctcaaaatattttctgttaataaattgccttcatgtacatgacgaacttcttgctttaactctaggtggtgccaggtacctaattcggcctatagtgagacgaattacaattcactggccctcgctttacaacgtcgtgactgtg

SEQ ID NO: 56104 - DNA, 3992 bp, Homo sapiens
ttaccatttatttgcagaattaacagtataataaactgctctacaagattttctatcaaggagtatttagaagagagatataaactgtaagcttataaaagtggtttctagagaaagtaagcaataataaaccctctcatataagttaggcatgtatttaaatttataagatacatttcttttgcttgatacaaatctcatcttaaatatacggctaaggaacagaaaaaaattcaaactgagacactcctgtaactctgggaaaattacacttatcaaattttacatataaatttagaatgactaatgaatgtttcagaaatacattaattaccaagatgctctgaaaagtacattactgtacatacagcctgaagttaacctttctatgttaaatgaaaaaactttgtcattcatcaggtcacagaaaccaaaaactaaacaatgcaaaaaaaaaaaaaatctaaaaataaaagaattttatatttgaagttattctggatattcgcaccattttagcttctgaaaaaaatgcaactatgaaatgaagacctcatatattttcatttatcaatataatgttaaaagtttcattccacccggtgtggagtctggagacgacgtgcagaaatggcacctcgaaaggggaaggaaaagaaggaagaacaggtcatcagcctcggacctcaggtggctgaaggagagaatgtatttggtgtctgccatatctttgcatccttcaatgacacttttgtccatgtcactgatctttctggcaaggaaaccatctgccgtgtgactggtgggatgaaggtaaaggcagaccgagatgaatcctcaccatatgctgctatgttggctgcccaggatgtggcccagaggtgcaaggagctgggtatcaccgccctacacatcaaactccgggccacaggaggaaataggaccaagacccctggacctggggcccagtcggccctcagagcccttgcccgctcgggtatgaagatcgggcggattgggtaagtgcccccctctagctaatgcttgggtttattttgaagcattggccccaaaaagcacgtgctgtgcccagtggatgtgcagcggctggtctggtcacttttggcagttaagtttgttaagggaggctgcaagaggcaccttgtgacttaaaaatctctccctgaatatctctgtcaccttgatatgaatgtcctgtttcatttgtgaatctctgtcctacactgcctggtgcaggtaaaactgacaagagatgaattgtcctttcctccattcttgaggtcattgctattagcattttgtgtgtaccatctcctgcattgtaggatgttcagcatttttggtttccgcctactaaatatcagttgggcatgccagtcgtgtgacagccaaaaatgaagtggggggtaccagcttctgttattaataccctcaggcctgtgatctcctggctccttacagctcttaggaagggaacagtagtctttccctgcacattgttctgtgcagttagtagcgacatacactgacgccccaggccaaagttcctactgtgtcctacttgaaggatgattttgttttcttgagacagggtctggctctgttgcgtgggctggaattcagtggcacaatctcagctcactgtaaatttcgcctcgtgggcggatctgtccaaaggatcctcccacctgcatctactgagtagctgggacaacagtgtgtgccacaccgggctttttttttttgtagcggggagtttcaccatgttgcccaggttggtcccaaactcctggcctcaggcgttccaccagcctcagtctcccaaagcccaaagtgctaggattacaggcatgagccaccggcgcccagccttaaaagattttttcagactttttttcagtgtctttttacttaatgaaaacgagacagttgcagttaccctgtctaaaagggttttttcctctagagaagacggtgggctagatgtcagaacctggatttgtcctgtgcctctgacatcttgcgcacagctcagcctgtttccctttctggaaagtgagttaagaccacgtcaggaaattcgaggaactggcagatggggccacttcatgttcacatccatctgttaggtactggggagtcatttggggagcagcaggatctgttgctgattggttaggccattggtctagggagtcctgggggcccttcccatccagctccaggcaatgacgctttctcttcctccccacagaggatgtcacccccatcccctctgacagcactcgcaggaaggggggtcgccgtggtcgccgtctgtgaacaagattcctcaaaatattttctgttaataaattgccttcatgtaaactgtttcaactccagccttctctccttcatcaggggctactcaggcatttgatttcttcctcctatttggcttcttgggagaaaggagcctgaggagagctgagatcctggtgctgcatttggggtcttttccatgctacttgcggcattaagttgccttggtcatctaaagcagaccaaggcgttggagacctcgttttgagtggagatgctggttctaaatatggaccaattcttaaagagccagagtgggaactgttgatccaagtgtagcctgaagcgaaagaggagccttccagacccatgccatatataaacacacgtgggtgtgcattctccccccacaccttctgtgcaaagctgggagctcactccactgcgtcttgctttttttcacttggcagatcttggagattgttccacatcagtacataaagtacataaagattgtcaccccacaaatacacaccaagtcctattttcatcagcgataaaaaagaaaagttcttgctttccggaagcttgcatgcggctctgagtacccagtgacaccagatggtactcagcgttttgcaagggattaccacaaggccccgtgatggtgcctgccatggttaggacaggctggtggctgggtagggttagtgagacccagtggagaggatgctgtgtgtcacaggctggagaggtgagaccattgaggtagtcagttgtagaggaaagaaaccagcaagaggggaaaatctgttgggatgctgcttttagcctttgatggcgtgttccaggcagagggaataagcaaataaatgggtcctgagacaaggggttactgtgatgaggcggcgttggttacatgccaaaccttgctagggattttaataacaacattgaatcttaacctgatgaaataacagtactcctggggaggcgggagggatagcattaggagatatacctaatgctaaatgacgagttaatgggtgcagcacaccaacatggcacatgtatacatatgtaacaaacctgcacgttgtgcacatgtaccctaaaacttaaagtataataaaaaaaaaaagcttgcaaaaaaaatataacagtactccttaaattgttaaaagtcatgaaagtcaaggacaggagattaaggaggcgtgaaaactaaatgcccattgtggtatcctggattggattctggaaccagaatagggtattagtataaaaactagtgaaataggataaaggcagggcacagtggttcacgcctataatcccaacactttgggaagccgagacaggaggacggattgagcccaggagtttgagaccagcctgggcaacacagggagaccccgtctctacaaaaaataaaaaattagctgggcatggtggcacacgtctgtactgccagctacttgggaggctgaggtgggagaattgcctgagcctgggaagtggaggccgcagtgagctgtgattgcatcactacattcagcctgggtcacagagcaagatcctatctcaaaaactaaataagtaaataataaattaaaaaatatgaataaagtctggagttaaagtctggaataaagctagtagtaatg

SEQ ID NO: 56105 - DNA, 2388 bp, Homo sapiens
ttaccatttatttgcagaattaacagtataataaactgctctacaagattttctatcaaggagtatttagaagagagatataaactgtaagcttataaaagtggtttctagagaaagtaagcaataataaaccctctcatataagttaggcatgtatttaaatttataagatacatttcttttgcttgatacaaatctcatcttaaatatacggctaaggaacagaaaaaaattcaaactgagacactcctgtaactctgggaaaattacacttatcaaattttacatataaatttagaatgactaatgaatgtttcagaaatacattaattaccaagatgctctgaaaagtacattactgtacatacagcctgaagttaacctttctatgttaaatgaaaaaactttgtcattcatcaggtcacagaaaccaaaaactaaacaatgcaaaaaaaaaaaaaatctaaaaataaaagaattttatatttgaagttattctggatattcgcaccattttagcttctgaaaaaaatgcaactatgaaatgaagacctcatatattttcatttatcaatataatgttaaaagtttcattccacccggtgtggagtctggagacgacgtgcagaaatggcacctcgaaaggggaaggaaaagaaggaagaacaggtcatcagcctcggacctcaggtggctgaaggagagaatgtatttggtgtctgccatatctttgcatccttcaatgacacttttgtccatgtcactgatctttctggcaaggaaaccatctgccgtgtgactggtgggatgaaggtaaaggcagaccgagatgaatcctcaccatatgctgctatgttggctgcccaggatgtggcccagaggtgcaaggagctgggtatcaccgccctacacatcaaactccgggccacaggaggaaataggaccaagacccctggacctggggcccagtcggccctcagagcccttgcccgctcgggtatgaagatcgggcggattgggtaagtgcccccctctagctaatgcttgggtttattttgaagcattggccccaaaaagcacgtgctgtgcccagtggatgtgcagcggctggtctggtcacttttggcagttaagtttgttaagggaggctgcaagaggcaccttgtgacttaaaaatctctccctgaatatctctgtcaccttgatatgaatgtcctgtttcatttgtgaatctctgtcctacactgcctggtgcaggtaaaactgacaagagatgaattgtcctttcctccattcttgaggtcattgctattagcattttgtgtgtaccatctcctgcattgtaggatgttcagcatttttggtttccgcctactaaatatcagttgggcatgccagtcgtgtgacagccaaaaatgaagtggggggtaccagcttctgttattaataccctcaggcctgtgatctcctggctccttacagctcttaggaagggaacagtagtctttccctgcacattgttctgtgcagttagtagcgacatacactgacgccccaggccaaagttcctactgtgtcctacttgaaggatgattttgttttcttgagacagggtctggctctgttgcgtgggctggaattcagtggcacaatctcagctcactgtaaatttcgcctcgtgggcggatctgtccaaaggatcctcccacctgcatctactgagtagctgggacaacagtgtgtgccacaccgggctttttttttttgtagcggggagtttcaccatgttgcccaggttggtcccaaactcctggcctcaggcgttccaccagcctcagtctcccaaagcccaaagtgctaggattacaggcatgagccaccggcgcccagccttaaaagattttttcagactttttttcagtgtctttttacttaatgaaaacgagacagttgcagttaccctgtctaaaagggttttttcctctagagaagacggtgggctagatgtcagaacctggatttgtcctgtgcctctgacatcttgcgcacagctcagcctgtttccctttctggaaagtgagttaagaccacgtcaggaaattcgaggaactggcagatggggccacttcatgttcacatccatctgttaggtactggggagtcatttggggagcagcaggatctgttgctgattggttaggccattggtctagggagtcctgggggcccttcccatccagctccaggcaatgacgctttctcttcctccccacagaggatgtcacccccatcccctctgacagcactcgcaggaaggggggtcgccgtggtcgccgtctgtgaacaagattcctcaaaatattttctgttaataaattgccttcatgt

SEQ ID NO: 56106 - DNA, 1948 bp, Homo sapiens
  misc_feature (1645)..(1645): n is a, c, g, or t
  misc_feature (1660)..(1660): n is a, c, g, or t
  misc_feature (1665)..(1666): n is a, c, g, or t
  misc_feature (1715)..(1715): n is a, c, g, or t
  misc_feature (1728)..(1728): n is a, c, g, or t
  misc_feature (1836)..(1836): n is a, c, g, or t
  misc_feature (1859)..(1859): n is a, c, g, or t
  misc_feature (1867)..(1867): n is a, c, g, or t
  misc_feature (1870)..(1870): n is a, c, g, or t
  misc_feature (1872)..(1872): n is a, c, g, or t
  misc_feature (1874)..(1874): n is a, c, g, or t
  misc_feature (1886)..(1886): n is a, c, g, or t
  misc_feature (1888)..(1888): n is a, c, g, or t
  misc_feature (1902)..(1902): n is a, c, g, or t
  misc_feature (1917)..(1917): n is a, c, g, or t
ttaccatttatttgcagaattaacagtataataaactgctctacaagattttctatcaaggagtatttagaagagagatataaactgtaagcttataaaagtggtttctagagaaagtaagcaataataaaccctctcatataagttaggcatgtatttaaatttataagatacatttcttttgcttgatacaaatctcatcttaaatatacggctaaggaacagaaaaaaattcaaactgagacactcctgtaactctgggaaaattacacttatcaaattttacatataaatttagaatgactaatgaatgtttcagaaatacattaattaccaagatgctctgaaaagtacattactgtacatacagcctgaagttaacctttctatgttaaatgaaaaaactttgtcattcatcaggtcacagaaaccaaaaactaaacaatgcaaaaaaaaaaaaaatctaaaaataaaagaattttatatttgaagttattctggatattcgcaccattttagcttctgaaaaaaatgcaactatgaaatgaagacctcatatattttcatttatcaatataatgttaaaagtttcattccacccggtgtggagtctggagacgacgtgcagaaatggcacctcgaaaggggaaggaaaagaaggaagaacaggtcatcagcctcggacctcaggtggctgaaggagagaatgtatttggtgtctgccatatctttgcatccttcaatgacacttttgtccatgtcactgatctttctggcaaggaaaccatctgccgtgtgactggtgggatgaaggtaaaggcagaccgagatgaatcctcaccatatgctgctatgttggctgcccaggatgtggcccagaggtgcaaggagctgggtatcaccgccctacacatcaaactccgggccacaggaggaaataggaccaagacccctggacctggggcccagtcggccctcagagcccttgcccgctcgggtatgaagatcgggcggattgggtaagtgcccccctctagctaatgcttgggtttattttgaagcattggccccaaaaagcacgtgctgtgcccagtggatgtgcagcggctggtctggtcacttttggcagttaagtttgttaagggaggctgcaagaggcaccttgtgacttaaaaatctctccctgaatatctctgtcaccttgatatgaatgtcctgtttcatttgtgaatctctgtcctacactgcctggtgcaggtaaaactgacaagagatgaattgtcctttcctccattcttgaggtcattgctattagcattttgtgtgtaccatctcctgcattgtaggatgttcagcatttttggtttccgcctactaaatatcagttgggcatgccagtcgtgtgacagccaaaaatgaagtggggggtaccagcttctgttattaataccctcaggcctgtgatctcctggctccttacagctcttaggaagggaacagtagtctttccctgcacattgttctgtgcagttagtagcgacatacactgacgccccaggccaaagttcctactgtgtcctacttgaaggatgattttgttttcttgagaccctgtctgaaagaaagagagaaagaaagaaagaanagagagagaaagaanagaanngaaagaaaagggaaagatggaaggaaggaaggaaaaagaaagagaaagngagagagataggngagggaaaaaaaaaaaaaaagaaaaaaaaaaaaagaaaaaacaaaaaaaaaaaaaaaaaaggggggggataaatggggggggggggaaaaagggggtatggaacgggnccatgggccaaaaggcggttccnggacccangtntntntggtccaagggngnaaatcggcagggtncccaatagggagcgnaataatggcggaaagccgagttaccggataa

SEQ ID NO: 56107 - DNA, 1090 bp, Homo sapiens
  misc_feature (1058)..(1058): n is a, c, g, or t
ttaccatttatttgcagaattaacagtataataaactgctctacaagattttctatcaaggagtatttagaagagagatataaactgtaagcttataaaagtggtttctagagaaagtaagcaataataaaccctctcatataagttaggcatgtatttaaatttataagatacatttcttttgcttgatacaaatctcatcttaaatatacggctaaggaacagaaaaaaattcaaactgagacactcctgtaactctgggaaaattacacttatcaaattttacatataaatttagaatgactaatgaatgtttcagaaatacattaattaccaagatgctctgaaaagtacattactgtacatacagcctgaagttaacctttctatgttaaatgaaaaaactttgtcattcatcaggtcacagaaaccaaaaactaaacaatgcaaaaaaaaaaaaaatctaaaaataaaagaattttatatttgaagttattctggatattcgcaccattttagcttctgaaaaaaatgcaactatgaaatgaagacctcatatattttcatttatcaatataatgttaaaagtttcattccacccggtgtggagtctggagacgacgtgcagaaatggcacctcgaaaggggaaggaaaagaaggaagaacaggtcatcagcctcggacctcaggtggctgaaggagagaatgtatttggtgtctgccatatctttgcatccttcaatgacacttttgtccatgtcactgatctttctggcaaggaaaccatctgccgtgtgactggtgggatgaaggtaaaggcagaccgagatgaatcctcaccatatgctgctatgttggctgcccaggatgtggcccagaggtgcaaggagctgggtatcaccgccctacacatcaaactccgggccacaggaggaaataggaccaagacccctggacctggggcccagtcggccctcagagcccttgcccgctcgggtatgaagatcgggcggattgtaagggttgtcaacccccattccccttttgacagcaattngcagggaagggggggttcgcccttggttcgcc

SEQ ID NO: 56108 - DNA, 2104 bp, Homo sapiens
aattacggctaggtacgaggctgggtggtggagtctggagacgacgtgcagaaatggcacctcgaaaggggaagaatgtatttggtgtctgccatatctttgcatccttcaatgacacttttgtccatgtcactgatctttctggcaaggaaaccatctgccgtgtgactggtgggatgaaggtaaaggcagaccgagatgaatcctcaccatatgctgctatgttggctgcccaggatgtggcccagaggtgcaaggagctgggtatcaccgccctacacatcaaactccgggccacaggaggaaataggaccaagacccctggacctggggcccagtcggccctcagagcccttgcccgctcgggtatgaagatcgggcggattgaggatgtcacccccatcccctctgacagcactcgcaggaaggggggtcgccgtggtcgccgtctgtgaacaagattcctcaaaatattttctgttaataaattgccttcatgtaaactgtttcaactccagccttctctccttcatcaggggctactcaggcatttgatttcttcctcctatttggcttcttgggagaaaggagcctgaggagagctgagatcctggtgctgcatttggggtcttttccatgctacttgcggcattaagttgccttggtcatctaaagcagaccaaggcgttggagacctcgttttgagtggagatgctggttctaaatatggaccaattcttaaagagccagagtgggaactgttgatccaagtgtagcctgaagcgaaagaggagccttccagacccatgccatatataaacacacgtgggtgtgcattctccccccacaccttctgtgcaaagctgggagctcactccactgcgtcttgctttttttcacttggcagatcttggagattgttccacatcagtacataaagtacataaagattgtcaccccacaaatacacaccaagtcctattttcatcagcgataaaaaagaaaagttcttgctttccggaagcttgcatgcggctctgagtacccagtgacaccagatggtactcagcgttttgcaagggattaccacaaggccccgtgatggtgcctgccatggttaggacaggctggtggctgggtagggttagtgagacccagtggagaggatgctgtgtgtcacaggctggagaggtgagaccattgaggtagtcagttgtagaggaaagaaaccagcaagaggggaaaatctgttgggatgctgcttttagcctttgatggcgtgttccaggcagagggaataagcaaataaatgggtcctgagacaaggggttactgtgatgaggcggcgttggttacatgccaaaccttgctagggattttaataacaacattgaatcttaacctgatgaaataacagtactcctggggaggcgggagggatagcattaggagatatacctaatgctaaatgacgagttaatgggtgcagcacaccaacatggcacatgtatacatatgtaacaaacctgcacgttgtgcacatgtaccctaaaacttaaagtataataaaaaaaaaaagcttgcaaaaaaaatataacagtactccttaaattgttaaaagtcatgaaagtcaaggacaggagattaaggaggcgtgaaaactaaatgcccattgtggtatcctggattggattctggaaccagaatagggtattagtataaaaactagtgaaataggataaaggcagggcacagtggttcacgcctataatcccaacactttgggaagccgagacaggaggacggattgagcccaggagtttgagaccagcctgggcaacacagggagaccccgtctctacaaaaaataaaaaattagctgggcatggtggcacacgtctgtactgccagctacttgggaggctgaggtgggagaattgcctgagcctgggaagtggaggccgcagtgagctgtgattgcatcactacattcagcctgggtcacagagcaagatcctatctcaaaaactaaataagtaaataataaattaaaaaatatgaataaagtctggagttaaagtctggaataaagctagtagtaatg

SEQ ID NO: 56109 - DNA, 1303 bp, Homo sapiens
cccactctctctttccggtgtggagtctggagacgacgtgcaggtaggaggcccgggcgcgacaatcggggggcatcctgcggcgaggggaccctgtggggcttgggacgagagacgggggtctttccgtgggaaccgagctaggtgccgggcaagagacgcgcggctggcccacctggatcctggccaactcgggattgagttcgttcctggtctcagaaggcccgttttgctttcagggaggagcttgtgaagtaaggtgcagaaatggcacctcgaaaggggaaggaaaagaaggaagaacaggtcatcagcctcggacctcaggtggctgaaggagagaatgtatttggtgtctgccatatctttgcatccttcaatgacacttttgtccatgtcactgatctttctggcaaggaaaccatctgccgtgtgactggtgggatgaaggtaaaggcagaccgagatgaatcctcaccatatgctgctatgttggctgcccaggatgtggcccagaggtgcaaggagctgggtatcaccgccctacacatcaaactccgggccacaggaggaaataggaccaagacccctggacctggggcccagtcggccctcagagcccttgcccgctcgggtatgaagatcgggcggattgaggatgtcacccccatcccctctgacagcactcgcaggaaggggggtcgccgtggtcgccgtctgtgaacaagattcctcaaaatattttctgttaataaattgccttcatgtaaaaaaaaaaaaaaaaaaggcgagatagttctctcggcttcgccggtaatcccaacacttggggaggccaggacagatcactggaggtcaggagttcgagaccagcccagccaacatggcgaaaccatgtctctactaaaaatacaaaccttttggggacgcctgctgtagtcccagctactcgggaggctgaggcaggaggatcgttgaacccaggaagtgagactgcggtgagccgatatcggcacccacagggctcagcctggtcgacgggagggagaactccatctcaaggaaaacattaacacttaagtggtctcgaagaagcaatgtctcatccagttaggggcacactcggcggcgataggggggtcagtcaaattgggtcacccatatcacagaccacagctctactaggcgagccacacgtttttcaattaagaaaggccctggggcgcgaataaagggcattcttcatctggcgacggcagggctacgtagggaggaccttgggcagtaaacgaagctgtagtag

SEQ ID NO: 56110 - DNA, 2062 bp, Homo sapiens
gcctgcggccgctactactactactaaattcgcggccgcgtcgacactggagacgcgttgcatccttcaatgacacttttgtccatgtcactgatctttctggcaaggaaaccatctgccgtgtgactggtgggatgaaggtaaaggcagaccgagatgaatcctcaccatatgctgctatgttggctgcccaggatgtggcccagaggtgcaaggagctgggtatcaccgccctacacatcaaactccgggccacaggaggaaataggaccaagacccctggacctggggcccagtcggccctcagagcccttgcccgctcgggtatgaagatcgggcggattgaggatgtcacccccatcccctctgacagcactcgcaggaaggggggtcgccgtggtcgccgtctgtgaacaagattcctcaaaatattttctgttaataaattgccttcatgtaaactgtttcaactccagccttctctccttcatcaggggctactcaggcatttgatttcttcctcctatttggcttcttgggagaaaggagcctgaggagagctgagatcctggtgctgcatttggggtcttttccatgctacttgcggcattaagttgccttggtcatctaaagcagaccaaggcgttggagacctcgttttgagtggagatgctggttctaaatatggaccaattcttaaagagccagagtgggaactgttgatccaagtgtagcctgaagcgaaagaggagccttccagacccatgccatatataaacacacgtgggtgtgcattctccccccacaccttctgtgcaaagctgggagctcactccactgcgtcttgctttttttcacttggcagatcttggagattgttccacatcagtacataaagtacataaagattgtcaccccacaaatacacaccaagtcctattttcatcagcgataaaaaagaaaagttcttgctttccggaagcttgcatgcggctctgagtacccagtgacaccagatggtactcagcgttttgcaagggattaccacaaggccccgtgatggtgcctgccatggttaggacaggctggtggctgggtagggttagtgagacccagtggagaggatgctgtgtgtcacaggctggagaggtgagaccattgaggtagtcagttgtagaggaaagaaaccagcaagaggggaaaatctgttgggatgctgcttttagcctttgatggcgtgttccaggcagagggaataagcaaataaatgggtcctgagacaaggggttactgtgatgaggcggcgttggttacatgccaaaccttgctagggattttaataacaacattgaatcttaacctgatgaaataacagtactcctggggaggcgggagggatagcattaggagatatacctaatgctaaatgacgagttaatgggtgcagcacaccaacatggcacatgtatacatatgtaacaaacctgcacgttgtgcacatgtaccctaaaacttaaagtataataaaaaaaaaaagcttgcaaaaaaaatataacagtactccttaaattgttaaaagtcatgaaagtcaaggacaggagattaaggaggcgtgaaaactaaatgcccattgtggtatcctggattggattctggaaccagaatagggtattagtataaaaactagtgaaataggataaaggcagggcacagtggttcacgcctataatcccaacactttgggaagccgagacaggaggacggattgagcccaggagtttgagaccagcctgggcaacacagggagaccccgtctctacaaaaaataaaaaattagctgggcatggtggcacacgtctgtactgccagctacttgggaggctgaggtgggagaattgcctgagcctgggaagtggaggccgcagtgagctgtgattgcatcactacattcagcctgggtcacagagcaagatcctatctcaaaaactaaataagtaaataataaattaaaaaatatgaataaagtctggagttaaagtctggaataaagctagtagtaatg

SEQ ID NO: 56111 - DNA, 2777 bp, Homo sapiens
cccactctctctttccggtgtggagtctggagacgacgtgcagtgcagaaatggcacctcgaaaggggaaggaaaagaaggaagaacaggtcatcagcctcggacctcaggtggctgaaggagagaatgtatttggtgtctgccatatctttgcatccttcaatgacacttttgtccatgtcactgatctttctggcaagtgagtacctgggtggagaggcatccagctggcaaaaggctgaggaaggcaatggctgggacgggctagcagttcaggggattctctctaaagaaatgctgttttgtccaggtaagaaaatgtgcttgtccatttagcccacaaatattgtgatttcccaggggttacaagagaggagacacattcttcgtccttaacagcgtgatggtcattgaatccttggtttcttgggaattatcttctttccctagttccctttgcaggagcagcagtggactgcaagtgggctctgggtgcgggttcgacggccatttagcaagttgtgacttgtgtgaaatcactcagattctgagttttggtttcctcatatgtaaaattaggacagtaatgtctaccttgtggagtaatggtaaggattaaatgcaaaagtagatatataaaatgttaatactgagtatagctatattgggccattcaaccccactggactgaactccatgagggcagagcccatgaccatcatcctccaccatgactgagctgtgttgctcttcactcattaggatatcgtaagcactccttgttggacgaggaagaaatgaccctgtgcttttgtccccagggaaaccatctgccgtgtgactggtgggatgaaggtaaaggcagaccgagatgaatcctcaccatatgctgctatgttggctgcccaggatgtggcccagaggtgcaaggagctgggtatcaccgccctacacatcaaactccgggccacaggaggaaataggaccaagacccctggacctggggcccagtcggccctcagagcccttgcccgctcgggtatgaagatcgggcggattgaggatgtcacccccatcccctctgacagcactcgcaggaaggggggtcgccgtggtcgccgtctgtgaacaagattcctcaaaatattttctgttaataaattgccttcatgtaaactgtttcaactccagccttctctccttcatcaggggctactcaggcatttgatttcttcctcctatttggcttcttgggagaaaggagcctgaggagagctgagatcctggtgctgcatttggggtcttttccatgctacttgcggcattaagttgccttggtcatctaaagcagaccaaggcgttggagacctcgttttgagtggagatgctggttctaaatatggaccaattcttaaagagccagagtgggaactgttgatccaagtgtagcctgaagcgaaagaggagccttccagacccatgccatatataaacacacgtgggtgtgcattctccccccacaccttctgtgcaaagctgggagctcactccactgcgtcttgctttttttcacttggcagatcttggagattgttccacatcagtacataaagtacataaagattgtcaccccacaaatacacaccaagtcctattttcatcagcgataaaaaagaaaagttcttgctttccggaagcttgcatgcggctctgagtacccagtgacaccagatggtactcagcgttttgcaagggattaccacaaggccccgtgatggtgcctgccatggttaggacaggctggtggctgggtagggttagtgagacccagtggagaggatgctgtgtgtcacaggctggagaggtgagaccattgaggtagtcagttgtagaggaaagaaaccagcaagaggggaaaatctgttgggatgctgcttttagcctttgatggcgtgttccaggcagagggaataagcaaataaatgggtcctgagacaaggggttactgtgatgaggcggcgttggttacatgccaaaccttgctagggattttaataacaacattgaatcttaacctgatgaaataacagtactcctggggaggcgggagggatagcattaggagatatacctaatgctaaatgacgagttaatgggtgcagcacaccaacatggcacatgtatacatatgtaacaaacctgcacgttgtgcacatgtaccctaaaacttaaagtataataaaaaaaaaaagcttgcaaaaaaaatataacagtactccttaaattgttaaaagtcatgaaagtcaaggacaggagattaaggaggcgtgaaaactaaatgcccattgtggtatcctggattggattctggaaccagaatagggtattagtataaaaactagtgaaataggataaaggcagggcacagtggttcacgcctataatcccaacactttgggaagccgagacaggaggacggattgagcccaggagtttgagaccagcctgggcaacacagggagaccccgtctctacaaaaaataaaaaattagctgggcatggtggcacacgtctgtactgccagctacttgggaggctgaggtgggagaattgcctgagcctgggaagtggaggccgcagtgagctgtgattgcatcactacattcagcctgggtcacagagcaagatcctatctcaaaaactaaataagtaaataataaattaaaaaatatgaataaagtctggagttaaagtctggaataaagctagtagtaatg

SEQ ID NO: 56112 - DNA, 1028 bp, Homo sapiens
  misc_feature (251)..(251): n is a, c, g, or t
  misc_feature (916)..(916): n is a, c, g, or t
  misc_feature (939)..(939): n is a, c, g, or t
  misc_feature (947)..(947): n is a, c, g, or t
  misc_feature (950)..(950): n is a, c, g, or t
  misc_feature (952)..(952): n is a, c, g, or t
  misc_feature (954)..(954): n is a, c, g, or t
  misc_feature (966)..(966): n is a, c, g, or t
  misc_feature (968)..(968): n is a, c, g, or t
  misc_feature (982)..(982): n is a, c, g, or t
  misc_feature (997)..(997): n is a, c, g, or t
cggtcctcaggtcctccatgtgtgccacatgcctccccctaaagggtacagggtctgcggaaatcgcgcattccacaaaggcggcccgttcatggagttggtttccattctttaccgcgatccccaactgtttgtgtagaccagtcatccgaggaccagacatcacagaaacttggctttcttgaagaagtgtatcttttgaatttgtgggggcttattcgtttgaccacccttaggagttcttgggggtngatctggagacgacgtgcagaaatggcacctcgaaaggggaaggaaaagaaggaagaacaggtcatcagcctcggacctcaggtggctgaaggagagaatgtatttggtgtctgccatatctttgcatccttcaatgacacttttgtccatgtcactgatctttctggcaaggaaaccatctgccgtgtgactggtgggatgaaggtaaaggcagaccgagatgaatcctcaccatatgctgctatgttggctgcccaggatgtggcccagaggtgcaaggagctgggtatcaccgccctacacatcaaactccgggccacaggaggaaataggaccaagacccctggacctggggcccagtcggccctcagagcccttgcccgctcgggtatgaagatcgggcggattgaggatgtcacccccatcccctctgacagcactcgcaggaaggggggtcgccgtggtcgccgtctgtgaacaagattcctcaaaatattttctgttaataaattgccttcatgtacaaaaaaaaaaaaaaaaaaaaaaaaaaaaaaaaaaaaaaaaaaaaaaaaaaaagaaaaaaaaaaaaagaaaaaacaaaaaaaaaaaaaaaaaaggggggggataaatggggggggggggaaaaagggggtatggaacgggnccatgggccaaaaggcggttccnggacccangtntntntggtccaagggngnaaatcggcagggtncccaatagggagcgnaataatggcggaaagccgagttaccggataa

SEQ ID NO: 56113 - DNA, 963 bp, Homo sapiens
gcgacaagacgacagaaggggctctcccgggtggagtctggagacgacgtgcagaaatggcacctcgaaaggggaaggaaaagaaggaagaacaggtcatcagcctcggacctcaggtggctgaaggagagaatgtatttggtgtctgccatatctttgcatccttcaatgacacttttgtccatgtcactgatctttctggcaaggaaaccatctgccgtgtgactggtgggatgaaggtaaaggcagaccgagatgaatcctcaccatatgctgctatgttggctgcccaggatgtggcccagaggtgcaaggagctgggtatcaccgccctacacatcaaactccgggccacaggaggaaataggaccaagacccctggacctggggcccagtcggccctcagagcccttgcccgctcgggtatgaagatcgggcggattgaggatgtcacccccatcccctctgacagcactcgcaggaaggggggtcgccgtggtcgccgtctgtgaacaagattcctcaaaatattttctgttaataaattgccttcatgttaaaacaacaaaaaaaaaaaaaaaaaaaaaaaaaaaaaaaataaaaaaaagagaggggcgcgcgcgcgccctcaaaatattatccccgcgggggggcccccaagttaaggcgttacccaggttttctgtgtgacacaaggggggcccccaaatagtagggaggaggcgttatttataacagcctgggacggtggccgcggggttttaacacaagcgttctggacgtcgtggtggaaacacttgcgtacccatggagagcacctttgtggaagagaaggacaccctcaatccctgggaggagagagaacaacatcttgcggccacaagtaccctaatagagaagatttatagagcccctatgagggcgaaacctaaaaaaatctcaaacagcggttataaggggcac

SEQ ID NO: 56114 - DNA, 1013 bp, Homo sapiens
  misc_feature (949)..(950): n is a, c, g, or t
  misc_feature (963)..(963): n is a, c, g, or t
  misc_feature (974)..(974): n is a, c, g, or t
ttaccatttatttgcagaattaacagtataataaactgctctacaagattttctatcaaggagtatttagaagagagatataaactgtaagcttataaaagtggtttctagagaaagtaagcaataataaaccctctcatataagttaggcatgtatttaaatttataagatacatttcttttgcttgatacaaatctcatcttaaatatacggctaaggaacagaaaaaaattcaaactgagacactcctgtaactctgggaaaattacacttatcaaattttacatataaatttagaatgactaatgaatgtttcagaaatacattaattaccaagatgctctgaaaagtacattactgtacatacagcctgaagttaacctttctatgttaaatgaaaaaactttgtcattcatcaggtcacagaaaccaaaaactaaacaatgcaaaaaaaaaaaaaatctaaaaataaaagaattttatatttgaagttattctggatattcgcaccattttagcttctgaaaaaaatgcaactatgaaatgaagacctcatatattttcatttatcaatataatgttaaaagtttcattccacccggtgtggagtctggagacgacgtgcagaaatggcacctcgaaaggggaaggaaaagaaggaagaacaggtcatcagcctcggacctcaggtggctgaaggagagaatgtatttggtgtctgccatatctttgcatccttcaatgacacttttgtccatgtcactgatctttctggcaaggaaaccatctgccgtgtgactggtgggatgaaggtaaaggcagaccgagatgaatcctcaccatatgctgctatgttggctgcccaggatgtggcccagaggtgcaaggagctgggtatcaccgccctacacatcaaactccgggccacaggaggaaatagtagaccanncccctgacctggnccagtcgcctnaagcctcgcccctcgtattaagtcgccgattagattaac

SEQ ID NO: 56115 - DNA, 2244 bp, Homo sapiens
gtcccgtgccatagcttgacatgcctcgccaggtccgaactcctagaggactcccctggtggtcctactggtaggtagctccctccctccctccttgtagcgaaggctcttctccctgatctcccctgagctgaactcactatgaagtgcacctccgtaggggatattaatgccttctcctcatagcggattcttatgtagttactctccaactcgagaacgagctacttactagacaggttccgtgtttacctttttcctgtccatgtcaccgatctttctggccaaggaaaccatctgccgtgtgactggtgggatgaaggtaaaggcagaccgagatgaatcctcaccatatgctgctatgttggctgcccaggatgtggcccagaggtgcaaggagctgggtatcaccgccctacacatcaaactccgggccacaggaggaaataggaccaagacccctggacctggggcccagtcggccctcagagcccttgcccgctcgggtatgaagatcgggcggattgaggatgtcacccccatcccctctgacagcactcgcaggaaggggggtcgccgtggtcgccgtctgtgaacaagattcctcaaaatattttctgttaataaattgccttcatgtaaactgtttcaactccagccttctctccttcatcaggggctactcaggcatttgatttcttcctcctatttggcttcttgggagaaaggagcctgaggagagctgagatcctggtgctgcatttggggtcttttccatgctacttgcggcattaagttgccttggtcatctaaagcagaccaaggcgttggagacctcgttttgagtggagatgctggttctaaatatggaccaattcttaaagagccagagtgggaactgttgatccaagtgtagcctgaagcgaaagaggagccttccagacccatgccatatataaacacacgtgggtgtgcattctccccccacaccttctgtgcaaagctgggagctcactccactgcgtcttgctttttttcacttggcagatcttggagattgttccacatcagtacataaagtacataaagattgtcaccccacaaatacacaccaagtcctattttcatcagcgataaaaaagaaaagttcttgctttccggaagcttgcatgcggctctgagtacccagtgacaccagatggtactcagcgttttgcaagggattaccacaaggccccgtgatggtgcctgccatggttaggacaggctggtggctgggtagggttagtgagacccagtggagaggatgctgtgtgtcacaggctggagaggtgagaccattgaggtagtcagttgtagaggaaagaaaccagcaagaggggaaaatctgttgggatgctgcttttagcctttgatggcgtgttccaggcagagggaataagcaaataaatgggtcctgagacaaggggttactgtgatgaggcggcgttggttacatgccaaaccttgctagggattttaataacaacattgaatcttaacctgatgaaataacagtactcctggggaggcgggagggatagcattaggagatatacctaatgctaaatgacgagttaatgggtgcagcacaccaacatggcacatgtatacatatgtaacaaacctgcacgttgtgcacatgtaccctaaaacttaaagtataataaaaaaaaaaagcttgcaaaaaaaatataacagtactccttaaattgttaaaagtcatgaaagtcaaggacaggagattaaggaggcgtgaaaactaaatgcccattgtggtatcctggattggattctggaaccagaatagggtattagtataaaaactagtgaaataggataaaggcagggcacagtggttcacgcctataatcccaacactttgggaagccgagacaggaggacggattgagcccaggagtttgagaccagcctgggcaacacagggagaccccgtctctacaaaaaataaaaaattagctgggcatggtggcacacgtctgtactgccagctacttgggaggctgaggtgggagaattgcctgagcctgggaagtggaggccgcagtgagctgtgattgcatcactacattcagcctgggtcacagagcaagatcctatctcaaaaactaaataagtaaataataaattaaaaaatatgaataaagtctggagttaaagtctggaataaagctagtagtaatg

SEQ ID NO: 56116 - DNA, 1173 bp, Homo sapiens
cccactctctctttccggtgtggagtctggagacgacgtgcagtgcagaaatggcacctcgaaaggggaaggaaaagaaggaagaacaggtcatcagcctcggacctcaggtggctgaaggagagaatgtatttggtgtctgccatatctttgcatccttcaatgacacttttgtccatgtcactgatctttctggcaagtgagtacctgggtggagaggcatccagctggcaaaaggctgaggaaggcaatggctgggacgggctagcagttcaggggattctctctaaagaaatgctgttttgtccaggtaagaaaatgtgcttgtccatttagcccacaaatattgtgatttcccaggggttacaagagaggagacacattcttcgtccttaacagcgtgatggtcattgaatccttggtttcttgggaattatcttctttccctagttccctttgcaggagcagcagtggactgcaagtgggctctgggtgcgggttcgacggccatttagcaagttgtgacttgtgtgaaatcactcagattctgagttttggtttcctcatatgtaaaattaggacagtaatgtctaccttgtggagtaatggtaaggattaaatgcaaaagtagatatataaaatgttaatactgagtatagctatattgggccattcaaccccactggactgaactccatgagggcagagcccatgaccatcatcctccaccatgactgagctgtgttgctcttcactcattaggatatcgtaagcactccttgttggacgaggaagaaatgaccctgtgcttttgtccccagggaaaccatctgccgtgtgactggtgggatgaaggtaaaggcagaccgagatgaatcctcaccatatgctgctatgttggctgcccaggatgtggcccagaggtgcaaggagctgggtatcaccgccctacacatcaaactccgggccacaggaggaaataggaccaagacccctggacctggggcccagtcggccctcagagcccttgcccgctcgggtatgaagatcgggcggattgaggatgtcacccccatcccctctgacagcactcgcaggaaggggggtcgccgtggtcgccgtctgtgaacaagattcctcaaaatattttctgttaataaattgccttcatgt

SEQ ID NO: 56117 - DNA, 3283 bp, Homo sapiens
  misc_feature (1)..(1): n is a, c, g, or t
ngagcgcagaatctctctagaaaaagattggactagatcttgaaataccctccatgactacagggttgcctgccaaccagagcatattgactccaacctttactgaaatggagctgtgactttgctggggagccggtcgcggcgcaccgccgcggtggaaatgcgcccgtcggcggccggtcgccggtcgggggacggtccaccgccctcgtgccgaattcggcacgaggaggaccaagacccctggacctggggcccagtcggccctcagagcccttgcccgctcgggtatgaagatcgggcggattgggtaagtgcccccctctagctaatgcttgggtttattttgaagcattggccccaaaaagcacgtgctgtgcccagtggatgtgcagcggctggtctggtcacttttggcagttaagtttgttaagggaggctgcaagaggcaccttgtgacttaaaaatctctccctgaatatctctgtcaccttgatatgaatgtcctgtttcatttgtgaatctctgtcctacactgcctggtgcaggtaaaactgacaagagatgaattgtcctttcctccattcttgaggtcattgctattagcattttgtgtgtaccatctcctgcattgtaggatgttcagcatttttggtttccgcctactaaatatcagttgggcatgccagtcgtgtgacagccaaaaatgaagtggggggtaccagcttctgttattaataccctcaggcctgtgatctcctggctccttacagctcttaggaagggaacagtagtctttccctgcacattgttctgtgcagttagtagcgacatacactgacgccccaggccaaagttcctactgtgtcctacttgaaggatgattttgttttcttgagacagggtctggctctgttgcgtgggctggaattcagtggcacaatctcagctcactgtaaatttcgcctcgtgggcggatctgtccaaaggatcctcccacctgcatctactgagtagctgggacaacagtgtgtgccacaccgggctttttttttttgtagcggggagtttcaccatgttgcccaggttggtcccaaactcctggcctcaggcgttccaccagcctcagtctcccaaagcccaaagtgctaggattacaggcatgagccaccggcgcccagccttaaaagattttttcagactttttttcagtgtctttttacttaatgaaaacgagacagttgcagttaccctgtctaaaagggttttttcctctagagaagacggtgggctagatgtcagaacctggatttgtcctgtgcctctgacatcttgcgcacagctcagcctgtttccctttctggaaagtgagttaagaccacgtcaggaaattcgaggaactggcagatggggccacttcatgttcacatccatctgttaggtactggggagtcatttggggagcagcaggatctgttgctgattggttaggccattggtctagggagtcctgggggcccttcccatccagctccaggcaatgacgctttctcttcctccccacagaggatgtcacccccatcccctctgacagcactcgcaggaaggggggtcgccgtggtcgccgtctgtgaacaagattcctcaaaatattttctgttaataaattgccttcatgtaaactgtttcaactccagccttctctccttcatcaggggctactcaggcatttgatttcttcctcctatttggcttcttgggagaaaggagcctgaggagagctgagatcctggtgctgcatttggggtcttttccatgctacttgcggcattaagttgccttggtcatctaaagcagaccaaggcgttggagacctcgttttgagtggagatgctggttctaaatatggaccaattcttaaagagccagagtgggaactgttgatccaagtgtagcctgaagcgaaagaggagccttccagacccatgccatatataaacacacgtgggtgtgcattctccccccacaccttctgtgcaaagctgggagctcactccactgcgtcttgctttttttcacttggcagatcttggagattgttccacatcagtacataaagtacataaagattgtcaccccacaaatacacaccaagtcctattttcatcagcgataaaaaagaaaagttcttgctttccggaagcttgcatgcggctctgagtacccagtgacaccagatggtactcagcgttttgcaagggattaccacaaggccccgtgatggtgcctgccatggttaggacaggctggtggctgggtagggttagtgagacccagtggagaggatgctgtgtgtcacaggctggagaggtgagaccattgaggtagtcagttgtagaggaaagaaaccagcaagaggggaaaatctgttgggatgctgcttttagcctttgatggcgtgttccaggcagagggaataagcaaataaatgggtcctgagacaaggggttactgtgatgaggcggcgttggttacatgccaaaccttgctagggattttaataacaacattgaatcttaacctgatgaaataacagtactcctggggaggcgggagggatagcattaggagatatacctaatgctaaatgacgagttaatgggtgcagcacaccaacatggcacatgtatacatatgtaacaaacctgcacgttgtgcacatgtaccctaaaacttaaagtataataaaaaaaaaaagcttgcaaaaaaaatataacagtactccttaaattgttaaaagtcatgaaagtcaaggacaggagattaaggaggcgtgaaaactaaatgcccattgtggtatcctggattggattctggaaccagaatagggtattagtataaaaactagtgaaataggataaaggcagggcacagtggttcacgcctataatcccaacactttgggaagccgagacaggaggacggattgagcccaggagtttgagaccagcctgggcaacacagggagaccccgtctctacaaaaaataaaaaattagctgggcatggtggcacacgtctgtactgccagctacttgggaggctgaggtgggagaattgcctgagcctgggaagtggaggccgcagtgagctgtgattgcatcactacattcagcctgggtcacagagcaagatcctatctcaaaaactaaataagtaaataataaattaaaaaatatgaataaagtctggagttaaagtctggaataaagctagtagtaatg

SEQ ID NO: 56118 - DNA, 1120 bp, Homo sapiens
  misc_feature (993)..(993): n is a, c, g, or t
  misc_feature (998)..(998): n is a, c, g, or t
  misc_feature (1017)..(1017): n is a, c, g, or t
  misc_feature (1029)..(1029): n is a, c, g, or t
  misc_feature (1031)..(1034): n is a, c, g, or t
  misc_feature (1037)..(1037): n is a, c, g, or t
  misc_feature (1042)..(1043): n is a, c, g, or t
  misc_feature (1046)..(1046): n is a, c, g, or t
  misc_feature (1050)..(1050): n is a, c, g, or t
  misc_feature (1059)..(1060): n is a, c, g, or t
  misc_feature (1063)..(1063): n is a, c, g, or t
  misc_feature (1069)..(1069): n is a, c, g, or t
  misc_feature (1071)..(1071): n is a, c, g, or t
  misc_feature (1075)..(1075): n is a, c, g, or t
  misc_feature (1080)..(1080): n is a, c, g, or t
  misc_feature (1088)..(1088): n is a, c, g, or t
  misc_feature (1096)..(1096): n is a, c, g, or t
  misc_feature (1098)..(1098): n is a, c, g, or t
  misc_feature (1114)..(1114): n is a, c, g, or t
cccactctctctttccggtgtggagtctggagacgacgtgcagtgcagaaatggcacctcgaaaggggaaggaaaagaaggaagaacaggtcatcagcctcggacctcaggtggctgaaggagagaatgtatttggtgtctgccatatctttgcatccttcaatgacacttttgtccatgtcactgatctttctggcaagtgagtacctgggtggagaggcatccagctggcaaaaggctgaggaaggcaatggctgggacgggctagcagttcaggggattctctctaaagaaatgctgttttgtccaggtaagaaaatgtgcttgtccatttagcccacaaatattgtgatttcccaggggttacaagagaggagacacattcttcgtccttaacagcgtgatggtcattgaatccttggtttcttgggaattatcttctttccctagttccctttgcaggagcagcagtggactgcaagtgggctctgggtgcgggttcgacggccatttagcaagttgtgacttgtgtgaaatcactcagattctgagttttggtttcctcatatgtaaaattaggacagtaatgtctaccttgtggagtaatggtaaggattaaatgcaaaagtagatatataaaatgttaatactgagtatagctatattgggccattcaaccccactggactgaactccatgagggcagagcccatgaccatcatcctccaccatgactgagctgtgttgctcttcactcattaggatatcgtaagcactccttgttggacgaggaagaaatgaccctgtgcttttgtccccagggaaaccatctgccgtgtgactggtgggatgaaggtaaaggcagaccgagatgaatcctcaccatatgctgctatgttggctgcccaggatgtggcccagaggtgcaaggagctgggtatcaccgccctacacatcaaactccgggccacaggaggaaatagaaagaggaanagacnaaacctggactgggccatngcctaaaccttncnnnnggntgaannggngatnagattaccnnccnttaaantnagangggtncgtgtccntttaaaantntaaaatttttaaaatncttttt

SEQ ID NO: 56119 - DNA, 935 bp, Homo sapiens
cccactctctctttccggtgtggagtctggagacgacgtgcagtgcagaaatggcacctcgaaaggggaaggaaaagaaggaagaacaggtcatcagcctcggacctcaggtggctgaaggagagaatgtatttggtgtctgccatatctttgcatccttcaatgacacttttgtccatgtcactgatctttctggcaagtgagtacctgggtggagaggcatccagctggcaaaaggctgaggaaggcaatggctgggacgggctagcagttcaggggattctctctaaagaaatgctgttttgtccaggtaagaaaatgtgcttgtccatttagcccacaaatattgtgatttcccaggggttacaagagaggagacacattcttcgtccttaacagcgtgatggtcattgaatccttggtttcttgggaattatcttctttccctagttccctttgcaggagcagcagtggactgcaagtgggctctgggtgcgggttcgacggccatttagcaagttgtgacttgtgtgaaatcactcagattctgagttttggtttcctcatatgtaaaattaggacagtaatgtctaccttgtggagtaatggtaaggattaaatgcaaaagtagatatataaaatgttaatactgagtatagctatattgggccattcaaccccactggactgaactccatgagggcagagcccatgaccatcatcctccaccatgactgagctgtgttgctcttcactcattaggatatcgtaagcactccttgttggacgaggaagaaatgaccctgtgcttttgtccccagggaaaccatctgccgtgtgactggtgggatgaaggtaaaggcagaccgagatgaatcctcaccatatgctgctatgttggctgcccagaaccggggatgggatcctctagatca

SEQ ID NO: 56120 - DNA, 555 bp, Homo sapiens
  misc_feature (443)..(443): n is a, c, g, or t
  misc_feature (466)..(466): n is a, c, g, or t
  misc_feature (474)..(474): n is a, c, g, or t
  misc_feature (477)..(477): n is a, c, g, or t
  misc_feature (479)..(479): n is a, c, g, or t
  misc_feature (481)..(481): n is a, c, g, or t
  misc_feature (493)..(493): n is a, c, g, or t
  misc_feature (495)..(495): n is a, c, g, or t
  misc_feature (509)..(509): n is a, c, g, or t
  misc_feature (524)..(524): n is a, c, g, or t
gcctgcggccgctactactactactaaattcgcggccgcgtcgacactggagacgcgtgctatgttggctgcccaggatgtggcccagaggtgcaaggagctgggtatcaccgccctacacatcaaactccgggccacaggaggaaataggaccaagacccctggacctggggcccagtcggccctcagagcccttgcccgctcgggtatgaagatcgggcggattgaggatgtcacccccatcccctctgacagcactcgcaggaaggggggtcgccgtggtcgccgtctgtgaacaagattcctcaaaatattttctgttaataaattgccttcatgtaaaaaaaaaaaaaaagaaaaaaaaaaaaagaaaaaacaaaaaaaaaaaaaaaaaaggggggggataaatggggggggggggaaaaagggggtatggaacgggnccatgggccaaaaggcggttccnggacccangtntntntggtccaagggngnaaatcggcagggtncccaatagggagcgnaataatggcggaaagccgagttaccggataa

SEQ ID NO: 56121 - DNA, 794 bp, Homo sapiens
gtggagtctggagacgacgtgcaggtaggaggcccgggcgcgacaatcggggggcatcctgcggcgaggggaccctgtggggcttgggacgagagacgggggtctttccgtgggaaccgagctaggtgccgggcaagagacgcgcggctggcccacctggatcctggccaactcgggattgagttcgttcctggtctcagaaggcccgttttgctttcagggaggagcttgtgaagtaagggtgagtgcgggtccagccttttaaggcctcggccccgcaatacggccacggccacggccgcgtttgagctgcacagcgtagttgagggaacccgggacagacgtgggctcccgcctctacctcgccaaacttttttcttggtgatcgcaggcccacgcctaatctcgtttgtttcctcgtttgcaaaataggaataacaatagcaccgatcccatgggtttgtagtgatcattcaaagaaggaaagcagggaaaactctcgcactatgttggatgcttctaaatctgggcgattctttccgttgctgagtcgggcacgttgcaagttctgggcgctcagggcccagcaccaatgtttgctgtgcgcttgccctgcgtttatatactcctgatgaccactctgctcgttactttaggggatgttaggaacggagaaactgcaaattggcatttactgaatggccatcatgccgaaacatactcatgcttacgtatttgagatatgctggagcctttctatgcttctcgaggcagaactttgggcttctctcctg

SEQ ID NO: 56122 - DNA, 633 bp, Homo sapiens
  misc_feature (1)..(1): n is a, c, g, or t
ngagcgcagaatctctctagaaaaagattggactagatcttgaaataccctccatgactacagggttgcctgccaaccagagcatattgactccaacctttactgaaatggagctgtgactttgctggggagccggtcgcggcgcaccgccgcggtggaaatgcgcccgtcggcggccggtcgccggtcgggggacggtccaccgccctcgtgccgaattcggcacgaggagttgcatccttcaatgacacttttgtccatgtcactgatctttctggcaaggaaaccatctgccgtgtgactggtgggatgaaggtaaaggcagaccgagatgaatcctcaccatatgctgctatgttggctgcccaggatgtggcccagaggtgcaaggagctgggtatcaccgccctacacatcaaactccgggccacaggaggaaataggaccaagacccctggacctggggcccagtcggccctcagagcccttgcccgctcgggtatgaagatcgggcggattgaggatgtcacccccatcccctctgacagcactcgcaggaaggggggtcgccgtggtcgccgtctgtgaacaagattcctcaaaatattttctgttaataaattgccttcatgt

SEQ ID NO: 56123 - DNA, 498 bp, Homo sapiens
gcttagtattactgtaagcggtcgcggatcgattgcaccctcggaacacgtgcaaatggacctaagggaaaggaagaacgttcctcggacctcaggtgtggaaatttttggtctgccattgcatcttcatgacacttttcgtacgatctttggcaaggaaaccatctcggtgactggggatggtaggcagaccgagatgaatcctcaccatatgctgctatgttggctgcccaggatgtggcccagaggtgcaaggagctgggtatcaccgccctacacatcaaactccgggccacaggaggaaataggaccaagacccctggacctggggcccagtcggccctcagagcccttgcccgctcgggtatgaagatcgggcggattgaggatgtcacccccatcccctctgacagcactcgcaggaaggggggtcgccgtggtcgccgtctgtgaacaagattcctcaaaatattttctgttaataaattgccttcatgt

SEQ ID NO: 56124 - DNA, 2994 bp, Homo sapiens
cccactctctctttccggtgtggagtctggagacgacgtgcaggtaggaggcccgggcgcgacaatcggggggcatcctgcggcgaggggaccctgtggggcttgggacgagagacgggggtctttccgtgggaaccgagctaggtgccgggcaagagacgcgcggctggcccacctggatcctggccaactcgggattgagttcgttcctggtctcagaaggcccgttttgctttcagggaggagcttgtgaagtaaggtgcagaaatggcacctcgaaaggggaaggaaaagaaggaagaacaggtcatcagcctcggacctcaggtggctgaaggagagaatgtatttggtgtctgccatatctttgcatccttcaatgacacttttgtccatgtcactgatctttctggcaagtgagtacctgggtggagaggcatccagctggcaaaaggctgaggaaggcaatggctgggacgggctagcagttcaggggattctctctaaagaaatgctgttttgtccaggtaagaaaatgtgcttgtccatttagcccacaaatattgtgatttcccaggggttacaagagaggagacacattcttcgtccttaacagcgtgatggtcattgaatccttggtttcttgggaattatcttctttccctagttccctttgcaggagcagcagtggactgcaagtgggctctgggtgcgggttcgacggccatttagcaagttgtgacttgtgtgaaatcactcagattctgagttttggtttcctcatatgtaaaattaggacagtaatgtctaccttgtggagtaatggtaaggattaaatgcaaaagtagatatataaaatgttaatactgagtatagctatattgggccattcaaccccactggactgaactccatgagggcagagcccatgaccatcatcctccaccatgactgagctgtgttgctcttcactcattaggatatcgtaagcactccttgttggacgaggaagaaatgaccctgtgcttttgtccccagggaaaccatctgccgtgtgactggtgggatgaaggtaaaggcagaccgagatgaatcctcaccatatgctgctatgttggctgcccaggatgtggcccagaggtgcaaggagctgggtatcaccgccctacacatcaaactccgggccacaggaggaaataggaccaagacccctggacctggggcccagtcggccctcagagcccttgcccgctcgggtatgaagatcgggcggattgaggatgtcacccccatcccctctgacagcactcgcaggaaggggggtcgccgtggtcgccgtctgtgaacaagattcctcaaaatattttctgttaataaattgccttcatgtaaactgtttcaactccagccttctctccttcatcaggggctactcaggcatttgatttcttcctcctatttggcttcttgggagaaaggagcctgaggagagctgagatcctggtgctgcatttggggtcttttccatgctacttgcggcattaagttgccttggtcatctaaagcagaccaaggcgttggagacctcgttttgagtggagatgctggttctaaatatggaccaattcttaaagagccagagtgggaactgttgatccaagtgtagcctgaagcgaaagaggagccttccagacccatgccatatataaacacacgtgggtgtgcattctccccccacaccttctgtgcaaagctgggagctcactccactgcgtcttgctttttttcacttggcagatcttggagattgttccacatcagtacataaagtacataaagattgtcaccccacaaatacacaccaagtcctattttcatcagcgataaaaaagaaaagttcttgctttccggaagcttgcatgcggctctgagtacccagtgacaccagatggtactcagcgttttgcaagggattaccacaaggccccgtgatggtgcctgccatggttaggacaggctggtggctgggtagggttagtgagacccagtggagaggatgctgtgtgtcacaggctggagaggtgagaccattgaggtagtcagttgtagaggaaagaaaccagcaagaggggaaaatctgttgggatgctgcttttagcctttgatggcgtgttccaggcagagggaataagcaaataaatgggtcctgagacaaggggttactgtgatgaggcggcgttggttacatgccaaaccttgctagggattttaataacaacattgaatcttaacctgatgaaataacagtactcctggggaggcgggagggatagcattaggagatatacctaatgctaaatgacgagttaatgggtgcagcacaccaacatggcacatgtatacatatgtaacaaacctgcacgttgtgcacatgtaccctaaaacttaaagtataataaaaaaaaaaagcttgcaaaaaaaatataacagtactccttaaattgttaaaagtcatgaaagtcaaggacaggagattaaggaggcgtgaaaactaaatgcccattgtggtatcctggattggattctggaaccagaatagggtattagtataaaaactagtgaaataggataaaggcagggcacagtggttcacgcctataatcccaacactttgggaagccgagacaggaggacggattgagcccaggagtttgagaccagcctgggcaacacagggagaccccgtctctacaaaaaataaaaaattagctgggcatggtggcacacgtctgtactgccagctacttgggaggctgaggtgggagaattgcctgagcctgggaagtggaggccgcagtgagctgtgattgcatcactacattcagcctgggtcacagagcaagatcctatctcaaaaactaaataagtaaataataaattaaaaaatatgaataaagtctggagttaaagtctggaataaagctagtagtaatg

SEQ ID NO: 56125 - DNA, 621 bp, Homo sapiens
  misc_feature (509)..(509): n is a, c, g, or t
  misc_feature (532)..(532): n is a, c, g, or t
  misc_feature (540)..(540): n is a, c, g, or t
  misc_feature (543)..(543): n is a, c, g, or t
  misc_feature (545)..(545): n is a, c, g, or t
  misc_feature (547)..(547): n is a, c, g, or t
  misc_feature (559)..(559): n is a, c, g, or t
  misc_feature (561)..(561): n is a, c, g, or t
  misc_feature (575)..(575): n is a, c, g, or t
  misc_feature (590)..(590): n is a, c, g, or t
tcgaattcaagcttctaacgatgtacggggacatgtcactgatctttctggcaaggaaaccatctgccgtgtgactggtgggatgaaggtaaaggcagaccgagatgaatcctcaccatatgctgctatgttggctgcccaggatgtggcccagaggtgcaaggagctgggtatcaccgccctacacatcaaactccgggccacaggaggaaataggaccaagacccctggacctggggcccagtcggccctcagagcccttgcccgctcgggtatgaagatcgggcggattgaggatgtcacccccatcccctctgacagcactcgcaggaaggggggtcgccgtggtcgccgtctgtgaacaagattcctcaaaatattttctgttaataaattgccttcatgtaaaaaaaaaaaaaaagaaaaaaaaaaaaagaaaaaacaaaaaaaaaaaaaaaaaaggggggggataaatggggggggggggaaaaagggggtatggaacgggnccatgggccaaaaggcggttccnggacccangtntntntggtccaagggngnaaatcggcagggtncccaatagggagcgnaataatggcggaaagccgagttaccggataa

SEQ ID NO: 56126 - DNA, 634 bp, Homo sapiens
tgggccaaggtggaaggagtgggttccccccccactccacccgccccccccatgcgaccaagacccctggacctggggcccagtcggccctcagagcccttgcccgctcgggtatgaagatcgggcggattgaggatgtcacccccatcccctctgacagcactcgcaggaaggggggtcgccgtggtcgccgtctgtgaacaagattcctcaaaatattttctgttaataaattgccttcatgtaaaaaaaaaaaaaaaaaaggtgtgtgcgggcgcgcgcccggggccccgcggaaagagagtttttagaaaccttgcgggtgggggcgcgcgggggccccagggtggaagagggaacaacgtggggcgcaaagcgggggggccctcaaggagagagaccgcggggaccagagagacaaagggcggtgggggttctccacaccacaatataaaaaaaccgcgcccgggggggcgacaccgcgacgagcggcgtcttggagaacaaaaatctccagagagggggggcccaggggggggaacactaaaggggggagctctctatcaacaggggaggcgtcccaaggaaaacgccccgaaatctcaaaattaaacgcccccggcgccgggggggc

SEQ ID NO: 56127 - DNA, 1184 bp, Homo sapiens
ttaccatttatttgcagaattaacagtataataaactgctctacaagattttctatcaaggagtatttagaagagagatataaactgtaagcttataaaagtggtttctagagaaagtaagcaataataaaccctctcatataagttaggcatgtatttaaatttataagatacatttcttttgcttgatacaaatctcatcttaaatatacggctaaggaacagaaaaaaattcaaactgagacactcctgtaactctgggaaaattacacttatcaaattttacatataaatttagaatgactaatgaatgtttcagaaatacattaattaccaagatgctctgaaaagtacattactgtacatacagcctgaagttaacctttctatgttaaatgaaaaaactttgtcattcatcaggtcacagaaaccaaaaactaaacaatgcaaaaaaaaaaaaaatctaaaaataaaagaattttatatttgaagttattctggatattcgcaccattttagcttctgaaaaaaatgcaactatgaaatgaagacctcatatattttcatttatcaatataatgttaaaagtttcattccacccggtgtggagtctggagacgacgtgcagaaatggcacctcgaaaggggaaggaaaagaaggaagaacaggtcatcagcctcggacctcaggtggctgaaggagagaatgtatttggtgtctgccatatctttgcatccttcaatgacacttttgtccatgtcactgatctttctggcaaggaaaccatctgccgtgtgactggtgggatgaaggtaaaggcagaccgagatgaatcctcaccatatgctgctatgttggctgcccaggatgtggcccagaggtgcaaggagctgggtatcaccgccctacacatcaaactccgggccacaggaggaaataggaccaagacccctggacctggggcccagtcggccctcagagcccttgcccgctcgggtatgaagatcgggcggattgaggatgtcacccccatcccctctgacagcactcgcaggaaggggggtcgccgtggtcgccgtctgtgaacaagattcctcaaaatattttctgttaataaattgccttcatgttttttacatgaaggcaatttattaacagaaaatatgtcgacgcggccgcgaat

SEQ ID NO: 56128 - DNA, 1195 bp, Homo sapiens
ttaccatttatttgcagaattaacagtataataaactgctctacaagattttctatcaaggagtatttagaagagagatataaactgtaagcttataaaagtggtttctagagaaagtaagcaataataaaccctctcatataagttaggcatgtatttaaatttataagatacatttcttttgcttgatacaaatctcatcttaaatatacggctaaggaacagaaaaaaattcaaactgagacactcctgtaactctgggaaaattacacttatcaaattttacatataaatttagaatgactaatgaatgtttcagaaatacattaattaccaagatgctctgaaaagtacattactgtacatacagcctgaagttaacctttctatgttaaatgaaaaaactttgtcattcatcaggtcacagaaaccaaaaactaaacaatgcaaaaaaaaaaaaaatctaaaaataaaagaattttatatttgaagttattctggatattcgcaccattttagcttctgaaaaaaatgcaactatgaaatgaagacctcatatattttcatttatcaatataatgttaaaagtttcattccacccggtgtggagtctggagacgacgtgcagaaatggcacctcgaaaggggaaggaaaagaaggaagaacaggtcatcagcctcggacctcaggtggctgaaggagagaatgtatttggtgtctgccatatctttgcatccttcaatgacacttttgtccatgtcactgatctttctggcaaggaaaccatctgccgtgtgactggtgggatgaaggtaaaggcagaccgagatgaatcctcaccatatgctgctatgttggctgcccaggatgtggcccagaggtgcaaggagctgggtatcaccgccctacacatcaaactccgggccacaggaggaaataggaccaagacccctggacctggggcccagtcggccctcagagcccttgcccgctcgggtatgaagatcgggcggattgaggatgtcacccccatcccctctgacagcactcgcaggaaggggggtcgccgtggtcgccgtctgtgaacaagattcctcaaaatattttctgttaataaattgccttcatgtcaaccctcatttttttagggtaacagatttacaccccatgagaataagggctcctggtcccccg

SEQ ID NO: 56129 - DNA, 1470 bp, Homo sapiens
  misc_feature (1178)..(1178): n is a, c, g, or t
ttaccatttatttgcagaattaacagtataataaactgctctacaagattttctatcaaggagtatttagaagagagatataaactgtaagcttataaaagtggtttctagagaaagtaagcaataataaaccctctcatataagttaggcatgtatttaaatttataagatacatttcttttgcttgatacaaatctcatcttaaatatacggctaaggaacagaaaaaaattcaaactgagacactcctgtaactctgggaaaattacacttatcaaattttacatataaatttagaatgactaatgaatgtttcagaaatacattaattaccaagatgctctgaaaagtacattactgtacatacagcctgaagttaacctttctatgttaaatgaaaaaactttgtcattcatcaggtcacagaaaccaaaaactaaacaatgcaaaaaaaaaaaaaatctaaaaataaaagaattttatatttgaagttattctggatattcgcaccattttagcttctgaaaaaaatgcaactatgaaatgaagacctcatatattttcatttatcaatataatgttaaaagtttcattccacccggtgtggagtctggagacgacgtgcagaaatggcacctcgaaaggggaaggaaaagaaggaagaacaggtcatcagcctcggacctcaggtggctgaaggagagaatgtatttggtgtctgccatatctttgcatccttcaatgacacttttgtccatgtcactgatctttctggcaaggaaaccatctgccgtgtgactggtgggatgaaggtaaaggcagaccgagatgaatcctcaccatatgctgctatgttggctgcccaggatgtggcccagaggtgcaaggagctgggtatcaccgccctacacatcaaactccgggccacaggaggaaataggaccaagacccctggacctggggcccagtcggccctcagagcccttgcccgctcgggtatgaagatcgggcggattgaggatgtcacccccatcccctctgacagcactcgcaggaaggggggtcgccgtggtcgccgtctgtgaacaagattcctcaaaatattttctgttaataaattgccttcatgtaaaaaaaaaaaaaaaaaaataaaaaaaagacaaaaaaaaaaaaaacnggggggggggggaaaaacccggggaggtttccagggttcgcggaccccagcggcgcggatggtggaaatcctcccttgaagggagtcctaatagcatcgttcgcacaagaaaaggaggggtcaccccagggcacatcacaggcaagccgaccaggcggtcctaagctgaagccgggggggcacagtgaaattccagggctcccccatgtggtaatacgggccgggcccggggggccgaagcctacacctgaaaaccagggcgggcatcacagggcacacttcgcgaatcacc

SEQ ID NO: 56130 - DNA, 1315 bp, Homo sapiens
  misc_feature (1203)..(1203): n is a, c, g, or t
  misc_feature (1226)..(1226): n is a, c, g, or t
  misc_feature (1234)..(1234): n is a, c, g, or t
  misc_feature (1237)..(1237): n is a, c, g, or t
  misc_feature (1239)..(1239): n is a, c, g, or t
  misc_feature (1241)..(1241): n is a, c, g, or t
  misc_feature (1253)..(1253): n is a, c, g, or t
  misc_feature (1255)..(1255): n is a, c, g, or t
  misc_feature (1269)..(1269): n is a, c, g, or t
  misc_feature (1284)..(1284): n is a, c, g, or t
ttaccatttatttgcagaattaacagtataataaactgctctacaagattttctatcaaggagtatttagaagagagatataaactgtaagcttataaaagtggtttctagagaaagtaagcaataataaaccctctcatataagttaggcatgtatttaaatttataagatacatttcttttgcttgatacaaatctcatcttaaatatacggctaaggaacagaaaaaaattcaaactgagacactcctgtaactctgggaaaattacacttatcaaattttacatataaatttagaatgactaatgaatgtttcagaaatacattaattaccaagatgctctgaaaagtacattactgtacatacagcctgaagttaacctttctatgttaaatgaaaaaactttgtcattcatcaggtcacagaaaccaaaaactaaacaatgcaaaaaaaaaaaaaatctaaaaataaaagaattttatatttgaagttattctggatattcgcaccattttagcttctgaaaaaaatgcaactatgaaatgaagacctcatatattttcatttatcaatataatgttaaaagtttcattccacccggtgtggagtctggagacgacgtgcagaaatggcacctcgaaaggggaaggaaaagaaggaagaacaggtcatcagcctcggacctcaggtggctgaaggagagaatgtatttggtgtctgccatatctttgcatccttcaatgacacttttgtccatgtcactgatctttctggcaaggaaaccatctgccgtgtgactggtgggatgaaggtaaaggcagaccgagatgaatcctcaccatatgctgctatgttggctgcccaggatgtggcccagaggtgcaaggagctgggtatcaccgccctacacatcaaactccgggccacaggaggaaataggaccaagacccctggacctggggcccagtcggccctcagagcccttgcccgctcgggtatgaagatcgggcggattgaggatgtcacccccatcccctctgacagcactcgcaggaaggggggtcgccgtggtcgccgtctgtgaacaagattcctcaaaatattttctgttaataaattgccttcatgtaaaaaaaaacaaaaaaaaaaaaattcggggggataaatggggggggggggaaaaagggggtatggaacgggnccatgggccaaaaggcggttccnggacccangtntntntggtccaagggngnaaatcggcagggtncccaatagggagcgnaataatggcggaaagccgagttaccggataa

SEQ ID NO: 56131 - DNA, 1441 bp, Homo sapiens
  misc_feature (1149)..(1149): n is a, c, g, or t
ttaccatttatttgcagaattaacagtataataaactgctctacaagattttctatcaaggagtatttagaagagagatataaactgtaagcttataaaagtggtttctagagaaagtaagcaataataaaccctctcatataagttaggcatgtatttaaatttataagatacatttcttttgcttgatacaaatctcatcttaaatatacggctaaggaacagaaaaaaattcaaactgagacactcctgtaactctgggaaaattacacttatcaaattttacatataaatttagaatgactaatgaatgtttcagaaatacattaattaccaagatgctctgaaaagtacattactgtacatacagcctgaagttaacctttctatgttaaatgaaaaaactttgtcattcatcaggtcacagaaaccaaaaactaaacaatgcaaaaaaaaaaaaaatctaaaaataaaagaattttatatttgaagttattctggatattcgcaccattttagcttctgaaaaaaatgcaactatgaaatgaagacctcatatattttcatttatcaatataatgttaaaagtttcattccacccggtgtggagtctggagacgacgtgcagaaatggcacctcgaaaggggaaggaaaagaaggaagaacaggtcatcagcctcggacctcaggtggctgaaggagagaatgtatttggtgtctgccatatctttgcatccttcaatgacacttttgtccatgtcactgatctttctggcaaggaaaccatctgccgtgtgactggtgggatgaaggtaaaggcagaccgagatgaatcctcaccatatgctgctatgttggctgcccaggatgtggcccagaggtgcaaggagctgggtatcaccgccctacacatcaaactccgggccacaggaggaaataggaccaagacccctggacctggggcccagtcggccctcagagcccttgcccgctcgggtatgaagatcgggcggattgaggatgtcacccccatcccctctgacagcactcgcaggaaggggggtcgccgtggtcgccgtctgtgaacaagattcctcaaaatattttctgttaataaattgccttcatgtacaaaaaaaaaaaaaacnggggggggggggaaaaacccggggaggtttccagggttcgcggaccccagcggcgcggatggtggaaatcctcccttgaagggagtcctaatagcatcgttcgcacaagaaaaggaggggtcaccccagggcacatcacaggcaagccgaccaggcggtcctaagctgaagccgggggggcacagtgaaattccagggctcccccatgtggtaatacgggccgggcccggggggccgaagcctacacctgaaaaccagggcgggcatcacagggcacacttcgcgaatcacc

SEQ ID NO: 56132 - DNA, 1520 bp, Homo sapiens
ttaccatttatttgcagaattaacagtataataaactgctctacaagattttctatcaaggagtatttagaagagagatataaactgtaagcttataaaagtggtttctagagaaagtaagcaataataaaccctctcatataagttaggcatgtatttaaatttataagatacatttcttttgcttgatacaaatctcatcttaaatatacggctaaggaacagaaaaaaattcaaactgagacactcctgtaactctgggaaaattacacttatcaaattttacatataaatttagaatgactaatgaatgtttcagaaatacattaattaccaagatgctctgaaaagtacattactgtacatacagcctgaagttaacctttctatgttaaatgaaaaaactttgtcattcatcaggtcacagaaaccaaaaactaaacaatgcaaaaaaaaaaaaaatctaaaaataaaagaattttatatttgaagttattctggatattcgcaccattttagcttctgaaaaaaatgcaactatgaaatgaagacctcatatattttcatttatcaatataatgttaaaagtttcattccacccggtgtggagtctggagacgacgtgcagaaatggcacctcgaaaggggaaggaaaagaaggaagaacaggtcatcagcctcggacctcaggtggctgaaggagagaatgtatttggtgtctgccatatctttgcatccttcaatgacacttttgtccatgtcactgatctttctggcaaggaaaccatctgccgtgtgactggtgggatgaaggtaaaggcagaccgagatgaatcctcaccatatgctgctatgttggctgcccaggatgtggcccagaggtgcaaggagctgggtatcaccgccctacacatcaaactccgggccacaggaggaaataggaccaagacccctggacctggggcccagtcggccctcagagcccttgcccgctcgggtatgaagatcgggcggattgaggatgtcacccccatcccctctgacagcactcgcaggaaggggggtcgccgtggtcgccgtctgtgaacaagattcctcaaaatattttctgttaataaattgccttcatgtaaaaaaaaaaaaaaaaaaggtgtgtgcgggcgcgcgcccggggccccgcggaaagagagtttttagaaaccttgcgggtgggggcgcgcgggggccccagggtggaagagggaacaacgtggggcgcaaagcgggggggccctcaaggagagagaccgcggggaccagagagacaaagggcggtgggggttctccacaccacaatataaaaaaaccgcgcccgggggggcgacaccgcgacgagcggcgtcttggagaacaaaaatctccagagagggggggcccaggggggggaacactaaaggggggagctctctatcaacaggggaggcgtcccaaggaaaacgccccgaaatctcaaaattaaacgcccccggcgccgggggggc

SEQ ID NO: 56133 - DNA, 1414 bp, Homo sapiens
ttaccatttatttgcagaattaacagtataataaactgctctacaagattttctatcaaggagtatttagaagagagatataaactgtaagcttataaaagtggtttctagagaaagtaagcaataataaaccctctcatataagttaggcatgtatttaaatttataagatacatttcttttgcttgatacaaatctcatcttaaatatacggctaaggaacagaaaaaaattcaaactgagacactcctgtaactctgggaaaattacacttatcaaattttacatataaatttagaatgactaatgaatgtttcagaaatacattaattaccaagatgctctgaaaagtacattactgtacatacagcctgaagttaacctttctatgttaaatgaaaaaactttgtcattcatcaggtcacagaaaccaaaaactaaacaatgcaaaaaaaaaaaaaatctaaaaataaaagaattttatatttgaagttattctggatattcgcaccattttagcttctgaaaaaaatgcaactatgaaatgaagacctcatatattttcatttatcaatataatgttaaaagtttcattccacccggtgtggagtctggagacgacgtgcagaaatggcacctcgaaaggggaaggaaaagaaggaagaacaggtcatcagcctcggacctcaggtggctgaaggagagaatgtatttggtgtctgccatatctttgcatccttcaatgacacttttgtccatgtcactgatctttctggcaaggaaaccatctgccgtgtgactggtgggatgaaggtaaaggcagaccgagatgaatcctcaccatatgctgctatgttggctgcccaggatgtggcccagaggtgcaaggagctgggtatcaccgccctacacatcaaactccgggccacaggaggaaataggaccaagacccctggacctggggcccagtcggccctcagagcccttgcccgctcgggtatgaagatcgggcggattgaggatgtcacccccatcccctctgacagcactcgcaggaaggggggtcgccgtggtcgccgtctgtgaacaagattcctcaaaatattttctgttaataaattgccttcatgtaaaaaaagcgtcctcgtggaatgtgacatcgtttttaaaccctgcgtggcaatccctgacgcaccgcgtgaatgcccagggaagacaggacgacctggaagtccaactacttccttaagatcatccaacctatgggatgatatccgaaacgttcattgtgggagccagacaatgtggggctccagcaaaggcagcagatcgatgtccttcgaggaagctggggggcgaagggagaaaacagagagggcaggcacgggggcggaaaaccacctggaagggccac

SEQ ID NO: 56134 - DNA, 1131 bp, Homo sapiens
ttaccatttatttgcagaattaacagtataataaactgctctacaagattttctatcaaggagtatttagaagagagatataaactgtaagcttataaaagtggtttctagagaaagtaagcaataataaaccctctcatataagttaggcatgtatttaaatttataagatacatttcttttgcttgatacaaatctcatcttaaatatacggctaaggaacagaaaaaaattcaaactgagacactcctgtaactctgggaaaattacacttatcaaattttacatataaatttagaatgactaatgaatgtttcagaaatacattaattaccaagatgctctgaaaagtacattactgtacatacagcctgaagttaacctttctatgttaaatgaaaaaactttgtcattcatcaggtcacagaaaccaaaaactaaacaatgcaaaaaaaaaaaaaatctaaaaataaaagaattttatatttgaagttattctggatattcgcaccattttagcttctgaaaaaaatgcaactatgaaatgaagacctcatatattttcatttatcaatataatgttaaaagtttcattccacccggtgtggagtctggagacgacgtgcagaaatggcacctcgaaaggggaaggaaaagaaggaagaacaggtcatcagcctcggacctcaggtggctgaaggagagaatgtatttggtgtctgccatatctttgcatccttcaatgacacttttgtccatgtcactgatctttctggcaaggaaaccatctgccgtgtgactggtgggatgaaggtaaaggcagaccgagatgaatcctcaccatatgctgctatgttggctgcccaggatgtggcccagaggtgcaaggagctgggtatcaccgccctacacatcaaactccgggccacaggaggaaataggaccaagacccctggacctggggcccagtcggccctcagagcccttgcccgctcgggtatgaagatcgggcggattgaggatgtcacccccatcccctctgacagcactcgcaggaaggggggtcgccgtggtcgccgtctgtgaacaagattcctcaaaatattttctgttaataaattgccttcatgt

SEQ ID NO: 56135 - DNA, 959 bp, Homo sapiens
gctcggcgtgggcctggcaggtggagacttgatgctggcaggaggggcgttagaatcctcacctacctaagcctgtggtggagcaaacagccctgcgggactcaatgcgtgtaacccttggattttcacccaacagttctgcaagtctctttcctcaaataaaccatcccccatctgcataatatggaagctaagtagatcgcccacaaagaaaagagaacaatcctgtataaaatgaggaagccagactaaataattccaaagtgtctttaggcaaatgcagaccagaatacagcatacttgaagatggatccttctagacccactccttctgcttgtctggaaagcccaggcctgccagcatcagcggcgacatttcaattctgccagtttgatcagaccacgtggattttctctctccaatacaccagctgataatgaagagacaaatgttagctaaggcagccctggtcaatcccaaagtccttagatgcaaaagacagggaaggtgctaatcatctcaggaggagaccccagacgggctcattaaaaccattataagaaatccctatctcccccaccacacctccaaggaaaccctgaccctggtgagtgagcagggattgcaggggcttcccttgcaccagttcttttggcttaggagggaggacatggcccagctcacccaccacctgcagcagcaacagcagcagccattacctttgaaataatcctcgctcgcacaccaagtatttgttatgagtctgtgcctggaagtaaatatcacttctgtttaggtgaccatgtgtcctgggtttcccaggacagtctggtttatgcctgttgtgctgacacacatatgattagtacctactgccatgctgaaaagcgtcttgtttgggcagtaatgtatgtggttacctaagctctaccaagttgtttcaaaactgattggaggg

SEQ ID NO: 56136 - DNA, 195 bp, Homo sapiens
ggaccagggagggagttattgtttaatgagtgtagagtttcagttttgcaaggtgaaaagagttccggagatagaggatggtgacagtgatagaacaatgtgaatgtaattaataccactgaattttatacttaaaaatggttaaggtgataaattttacattatgtgtgttttaccacaaaaaaagaattagct

SEQ ID NO: 56137 - DNA, 350 bp, Homo sapiens
gtaccttttctgcagttggaagatgggaaattctattaggagcctcagtgagttgggtagaagtcacaccaatcaacggaattaattctagaagattgtggtggaagacattatattaatgattccaagagaccctgatgttggcttctgaaaaatttaacatcttcattgtaaagggaagggtgagaatgtccccaagaagctatgccatgactcagtggcctctttgaaagattctcattttaatctaaatagtgtgacttcagtgaaggtcaacatggtcccagttttaagaggatcccaggcattagccactctggcaccaccacctggcactggttatgattatt

SEQ ID NO: 56138 - DNA, 419 bp, Homo sapiens
ctaaatttgatgaactcaacctcctatcaactggaactgttactctgtcacttggtgcatgactacaaagatagttctgacttcatgtttataataatgatccccaatgctgcaagatcctgaagtgcctttgagtcatcaccaataacttactcatcagaattgctttcgtgttgagtagattttgctgatatctgattgttcagcaagtacaaacttaattaagcttctattttagtactagatacatgctctaagatcaagacagaattccctataaacagaatatttgctagatcatatcccattatttgagcaaactggatccagaatattttcttgtttgtttgtaaagtagttcatgtgtacatttgtgtgtgtgtttgtaaatccttcctttcttggtgaattttctttta

SEQ ID NO: 56139 - DNA, 306 bp, Homo sapiens
ctttttttaaaaatttctaatataatacttttgtaaaatgataaagatgaagacatgcatacaatatgtaagcctgaatttgattagtttcagcagatacaaaattgtcaaattgctacagattttcaaagtgtttactttgcatttctatacttaacctcactgtcaaccataaccagtttgtggaccagcagtagtagtctgtggactatactttgagttactggttcaaaccattattagtgccaagagggactactgattattccatacttcaaataaggtgttgggtgatttgtcttaacc

SEQ ID NO: 56140 - DNA, 2736 bp, Homo sapiens
ggggtctccagttcctgccagtgagtccctaggcctccatctctctcccttgctgtaccaccttcaccaccatccatgcgaccccaagagccttaatgactctagaagagactccaggcaggggaagctgaaaggacctttcactccctacttttggccagggccttctgtgccacctgccaagaccagcaggcctaccctctgaagaggtccaagcaacggaagtactactacgaagctgcctttctggccatccttgagaaaaatagacagatggccaaggagaggggcctaataagccccagtgattttgcccagctgcaaaaatacatggaatactccaccaaaaaggtcagtgatgtcctaaagctcttcgaggatggcgagatggctaaatatgtccaaggagatgccattgggtacgagggattccagcaattcctgaaaatctatctcgaagtggataatgttcccagacacctaagcctggcactgtttcaatcctttgagactggtcactgcttaaatgagacaaatgtgacaaaagatgtggtgtgtctcaatgatgtttcctgctacttttcccttctggagggtggtcggccagaagacaagttagaattcaccttcaagctgtacgacacggacagaaatgggatcctggacagctcagaagtggacaaaattatcctacagatgatgcgagtggctgaatacctggattgggatgtgtctgagctgaggccgattcttcaggagatgatgaaagagattgactatgatggcagtggctctgtctctcaagctgagtgggtccgggctggggccaccaccgtgccactgctagtgctgctgggtctggagatgactctgaaggacgacggacagcacatgtggaggcccaagaggttccccagaccagtctactgcaatctgtgcgagtcaagcattggtcttggcaaacagggactgagctgtaacctctgtaagtacactgttcacgaccagtgtgccatgaaagccctgccttgtgaagtcagcacctatgccaagtctcggaaggacattggtgtccaatcacatgtgtgggtgcgaggaggctgtgagtccgggcgctgcgaccgctgtcagaaaaagatccggatctaccacagtctgaccgggctgcattgtgtatggtgccacctagagatccacgatgactgcctgcaagcggtgggccatgagtgtgactgtgggctgctccgggatcacatcctgcctccatcttccatctatcccagtgtcctggcctctggaccggatcgtaaaaatagcaaaacaagccagaagaccatggatgatttaaatttgagcacctctgaggctctgcggattgaccctgttcctaacacccacccacttctcgtctttgtcaatcctaagagtggcgggaagcaggggcagagggtgctctggaagttccagtatatattaaaccctcgacaggtgttcaacctcctaaaggatggtcctgagatagggctccgattattcaaggatgttcctgatagccggattttggtgtgtggtggagacggcacagtaggctggattctagagaccattgacaaagctaacttgccagttttgcctcctgttgctgtgttgcccctgggtactggaaatgatctggctcgatgcctaagatggggaggaggttatgaaggacagaatctggcaaagatcctcaaggatttagagatgagtaaagtggtacatatggatcgatggtctgtggaggtgatacctcaacaaactgaagaaaaaagtgacccagtcccctttcaaatcatcaataactacttctctattggcgtggatgcctctattgctcatcgattccacatcatgcgagagaaatatccggagaagttcaacagcagaatgaagaacaagctatggtacttcgaatttgccacatctgaatccatcttctcaacatgcaaaaagctggaggagtctttgacagttgagatctgtgggaaaccgctggatctgagcaacctgtccctagaaggcatcgcagtgctaaacatccctagcatgcatggtggctccaacctctggggtgataccaggagaccccatggggatatctatgggatcaaccaggccttaggtgctacagctaaagtcatcaccgaccctgatatcctgaaaacctgtgtaccagacctaagtgacaagagactggaagtggttgggctggagggtgcaattgagatgggccaaatctataccaagctcaagaatgctggacgtcggctggccaagtgctctgagatcaccttccacaccacaaaaacccttcccatgcaaattgacggagaaccctggatgcagacgccctgtacaatcaagatcacccacaagaaccagatgcccatgctcatgggcccacccccccgctccaccaatttctttggcttcttgagctaagggggacacccttggcctccaagccagccttgaacccacctccctgtccctggactctactcccgaggctctgtacattgctgccacatactcctgccagcttgggggagtgttccttcaccctcacagtatttattatcctgcaccacctcactgttccccatgcgcacacacatacacacaccccaaaacacatacattgaaagtgcctcatctgaataaaatgacttgtgtttcccctttgggatctgctaa

SEQ ID NO: 56141 - DNA, 776 bp, Homo sapiens
tccggggatatctttcgccgggtggtcggatcctcacggctggtccggcatggcatgcagtagcagctgatcttttaggaggaagagtaaggaaaaggcgtgggttttggaggtgggcacttcaccccgaacttttattctgctacaccctcaagcaagggatcacatatctgatcctgcctcaccctcaggtaagaaggaaatagggggagaggctcagctaagcctcccaacttcttccttctccctcagtctgtaagtacactgttcacgaccagtgtgccatgaaagccctgccttgtgaagtcagcacctatgccaagtctcggaaggacattggtgtgagtgatctcatgcctccacccccaacatcacctacatcctggccctggccctggcccttggcccattgctgccctcagcccctccctcccctaggtcctgctcagaccctgccagacaaggaactgcctttctccccaaggtccaatcacatgtgtgggtgcgaggaggctgtgagtccgggcgctgcgaccgctgtcagaaaaagatccggatctaccacagtctgaccgggctgcattgtgtatggtgccacctagaggtcagtttgggagccatcccttctgggtgcgtcttaccccgcagagctgccttctccacgggcctccggccacacctcctttacaggcacagttgcccctgctcccaagggctctttccagcccagactgccaggttgagaggagacagggttaccttcgtgatctctctgt

SEQ ID NO: 56142 - DNA, 481 bp, Homo sapiens
agagggtcagcccagctatctgtgggagcttgatgctgtaaacttagaaaagacctaggtttgaatcctgggctctgccactgactagttatgtgaccttgggaaagccacatcacttctttaagccttagtttcctcaactgaaaatgaggtaattgtgagcattaaaaaagttggtgcaagaaaagtgcttcagatggtgcatgcacatactataaaatgcaataaaaaatatctattatgattactgttgctgttagacctgggccctgtccctggactctactcccgaggctctgtacattgctgccacatactcctgccagcttgggggagtgttccttcaccctcacagtatttattatcctgcaccacctcactgttccccatgcgcacacacatacacacaccccaaaacacatacattgaaagtgcctcatctgaataaaatgacttgtgtttcccctttgggatctgctaa

SEQ ID NO: 56143 - DNA, 2747 bp, Homo sapiens
ccccgctgcggccgcgtctgcctggcccgtcccctccagcccagctcgggctccagctccagcgccggcgcttcagctgcgaccgcgagccctctcaagcaagatataacttccccaagtcacacagtggtatcagagctaagaatgggacccagatatgactgatctagttctgttccaaaaccgtgctgtattatattaacgcctaccctctgaagaggtccaagcaacggaagtactactacgaagctgcctttctggccatccttgagaaaaatagacagatggccaaggagaggggcctaataagccccagtgattttgcccagctgcaaaaatacatggaatactccaccaaaaaggtcagtgatgtcctaaagctcttcgaggatggcgagatggctaaatatgtccaaggagatgccattgggtacgagggattccagcaattcctgaaaatctatctcgaagtggataatgttcccagacacctaagcctggcactgtttcaatcctttgagactggtcactgcttaaatgagacaaatgtgacaaaagatgtggtgtgtctcaatgatgtttcctgctacttttcccttctggagggtggtcggccagaagacaagttagaattcaccttcaagctgtacgacacggacagaaatgggatcctggacagctcagaagtggacaaaattatcctacagatgatgcgagtggctgaatacctggattgggatgtgtctgagctgaggccgattcttcaggagatgatgaaagagattgactatgatggcagtggctctgtctctcaagctgagtgggtccgggctggggccaccaccgtgccactgctagtgctgctgggtctggagatgactctgaaggacgacggacagcacatgtggaggcccaagaggttccccagaccagtctactgcaatctgtgcgagtcaagcattggtcttggcaaacagggactgagctgtaacctctgtaagtacactgttcacgaccagtgtgccatgaaagccctgccttgtgaagtcagcacctatgccaagtctcggaaggacattggtgtccaatcacatgtgtgggtgcgaggaggctgtgagtccgggcgctgcgaccgctgtcagaaaaagatccggatctaccacagtctgaccgggctgcattgtgtatggtgccacctagagatccacgatgactgcctgcaagcggtgggccatgagtgtgactgtgggctgctccgggatcacatcctgcctccatcttccatctatcccagtgtcctggcctctggaccggatcgtaaaaatagcaaaacaagccagaagaccatggatgatttaaatttgagcacctctgaggctctgcggattgaccctgttcctaacacccacccacttctcgtctttgtcaatcctaagagtggcgggaagcaggggcagagggtgctctggaagttccagtatatattaaaccctcgacaggtgttcaacctcctaaaggatggtcctgagatagggctccgattattcaaggatgttcctgatagccggattttggtgtgtggtggagacggcacagtaggctggattctagagaccattgacaaagctaacttgccagttttgcctcctgttgctgtgttgcccctgggtactggaaatgatctggctcgatgcctaagatggggaggaggttatgaaggacagaatctggcaaagatcctcaaggatttagagatgagtaaagtggtacatatggatcgatggtctgtggaggtgatacctcaacaaactgaagaaaaaagtgacccagtcccctttcaaatcatcaataactacttctctattggcgtggatgcctctattgctcatcgattccacatcatgcgagagaaatatccggagaagttcaacagcagaatgaagaacaagctatggtacttcgaatttgccacatctgaatccatcttctcaacatgcaaaaagctggaggagtctttgacagttgagatctgtgggaaaccgctggatctgagcaacctgtccctagaaggcatcgcagtgctaaacatccctagcatgcatggtggctccaacctctggggtgataccaggagaccccatggggatatctatgggatcaaccaggccttaggtgctacagctaaagtcatcaccgaccctgatatcctgaaaacctgtgtaccagacctaagtgacaagagactggaagtggttgggctggagggtgcaattgagatgggccaaatctataccaagctcaagaatgctggacgtcggctggccaagtgctctgagatcaccttccacaccacaaaaacccttcccatgcaaattgacggagaaccctggatgcagacgccctgtacaatcaagatcacccacaagaaccagatgcccatgctcatgggcccacccccccgctccaccaatttctttggcttcttgagctaagggggacacccttggcctccaagccagccttgaacccacctccctgtccctggactctactcccgaggctctgtacattgctgccacatactcctgccagcttgggggagtgttccttcaccctcacagtatttattatcctgcaccacctcactgttccccatgcgcacacacatacacacaccccaaaacacatacattgaaagtgcctcatctgaataaaatgacttgtgtttcccctttgggatctgctaa

SEQ ID NO: 56144 - DNA, 2647 bp, Homo sapiens
ccccgctgcggccgcgtctgcctggcccgtcccctccagcccagctcgggctccagctccagcgccggcgcttcagctgcgaccgcgagccctctcaagcaaggcctaccctctgaagaggtccaagcaacggaagtactactacgaagctgcctttctggccatccttgagaaaaatagacagatggccaaggagaggggcctaataagccccagtgattttgcccagctgcaaaaatacatggaatactccaccaaaaaggtcagtgatgtcctaaagctcttcgaggatggcgagatggctaaatatgtccaaggagatgccattgggtacgagggattccagcaattcctgaaaatctatctcgaagtggataatgttcccagacacctaagcctggcactgtttcaatcctttgagactggtcactgcttaaatgagacaaatgtgacaaaagatgtggtgtgtctcaatgatgtttcctgctacttttcccttctggagggtggtcggccagaagacaagttagaattcaccttcaagctgtacgacacggacagaaatgggatcctggacagctcagaagtggacaaaattatcctacagatgatgcgagtggctgaatacctggattgggatgtgtctgagctgaggccgattcttcaggagatgatgaaagagattgactatgatggcagtggctctgtctctcaagctgagtgggtccgggctggggccaccaccgtgccactgctagtgctgctgggtctggagatgactctgaaggacgacggacagcacatgtggaggcccaagaggttccccagaccagtctactgcaatctgtgcgagtcaagcattggtcttggcaaacagggactgagctgtaacctctgtaagtacactgttcacgaccagtgtgccatgaaagccctgccttgtgaagtcagcacctatgccaagtctcggaaggacattggtgtccaatcacatgtgtgggtgcgaggaggctgtgagtccgggcgctgcgaccgctgtcagaaaaagatccggatctaccacagtctgaccgggctgcattgtgtatggtgccacctagagatccacgatgactgcctgcaagcggtgggccatgagtgtgactgtgggctgctccgggatcacatcctgcctccatcttccatctatcccagtgtcctggcctctggaccggatcgtaaaaatagcaaaacaagccagaagaccatggatgatttaaatttgagcacctctgaggctctgcggattgaccctgttcctaacacccacccacttctcgtctttgtcaatcctaagagtggcgggaagcaggggcagagggtgctctggaagttccagtatatattaaaccctcgacaggtgttcaacctcctaaaggatggtcctgagatagggctccgattattcaaggatgttcctgatagccggattttggtgtgtggtggagacggcacagtaggctggattctagagaccattgacaaagctaacttgccagttttgcctcctgttgctgtgttgcccctgggtactggaaatgatctggctcgatgcctaagatggggaggaggttatgaaggacagaatctggcaaagatcctcaaggatttagagatgagtaaagtggtacatatggatcgatggtctgtggaggtgatacctcaacaaactgaagaaaaaagtgacccagtcccctttcaaatcatcaataactacttctctattggcgtggatgcctctattgctcatcgattccacatcatgcgagagaaatatccggagaagttcaacagcagaatgaagaacaagctatggtacttcgaatttgccacatctgaatccatcttctcaacatgcaaaaagctggaggagtctttgacagttgagatctgtgggaaaccgctggatctgagcaacctgtccctagaaggcatcgcagtgctaaacatccctagcatgcatggtggctccaacctctggggtgataccaggagaccccatggggatatctatgggatcaaccaggccttaggtgctacagctaaagtcatcaccgaccctgatatcctgaaaacctgtgtaccagacctaagtgacaagagactggaagtggttgggctggagggtgcaattgagatgggccaaatctataccaagctcaagaatgctggacgtcggctggccaagtgctctgagatcaccttccacaccacaaaaacccttcccatgcaaattgacggagaaccctggatgcagacgccctgtacaatcaagatcacccacaagaaccagatgcccatgctcatgggcccacccccccgctccaccaatttctttggcttcttgagctaagggggacacccttggcctccaagccagccttgaacccacctccctgtccctggactctactcccgaggctctgtacattgctgccacatactcctgccagcttgggggagtgttccttcaccctcacagtatttattatcctgcaccacctcactgttccccatgcgcacacacatacacacaccccaaaacacatacattgaaagtgcctcatctgaataaaatgacttgtgtttcccctttgggatctgctaa

SEQ ID NO: 56145 - DNA, 2824 bp, Homo sapiens
ggggtctccagttcctgccagtgagtccctaggcctccatctctctcccttgctgtaccaccttcaccaccatccatgcgaccccaagagccttaatgactctagaagagactccaggcaggggaagctgaaaggacctttcactccctacttttggccagggccttctgtgccacctgccaagaccagcaggcctaccctctgaagaggtccaagcaacggaagtactactacgaagctgcctttctggccatccttgagaaaaatagacagatggccaaggagaggggcctaataagccccagtgattttgcccagctgcaaaaatacatggaatactccaccaaaaaggtcagtgatgtcctaaagctcttcgaggatggcgagatggctaaatatgtccaaggagatgccattgggtacgagggattccagcaattcctgaaaatctatctcgaagtggataatgttcccagacacctaagcctggcactgtttcaatcctttgagactggtcactgcttaaatgagacaaatgtgacaaaagatgtggtgtgtctcaatgatgtttcctgctacttttcccttctggagggtggtcggccagaagacaagttagaattcaccttcaagctgtacgacacggacagaaatgggatcctggacagctcagaagtggacaaaattatcctacagatgatgcgagtggctgaatacctggattgggatgtgtctgagctgaggccgattcttcaggagatgatgaaagagattgactatgatggcagtggctctgtctctcaagctgagtgggtccgggctggggccaccaccgtgccactgctagtgctgctgggtctggagatgactctgaaggacgacggacagcacatgtggaggcccaagaggttccccagaccagtctactgcaatctgtgcgagtcaagcattggtcttggcaaacagggactgagctgtaacctctgtaagtacactgttcacgaccagtgtgccatgaaagccctgccttgtgaagtcagcacctatgccaagtctcggaaggacattggtgtccaatcacatgtgtgggtgcgaggaggctgtgagtccgggcgctgcgaccgctgtcagaaaaagatccggatctaccacagtctgaccgggctgcattgtgtatggtgccacctagagatccacgatgactgcctgcaagcggtgggccatgagtgtgactgtgggctgctccgggatcacatcctgcctccatcttccatctatcccagtgtcctggcctctggaccggatcgtaaaaatagcaaaacaagccagaagaccatggatgatttaaatttgagcacctctgaggctctgcggattgaccctgttcctaacacccacccacttctcgtctttgtcaatcctaagagtggcgggaagcaggggcagagggtgctctggaagttccagtatatattaaaccctcgacaggtgttcaacctcctaaaggatggtcctgagatagggctccgattattcaaggatgttcctgatagccggattttggtgtgtggtggagacggcacagtaggctggattctagagaccattgacaaagctaacttgccagttttgcctcctgttgctgtgttgcccctgggtactggaaatgatctggctcgatgcctaagatggggaggaggttatgaaggacagaatctggcaaagatcctcaaggatttagagatgagtaaagtggtacatatggatcgatggtctgtggaggtgatacctcaacaaactgaagaaaaaagtgacccagtcccctttcaaatcatcaataactacttctctattggcgtggatgcctctattgctcatcgattccacatcatgcgagagaaatatccggagaagttcaacagcagaatgaagaacaagctatggtacttcgaatttgccacatctgaatccatcttctcaacatgcaaaaagctggaggagtctttgacagttgagatctgtgggaaaccgctggatctgagcaacctgtccctagaaggcatcgcagtgctaaacatccctagcatgcatggtggctccaacctctggggtgataccaggagaccccatggggatatctatgggatcaaccaggccttaggtgctacagctaaagtcatcaccgaccctgatatcctgaaaacctgtgtaccagacctaagtgacaagagactggaagtggttgggctggagggtgcaattgagatgggccaaatctataccaagctcaagaatgctggacgtcggctggccaagtgctctgagatcaccttccacaccacaaaaacccttcccatgcaaattgacggagaaccctggatgcagacgccctgtacaatcaagatcacccacaagaaccagatgcccatgctcatgggcccacccccccgctccaccaatttctttggcttcttgagctaagggggacacccttggcctccaagccagccttgaacccacctccctgtccctggactctactcccgaggctctgtacattgctgccacatactcctgccagcttgggggagtgttccttcaccctcacagtatttattatcctgcaccacctcactgttccccacaataaaaaccaaaaaataattgaggcccactgataatgatgggttcccttgggattgtaaaaaaaaaggggggcaagttccaagggcatagggacgtttgaagggcaaggggtaaagagaggggacaggggaaggtgttggggcctgggtgcgcccaaacggaaggggctggtagaaac

SEQ ID NO: 56146 - DNA, 2608 bp, Homo sapiens
gtggctgttctagaggtcccggtgctgtgctgggtcgggaaggaggagcgtgacagctggagcggcctaccctctgaagaggtccaagcaacggaagtactactacgaagctgcctttctggccatccttgagaaaaatagacagatggccaaggagaggggcctaataagccccagtgattttgcccagctgcaaaaatacatggaatactccaccaaaaaggtcagtgatgtcctaaagctcttcgaggatggcgagatggctaaatatgtccaaggagatgccattgggtacgagggattccagcaattcctgaaaatctatctcgaagtggataatgttcccagacacctaagcctggcactgtttcaatcctttgagactggtcactgcttaaatgagacaaatgtgacaaaagatgtggtgtgtctcaatgatgtttcctgctacttttcccttctggagggtggtcggccagaagacaagttagaattcaccttcaagctgtacgacacggacagaaatgggatcctggacagctcagaagtggacaaaattatcctacagatgatgcgagtggctgaatacctggattgggatgtgtctgagctgaggccgattcttcaggagatgatgaaagagattgactatgatggcagtggctctgtctctcaagctgagtgggtccgggctggggccaccaccgtgccactgctagtgctgctgggtctggagatgactctgaaggacgacggacagcacatgtggaggcccaagaggttccccagaccagtctactgcaatctgtgcgagtcaagcattggtcttggcaaacagggactgagctgtaacctctgtaagtacactgttcacgaccagtgtgccatgaaagccctgccttgtgaagtcagcacctatgccaagtctcggaaggacattggtgtccaatcacatgtgtgggtgcgaggaggctgtgagtccgggcgctgcgaccgctgtcagaaaaagatccggatctaccacagtctgaccgggctgcattgtgtatggtgccacctagagatccacgatgactgcctgcaagcggtgggccatgagtgtgactgtgggctgctccgggatcacatcctgcctccatcttccatctatcccagtgtcctggcctctggaccggatcgtaaaaatagcaaaacaagccagaagaccatggatgatttaaatttgagcacctctgaggctctgcggattgaccctgttcctaacacccacccacttctcgtctttgtcaatcctaagagtggcgggaagcaggggcagagggtgctctggaagttccagtatatattaaaccctcgacaggtgttcaacctcctaaaggatggtcctgagatagggctccgattattcaaggatgttcctgatagccggattttggtgtgtggtggagacggcacagtaggctggattctagagaccattgacaaagctaacttgccagttttgcctcctgttgctgtgttgcccctgggtactggaaatgatctggctcgatgcctaagatggggaggaggttatgaaggacagaatctggcaaagatcctcaaggatttagagatgagtaaagtggtacatatggatcgatggtctgtggaggtgatacctcaacaaactgaagaaaaaagtgacccagtcccctttcaaatcatcaataactacttctctattggcgtggatgcctctattgctcatcgattccacatcatgcgagagaaatatccggagaagttcaacagcagaatgaagaacaagctatggtacttcgaatttgccacatctgaatccatcttctcaacatgcaaaaagctggaggagtctttgacagttgagatctgtgggaaaccgctggatctgagcaacctgtccctagaaggcatcgcagtgctaaacatccctagcatgcatggtggctccaacctctggggtgataccaggagaccccatggggatatctatgggatcaaccaggccttaggtgctacagctaaagtcatcaccgaccctgatatcctgaaaacctgtgtaccagacctaagtgacaagagactggaagtggttgggctggagggtgcaattgagatgggccaaatctataccaagctcaagaatgctggacgtcggctggccaagtgctctgagatcaccttccacaccacaaaaacccttcccatgcaaattgacggagaaccctggatgcagacgccctgtacaatcaagatcacccacaagaaccagatgcccatgctcatgggcccacccccccgctccaccaatttctttggcttcttgagctaagggggacacccttggcctccaagccagccttgaacccacctccctgtccctggactctactcccgaggctctgtacattgctgccacatactcctgccagcttgggggagtgttccttcaccctcacagtatttattatcctgcaccacctcactgttccccatgcgcacacacatacacacaccccaaaacacatacattgaaagtgcctcatctgaataaaatgacttgtgtttcccctttgggatctgctaa

SEQ ID NO: 56147 - DNA, 2879 bp, Homo sapiens
ggggtctccagttcctgccagtgagtccctaggcctccatctctctcccttgctgtaccaccttcaccaccatccatgcgaccccaagagccttaatgactctagaagagactccaggcaggggaagctgaaaggacctttcactccctacttttggccagggccttctgtgccacctgccaagaccagcaggcctaccctctgaagaggtccaagcaacggaagtactactacgaagctgcctttctggccatccttgagaaaaatagacagatggccaaggagaggggcctaataagccccagtgattttgcccagctgcaaaaatacatggaatactccaccaaaaaggtcagtgatgtcctaaagctcttcgaggatggcgagatggctaaatatgtccaaggagatgccattgggtacgagggattccagcaattcctgaaaatctatctcgaagtggataatgttcccagacacctaagcctggcactgtttcaatcctttgagactggtcactgcttaaatgagacaaatgtgacaaaagatgtggtgtgtctcaatgatgtttcctgctacttttcccttctggagggtggtcggccagaagacaagttagaattcaccttcaagctgtacgacacggacagaaatgggatcctggacagctcagaagtggacaaaattatcctacagatgatgcgagtggctgaatacctggattgggatgtgtctgagctgaggccgattcttcaggagatgatgaaagagattgactatgatggcagtggctctgtctctcaagctgagtgggtccgggctggggccaccaccgtgccactgctagtgctgctgggtctggagatgactctgaaggacgacggacagcacatgtggaggcccaagaggttccccagaccagtctactgcaatctgtgcgagtcaagcattggtcttggcaaacagggactgagctgtaacctctgtaagtacactgttcacgaccagtgtgccatgaaagccctgccttgtgaagtcagcacctatgccaagtctcggaaggacattggtgtgagtgatctcatgcctccacccccaacatcacctacatcctggccctggccctggcccttggcccattgctgccctcagcccctccctcccctaggtcctgctcagaccctgccagacaaggaactgcctttctccccaaggtccaatcacatgtgtgggtgcgaggaggctgtgagtccgggcgctgcgaccgctgtcagaaaaagatccggatctaccacagtctgaccgggctgcattgtgtatggtgccacctagagatccacgatgactgcctgcaagcggtgggccatgagtgtgactgtgggctgctccgggatcacatcctgcctccatcttccatctatcccagtgtcctggcctctggaccggatcgtaaaaatagcaaaacaagccagaagaccatggatgatttaaatttgagcacctctgaggctctgcggattgaccctgttcctaacacccacccacttctcgtctttgtcaatcctaagagtggcgggaagcaggggcagagggtgctctggaagttccagtatatattaaaccctcgacaggtgttcaacctcctaaaggatggtcctgagatagggctccgattattcaaggatgttcctgatagccggattttggtgtgtggtggagacggcacagtaggctggattctagagaccattgacaaagctaacttgccagttttgcctcctgttgctgtgttgcccctgggtactggaaatgatctggctcgatgcctaagatggggaggaggttatgaaggacagaatctggcaaagatcctcaaggatttagagatgagtaaagtggtacatatggatcgatggtctgtggaggtgatacctcaacaaactgaagaaaaaagtgacccagtcccctttcaaatcatcaataactacttctctattggcgtggatgcctctattgctcatcgattccacatcatgcgagagaaatatccggagaagttcaacagcagaatgaagaacaagctatggtacttcgaatttgccacatctgaatccatcttctcaacatgcaaaaagctggaggagtctttgacagttgagatctgtgggaaaccgctggatctgagcaacctgtccctagaaggcatcgcagtgctaaacatccctagcatgcatggtggctccaacctctggggtgataccaggagaccccatggggatatctatgggatcaaccaggccttaggtgctacagctaaagtcatcaccgaccctgatatcctgaaaacctgtgtaccagacctaagtgacaagagactggaagtggttgggctggagggtgcaattgagatgggccaaatctataccaagctcaagaatgctggacgtcggctggccaagtgctctgagatcaccttccacaccacaaaaacccttcccatgcaaattgacggagaaccctggatgcagacgccctgtacaatcaagatcacccacaagaaccagatgcccatgctcatgggcccacccccccgctccaccaatttctttggcttcttgagctaagggggacacccttggcctccaagccagccttgaacccacctccctgtccctggactctactcccgaggctctgtacattgctgccacatactcctgccagcttgggggagtgttccttcaccctcacagtatttattatcctgcaccacctcactgttccccatgcgcacacacatacacacaccccaaaacacatacattgaaagtgcctcatctgaataaaatgacttgtgtttcccctttgggatctgctaa

SEQ ID NO: 56148 - DNA, 2697 bp, Homo sapiens
ggggtctccagttcctgccagtgagtccctaggcctccatctctctcccttgctgtaccaccttcaccaccatccatgcgaccccaagagccttaatgactctagaagagactccaggcaggggaagctgaaaggacctttcactccctacttttggccagggccttctgtgccacctgccaagaccagcaggcctaccctctgaagaggtccaagcaacggaagtactactacgaagctgcctttctggccatccttgagaaaaatagacagatggccaaggagaggggcctaataagccccagtgattttgcccagctgcaaaaatacatggaatactccaccaaaaaggtcagtgatgtcctaaagctcttcgaggatggcgagatggctaaatatgtccaaggagatgccattgggtacgagggattccagcaattcctgaaaatctatctcgaagtggataatgttcccagacacctaagcctggcactgtttcaatcctttgagactggtcactgcttaaatgagacaaatgtgacaaaagatgtggtgtgtctcaatgatgtttcctgctacttttcccttctggagggtggtcggccagaagacaagttagaattcaccttcaagctgtacgacacggacagaaatgggatcctggacagctcagaagtggacaaaattatcctacagatgatgcgagtggctgaatacctggattgggatgtgtctgagctgaggccgattcttcaggagatgatgaaagagattgactatgatggcagtggctctgtctctcaagctgagtgggtccgggctggggccaccaccgtgccactgctagtgctgctgggtctggagatgactctgaaggacgacggacagcacatgtggaggcccaagaggttccccagaccagtctactgcaatctgtgcgagtcaagcattggtcttggcaaacagggactgagctgtaacctctgtaagtacactgttcacgaccagtgtgccatgaaagccctgccttgtgaagtcagcacctatgccaagtctcggaaggacattggtgtccaatcacatgtgtgggtgcgaggaggctgtgagtccgggcgctgcgaccgctgtcagaaaaagatccggatctaccacagtctgaccgggctgcattgtgtatggtgccacctagagatccacgatgactgcctgcaagcggtgggccatgagtgtgactgtgggctgctccgggatcacatcctgcctccatcttccatctatcccagtgtcctggcctctggaccggatcgtaaaaatagcaaaacaagccagaagaccatggatgatttaaatttgagcacctctgaggctctgcggattgaccctgttcctaacacccacccacttctcgtctttgtcaatcctaagagtggcgggaagcaggggcagagggtgctctggaagttccagtatatattaaaccctcgacaggtgttcaacctcctaaaggatggtcctgagatagggctccgattattcaaggatgttcctgatagccggattttggtgtgtggtggagacggcacagtaggctggattctagagaccattgacaaagctaacttgccagttttgcctcctgttgctgtgttgcccctgggtactggaaatgatctggctcgatgcctaagatggggaggaggttatgaaggacagaatctggcaaagatcctcaaggatttagagatgagtaaagtggtacatatggatcgatggtctgtggaggtgatacctcaacaaactgaagaaaaaagtgacccagtcccctttcaaatcatcaataactacttctctattggcgtggatgcctctattgctcatcgattccacatcatgcgagagaaatatccggagaagttcaacagcagaatgaagaacaagctatggtacttcgaatttgccacatctgaatccatcttctcaacatgcaaaaagctggaggagtctttgacagttgagatctgtgggaaaccgctggatctgagcaacctgtccctagaaggcatcgcagtgctaaacatccctagcatgcatggtggctccaacctctggggtgataccaggagaccccatggggatatctatgggatcaaccaggccttaggtgctacagctaaagtcatcaccgaccctgatatcctgaaaacctgtgtaccagacctaagtgacaagagactggaagtggttgggctggagggtgcaattgagatgggccaaatctataccaagctcaagaatgctggacgtcggctggccaagtgctctgagatcaccttccacaccacaaaaacccttcccatgcaaattgacggagaaccctggatgcagacgccctgtacaatcaagatcacccacaagaaccagatgcccatgctcatgggcccacccccccgctccaccaatttctttggcttcttgagctaagggggacacccttggcctccaagccagccttgaacccacctcatgcgcacacacatacacacaccccaaaacacatacattgaaagtgcctcatctgaataaaatgacttgtgtttcccctttgggatctgctaagtaagtggtacacttccttcttttataccttcactccttaaatgacgtagattctcccaagaagcaacagaaaaaccagca

SEQ ID NO: 56149 - DNA, 2685 bp, Homo sapiens
ggggtctccagttcctgccagtgagtccctaggcctccatctctctcccttgctgtaccaccttcaccaccatccatgcgaccccaagagccttaatgactctagaagagactccaggcaggggaagctgaaaggacctttcactccctacttttggccagggccttctgtgccacctgccaagaccagcaggcctaccctctgaagaggtccaagcaacggaagtactactacgaagctgcctttctggccatccttgagaaaaatagacagatggccaaggagaggggcctaataagccccagtgattttgcccagctgcaaaaatacatggaatactccaccaaaaaggtcagtgatgtcctaaagctcttcgaggatggcgagatggctaaatatgtccaaggagatgccattgggtacgagggattccagcaattcctgaaaatctatctcgaagtggataatgttcccagacacctaagcctggcactgtttcaatcctttgagactggtcactgcttaaatgagacaaatgtgacaaaagatgtggtgtgtctcaatgatgtttcctgctacttttcccttctggagggtggtcggccagaagacaagttagaattcaccttcaagctgtacgacacggacagaaatgggatcctggacagctcagaagtggacaaaattatcctacagatgatgcgagtggctgaatacctggattgggatgtgtctgagctgaggccgattcttcaggagatgatgaaagagattgactatgatggcagtggctctgtctctcaagctgagtgggtccgggctggggccaccaccgtgccactgctagtgctgctgggtctggagatgactctgaaggacgacggacagcacatgtggaggcccaagaggttccccagaccagtctactgcaatctgtgcgagtcaagcattggtcttggcaaacagggactgagctgtaacctctgtaagtacactgttcacgaccagtgtgccatgaaagccctgccttgtgaagtcagcacctatgccaagtctcggaaggacattggtgtccaatcacatgtgtgggtgcgaggaggctgtgagtccgggcgctgcgaccgctgtcagaaaaagatccggatctaccacagtctgaccgggctgcattgtgtatggtgccacctagagatccacgatgactgcctgcaagcggtgggccatgagtgtgactgtgggctgctccgggatcacatcctgcctccatcttccatctatcccagtgtcctggcctctggaccggatcgtaaaaatagcaaaacaagccagaagaccatggatgatttaaatttgagcacctctgaggctctgcggattgaccctgttcctaacacccacccacttctcgtctttgtcaatcctaagagtggcgggaagcaggggcagagggtgctctggaagttccagtatatattaaaccctcgacaggtgttcaacctcctaaaggatggtcctgagatagggctccgattattcaaggatgttcctgatagccggattttggtgtgtggtggagacggcacagtaggctggattctagagaccattgacaaagctaacttgccagttttgcctcctgttgctgtgttgcccctgggtactggaaatgatctggctcgatgcctaagatggggaggaggttatgaaggacagaatctggcaaagatcctcaaggatttagagatgagtaaagtggtacatatggatcgatggtctgtggaggtgatacctcaacaaactgaagaaaaaagtgacccagtcccctttcaaatcatcaataactacttctctattggcgtggatgcctctattgctcatcgattccacatcatgcgagagaaatatccggagaagttcaacagcagaatgaagaacaagctatggtacttcgaatttgccacatctgaatccatcttctcaacatgcaaaaagctggaggagtctttgacagttgagatctgtgggaaaccgctggatctgagcaacctgtccctagaaggcatcgcagtgctaaacatccctagcatgcatggtggctccaacctctggggtgataccaggagaccccatggggatatctatgggatcaaccaggccttaggtgctacagctaaagtcatcaccgaccctgatatcctgaaaacctgtgtaccagacctaagtgacaagagactggaagtggttgggctggagggtgcaattgagatgggccaaatctataccaagctcaagaatgctggacgtcggctggccaagtgctctgagatcaccttccacaccacaaaaacccttcccatgcaaattgacggagaaccctggatgcagacgccctgtacacgctccaccaatttctttggcttcttgagctaagggggacacccttggcctccaagccagccttgaacccacctccctgtccctggactctactcccgaggctctgtacattgctgccacatactcctgccagcttgggggagtgttccttcaccctcacagtatttattatcctgcaccacctcactgttccccatgcgcacacacatacacacaccccaaaacacatacattgaaagtgcctcatctgaataaaatgacttgtgtttcccctttgggatctgctaa

SEQ ID NO: 56150 - DNA, 2971 bp, Homo sapiens
ggggtctccagttcctgccagtgagtccctaggcctccatctctctcccttgctgtaccaccttcaccaccatccatgcgaccccaagagccttaatgactctagaagagactccaggcaggggaagctgaaaggacctttcactccctacttttggccagggccttctgtgccacctgccaagaccagcaggcctaccctctgaagaggtccaagcaacggaagtactactacgaagctgcctttctggccatccttgagaaaaatagacagatggccaaggagaggggcctaataagccccagtgattttgcccagctgcaaaaatacatggaatactccaccaaaaaggtcagtgatgtcctaaagctcttcgaggatggcgagatggctaaatatgtccaaggagatgccattgggtacgagggattccagcaattcctgaaaatctatctcgaagtggataatgttcccagacacctaagcctggcactgtttcaatcctttgagactggtcactgcttaaatgagacaaatgtgacaaaagatgtggtgtgtctcaatgatgtttcctgctacttttcccttctggagggtggtcggccagaagacaagttagaattcaccttcaagctgtacgacacggacagaaatgggatcctggacagctcagaagtggacaaaattatcctacagatgatgcgagtggctgaatacctggattgggatgtgtctgagctgaggccgattcttcaggagatgatgaaagagattgactatgatggcagtggctctgtctctcaagctgagtgggtccgggctggggccaccaccgtgccactgctagtgctgctgggtctggagatgactctgaaggacgacggacagcacatgtggaggcccaagaggttccccagaccagtctactgcaatctgtgcgagtcaagcattggtcttggcaaacagggactgagctgtaacctctgtaagtacactgttcacgaccagtgtgccatgaaagccctgccttgtgaagtcagcacctatgccaagtctcggaaggacattggtgtccaatcacatgtgtgggtgcgaggaggctgtgagtccgggcgctgcgaccgctgtcagaaaaagatccggatctaccacagtctgaccgggctgcattgtgtatggtgccacctagagatccacgatgactgcctgcaagcggtgggccatgagtgtgactgtgggctgctccgggatcacatcctgcctccatcttccatctatcccagtgtcctggcctctggaccggatcgtaaaaatagcaaaacaagccagaagaccatggatgatttaaatttgagcacctctgaggctctgcggattgaccctgttcctaacacccacccacttctcgtctttgtcaatcctaagagtggcgggaagcaggggcagagggtgctctggaagttccagtatatattaaaccctcgacaggtgttcaacctcctaaaggatggtcctgagatagggctccgattattcaaggatgttcctgatagccggattttggtgtgtggtggagacggcacagtaggctggattctagagaccattgacaaagctaacttgccagttttgcctcctgttgctgtgttgcccctgggtactggaaatgatctggctcgatgcctaagatggggaggaggttatgaaggacagaatctggcaaagatcctcaaggatttagagatgagtaaagtggtacatatggatcgatggtctgtggaggtgatacctcaacaaactgaagaaaaaagtgacccagtcccctttcaaatcatcaataactacttctctattggcgtggatgcctctattgctcatcgattccacatcatgcgagagaaatatccggagaagttcaacagcagaatgaagaacaagctatggtacttcgaatttgccacatctgaatccatcttctcaacatgcaaaaagctggaggagtctttgacagttgagatctgtgggaaaccgctggatctgagcaacctgtccctagaaggcatcgcagtgctaaacatccctagcatgcatggtggctccaacctctggggtgataccaggagaccccatggggatatctatgggatcaaccaggccttaggtgctacagctaaagtcatcaccgaccctgatatcctgaaaacctgtgtaccagacctaagtgacaagagactggaagtggttgggctggagggtgcaattgagatgggccaaatctataccaagctcaagaatgctggacgtcggctggccaagtgctctgagatcaccttccacaccacaaaaacccttcccatgcaaattgacggagaaccctggatgcagacgccctgtacagtgagtattgacgatcccagccaaaaattaaacccttgggctccatggatcctaaatccccattccacagcttctttacacccttctgatgcctgaacttcccctgcacatcattcatcctaaaccctgatttctcagcccctggtttccctatcgtggcctctctaggaacctagcaacccaccccaaaccccacagatttccctctaaatctctgaagccacagccccaaagtatcaggtcctgcctctgaatgtgctcccttcccttccagatcaagatcacccacaagaaccagatgcccatgctcatgggcccacccccccgctccaccaatttctttggcttcttgagctaagggggacacccttggcctccaagccagccttgaacccacctcatgcgcacacacatacacacaccccaaaacacatacattgaaagtgcctcatctgaataaaatgacttgtgtttcccctttgggatctgctaagtaagtggtacacttccttcttttataccttcactccttaaatgacgtagattctcccaagaagcaacagaaaaaccagca

SEQ ID NO: 56151 - DNA, 1541 bp, Homo sapiens
ctcaaaagtttaaacctcccccacggagtatggtagcgaggctggggctccgggatcacatcctgcctccatcttccatctatcccagtgtcctggcctctggaccggatcgtaaaaatagcaaaacaagccagaagaccatggatgatttaaatttgagcacctctgaggctctgcggattgaccctgttcctaacacccacccacttctcgtctttgtcaatcctaagagtggcgggaagcaggggcagagggtgctctggaagttccagtatatattaaaccctcgacaggtgttcaacctcctaaaggatggtcctgagatagggctccgattattcaaggatgttcctgatagccggattttggtgtgtggtggagacggcacagtaggctggattctagagaccattgacaaagctaacttgccagttttgcctcctgttgctgtgttgcccctgggtactggaaatgatctggctcgatgcctaagatggggaggaggttatgaaggacagaatctggcaaagatcctcaaggatttagagatgagtaaagtggtacatatggatcgatggtctgtggaggtgatacctcaacaaactgaagaaaaaagtgacccagtcccctttcaaatcatcaataactacttctctattggcgtggatgcctctattgctcatcgattccacatcatgcgagagaaatatccggagaagttcaacagcagaatgaagaacaagctatggtacttcgaatttgccacatctgaatccatcttctcaacatgcaaaaagctggaggagtctttgacagttgagatctgtgggaaaccgctggatctgagcaacctgtccctagaaggcatcgcagtgctaaacatccctagcatgcatggtggctccaacctctggggtgataccaggagaccccatggggatatctatgggatcaaccaggccttaggtgctacagctaaagtcatcaccgaccctgatatcctgaaaacctgtgtaccagacctaagtgacaagagactggaagtggttgggctggagggtgcaattgagatgggccaaatctataccaagctcaagaatgctggacgtcggctggccaagtgctctgagatcaccttccacaccacaaaaacccttcccatgcaaattgacggagaaccctggatgcagacgccctgtacaatcaagatcacccacaagaaccagatgcccatgctcatgggcccacccccccgctccaccaatttctttggcttcttgagctaagggggacacccttggcctccaagccagccttgaacccacctccctgtccctggactctactcccgaggctctgtacattgctgccacatactcctgccagcttgggggagtgttccttcaccctcacagtatttattatcctgcaccacctcactgttccccatgcgcacacacatacacacaccccaaaacacatacattgaaagtgcctcatctgaataaaatgacttgtgtttcccctttgggatctgctaa

SEQ ID NO: 56152 - DNA, 1506 bp, Homo sapiens
ggggtctccagttcctgccagtgagtccctaggcctccatctctctcccttgctgtaccaccttcaccaccatccatgcgaccccaagagccttaatgactctagaagagactccaggcaggggaagctgaaaggacctttcactccctacttttggccagggccttctgtgccacctgccaagaccagcaggcctaccctctgaagaggtccaagcaacggaagtactactacgaagctgcctttctggccatccttgagaaaaatagacagatggccaaggagaggggcctaataagccccagtgattttgcccagctgcaaaaatacatggaatactccaccaaaaaggtcagtgatgtcctaaagctcttcgaggatggcgagatggctaaatatgtccaaggagatgccattgggtacgagggattccagcaattcctgaaaatctatctcgaagtggataatgttcccagacacctaagcctggcactgtttcaatcctttgagactggtcactgcttaaatgagacaaatgtgacaaaagatgtggtgtgtctcaatgatgtttcctgctacttttcccttctggagggtggtcggccagaagacaagttagaattcaccttcaagctgtacgacacggacagaaatgggatcctggacagctcagaagtggacaaaattatcctacagatgatgcgagtggctgaatacctggattgggatgtgtctgagctgaggccgattcttcaggagatgatgaaagagattgactatgatggcagtggctctgtctctcaagctgagtgggtccgggctggggccaccaccgtgccactgctagtgctgctgggtctggagatgactctgaaggacgacggacagcacatgtggaggcccaagaggttccccagaccagtctactgcaatctgtgcgagtcaagcattggtcttggcaaacagggactgagctgtaacctctgtaagtacactgttcacgaccagtgtgccatgaaagccctgccttgtgaagtcagcacctatgccaagtctcggaaggacattggtgtgagtgatctcatgcctccacccccaacatcacctacatcctggccctggccctggcccttggcccattgctgccctcagcccctccctcccctaggtcctgctcagaccctgccagacaaggaactgcctttctccccaaggtccaatcacatgtgtgggtgcgaggaggctgtgagtccgggcgctgcgaccgctgtcagaaaaagatccggatctaccacagtctgaccgggctgcattgtgtatggtgccacctagaggtcagtttgggagccatcccttctgggtgcgtcttaccccgcagagctgccttctccacgggcctccggccacacctcctttacaggcacagttgcccctgctcccaagggctctttccagcccagactgccaggttgagaggagacagggttaccttcgtgatctctctgt

SEQ ID NO: 56153 - DNA, 715 bp, Homo sapiens
ggggtctccagttcctgccagtgagtccctaggcctccatctctctcccttgctgtaccaccttcaccaccatccatgcgaccccaagagccttaatgactctagaagagactccaggcaggggaagctgaaaggacctttcactccctacttttggccagggccttctgtgccacctgccaagaccagcaggcctaccctctgaagaggtccaagcaacggaagtactactacgaagctgcctttctggccatccttgagaaaaatagacagatggccaaggagaggggcctaataagccccagtgattttgcccagctgcaaaaatacatggaatactccaccaaaaaggtcagtgatgtcctaaagctcttcgaggatggcgagatggctaaatatgtccaaggagatgccattgggtacgagggattccagcaattcctgaaaatctatctcgaagtggataatgttcccagacacctaagcctggcactgtttcaatcctttgagactggtcactgcttaaatgagacaaatgtgacaaaagatgtggtgtgtctcaatgatgtttcctgctacttttcccttctggagggtggtcggccagaagacaagttagaattcaccttcaagctgtacgacacggacagaaatgggatcctggacagctcagtgagttggggaccctgtatgctgggcaagggaatatgtgtta

SEQ ID NO: 56154 - DNA, 246 bp, Homo sapiens
ttgctccagctctcagagaagaggagtaaagagtggtactgttttggaggatctgaaatatttttccctctgtatttctgtgtttcttcttggaatttcttcatctcatttgaatcttttttcctgctggatttctctggcaagagaactcagctggactaataatgctgttctcttactctctctacaccctagactccaccaaaaaggtcagtgatgtcctaaagctcttcgaggatggcgaga

SEQ ID NO: 56155 - DNA, 262 bp, Homo sapiens
ggcaaagatcctcaaggatttagagatgagtaaagtggtacatatggatcgatggtctgtggaggtgatacctcaacaaactgaagaaaaaagtgacccagtcccctttcaaatcatcaataactacttctctattggcgtggtcagtggaatggggcctggggagaagggagaaagggggggccaagcagtcagaggctggaggagagcagaaaaggagggggaggttaagtgacctgtgacacagggaaattgggagtgc

SEQ ID NO: 56156 - DNA, 185 bp, Homo sapiens
ctgccaggttgagaggagacagggttaccttcgtgatctctctgtgcccacctcgtctttcagatccacgatgactgcctgcaagcggtgggccatgagtgtgactgtgggctgctccgggatcacatcctgcctccatcttccatctatcccagtgtcctggtgagaccctcggcagcagcggg

SEQ ID NO: 56157 - DNA, 481 bp, Homo sapiens
ccccgctgcggccgcgtctgcctggcccgtcccctccagcccagctcgggctccagctccagcgccggcgcttcagctgcgaccgcgagccctctcaagcaaggtagagaccccgcgagccccccagcgccccaccctcccccatcggaaaaggacaggggtagggaagccgaggacccacgggctgcgttcgtgctgctgggtcgggaaggaggaagcgtgacagctggagcgggtatcgagaagggtctgcgctgggacgcgggggtgcagcgggagggctgggcccgaacccggtgggtaacgtttcccagaccttcccctccatccctcccgctcattcggagggatggtgaagcccggttcctgggacccgactcggagggaagtcctcttcggaacctccacagtgccgcacgggtggagaagggttcttgtttggcctccaggtccccaacttcccaccccatcctctccccac

SEQ ID NO: 56158 - DNA, 2986 bp, Homo sapiens
ggggtctccagttcctgccagtgagtccctaggcctccatctctctcccttgctgtaccaccttcaccaccatccatgcgaccccaagagccttaatgactctagaagagactccaggcaggggaagctgaaaggacctttcactccctacttttggccagggccttctgtgccacctgccaagaccagcaggcctaccctctgaagaggtccaagcaacggaagtactactacgaagctgcctttctggccatccttgagaaaaatagacagatggccaaggagaggggcctaataagccccagtgattttgcccagctgcaaaaatacatggaatactccaccaaaaaggtcagtgatgtcctaaagctcttcgaggatggcgagatggctaaatatgtccaaggagatgccattgggtacgagggattccagcaattcctgaaaatctatctcgaagtggataatgttcccagacacctaagcctggcactgtttcaatcctttgagactggtcactgcttaaatgagacaaatgtgacaaaagatgtggtgtgtctcaatgatgtttcctgctacttttcccttctggagggtggtcggccagaagacaagttagaattcaccttcaagctgtacgacacggacagaaatgggatcctggacagctcagaagtggacaaaattatcctacagatgatgcgagtggctgaatacctggattgggatgtgtctgagctgaggccgattcttcaggagatgatgaaagagattgactatgatggcagtggctctgtctctcaagctgagtgggtccgggctggggccaccaccgtgccactgctagtgctgctgggtctggagatgactctgaaggacgacggacagcacatgtggaggcccaagaggttccccagaccagtctactgcaatctgtgcgagtcaagcattggtcttggcaaacagggactgagctgtaacctctgtaagtacactgttcacgaccagtgtgccatgaaagccctgccttgtgaagtcagcacctatgccaagtctcggaaggacattggtgtccaatcacatgtgtgggtgcgaggaggctgtgagtccgggcgctgcgaccgctgtcagaaaaagatccggatctaccacagtctgaccgggctgcattgtgtatggtgccacctagagatccacgatgactgcctgcaagcggtgggccatgagtgtgactgtgggctgctccgggatcacatcctgcctccatcttccatctatcccagtgtcctggcctctggaccggatcgtaaaaatagcaaaacaagccagaagaccatggatgatttaaatttgagcacctctgaggctctgcggattgaccctgttcctaacacccacccacttctcgtctttgtcaatcctaagagtggcgggaagcaggggcagagggtgctctggaagttccagtatatattaaaccctcgacaggtgttcaacctcctaaaggatggtcctgagatagggctccgattattcaaggatgttcctgatagccggattttggtgtgtggtggagacggcacagtaggctggattctagagaccattgacaaagctaacttgccagttttgcctcctgttgctgtgttgcccctgggtactggaaatgatctggctcgatgcctaagatggggaggaggttatgaaggacagaatctggcaaagatcctcaaggatttagagatgagtaaagtggtacatatggatcgatggtctgtggaggtgatacctcaacaaactgaagaaaaaagtgacccagtcccctttcaaatcatcaataactacttctctattggcgtggatgcctctattgctcatcgattccacatcatgcgagagaaatatccggagaagttcaacagcagaatgaagaacaagctatggtacttcgaatttgccacatctgaatccatcttctcaacatgcaaaaagctggaggagtctttgacagttgagatctgtgggaaaccgctggatctgagcaacctgtccctagaaggcatcgcagtgctaaacatccctagcatgcatggtggctccaacctctggggtgataccaggagaccccatggggatatctatgggatcaaccaggccttaggtgctacagctaaagtcatcaccgaccctgatatcctgaaaacctgtgtaccagacctaagtgacaagagactggaagtggttgggctggagggtgcaattgagatgggccaaatctataccaagctcaagaatgctggacgtcggctggccaagtgctctgagatcaccttccacaccacaaaaacccttcccatgcaaattgacggagaaccctggatgcagacgccctgtacaatcaagatcacccacaagaaccagatgcccatgctcatgggcccacccccccgctccaccaatttctttggcttcttgagctaagggggacacccttggcctccaagccagccttgaacccacctccctgtccctggactctactcccgaggctctgtacattgctgccacatactcctgccagcttgggggagtgttccttcaccctcacagtatttattatcctgcaccacctcactgttccccatgcgcacacacatacacacaccccaaaacacatacattgaaagtgcctcatctgaataaaatgacttgtgtttcccctttgggatctgctaaaaaaaaaaaaaataaaaaacaaaaaacaatttgggggggcggactcaggcccgagaaaagttttaaacacaatctggtttgggccggggccacgtaggaaatgacaccagggccatagctggtccaaagaaaccggggcataccaagtgcttggttccccccaataacaacgccggggaacggcgtttgaacaaccaaggggtcggggcaacggaccttaacggggccaggaccagtaacaccggggggc

SEQ ID NO: 56159 - DNA, 2779 bp, Homo sapiens
ccccgctgcggccgcgtctgcctggcccgtcccctccagcccagctcgggctccagctccagcgccggcgcttcagctgcgaccgcgagccctctcaagcaaggtagagaccccgcgagccccccagcgccccaccctcccccatcggaaaaggacaggggtagggaagccgaggacccacgggctgcgttcgtgctgctgggtcgggaaggaggaagcgtgacagctggagcgggcctaccctctgaagaggtccaagcaacggaagtactactacgaagctgcctttctggccatccttgagaaaaatagacagatggccaaggagaggggcctaataagccccagtgattttgcccagctgcaaaaatacatggaatactccaccaaaaaggtcagtgatgtcctaaagctcttcgaggatggcgagatggctaaatatgtccaaggagatgccattgggtacgagggattccagcaattcctgaaaatctatctcgaagtggataatgttcccagacacctaagcctggcactgtttcaatcctttgagactggtcactgcttaaatgagacaaatgtgacaaaagatgtggtgtgtctcaatgatgtttcctgctacttttcccttctggagggtggtcggccagaagacaagttagaattcaccttcaagctgtacgacacggacagaaatgggatcctggacagctcagaagtggacaaaattatcctacagatgatgcgagtggctgaatacctggattgggatgtgtctgagctgaggccgattcttcaggagatgatgaaagagattgactatgatggcagtggctctgtctctcaagctgagtgggtccgggctggggccaccaccgtgccactgctagtgctgctgggtctggagatgactctgaaggacgacggacagcacatgtggaggcccaagaggttccccagaccagtctactgcaatctgtgcgagtcaagcattggtcttggcaaacagggactgagctgtaacctctgtaagtacactgttcacgaccagtgtgccatgaaagccctgccttgtgaagtcagcacctatgccaagtctcggaaggacattggtgtccaatcacatgtgtgggtgcgaggaggctgtgagtccgggcgctgcgaccgctgtcagaaaaagatccggatctaccacagtctgaccgggctgcattgtgtatggtgccacctagagatccacgatgactgcctgcaagcggtgggccatgagtgtgactgtgggctgctccgggatcacatcctgcctccatcttccatctatcccagtgtcctggcctctggaccggatcgtaaaaatagcaaaacaagccagaagaccatggatgatttaaatttgagcacctctgaggctctgcggattgaccctgttcctaacacccacccacttctcgtctttgtcaatcctaagagtggcgggaagcaggggcagagggtgctctggaagttccagtatatattaaaccctcgacaggtgttcaacctcctaaaggatggtcctgagatagggctccgattattcaaggatgttcctgatagccggattttggtgtgtggtggagacggcacagtaggctggattctagagaccattgacaaagctaacttgccagttttgcctcctgttgctgtgttgcccctgggtactggaaatgatctggctcgatgcctaagatggggaggaggttatgaaggacagaatctggcaaagatcctcaaggatttagagatgagtaaagtggtacatatggatcgatggtctgtggaggtgatacctcaacaaactgaagaaaaaagtgacccagtcccctttcaaatcatcaataactacttctctattggcgtggatgcctctattgctcatcgattccacatcatgcgagagaaatatccggagaagttcaacagcagaatgaagaacaagctatggtacttcgaatttgccacatctgaatccatcttctcaacatgcaaaaagctggaggagtctttgacagttgagatctgtgggaaaccgctggatctgagcaacctgtccctagaaggcatcgcagtgctaaacatccctagcatgcatggtggctccaacctctggggtgataccaggagaccccatggggatatctatgggatcaaccaggccttaggtgctacagctaaagtcatcaccgaccctgatatcctgaaaacctgtgtaccagacctaagtgacaagagactggaagtggttgggctggagggtgcaattgagatgggccaaatctataccaagctcaagaatgctggacgtcggctggccaagtgctctgagatcaccttccacaccacaaaaacccttcccatgcaaattgacggagaaccctggatgcagacgccctgtacaatcaagatcacccacaagaaccagatgcccatgctcatgggcccacccccccgctccaccaatttctttggcttcttgagctaagggggacacccttggcctccaagccagccttgaacccacctccctgtccctggactctactcccgaggctctgtacattgctgccacatactcctgccagcttgggggagtgttccttcaccctcacagtatttattatcctgcaccacctcactgttccccatgcgcacacacatacacacaccccaaaacacatacattgaaagtgcctcatctgaataaaatgacttgtgtttcccctttgggatctgctaa

SEQ ID NO: 56160 - DNA, 2704 bp, Homo sapiens
ccccgctgcggccgcgtctgcctggcccgtcccctccagcccagctcgggctccagctccagcgccggcgcttcagctgcgaccgcgagccctctcaagcaaggtagagaccccgcgagccccccagcgccccaccctcccccatcggaaaaggacaggggcctaccctctgaagaggtccaagcaacggaagtactactacgaagctgcctttctggccatccttgagaaaaatagacagatggccaaggagaggggcctaataagccccagtgattttgcccagctgcaaaaatacatggaatactccaccaaaaaggtcagtgatgtcctaaagctcttcgaggatggcgagatggctaaatatgtccaaggagatgccattgggtacgagggattccagcaattcctgaaaatctatctcgaagtggataatgttcccagacacctaagcctggcactgtttcaatcctttgagactggtcactgcttaaatgagacaaatgtgacaaaagatgtggtgtgtctcaatgatgtttcctgctacttttcccttctggagggtggtcggccagaagacaagttagaattcaccttcaagctgtacgacacggacagaaatgggatcctggacagctcagaagtggacaaaattatcctacagatgatgcgagtggctgaatacctggattgggatgtgtctgagctgaggccgattcttcaggagatgatgaaagagattgactatgatggcagtggctctgtctctcaagctgagtgggtccgggctggggccaccaccgtgccactgctagtgctgctgggtctggagatgactctgaaggacgacggacagcacatgtggaggcccaagaggttccccagaccagtctactgcaatctgtgcgagtcaagcattggtcttggcaaacagggactgagctgtaacctctgtaagtacactgttcacgaccagtgtgccatgaaagccctgccttgtgaagtcagcacctatgccaagtctcggaaggacattggtgtccaatcacatgtgtgggtgcgaggaggctgtgagtccgggcgctgcgaccgctgtcagaaaaagatccggatctaccacagtctgaccgggctgcattgtgtatggtgccacctagagatccacgatgactgcctgcaagcggtgggccatgagtgtgactgtgggctgctccgggatcacatcctgcctccatcttccatctatcccagtgtcctggcctctggaccggatcgtaaaaatagcaaaacaagccagaagaccatggatgatttaaatttgagcacctctgaggctctgcggattgaccctgttcctaacacccacccacttctcgtctttgtcaatcctaagagtggcgggaagcaggggcagagggtgctctggaagttccagtatatattaaaccctcgacaggtgttcaacctcctaaaggatggtcctgagatagggctccgattattcaaggatgttcctgatagccggattttggtgtgtggtggagacggcacagtaggctggattctagagaccattgacaaagctaacttgccagttttgcctcctgttgctgtgttgcccctgggtactggaaatgatctggctcgatgcctaagatggggaggaggttatgaaggacagaatctggcaaagatcctcaaggatttagagatgagtaaagtggtacatatggatcgatggtctgtggaggtgatacctcaacaaactgaagaaaaaagtgacccagtcccctttcaaatcatcaataactacttctctattggcgtggatgcctctattgctcatcgattccacatcatgcgagagaaatatccggagaagttcaacagcagaatgaagaacaagctatggtacttcgaatttgccacatctgaatccatcttctcaacatgcaaaaagctggaggagtctttgacagttgagatctgtgggaaaccgctggatctgagcaacctgtccctagaaggcatcgcagtgctaaacatccctagcatgcatggtggctccaacctctggggtgataccaggagaccccatggggatatctatgggatcaaccaggccttaggtgctacagctaaagtcatcaccgaccctgatatcctgaaaacctgtgtaccagacctaagtgacaagagactggaagtggttgggctggagggtgcaattgagatgggccaaatctataccaagctcaagaatgctggacgtcggctggccaagtgctctgagatcaccttccacaccacaaaaacccttcccatgcaaattgacggagaaccctggatgcagacgccctgtacaatcaagatcacccacaagaaccagatgcccatgctcatgggcccacccccccgctccaccaatttctttggcttcttgagctaagggggacacccttggcctccaagccagccttgaacccacctccctgtccctggactctactcccgaggctctgtacattgctgccacatactcctgccagcttgggggagtgttccttcaccctcacagtatttattatcctgcaccacctcactgttccccatgcgcacacacatacacacaccccaaaacacatacattgaaagtgcctcatctgaataaaatgacttgtgtttcccctttgggatctgctaa

SEQ ID NO: 56161 - DNA, 3010 bp, Homo sapiens
ggggtctccagttcctgccagtgagtccctaggcctccatctctctcccttgctgtaccaccttcaccaccatccatgcgaccccaagagccttaatgactctagaagagactccaggcaggggaagctgaaaggacctttcactccctacttttggccagggccttctgtgccacctgccaagaccagcaggcctaccctctgaagaggtccaagcaacggaagtactactacgaagctgcctttctggccatccttgagaaaaatagacagatggccaaggagaggggcctaataagccccagtgattttgcccagctgcaaaaatacatggaatactccaccaaaaaggtcagtgatgtcctaaagctcttcgaggatggcgagatggctaaatatgtccaaggagatgccattgggtacgagggattccagcaattcctgaaaatctatctcgaagtggataatgttcccagacacctaagcctggcactgtttcaatcctttgagactggtcactgcttaaatgagacaaatgtgacaaaagatgtggtgtgtctcaatgatgtttcctgctacttttcccttctggagggtggtcggccagaagacaagttagaattcaccttcaagctgtacgacacggacagaaatgggatcctggacagctcagaagtggacaaaattatcctacagatgatgcgagtggctgaatacctggattgggatgtgtctgagctgaggccgattcttcaggagatgatgaaagagattgactatgatggcagtggctctgtctctcaagctgagtgggtccgggctggggccaccaccgtgccactgctagtgctgctgggtctggagatgactctgaaggacgacggacagcacatgtggaggcccaagaggttccccagaccagtctactgcaatctgtgcgagtcaagcattggtcttggcaaacagggactgagctgtaacctctgtaagtacactgttcacgaccagtgtgccatgaaagccctgccttgtgaagtcagcacctatgccaagtctcggaaggacattggtgtccaatcacatgtgtgggtgcgaggaggctgtgagtccgggcgctgcgaccgctgtcagaaaaagatccggatctaccacagtctgaccgggctgcattgtgtatggtgccacctagagatccacgatgactgcctgcaagcggtgggccatgagtgtgactgtgggctgctccgggatcacatcctgcctccatcttccatctatcccagtgtcctggcctctggaccggatcgtaaaaatagcaaaacaagccagaagaccatggatgatttaaatttgagcacctctgaggctctgcggattgaccctgttcctaacacccacccacttctcgtctttgtcaatcctaagagtggcgggaagcaggggcagagggtgctctggaagttccagtatatattaaaccctcgacaggtgttcaacctcctaaaggatggtcctgagatagggctccgattattcaaggatgttcctgatagccggattttggtgtgtggtggagacggcacagtaggctggattctagagaccattgacaaagctaacttgccagttttgcctcctgttgctgtgttgcccctgggtactggaaatgatctggctcgatgcctaagatggggaggaggttatgaaggacagaatctggcaaagatcctcaaggatttagagatgagtaaagtggtacatatggatcgatggtctgtggaggtgatacctcaacaaactgaagaaaaaagtgacccagtcccctttcaaatcatcaataactacttctctattggcgtggatgcctctattgctcatcgattccacatcatgcgagagaaatatccggagaagttcaacagcagaatgaagaacaagctatggtacttcgaatttgccacatctgaatccatcttctcaacatgcaaaaagctggaggagtctttgacagttgagatctgtgggaaaccgctggatctgagcaacctgtccctagaaggcatcgcagtgctaaacatccctagcatgcatggtggctccaacctctggggtgataccaggagaccccatggggatatctatgggatcaaccaggccttaggtgctacagctaaagtcatcaccgaccctgatatcctgaaaacctgtgtaccagacctaagtgacaagagactggaagtggttgggctggagggtgcaattgagatgggccaaatctataccaagctcaagaatgctggacgtcggctggccaagtgctctgagatcaccttccacaccacaaaaacccttcccatgcaaattgacggagaaccctggatgcagacgccctgtacagtgagtattgacgatcccagccaaaaattaaacccttgggctccatggatcctaaatccccattccacagcttctttacacccttctgatgcctgaacttcccctgcacatcattcatcctaaaccctgatttctcagcccctggtttccctatcgtggcctctctaggaacctagcaacccaccccaaaccccacagatttccctctaaatctctgaagccacagccccaaagtatcaggtcctgcctctgaatgtgctcccttcccttccagatcaagatcacccacaagaaccagatgcccatgctcatgggcccacccccccgctccaccaatttctttggcttcttgagctaagggggacacccttggcctccaagccagccttgaacccacctccctgtccctggactctactcccgaggctctgtacattgctgccacatactcctgccagcttgggggagtgttccttcaccctcacagtatttattatcctgcaccacctcactgttccccatgcgcacacacatacacacaccccaaaacacatacattgaaagtgcctcatctgaataaaatgacttgtgtttcccctttgggatctgctaa

SEQ ID NO: 56162 - DNA, 3279 bp, Homo sapiens
ggggtctccagttcctgccagtgagtccctaggcctccatctctctcccttgctgtaccaccttcaccaccatccatgcgaccccaagagccttaatgactctagaagagactccaggcaggggaagctgaaaggacctttcactccctacttttggccagggccttctgtgccacctgccaagaccagcaggcctaccctctgaagaggtccaagcaacggaagtactactacgaagctgcctttctggccatccttgagaaaaatagacagatggccaaggagaggggcctaataagccccagtgattttgcccagctgcaaaaatacatggaatactccaccaaaaaggtcagtgatgtcctaaagctcttcgaggatggcgagatggctaaatatgtccaaggagatgccattgggtacgagggattccagcaattcctgaaaatctatctcgaagtggataatgttcccagacacctaagcctggcactgtttcaatcctttgagactggtcactgcttaaatgagacaaatgtgacaaaagatgtggtgtgtctcaatgatgtttcctgctacttttcccttctggagggtggtcggccagaagacaagttagaattcaccttcaagctgtacgacacggacagaaatgggatcctggacagctcagaagtggacaaaattatcctacagatgatgcgagtggctgaatacctggattgggatgtgtctgagctgaggccgattcttcaggagatgatgaaagagattgactatgatggcagtggctctgtctctcaagctgagtgggtccgggctggggccaccaccgtgccactgctagtgctgctgggtctggagatgactctgaaggacgacggacagcacatgtggaggcccaagaggttccccagaccagtctactgcaatctgtgcgagtcaagcattggtcttggcaaacagggactgagctgtaacctctgtaagtacactgttcacgaccagtgtgccatgaaagccctgccttgtgaagtcagcacctatgccaagtctcggaaggacattggtgtccaatcacatgtgtgggtgcgaggaggctgtgagtccgggcgctgcgaccgctgtcagaaaaagatccggatctaccacagtctgaccgggctgcattgtgtatggtgccacctagagatccacgatgactgcctgcaagcggtgggccatgagtgtgactgtgggctgctccgggatcacatcctgcctccatcttccatctatcccagtgtcctggcctctggaccggatcgtaaaaatagcaaaacaagccagaagaccatggatgatttaaatttgagcacctctgaggctctgcggattgaccctgttcctaacacccacccacttctcgtctttgtcaatcctaagagtggcgggaagcaggggcagagggtgctctggaagttccagtatatattaaaccctcgacaggtgttcaacctcctaaaggatggtcctgagatagggctccgattattcaaggatgttcctgatagccggattttggtgtgtggtggagacggcacagtaggctggattctagagaccattgacaaagctaacttgccagttttgcctcctgttgctgtgttgcccctgggtactggaaatgatctggctcgatgcctaagatggggaggaggttatgaaggacagaatctggcaaagatcctcaaggatttagagatgagtaaagtggtacatatggatcgatggtctgtggaggtgatacctcaacaaactgaagaaaaaagtgacccagtcccctttcaaatcatcaataactacttctctattggcgtggatgcctctattgctcatcgattccacatcatgcgagagaaatatccggagaagttcaacagcaggttagggaaaggagggggcagtgtgggcatacacagtgtcaggagccaggttttgaccaagtttgactcagattgctcagaagaacagtggcacctctaggaggtccccccaaccaaagccacccttgttccccatgggactaaagttaggaggttgatgcccttccctgtcacgtaccacccctgccagcactgtgtaacctgtccctccctactgggccttgtgttggggctgacacagaatgaagaacaagctatggtacttcgaatttgccacatctgaatccatcttctcaacatgcaaaaagctggaggagtctttgacagttgaggtgtgtgtaataagacttaaccctacatccttttcagcttcttaatagccaagtttctccctccatggcacccttaggaacttcccatattcttgaacctatgcttctttaacctcccagctctcctaccccaattctccaagtcctcaagatacactagtccctatttccattccttgcacacctccaaatcctgccttctccagtttgtcatctggtggagggagcgatcacatctatgatcatgccatgaggtgaggatctgtaccctccctaactgggactgtgccccctcctctcagatctgtgggaaaccgctggatctgagcaacctgtccctagaaggcatcgcagtgctaaacatccctagcatgcatggtggctccaacctctggggtgataccaggagaccccatggggatatctatgggatcaaccaggccttaggtgctacagctaaagtcatcaccgaccctgatatcctgaaaacctgtgtaccagacctaagtgacaagagactggaagtggttgggctggagggtgcaattgagatgggccaaatctataccaagctcaagaatgctggacgtcggctggccaagtgctctgagatcaccttccacaccacaaaaacccttcccatgcaaattgacggagaaccctggatgcagacgccctgtacaatcaagatcacccacaagaaccagatgcccatgctcatgggcccacccccccgctccaccaatttctttggcttcttgagctaagggggacacccttggcctccaagccagccttgaacccacctccctgtccctggactctactcccgaggctctgtacattgctgccacatactcctgccagcttgggggagtgttccttcaccctcacagtatttattatcctgcaccacctcactgttccccatgcgcacacacatacacacaccccaaaacacatacattgaaagtgcctcatctgaataaaatgacttgtgtttcccctttgggatctgctaa

SEQ ID NO: 56163 - DNA, 1329 bp, Homo sapiens
ctgttcgtgaacccgaagtggggggggaagcaggggcagagggtgctctggaagttccagtatatattaaaccctcgacaggtgttcaacctcctaaaggatggtcctgagatagggctccgattattcaaggatgttcctgatagccggattttggtgtgtggtggagacggcacagtaggctggattctagagaccattgacaaagctaacttgccagttttgcctcctgttgctgtgttgcccctgggtactggaaatgatctggctcgatgcctaagatggggaggaggttatgaaggacagaatctggcaaagatcctcaaggatttagagatgagtaaagtggtacatatggatcgatggtctgtggaggtgatacctcaacaaactgaagaaaaaagtgacccagtcccctttcaaatcatcaataactacttctctattggcgtggatgcctctattgctcatcgattccacatcatgcgagagaaatatccggagaagttcaacagcagaatgaagaacaagctatggtacttcgaatttgccacatctgaatccatcttctcaacatgcaaaaagctggaggagtctttgacagttgagatctgtgggaaaccgctggatctgagcaacctgtccctagaaggcatcgcagtgctaaacatccctagcatgcatggtggctccaacctctggggtgataccaggagaccccatggggatatctatgggatcaaccaggccttaggtgctacagctaaagtcatcaccgaccctgatatcctgaaaacctgtgtaccagacctaagtgacaagagactggaagtggttgggctggagggtgcaattgagatgggccaaatctataccaagctcaagaatgctggacgtcggctggccaagtgctctgagatcaccttccacaccacaaaaacccttcccatgcaaattgacggagaaccctggatgcagacgccctgtacaatcaagatcacccacaagaaccagatgcccatgctcatgggcccacccccccgctccaccaatttctttggcttcttgagctaagggggacacccttggcctccaagccagccttgaacccacctccctgtccctggactctactcccgaggctctgtacattgctgccacatactcctgccagcttgggggagtgttccttcaccctcacagtatttattatcctgcaccacctcactgttccccatgcgcacacacatacacacaccccaaaacacatacattgaaagtgcctcatctgaataaaatgacttgtgtttcccctttgggatctgctaa

SEQ ID NO: 56164 - DNA, 1534 bp, Homo sapiens
  misc_feature (27)..(27): n is a, c, g, or t
  misc_feature (39)..(39): n is a, c, g, or t
aaacgagaccaaaatacggctaggtangaggctgggtgngctccgggatcacatcctgcctccatcttccatctatcccagtgtcctggcctctggaccggatcgtaaaaatagcaaaacaagccagaagaccatggatgatttaaatttgagcacctctgaggctctgcggattgaccctgttcctaacacccacccacttctcgtctttgtcaatcctaagagtggcgggaagcaggggcagagggtgctctggaagttccagtatatattaaaccctcgacaggtgttcaacctcctaaaggatggtcctgagatagggctccgattattcaaggatgttcctgatagccggattttggtgtgtggtggagacggcacagtaggctggattctagagaccattgacaaagctaacttgccagttttgcctcctgttgctgtgttgcccctgggtactggaaatgatctggctcgatgcctaagatggggaggaggttatgaaggacagaatctggcaaagatcctcaaggatttagagatgagtaaagtggtacatatggatcgatggtctgtggaggtgatacctcaacaaactgaagaaaaaagtgacccagtcccctttcaaatcatcaataactacttctctattggcgtggatgcctctattgctcatcgattccacatcatgcgagagaaatatccggagaagttcaacagcagaatgaagaacaagctatggtacttcgaatttgccacatctgaatccatcttctcaacatgcaaaaagctggaggagtctttgacagttgagatctgtgggaaaccgctggatctgagcaacctgtccctagaaggcatcgcagtgctaaacatccctagcatgcatggtggctccaacctctggggtgataccaggagaccccatggggatatctatgggatcaaccaggccttaggtgctacagctaaagtcatcaccgaccctgatatcctgaaaacctgtgtaccagacctaagtgacaagagactggaagtggttgggctggagggtgcaattgagatgggccaaatctataccaagctcaagaatgctggacgtcggctggccaagtgctctgagatcaccttccacaccacaaaaacccttcccatgcaaattgacggagaaccctggatgcagacgccctgtacaatcaagatcacccacaagaaccagatgcccatgctcatgggcccacccccccgctccaccaatttctttggcttcttgagctaagggggacacccttggcctccaagccagccttgaacccacctccctgtccctggactctactcccgaggctctgtacattgctgccacatactcctgccagcttgggggagtgttccttcaccctcacagtatttattatcctgcaccacctcactgttccccatgcgcacacacatacacacaccccaaaacacatacattgaaagtgcctcatctgaataaaatgacttgtgtttcccctttgggatctgctaa

SEQ ID NO: 56165 - DNA, 793 bp, Homo sapiens
ggggtctccagttcctgccagtgagtccctaggcctccatctctctcccttgctgtaccaccttcaccaccatccatgcgaccccaagagccttaatgactctagaagagactccaggcaggggaagctgaaaggacctttcactccctacttttggccagggccttctgtgccacctgccaagaccagcaggcctaccctctgaagaggtccaagcaacggaagtactactacgaagctgcctttctggccatccttgagaaaaatagacagatggccaaggagaggggcctaataagccccagtgattttgcccagctgcaaaaatacatggaatactccaccaaaaaggtcagtgatgtcctaaagctcttcgaggatggcgagatggctaaatatgtccaaggagatgccattgggtacgagggattccagcaattcctgaaaatctatctcgaagtggataatgttcccagacacctaagcctggcactgtttcaatcctttgagactggtcactgcttaaatgagacaaatgtgacaaaaggtatggtcaagcaggtaggatgttccttcaccctcacagtatttattatcctgcaccacctcactgttccccatgcgcacacacatacacacaccccaaaacacatacattgaaagtgcctcatctgaataaaatgacttgtgtttcccctttgggatctgctaagtaagtggtacacttccttcttttataccttcactccttaaatgacgtagattctcccaagaagcaacagaaaaaccagca

SEQ ID NO: 56166 - DNA, 1129 bp, Homo sapiens
agtttttaagaattattttaatacacttttcctgcgaaactcaattcaaggcagcttcaaggtaaaaatgcttatatttggcatctgtccttgtatttttaggcaccttgatgcattcacactcactacgctcacacccagaagacccccaagaaatccgcttctttgtgcagataaaggaaatgcaaactggtcattctggaaaccagggtcaattctagatttctagaagcctggctgtgggcctcaaggcctttcatgaaagcaagggcctcagattgaccctttccaagcatcccctaccaggaggggaagggcacagattctcaagggaccgtggtgcatgcaggtaaaccgaaacctctaggctggcacgtggcaccactgccctgggagacaagccatccccgctctctgtctggatggcctggtcaatgcagtgtagatcatggatgtgatttctctcactgatatttgggggatacaatttaaaatgtatccaagtatctgatggaaataagagggagctacagaaaatgactcaagctgaggacatataggaaggaatcggttcaggtgtaaggaaggatttctggggaactttcttccttgtgttcatccctccctctttacataaggtcttgagtcacgagcaccttgtgttagatgctgggctacaaaatgatcaaaacagaaggcctgcccactgagagtacacacttccctgggccacatccaccctccaaagtaatcccaccataacagggcagctgtcatcatggaaggactgcccacgtgcagaggggcccaagaaagtggtcttgtcctcaaagcaacttgagatgaggatcctgtgtcatccaacagctacagcttaggcagatgaatagcggcttccctgggcccaggcagtcctccaattcataaaagcaaacaggcctggggcagtggctcacgctgtaatcccagcactttgggaggcctaggcaggcggatcacaaggtcaggagtttgagaccagcctggccaacatggtgaaaccccgtctgtactaaaaaaaatacaaaaattagccgggcatggtagcatgcgcctgtaatcccagctactcaggaggttgaggcaggag

SEQ ID NO: 56167 - DNA, 204 bp, Homo sapiens
cttttcctctcattcctgtctgtgccttcatttctgtcttgttctcttgctcctccaaggacgacaatgtgcatttattgagtgcctcctgtgtgcccaccacctcaccagtgtacttgttctcatttcctctcttctccctgcctccttctctccaccagcttctccccctcctctctgccctgccagctctttcctgaggga

SEQ ID NO: 56168 - DNA, 667 bp, Homo sapiens
tatacattttaatattaaaagaaaaagctgtgatacataatgattatacatatgtatggggaacattgttcgtttcaatacatggagagattgtgtaatcatcaaatcagagtcattagaatttcatcacctcaaatatttatcagttttttgtggtgaggacatgcaaattattttcctctagctttttttgaaatatacaatatatttccattatctgagaatatgctgtatttagcaaaaaataatttgcgattactaggtacttcagtgcatgtagagagggtattttctcagttaaaagtaatgtattctatggagaccagtcaattgaaggtttcaacaatttcaaatttattagcataaagcacagctttgaaaacaaatgcaggcaattttatgaaaaaatggaaaacaataaaactgtatttcaaaaatacattgtccacaaatagaataataatgaccaatattacttgtacaactaagatggtgtttaaattaaatgaatatataacataaataatcatactacttgttatttaatgtgctgataatcaatacaaatattcttttgcttttatgaatagaaatagatattgctttcttaaagaaacattttatttcaaaaatattttataacacttccataggcccaaaccccact

SEQ ID NO: 56169 - DNA, 333 bp, Homo sapiens
aatttttagaaattatgataaaccaccatttaaatgaataatatgacacagaaaatttactttgctcaccctggagtgttagaaagaaaagttgaatattaatcactcacattagactgtgaagtagaggaataggcttaatagaaaacctcctacattacattatttttattggaacaaatgacatctctctaaatgccttctgacttattctctgtgcttactctcaagatagtacagaaaaagattgctttaaagtgttagtgtcagaggacagattttgaagcataaataataatgttgtaaatagcatgtgtattctgtagctttgag

SEQ ID NO: 56170 - DNA, 299 bp, Homo sapiens
gtggcaggcacttgtaatcccagctactcaggaggctgaggcaggagaattgcttgaagccgggaggcagaggttgccgtgagccaagatcataccactgcactctagcctgggtgatgagctctcaaaaaaaaattaaatggttagtgtttcctggtgtgattgtgccataatttatttacccaggccccagttgactggcatttataatttttccacaccatttctcttacagacaaggttgcagtaaagatcttttacatatttttgtatacatgtgagtatatacctttggaaca

SEQ ID NO: 56171 - DNA, 148 bp, Homo sapiens
acaggatctccaggtaagacttcctttttggaaacttgactgagccaccagaaataggggtagttattaaaagccacaacggcaaggcagccaaagccaggcagttcatgattcaaccagtttgcaaataaagacaccatgagacagg

SEQ ID NO: 56172 - DNA, 438 bp, Homo sapiens
gtccttctcctgtcacaaatccacacaggcacatctccctctaactgtgacttctctcatgcttccctcttccatttttgaagaatttttttttttagacagagttttgctctgtcacccaggctggggtgcagtggcatgatctcggctcactgcaacctctacctcccatgttcaagcgattctcctgcctcagcctcccgagtagctgggattacagtcatccaccaccatgcccggctagcttttgtatttttagcagacttgggatttcaccatgttggccaggctggtctcaaactcctgacttcaagtgacctgcccacttcagcctcccaaagtgctgggattacaggtgtgagcccccatgcccagcctttaaagaacccttttgatgacactgggcctactgcataatccagaataaccttcccatct

SEQ ID NO: 56173 - DNA, 290 bp, Homo sapiens
cgggacgctgactgctctttctcctcaccctggccctttatatacctccaggcagccatggcgaacacatctggctccagaagcccccactgaagctggccttgctctctctcgccatggcctctcactcaggtatcactggtcctggtgcttccggagtcttgggcatcatcttatctcaccaggaagattctggaagcactacccccagggttggctcagcagggctgcagggatggagccagggtgggcaggggtgtgtgatgtatgcgctcacggcatcgttctct

SEQ ID NO: 56174 - DNA, 546 bp, Homo sapiens
gtgtatagctgttccagtggtcactagctgttagcagatgacgatctgtgaatagaaccataatctgttctctcttccaagctgcagcaaggcgtttgccatttccatttctgggatctcttaggctagatgatcagtaatgatgggattgtaggtaggatggctttatctgcctccactactcaatcgataaagactacatctcacttaacaagtctgccagggatttttagacagcctctgttgttgtagttgatgcatctggagggtcagcctttccagctaggtctttcttaacaaaaagtggcaaaagtgttattgcttttttcccctcttttcagatctcatgttcttgtgtggcttcctgcttcagtgctgtttgtgggtataatctatgctgggtccagagcattgtccagactggtaagtattagaggttcaggggaaacaactcctctctccctttcccctttgccttttaacttatcatgcctcagctcaataagggcaaagaatcactttaataatgataataatgggacctat

SEQ ID NO: 56175 - DNA, 1491 bp, Homo sapiens
  misc_feature (21)..(21): n is a, c, g, or t
  misc_feature (30)..(30): n is a, c, g, or t
  misc_feature (33)..(33): n is a, c, g, or t
  misc_feature (1161)..(1161): n is a, c, g, or t
aagatatgctagtacgaggcnggtggtatnggngaggcggcggcagggattgggcaggcaccgtggatccccgggaaggggacgagttgacagatgtgcgtgaggaggtctctggtcggcctcaccttttgtacctgctacctggcttcttacctcacgaacaagtatgtgctgtctgtcttgaaatttacctaccctacattattccaagggtggcagacgctcattggtggacttttgcttcatgtgtcctggaaactgggctgggtagagatcaacagcagttcaagatctcatgttcttgtgtggcttcctgcttcagtgctgtttgtgggtataatctatgctgggtccagagcattgtccagactggccattcctgtgtttctcactttgcataatgtagctgaagttatcatctgtgggtaccagaagtgttttcagaaagagaaaacatctcctgcaaagatctgtagtgccctcttcctcctggccgcagcaggatgccttcccttcaatgactcccagtttaatccagatggatatttttgggctataattcacttactctgtgtaggggcttataaaattctacagaagtcccagaaacccagtgcattaagtgacattgaccagcaatacttaaactatatattcagtgtggtgctcctggcatttgcatctcatcccacaggtgatctcttcagcgtcctggacttcccattcctgtacttctacagattccatggtagctgctgtgccagtggattttgggattctttctcatgttcagtacagtgaagctaaaaaaccttctggccccagggcagtgtgcagcctggattttcttgctaagataatcacagctggcttatcaatatgctgtttgatgcgatcctgaccagtgcaaccacgggatgcctcctgctcggtgcgcttggagaggccttgctggttttctcagagcggaagagctcctgaacaagacggtcaagagaaagactcacaggctgctgcgggagaacagcttgtacacctgtgtacgagcccctggtctcatagctccctgttggatgtgtcagaaagaggaatgcaaggacagtgaggccaggtgggcagtgcatcacctcacccaagtgaatgtggtggtggtgatgaggncgaggcctggtgcttcaaggagcacctttctgggggtctgcaggtcactgcagaggagcggtctgttacatcttcccatttggagaacctctctcaacgtgctgtagctggttctgcagaaaccaggaagtaccaggatttcatgggctggtctggtcgctcgatgagcttcaacttctggatggcaaatgctctttcccaaaaactggtttcagtgaagggaatgggcaagggttggggagtaataccacgtaaaacttaattatttatatattttaaaaaagggcacctggggcagggatgaagggggacacagtgggacgttaacac

SEQ ID NO: 56176 - DNA, 1386 bp, Homo sapiens
  misc_feature (21)..(21): n is a, c, g, or t
  misc_feature (30)..(30): n is a, c, g, or t
  misc_feature (33)..(33): n is a, c, g, or t
  misc_feature (1056)..(1056): n is a, c, g, or t
aagatatgctagtacgaggcnggtggtatnggngaggcggcggcagggattgggcaggcaccgtggatccccgggaaggggacgagttgacagatgtgcgtgaggaggtctctggtcggcctcaccttttgtacctgctacctggcttcttacctcacgaacaagtatgtgctgtctgtcttgaaatttacctaccctacattattccaagggtggcagacgctcattggtggacttttgcttcatgtgtcctggaaactgggctgggtagagatcaacagcagttcaagatctcatgttcttgtgtggcttcctgcttcagtgctgtttgtgggtataatctatgctgggtccagagcattgtccagactggccattcctgtgtttctcactttgcataatgtagctgaagttatcatctgtgggtaccagaagtgttttcagaaagagaaaacatctcctgcaaagatctgtagtgccctcttcctcctggccgcagcaggatgccttcccttcaatgactcccagtttaatccagatggatatttttgggctataattcacttactctgtgtaggggcttataaaattctacagaagtcccagaaacccagtgcattaagtgacattgaccagcaatacttaaactatatattcagtggattttgggattctttctcatgttcagtacagtgaagctaaaaaaccttctggccccagggcagtgtgcagcctggattttcttgctaagataatcacagctggcttatcaatatgctgtttgatgcgatcctgaccagtgcaaccacgggatgcctcctgctcggtgcgcttggagaggccttgctggttttctcagagcggaagagctcctgaacaagacggtcaagagaaagactcacaggctgctgcgggagaacagcttgtacacctgtgtacgagcccctggtctcatagctccctgttggatgtgtcagaaagaggaatgcaaggacagtgaggccaggtgggcagtgcatcacctcacccaagtgaatgtggtggtggtgatgaggncgaggcctggtgcttcaaggagcacctttctgggggtctgcaggtcactgcagaggagcggtctgttacatcttcccatttggagaacctctctcaacgtgctgtagctggttctgcagaaaccaggaagtaccaggatttcatgggctggtctggtcgctcgatgagcttcaacttctggatggcaaatgctctttcccaaaaactggtttcagtgaagggaatgggcaagggttggggagtaataccacgtaaaacttaattatttatatattttaaaaaagggcacctggggcagggatgaagggggacacagtgggacgttaacac

SEQ ID NO: 56177 - DNA, 478 bp, Homo sapiens
  misc_feature (467)..(467): n is a, c, g, or t
cactgttagctgaagcttcaaggatacaaattcaataatcctctattaacacagctcagaaatgttcagaaatccaggggtgtttctcttttcatgtgcgtcatgtcaaggaagtaaaaccttcctgttaattgtgtccttcataatcatgatgctttccatgcccagcactctggggaccaatggaaggactgactgcgttatcatagaggattattgaatttgtatccttgaagccttccaaatgttgatggtcttctcctgtcagctgggtgtgacactcgtagggaaaaggaccagcagtcgtgcttttgggagcctttatccatgtggattttgtgtgtccccggacaggccagcagctccttgagcagaataccatgaccagtgatatgttttatttcattttcaggggcttataaaattctacagaagtcccagaaacccagtgcattaagtgacattgnccagggggatg

SEQ ID NO: 56178 - DNA, 1328 bp, Homo sapiens
  misc_feature (21)..(21): n is a, c, g, or t
  misc_feature (30)..(30): n is a, c, g, or t
  misc_feature (33)..(33): n is a, c, g, or t
  misc_feature (998)..(998): n is a, c, g, or t
aagatatgctagtacgaggcnggtggtatnggngaggcggcggcagggattgggcaggcaccgtggatccccgggaaggggacgagttgacagatgtgcgtgaggaggtctctggtcggcctcaccttttgtacctgctacctggcttcttacctcacgaacaagtatgtgctgtctgtcttgaaatttacctaccctacattattccaaggatctcatgttcttgtgtggcttcctgcttcagtgctgtttgtgggtataatctatgctgggtccagagcattgtccagactggccattcctgtgtttctcactttgcataatgtagctgaagttatcatctgtgggtaccagaagtgttttcagaaagagaaaacatctcctgcaaagatctgtagtgccctcttcctcctggccgcagcaggatgccttcccttcaatgactcccaggggcttataaaattctacagaagtcccagaaacccagtgcattaagtgtggtgctcctggcatttgcatctcatcccacaggtgatctcttcagcgtcctggacttcccattcctgtacttctacagattccatggtagctgctgtgccagtggattttgggattctttctcatgttcagtacagtgaagctaaaaaaccttctggccccagggcagtgtgcagcctggattttcttgctaagataatcacagctggcttatcaatatgctgtttgatgcgatcctgaccagtgcaaccacgggatgcctcctgctcggtgcgcttggagaggccttgctggttttctcagagcggaagagctcctgaacaagacggtcaagagaaagactcacaggctgctgcgggagaacagcttgtacacctgtgtacgagcccctggtctcatagctccctgttggatgtgtcagaaagaggaatgcaaggacagtgaggccaggtgggcagtgcatcacctcacccaagtgaatgtggtggtggtgatgaggncgaggcctggtgcttcaaggagcacctttctgggggtctgcaggtcactgcagaggagcggtctgttacatcttcccatttggagaacctctctcaacgtgctgtagctggttctgcagaaaccaggaagtaccaggatttcatgggctggtctggtcgctcgatgagcttcaacttctggatggcaaatgctctttcccaaaaactggtttcagtgaagggaatgggcaagggttggggagtaataccacgtaaaacttaattatttatatattttaaaaaagggcacctggggcagggatgaagggggacacagtgggacgttaacac

SEQ ID NO: 56179 - DNA, 1493 bp, Homo sapiens
  misc_feature (1163)..(1163): n is a, c, g, or t
gtgtatagctgttccagtggtcactagctgttagcagatgacgatctgtgaatagaaccataatctgttctctcttccaagctgcagcaaggcgtttgccatttccatttctgggatctcttaggctagatgatcagtaatgatgggattgtaggtaggatggctttatctgcctccactactcaatcgataaagactacatctcacttaacaagtctgccagggatttttagacagcctctgttgttgtagttgatgcatctggagggtcagcctttccagctaggtctttcttaacaaaaagtggcaaaagtgttattgcttttttcccctcttttcagatctcatgttcttgtgtggcttcctgcttcagtgctgtttgtgggtataatctatgctgggtccagagcattgtccagactggccattcctgtgtttctcactttgcataatgtagctgaagttatcatctgtgggtaccagaagtgttttcagaaagagaaaacatctcctgcaaagatctgtagtgccctcttcctcctggccgcagcaggatgccttcccttcaatgactcccaggggcttataaaattctacagaagtcccagaaacccagtgcattaagtgacattgaccagcaatacttaaactatatattcagtgtggtgctcctggcatttgcatctcatcccacaggtgatctcttcagcgtcctggacttcccattcctgtacttctacagattccatggtagctgctgtgccagtggattttgggattctttctcatgttcagtacagtgaagctaaaaaaccttctggccccagggcagtgtgcagcctggattttcttgctaagataatcacagctggcttatcaatatgctgtttgatgcgatcctgaccagtgcaaccacgggatgcctcctgctcggtgcgcttggagaggccttgctggttttctcagagcggaagagctcctgaacaagacggtcaagagaaagactcacaggctgctgcgggagaacagcttgtacacctgtgtacgagcccctggtctcatagctccctgttggatgtgtcagaaagaggaatgcaaggacagtgaggccaggtgggcagtgcatcacctcacccaagtgaatgtggtggtggtgatgaggncgaggcctggtgcttcaaggagcacctttctgggggtctgcaggtcactgcagaggagcggtctgttacatcttcccatttggagaacctctctcaacgtgctgtagctggttctgcagaaaccaggaagtaccaggatttcatgggctggtctggtcgctcgatgagcttcaacttctggatggcaaatgctctttcccaaaaactggtttcagtgaagggaatgggcaagggttggggagtaataccacgtaaaacttaattatttatatattttaaaaaagggcacctggggcagggatgaagggggacacagtgggacgttaacac

SEQ ID NO: 56180 - DNA, 1003 bp, Homo sapiens
  misc_feature (673)..(673): n is a, c, g, or t
cccgcttcccacctgcgcggtcaccatggtggcgagcacagcaaccccaggtgtccagagcactgccccaagtgccctcttcctcctggccgcagcaggatgccttcccttcaatgactcccaggggcttataaaattctacagaagtcccagaaacccagtgcattaagtgacattgaccagcaatacttaaactatatattcaggtgatctcttcagcgtcctggacttcccattcctgtacttctacagattccatggtagctgctgtgccagtggattttgggattctttctcatgttcagtacagtgaagctaaaaaaccttctggccccagggcagtgtgcagcctggattttcttgctaagataatcacagctggcttatcaatatgctgtttgatgcgatcctgaccagtgcaaccacgggatgcctcctgctcggtgcgcttggagaggccttgctggttttctcagagcggaagagctcctgaacaagacggtcaagagaaagactcacaggctgctgcgggagaacagcttgtacacctgtgtacgagcccctggtctcatagctccctgttggatgtgtcagaaagaggaatgcaaggacagtgaggccaggtgggcagtgcatcacctcacccaagtgaatgtggtggtggtgatgaggncgaggcctggtgcttcaaggagcacctttctgggggtctgcaggtcactgcagaggagcggtctgttacatcttcccatttggagaacctctctcaacgtgctgtagctggttctgcagaaaccaggaagtaccaggatttcatgggctggtctggtcgctcgatgagcttcaacttctggatggcaaatgctctttcccaaaaactggtttcagtgaagggaatgggcaagggttggggagtaataccacgtaaaacttaattatttatatattttaaaaaagggcacctggggcagggatgaagggggacacagtgggacgttaacac

SEQ ID NO: 56181 - DNA, 598 bp, Homo sapiens
cgctgacgagaccctgcaggacacaacgctccgctactgggagcgcagacgctcagtccaacagagcgtcattgtgaaccagaaggccgccctgccagtggcgtccgagcgggtgtttgggagtgtcggaaaacggctggagagtttgcccaaagccctgtaccctggggccaaggaggagaccctggccagctcctcgtgttgggactgcgctggcctgtccacccagaagacacagggctacctttctgaggacacctccatgaacagcagcctgcccttctgttcatggaagaaggccgctgctcagaggccgcgaagcagcctccgagccttcttggacccgcacagaaacctggagcaggagtccctcctgcccaaccgggtgctgcagtcggtcctgaagcaaggctgccctaaggggtaccatctcctcctggcctccgcaacactgcagccagataagaggtgaacactcgcgaacccaaggccaggggcacacatgggccaggcaatgaggagcgtccttccttgccccacaaataaaggcacatcccaggtggctgggacctgccagtaggtgtcacaccacaaaact

SEQ ID NO: 56182 - DNA, 1507 bp, Homo sapiens
caggtgtgtgggtctagggaggagagtggaaactgtgaattcctgtgtgcttgtcttgttgcttcaatgaggaggcctgattgaggcaagtcagcctccacctgcttttcctgggtcctgtcttggaaggacagagagcagctaaattctagtgtatcttaaatcagtgagggtcaaataagctaaaagcagctgaaattcctttgttccctgtgagctgggaaaacagcgaaggcctgagtcgtagagattgtcaggtccattttggcttctttccacacccacagtctcgcgtttgttccccagccctcggctgcctcttaactttgggttgactttcaacagtgaatagtctcttgggtctgaatatacctgggtttgtttttgtgtttttgagacggagtctcgctctgtcggccaggttggagtgcagtggtgcaatctcagctcactgcaacctccccctcctgggttcaagcgattctcctgcctcagcctcctgagtagctgagattataggcctaccaccatgcccagccaatttttgtatttttagtagaaacgggacttcaccatgttgcccaggctggcctcgaactcctgacctcaagtgatccacccgcctcggcctcccaaagtgctgggattacaggcatgagctgccgcacccggcctccacctgggttttgagccaatcccccggacttgctcctggtttcctcaaggggtggggcagtggtttaggacactcgacaactaagaacaggagttcccaggaaggacaaggatctgcctcccccactgccacttctctgatgtgttcctcaaagctggctcgagggctcgatcccttcatcggacccaggaggggactggttggtgtatccaggtaatttactcttggaagtgactgtagtgaaggtcgtggaagggctcagagggttaattggtttgcagtgcgtctttgtctattgcatgtcttggaaaactcagatcccaaaggcgctgggtttcagagaggacagtggagaccttgctccttttccttaggccgccagtctctcaaatttcagaggaggctgtttccacaactcccctatggaaacacttggcagcggagttgctcctttgcagtttccacaccatggcttttcctttcctttcttctccattccctgatgcatcaacacttacttggagcaatttcctaggagtcagaaccagcaccagccactcggtgtcggtggccaccaaggcttaacattgaccttcccgcctgaccttgatgcagatgtccactgaacacaccgcaggaaagccagggccttcaataccaataagtgtgaatatgtgtgtatgttgtccaagagagattagggagatcacatagactctagggagtagagaacttgtaacagtcttgcaaggctagcatgcacggctccacagcaggtggtggggagcagaggggcaggacctgcagggaagaagcagcctttggatggtg

SEQ ID NO: 56183 - DNA, 184 bp, Homo sapiens
agactaggctaacagacaaggtactttatggtaggaggaatgggccataaccctttagtgcagagaaggaaggagcggatgttcctgataacacccccagagagggagtacatgggacacagacccatgcctgggtacccctgagtgttgggcccccttggcaggtgagcctgccctccagagg

SEQ ID NO: 56184 - DNA, 762 bp, Homo sapiens
atcctcttcccagcttcagccacaggagtctggcagggcggaacaagggtctcagagaggggagaaaatgaaggggaagatggtgagccaggtcccatcccaagggccatgtgtacacatggaggctggtgtggactatctatctccaggcccaggagaaccctcaaactctaaggttctggtctcaggcaagagaaaggacaaggcttcagcctcatcctcagccaaaaagagagagcaccctaggaaacccaaagcaggagaccatagaagagggactgcaaggttggggttatccacagtcacagggaagaaccaccctgcccaggccagaagcctagtagaggcccctgtaagcacatttccccaaaggtctcaacacaggggccagagctctcaacacactgctcttccccagctgcttctccccaaagcttcgggtccccaggatcagccagaggcagggcgaagagcaagtgacatcctgacccctcgccactgtaagcactgtccttgggcccacatggagaagtatctctccttccctaccctcaaggcttcccttaccaggggtttgcaaaaggtgttagccaaatgcctggataaccatcgacccctacccaccaaatctagtcagtagagaaaaggctggtaatactagcacttggtatgccaagacctgaagccaaaccagggggaaggtggggatgtggagacaagaaatggaaattctaataaactagctgaattagaaaaaaaaaa

SEQ ID NO: 56185 - DNA, 500 bp, Homo sapiens
ccaatctgaagtgggagcaattgaaggtttttgaggggtaatagtaggaacggtaactggaagccagaaaagctacttctgtaaactggtgtaagatgacagggatctgtgtcagggaggtagcaggaagagatgacttcaagcgacaccgcagaataagaaccatagagcttggtgcctaaatagagggctggaaatggggctgggagtggcataaggatggggaacgatttgagcctgagagatggttgtagcccaacagcacgtctcctcttcttcattagtaagagcgcccaggaaggagcaatgattaccaataataaagactacattttcccgccatgtgaatgaccaacggatgtaaatgaaagtgacatgtgttacttcgaggaaatgtccttaacaagaaagaaacaaccttattttgtccatttctctttcctgatggctaaaaggtaggtgggatggctggagctccagcagctttcttgaagtatgag

SEQ ID NO: 56186 - DNA, 2295 bp, Homo sapiens
  misc_feature (308)..(308): n is a, c, g, or t
ctcgccccgccctcctcgtttggcgccaaaccctgtggtcaacggcgcgcgggtctccaggctccgtgttctaggcccgagttagaatcctgtcagctgaggaggtcgggcggggcagaggggcttcaccttgaaaatctcggggagactgtgggtacgagggggaagtgattatttttctgttgcccacttttcaatatgaaggaggatcaagttgtggcggaagaaccaggattccaagatgaagaggaatctttgtttcaagatattgacctgttacagaaacatggaattaacgtggctgacantaagaaactgaaatcagtaggaatctgtaccatcaaaggtatacagatgacaacaagaagagctctatgcaatgtcaaaggactctcagaagccaaagtagacaagattaaagaggcagcgaacaaactaattgaaccaggattcttgactgcatttgagtatagtgaaaagaggaaaatggttttccatatcaccaccgggagccaggaatttgataagttactaggaggtggaattgaaagtatggcaattacagaagcttttggagaatttcgtactggaaaaacccagctttctcataccctctgtgtgacagctcaacttccaggagctggtggctacccaggaggaaagattatcttcattgatacagaaaatactttccgtccagatcgccttagggacattgctgatcgctttaatgtagaccatgatgcagtactggacaacgtactttatgcacgtgcatatactagtgaacatcagatggagctacttgattatgtagcagcaaagttccatgaagaagctggcatcttcaagctattgattatcgattcaataatggcactttttcgagtggatttcagtggccgtggggagttggccgaacggcagcaaaaattggcccagatgttgtcacgactccaaaaaatctcagaagaatataacgtggctgtttttgtgaccaatcaaatgactgccgatccaggagcaactatgacctttcaggcagatcccaaaaaacccattgggggacacattctggctcatgcttcaacaacaagaataagcttgcgaaagggaagaggagagctcagaattgccaagatttatgacagtcctgagatgcctgaaaatgaagccaccttcgcaataactgctggaggaattggggatgccaaggagtaggtggtgaattgatgcaaattgcttcttagtgcttattaggagctgaagaaatggaaaagcagtctccaatttcacatcttgaaatagaggttttttcccacatgttactaaagaaaagtcagcaaagagatttaaatcttatatttatcttaaaagtccctgatttatgataactatacattgtatgtaaattcagggatatgtatatgtatgtttgtgtgtgtgtgtgtttgtgtgtgtatacctgacatatatagtagatatatatacctattgaaattctctcactctgtgtatgtatatatacctatggaaaactagttgttgggaaaggagtacgtgattccctccctttcacttttcaaagtgagccactaaacagaaagtctaagagttcagaaatgtcccattctcctaaggactttcccttcaccatttttctagggtatagtgccactgacattacatagctagatgtttttccacaagaggatttaagggaggaatgtttataggacacacacacaaaagctctttctatttataatatcaaactgcatattcacctttatagcaacagaaaacagacattaaattaagccaaattttaaatcatttgactttgacaagcagaaattacttttaaaaaatgtatttatggctgggcgtggtggctcacacctgtaatcccagcactttgggaggccgaggcaggtggatcacttgaggtcaggaggtcaagaccagcctggccaacatggagaaaccccatctctactaaaaaaaaaaaaattagccaagtgcagtggcatgtgcttgtaatcccagctaccctggaggctgaggcaggagaattgcttgaacccaggaggcagagattgcggtgagccaagatggcaccactgcactccagcctaggtgacagagtgagactccgtctcaaaaaaaaaaaaaaaaaacttttttaaaatgttaaaattaatttaaatgtaaaatttctgaatactaatcttagaaatgtgtaaaagatattattttgattgttaaacaaataaaatcctgttttcaaaatgc

SEQ ID NO: 56187 - DNA, 277 bp, Homo sapiens
ctcgccccgccctcctcgtttggcgccaaaccctgtggtcaacggcgcgcgggtctccaggctccgtgttctaggcccgagttagaatcctgtcagctgaggaggtcgggcggggcagaggggcttcaccttgaaaatctcggggagactgtgggtacgagggggggtccaacccctgactttggtatcaaatgaggaaatggaatcgaccaagaaaaatgatgatttggaccgcattttattgtaataaataaacacaatcacgccttgtggattc

SEQ ID NO: 56188 - DNA, 3308 bp, Homo sapiens
ggtcgacggaagagttctatgcgctctgtgaccagctggagctgtgcctgcgcctggcgcatgagtgcctgtcacagagttgtgacagtgccaagcactctccaacgttggtgcccacagccaccaagcccgacgcagtgcagcctgacagcctcccctacccacagtacctggcggtcatcaaagcccagatttcctgtgccaaggacattcacaccgccctgctggactgtgccaacaaggtcacgggcaagacacccgcaccacctgctggccctgggggcactctgtgaagtgggggacagggagtggggcaggcagtggttggtgggtggtgtgcaaagggaatgaagagcgtcctgggcctaaacacagcagcctcctctcttcctgcctgagcaccgcagcgggagccagcagggggcagcagaggccaacagggagctcgcaggccgggcccctgcgtccctgccccttcttcctgctccccctcctagcctagggtagactttgaactgtgtgtgttgatgacttctctgttccacaggccctcccccattcttgcctgggtgtggagccctggctgtcccctctccctcagtccttcctgactgtctccagctgggaggtggtctctgtgtgccactcctctgtgtctctattacagttgtgtctctctcatcctgtctctttttcccttgtttctctgttcctgttaatgtgtttctccccatggtcctatttctctcactctgacctctctctcttagtcccctttagctgtcttctatccccagctcctaactgggactctgtgtctatgcagggggccagcacccctgggttatctggggctaagggaagggacttcatttccaggggccacagccaagcccagagtcccccagcggctcgcatgtcagcccagaccccagggtccttggcctaggagaggagcagtggaggggcccaggctctgagctccacaggtctgagcagggagcaactcaggcccccacccaagcctgcgtcagcggaacttgagtgaggggcgttgtgcaatttgtggcaaggctggcccagctggatgcctgggtcccagtatttttagccccaaaggagaagtgaaaaggccccagccggggtgaatcatcagtcctggggaagaacccaggcgcctgagccccagctccgggaagcaggcactggggagggggcttcaaggagggagtgccccctcagactccctgcttccctggaagcttcaggaagctcagcctcagccttcaggcctgagcaagtgcagggcggagctaccagcccaggctcagatgttggggtgtgaaagcctcaagtgactcagcctggttggagaactgccccacccagtatcttctgtgccatggttcccacattcgcactccatggcctcctgtcctggaccccacgtctgcaaggaaaccctaggaccatggatacctctgtgattcacgctgagcccaagtccccacactggaaaactgggaaatggccagctgtgtgtcccaggaaattcctccccttattcttccttgaagtgcccgagcatgtagggcaagaaggaaggctgaagcgctgtccctaggaggaatttctccttcaggggagcctcagttttgcccatttatctaattgaatcagttttttacccaatcccccgattttgtaggataatctcccttatctaaagtcaactgattatggactttaatcacatctacaaaacacttccatggcgacagctagatgagtgtttgaataactgggactgtagcccgtccaagttgacacataaaactgaccatcgggccgggggcggtggctcacgcctgtaatcccaacactttgggagcccgaggcgggcggatcacaaggtcaggagttcgagaccagcctggccaacacggtgaaaccccgactctactaaaaatacaaaaaattagccgggtgtggtggcacacacctgtagtcccagctactcgggaggctgaggcaggagaatcgtttgaacctgggaggcagaggttgcagtgagccaagatcacactattgcactccagcctgggcgacagggcaagactctgtctcaaaaaaaataaaaaactgaccatctagtccttgtcatctgggcaccctcacacatctccttaaccacacttaatctccaaataagtacgataacatagtcatagtcccacccaacatgatgcagttatcttgcatacaactgaagacaactaaccctttccccaacagagcccaccagcagtggtggagatgtcggtccatgagcgcacacacaagactgagggactgtcggccctcccaggtggtgtcaacacaacatcacacacaggtgggggggcctgatagcccagcacccatgatacagggcctaccaatgcttaaaaccacacccagggagcccacagaggcactcagtgggtggtggggtgatggatacacatctatcaggcacagggcggaggtgggcaccactgagttgcactcagcaaacacattgggtatcttgtgcccaaggcctgtatttgtggagctgatgttctagtgagagacagtaaatgtgacaaaagtaaaatatatcagatggtgagaaaacagaaaaatgagatcagaagtggagatgttggggccaggcacagtggcccaggcctgtaatcccatcactttgggaggtgcaggcaggcagatggcttgagcccaggaattcaagaccagtccgagcaacatagcaaaagcccttatctgcaaaaaattcaaaaattagccaggtgtggtggtgcgtgcccaggttcccaggtactcggaggctgagaggtgggaggatgccttgagcttgagaggttgaagctgcagtgagctgtgatcgcaccactgcactccagcttggttcatggagaccctgtttttttaaaaaaagaagtggaggtgtttacaccagcaaaatactcattttttaagtgtaattaagttgaagatcaaaaaatggaaatgtataattaaatcatacttagcaaatctaacacatgaaatgtaacatctgcatatggagaaccgtgttactttattgaaaaacattaaaagtttgagaacttaaaaaaaaaaaaaaaacacggaggattgtaaatcaaatgaggaagggcaaaccggtcattaggggaaaagaaaaacgagcagagagaaggggaaaaccccagggaaaagacacaaacaacgaagagagaacaaaaagggggggccacaaaaga

SEQ ID NO: 56189 - DNA, 2152 bp, Homo sapiens
ggtcgacggaagagttctatgcgctctgtgaccagctggagctgtgcctgcgcctggcgcatgagtgcctgtcacagagttgtgacagtgccaagcactctccaacgttggtgcccacagccaccaagcccgacgcagtgcagcctgacagcctcccctacccacagtacctggcggtcatcaaagcccagatttcctgtgccaaggacattcacaccgccctgctggactgtgccaacaaggtcacgggcaagacacccgcaccacctgctggccctgggggcactctgtgaagtgggggacagggagtggggcaggcagtggttggtgggtggtgtgcaaagggaatgaagagcgtcctgggcctaaacacagcagcctcctctcttcctgcctgagcaccgcagcgggagccagcagggggcagcagaggccaacagggagctcgcaggccgggcccctgcgtccctgccccttcttcctgctccccctcctagcctagggtagactttgaactgtgtgtgttgatgacttctctgttccacaggccctcccccattcttgcctgggtgtggagccctggctgtcccctctccctcagtccttcctgactgtctccagctgggaggtggtctctgtgtgccactcctctgtgtctctattacagttgtgtctctctcatcctgtctctttttcccttgtttctctgttcctgttaatgtgtttctccccatggtcctatttctctcactctgacctctctctcttagtcccctttagctgtcttctatccccagctcctaactgggactctgtgtctatgcagggggccagcacccctgggttatctggggctaagggaagggacttcatttccaggggccacagccaagcccagagtcccccagcggctcgcatgtcagcccagaccccagggtccttggcctaggagaggagcagtggaggggcccaggctctgagctccacaggtctgagcagggagcaactcaggcccccacccaagcctgcgtcagcggaacttgagtgaggggcgttgtgcaatttgtggcaaggctggcccagctggatgcctgggtcccagtatttttagccccaaaggagaagtgaaaaggccccagccggggtgaatcatcagtcctggggaagaacccaggcgcctgagccccagctccgggaagcaggcactggggagggggcttcaaggagggagtgccccctcagactccctgcttccctggaagcttcaggaagctcagcctcagccttcaggcctgagcaagtgcagggcggagctaccagcccaggctcagatgttggggtgtgaaagcctcaagtgactcagcctggttggagaactgccccacccagtatcttctgtgccatggttcccacattcgcactccatggcctcctgtcctggaccccacgtctgcaaggaaaccctaggaccatggatacctctgtgattcacgctgagcccaagtccccacactggaaaactgggaaatggccagctgtgtgtcccaggaaattcctccccttattcttccttgaagtgcccgagcatgtagggcaagaaggaaggctgaagcgctgtccctaggaggaatttctccttcaggggagcctcagttttgcccatttatctaattgaatcagttttttacccaatcccccgattttgtaggataatctcccttatctaaagtcaactgattatggactttaatcacatctacaaaacacttccatggcgacagctagatgagtgtttgaataactgggactgtagcccgtccaagttgacacataaaactgaccatcgggccgggggcggtggctcacgcctgtaatcccaacactttgggagcccgaggcgggcggatcacaaggtcaggagttcgagaccagcctggccaacacggtgaaaccccgactctactaaaaatacaaaaaattagccgggtgtggtggcacacacctgtagtcccagctactcgggaggctgaggcaggagaatcgtttgaacctgggaggcagaggttgcagtgagccaagatcacactattgcactccagcctgggcgacagggcaagactctgtctcaaaaaaaataaaaaactgaccatct

SEQ ID NO: 56190 - DNA, 2368 bp, Homo sapiens
ggtcgacggaagagttctatgcgctctgtgaccagctggagctgtgcctgcgcctggcgcatgagtgcctgtcacagagttgtgacagtgccaagcactctccaacgttggtgcccacagccaccaagcccgacgcagtgcagcctgacagcctcccctacccacagtacctggcggtcatcaaagcccagatttcctgtgccaaggacattcacaccgccctgctggactgtgccaacaaggtcacgggcaagacacccgcaccacctgctggccctgggggcactctgtgaagtgggggacagggagtggggcaggcagtggttggtgggtggtgtgcaaagggaatgaagagcgtcctgggcctaaacacagcagcctcctctcttcctgcctgagcaccgcagcgggagccagcagggggcagcagaggccaacagggagctcgcaggccgggcccctgcgtccctgccccttcttcctgctccccctcctagcctagggtagactttgaactgtgtgtgttgatgacttctctgttccacaggccctcccccattcttgcctgggtgtggagccctggctgtcccctctccctcagtccttcctgactgtctccagctgggaggtggtctctgtgtgccactcctctgtgtctctattacagttgtgtctctctcatcctgtctctttttcccttgtttctctgttcctgttaatgtgtttctccccatggtcctatttctctcactctgacctctctctcttagtcccctttagctgtcttctatccccagctcctaactgggactctgtgtctatgcagggggccagcacccctgggttatctggggctaagggaagggacttcatttccaggggccacagccaagcccagagtcccccagcggctcgcatgtcagcccagaccccagggtccttggcctaggagaggagcagtggaggggcccaggctctgagctccacaggtctgagcagggagcaactcaggcccccacccaagcctgcgtcagcggaacttgagtgaggggcgttgtgcaatttgtggcaaggctggcccagctggatgcctgggtcccagtatttttagccccaaaggagaagtgaaaaggccccagccggggtgaatcatcagtcctggggaagaacccaggcgcctgagccccagctccgggaagcaggcactggggagggggcttcaaggagggagtgccccctcagactccctgcttccctggaagcttcaggaagctcagcctcagccttcaggcctgagcaagtgcagggcggagctaccagcccaggctcagatgttggggtgtgaaagcctcaagtgactcagcctggttggagaactgccccacccagtatcttctgtgccatggttcccacattcgcactccatggcctcctgtcctggaccccacgtctgcaaggaaaccctaggaccatggatacctctgtgattcacgctgagcccaagtccccacactggaaaactgggaaatggccagctgtgtgtcccaggaaattcctccccttattcttccttgaagtgcccgagcatgtagggcaagaaggaaggctgaagcgctgtccctaggaggaatttctccttcaggggagcctcagttttgcccatttatctaattgaatcagttttttacccaatcccccgattttgtaggataatctcccttatctaaagtcaactgattatggactttaatcacatctacaaaacacttccatggcgacagctagatgagtgtttgaataactgggactgtagcccgtccaagttgacacataaaactgaccatcgggccgggggcggtggctcacgcctgtaatcccaacactttgggagcccgaggcgggcggatcacaaggtcaggagttcgagaccagcctggccaacacggtgaaaccccgactctactaaaaatacaaaaaattagccgggtgtggtggcacacacctgtagtcccagctactcgggaggctgaggcaggagaatcgtttgaacctgggaggcagaggttgcagtgagccaagatcacactattgcactccagcctgggcgacagggcaagactctgtctcaaaaaaaataaaaaactgaccatctagtccttgtcatctgggcaccctcacacatctccttaaccacacttaatctccaaataagtacgataacatagtcatagtcccacccaacatgatgcagttatcttgcatacaactgaagacaactaaccctttccccaacagagcccaccagcagtggtggagatgttccccacgtaacttgcgtcccgactaacttgcagatcctctagaacac

SEQ ID NO: 56191 - DNA, 2369 bp, Homo sapiens
ggtcgacggaagagttctatgcgctctgtgaccagctggagctgtgcctgcgcctggcgcatgagtgcctgtcacagagttgtgacagtgccaagcactctccaacgttggtgcccacagccaccaagcccgacgcagtgcagcctgacagcctcccctacccacagtacctggcggtcatcaaagcccagatttcctgtgccaaggacattcacaccgccctgctggactgtgccaacaaggtcacgggcaagacacccgcaccacctgctggccctgggggcactctgtgaagtgggggacagggagtggggcaggcagtggttggtgggtggtgtgcaaagggaatgaagagcgtcctgggcctaaacacagcagcctcctctcttcctgcctgagcaccgcagcgggagccagcagggggcagcagaggccaacagggagctcgcaggccgggcccctgcgtccctgccccttcttcctgctccccctcctagcctagggtagactttgaactgtgtgtgttgatgacttctctgttccacaggccctcccccattcttgcctgggtgtggagccctggctgtcccctctccctcagtccttcctgactgtctccagctgggaggtggtctctgtgtgccactcctctgtgtctctattacagttgtgtctctctcatcctgtctctttttcccttgtttctctgttcctgttaatgtgtttctccccatggtcctatttctctcactctgacctctctctcttagtcccctttagctgtcttctatccccagctcctaactgggactctgtgtctatgcagggggccagcacccctgggttatctggggctaagggaagggacttcatttccaggggccacagccaagcccagagtcccccagcggctcgcatgtcagcccagaccccagggtccttggcctaggagaggagcagtggaggggcccaggctctgagctccacaggtctgagcagggagcaactcaggcccccacccaagcctgcgtcagcggaacttgagtgaggggcgttgtgcaatttgtggcaaggctggcccagctggatgcctgggtcccagtatttttagccccaaaggagaagtgaaaaggccccagccggggtgaatcatcagtcctggggaagaacccaggcgcctgagccccagctccgggaagcaggcactggggagggggcttcaaggagggagtgccccctcagactccctgcttccctggaagcttcaggaagctcagcctcagccttcaggcctgagcaagtgcagggcggagctaccagcccaggctcagatgttggggtgtgaaagcctcaagtgactcagcctggttggagaactgccccacccagtatcttctgtgccatggttcccacattcgcactccatggcctcctgtcctggaccccacgtctgcaaggaaaccctaggaccatggatacctctgtgattcacgctgagcccaagtccccacactggaaaactgggaaatggccagctgtgtgtcccaggaaattcctccccttattcttccttgaagtgcccgagcatgtagggcaagaaggaaggctgaagcgctgtccctaggaggaatttctccttcaggggagcctcagttttgcccatttatctaattgaatcagttttttacccaatcccccgattttgtaggataatctcccttatctaaagtcaactgattatggactttaatcacatctacaaaacacttccatggcgacagctagatgagtgtttgaataactgggactgtagcccgtccaagttgacacataaaactgaccatcgggccgggggcggtggctcacgcctgtaatcccaacactttgggagcccgaggcgggcggatcacaaggtcaggagttcgagaccagcctggccaacacggtgaaaccccgactctactaaaaatacaaaaaattagccgggtgtggtggcacacacctgtagtcccagctactcgggaggctgaggcaggagaatcgtttgaacctgggaggcagaggttgcagtgagccaagatcacactattgcactccagcctgggcgacagggcaagactctgtctcaaaaaaaataaaaaactgaccatctagtccttgtcatctgggcaccctcacacatctccttaaccacacttaatctccaaataagtacgataacatagtcatagtcccacccaacatgatgcagttatcttgcatacaactgaagacaactaaccctttccccaacagagcccaccagcagtggtggagatgtcacaatccactgcatccggtccactgcattaaatcctctaagtcaccct

SEQ ID NO: 56192 - DNA, 434 bp, Homo sapiens
tggatttggcccacaatctgtttgccatctcctgatctaaatgatccccacttggagcaagagctaaccaaagacacactttaatggcccttatcagatagatagatgcttatatcatactttaaattcttaattatataagatgcagtttttatgtaacttcccttcacaatttgttagtaccacactcataacttaagatgatacttaagcatccacagaagcactttgcttttacaaaattcttgtatctactcctgcctgttttattacttagctatatgtcaatacaatacgtcaagttcccagaaaaactatgttagaattttgactaaaattgcaaagcaatttctgtataactcatgtatttgaaatagtgatttatcattcaggaacatggcttctatctgtatttcgttctcataaaattttat

SEQ ID NO: 56193 - DNA, 173 bp, Homo sapiens
gagctaatattactattttctaaagaataagatcagtatcagttattaatatcaggcgtcataatcatcaatattaatcatgtattgttattgttagtataactatttaatattaattatcattagtatccgtattgattttaaaaattatattatgggttattaatattgat

SEQ ID NO: 56194 - DNA, 327 bp, Homo sapiens
ctctctcacagtcctagaggctgcaagtccaagatgggcacctcatagacagctgtcttctccctgtgtcctcatggtggaagggccgagacagctctctggggtcccttttataaggacactaaacttggccagttgcgctggctcatgcctgtaatcccagcactttgggaggccagattgcttgagcccaggagttcagggccagcctggccaacatggagaaaccctgtctctacaaaaaaagtaaaatattatctgggggtggtgacagatgcctgtagtcccagctactcgagaggctgagatgggaggatcacttgagcc

SEQ ID NO: 56195 - DNA, 649 bp, Homo sapiens
ctgtctggtctgtttgaaggacagtgaggtagcctgtttggctggagcagagaagtaatgggggtcaaagagtgtgggaccctgtggccactacaaacagtgagctctttgtcctgagagcaatgggaagaccccaccgttaccctgtgaagtgggattatcaacctgcttttacataagaggagactgagggtcagggagaagtgactcgtccaagaacatctggcaagagggtggcagagcctagaacccagatcggcttcctgagccccattttgtcatcattgcccagggtctctctctaagttggcctcctctcccttgactctcaacagccgaaggtggtctggatgaagaacaagatggaaatccgtgaagatcccaagttcctgataaccaattaccaaggagtcctgacgctgaacatccgtcgcccctcgcccttcgacgctgggacttacacctgccgggccgtcaacgagctgggcgaggcgctggctgagtgcaagctggaggtccgagtgccgcagtgagacctgtcccctacctgccaagacaattggtggtggagtcctgaccccaatccccaacctcccaggactgtgttctttctggagttttcgctgagaacaaaacagtgttgtctgga

SEQ ID NO: 56196 - DNA, 236 bp, Homo sapiens
tggggcccaagtccccgggagaaacgggagcggaggatgggaggagggcacgagatccgccagcagggcctctctctccagccgaggaatgggtccctgccaacaccgagcccgtggagcgctgtgtaagttcccagtagaagcagcagcagcagctgggagttagttaagcattcatcatggccaggttctaagggtggccattctgttcgctcattaattttttttttttttaa

SEQ ID NO: 56197 - DNA, 433 bp, Homo sapiens
ccaggctggtcgcaaactcccaacctcagttgatctacccgcctcggcctcccaaagtgctgggattacaggtgtgagccactgcgccccgtccagtctggtgcttttaatgaaggacggcatttggagggcgaggagggcagtggagcgagtgaggactctgtgtgttgatggggaatcatgggaggattctgagcaggggaatggcagaggcaggcctgggtttgcttggggacacgatggggtgcaaggccatctggtggctgcgttcaggtattcacgaccaccgagggcaggacccgcatcgagaagcgggtggactgcagcagctttgtgattgagagtgcgcagcgggaagacgagggccgctacaccatcaaggtcaccaaccccgtcggcgaggacgtggcttccatcttcctgcaagttgtag

SEQ ID NO: 56198 - DNA, 344 bp, Homo sapiens
gccacctgactctcctgccccctgcagatgtcccagaccccccggaggctgtgcgcatcacctcggttggagaggattgggccatccttgtctgggagccaccaatgtacgatggggggaagccagtcaccggtgagtgcctctgtcctcatgacctctgaccttccctctttctgccttctgtttttttttttttttttttttttgagatggagtctcactctatcgcccaggctggagtgcagtggctcaatctcggctcactgcaacctctgcctcctgggtacaagcaattctcctgcctcagcctcgcaagtaactgggattacaggtgcccaccacca

SEQ ID NO: 56199 - DNA, 3561 bp, Homo sapiens
cgggaggaggtcccccgacatgcctgaggcaaaaccagcggccaaaaaggcccccaaaggcaaagatgcccccaaaggagcccccaaggaggctccccctaaggaggctcctgcagaggcccccaaagaagccccacccgaggaccagtccccgactgcagaggagcccaccggcgttttcctgaagaagccggactccgtctcagtggagactgggaaggacgcagtggtcgtggccaaggtgaacgggaaggagctcccagacaaaccgaccatcaagtggttcaaggggaagtggctggagctgggcagcaagagtggcgcccgcttctccttcaaggagtcccacaactccgccagcaatgtgtacaccgtggagctgcacattgggaaggtggtactgggggaccgtgggtattaccgcctcgaggtcaaagccaaggacacctgtgacagctgtggcttcaacatcgatgtggaggcaccccgtcaggatgcctctgggcagagtctagaaagcttcaagcgtacgagtgaaaagaagtcggatactgcaggtgagctggatttcagtggcctgttgaagaagagggaggtggtggaggaggagaagaagaagaaaaagaaagatgacgatgacctaggcatccccccggagatttgggagctcctgaaaggggcaaagaagagcgagtacgagaaaatcgccttccagtatggcatcaccgacctccggggcatgctgaagcggctgaaaaaggctaaggtcgaggtcaagaagagtgcagcattcacaaagaagctggatccagcctaccaagtggacagaggcaacaagatcaagttgatggtagagatcagcgacccagacctgaccctcaagtggttcaagaacggccaggagatcaaaccaagcagcaagtacgtgtttgagaacgttggtaagaagcgaattcttaccatcaacaagtgcacgctggcggatgacgctgcctatgaagtagctgtcaaggatgagaagtgtttcaccgagctcttcgtcaaagaacctccagtcctaattgtcacacctcttgaggaccagcaggtgtttgtgggtgaccgggtggaaatggcagtggaggtgtcagaagagggtgcccaggtgatgtggatgaaagatggtgtggaactgactcgggaggattccttcaaggcccggtaccgcttcaagaaggacgggaagcgccacatcctcatcttctcagacgtggtccaggaggacaggggtcgctatcaggtcataaccaatggcggccagtgtgaggccgagctgattgtggaagagaaacagctggaggtcctgcaggacatcgcggatctgacggtgaaggcctcagaacaagctgtgttcaagtgcgaggtgtctgatgagaaagtgacgggcaagtggtataagaatggggtcgaggtgcggcccagcaagaggatcaccatttcccatgtaggcaggttccacaagctggtgatcgatgacgtccgccccgaggatgagggagactacacgtttgtgcctgacggctacgccctgtcgctctcggccaagctcaacttcctggaaatcaaggtggagtacgttcccaagcaagagccaccaaagatccacttggattgctcggggaagacctcagagaatgcgattgtggttgtggctggaaacaagctgaggcttgacgtgtccatcacaggggagccccctcccgtcgctacctggctgaagggagatgaggtattcacgaccaccgagggcaggacccgcatcgagaagcgggtggactgcagcagctttgtgattgagagtgcgcagcgggaagacgagggccgctacaccatcaaggtcaccaaccccgtcggcgaggacgtggcttccatcttcctgcaagttgtagatgtcccagaccccccggaggctgtgcgcatcacctcggttggagaggattgggccatccttgtctgggagccaccaatgtacgatggggggaagccagtcaccgggtacctcgtagagcggaagaagaagggctctcagcgctggatgaagctgaactttgaggtcttcacagagaccacctatgagtccaccaagatgatcgagggcatcctctatgagatgcgtgtcttcgccgtcaatgctataggggtctcccagcccagcatgaacaccaagccttttatgcctattgcacccacgagtgaacccctgcacctgatagtggaggatgtgacagacaccaccaccacactcaagtggaggcctccgaacaggatcggggcaggtggcatcgatgggtacctggtggagtactgcctggaaggctccgaggaatgggtccctgccaacaccgagcccgtggagcgctgtggcttcaccgtcaagaatctcccgaccggagccagaatcctcttccgagtagttggggtcaacatcgcggggcgcacggagccggccaccctggcccagccggtcaccatcagggagattgcggagccacccaagatccggcttccccgccatctccgccagacctacatccgcaaagtgggcgagcagctcaaccttgtcgtccccttccagggaaagccccggccccaggtggtgtggaccaagggcggggccccgctggacacctcccgcgtgcacgtgcggaccagcgacttcgacaccgtgttcttcgtgcgccaggcggcccgctccgactccggggagtacgagctgagcgtgcagatcgagaacatgaaggacaccgccaccatccgcatccgcgttgtggaaaaggctgggccccccataaacgtgatggtgaaggaggtgtggggcacgaacgcgctggtggagtggcaggcccccaaagatgatgggaacagtgagatcatggggtatttcgtccagaaagcagacaaaaaaaccatggagtggttcaacgtctatgaacgtaacaggcacactagctgtactgtgtccgaccttatcgtgggcaatgaatactatttccgagtttacaccgagaacatctgtgggctcagtgactcacctggtgtctccaagaacacggcccgcatcctcaagacaggaatcaccttcaaaccgttcgagtataaggagcatgacttccggatggctcccaagttcctgacacctctcatagaccgcgtggtcgtggctgggtactcggcagccctcaactgcgctgtcagaggccacccgaagccgaaggtggtctggatgaagaacaagatggaaatccgtgaagatcccaagttcctgataaccaattaccaaggagtcctgacgctgaacatccgtcgcccctcgcccttcgacgctgggacttacacctgccgggccgtcaacgagctgggcgaggcgctggctgagtgcaagctggaggtccgagtgccgcagtgagacctgtcccctacctgccaagacaattggtggtggagtcctgaccccaatccccaacctcccaggactgtgttctttctggagttttcgctgagaacaaaacagtgttgtctgga

SEQ ID NO: 56200 - DNA, 2454 bp, Homo sapiens
tcgctttcttgggcctccgggcgcctcaaaggtaaaactaggccatttgaagcctgcgaagcgaagggcagtcggtcttcaggcctagcgggcttggctgggctgggtcggtggacccctgggctggcggcgggagcagagcatcgagcggcttttagctggggttcgggcggaggacctgggacaaccgcgggcctcgctcctccccggacggggcgggacggggaagtcccgcccaccaggcccaggccccgggccgccccgagggctgcgcccacctccttcctgcctcggcaaccccgggccctgagggcaggccccaaccgcggaggagcaggagagggcggaggccggcgggccatgccctggtcgtcccgcggcgccctccttcgggacctggtcctgggcgtgctgggcaccgccgccttcctgctcgacctgggcaccgacctgtgggccgccgtccagtatgcgctcggcggccgctacctgtgggcggcgctggtgctggcgctgctgggcctggcctccgtggcgctgcagctcttcagctggctctggctgcgcgctgaccctgccggcctgcacgggtcgcagcccccgcgccgctgcctggcgctgctgcatctcctgcagctgggttacctgtacaggtgcgtgcaggagctgcggcaggggctgctggtgtggcagcaggaggagccctctgagtttgacttggcctacgccgacttcctcgccctggacatcagcatgctgcggctcttcgagaccttcttggagacggcaccacagctcacgctggtgctggccatcatgctgcagagtggccgggctgagtactaccagtgggttggcatctgcacatccttcctgggcatctcgtgggcactgctcgactaccaccgggccttgcgcacctgcctcccctccaagccgctcctgggcctgggctcctccgtgatctacttcctgtggaacctgctgctgctgtggccccgagtcctggctgtggccctgttctcagccctcttccccagctatgtggccctgcacttcctgggcctgtggctggtactgctgctctgggtctggcttcagggcacagacttcatgccggaccccagctccgagtggctgtaccgggtgacggtggccaccatcctctatttctcctggttcaacgtggctgagggccgcacccgaggccgggccatcatccacttcgccttcctcctgagtgacagcattctcctggtggccacctgggtgactcatagctcctggctgcccagcgggattccactgcagctgtggctgcctgtgggatgcggctgcttctttctgggcctggctctgcggcttgtgtactaccactggctgcaccctagctgctgctggaagcccgaccctgaccaggtagacggggcccggagtctgctttctccagaggggtatcagctgcctcagaacaggcgcatgacccatttagcacagaagtttttccccaaggctaaggatgaggctgcttcgccagtgaagggataggtgaacggcgtcctttgaagcaggatcagacccagccagcagagatggagagtgactctgttggcagaaggcaggcgaggataagctaacgatgctgctgtggcctctatgcactcagcaagagcgggacgcctgtgctgggccgggcaccagggatggtgctgagtcgggcagaggcctcctttcaaggagttcacagtgaacaagatgagaagggctgggccctggagggtcaagagccccaattatgtacaagacactttgggaggaaagaagactaccttttccccctgccattggtatagctggtgccccaaaacttccacctccctccctggccacctctaaaatgactggtataggtgctgccccaccccttagctcccctatcctgggctaggaggccacaggggctgtcctctagaattcttccttccctcccccacaccattcattcaattcatgaaacaaatctttgccaagagcagtttatgtgccaggaacatcattctgtccttgcaacctggaacaagaccagctaccagcctagcttcatccgctacttgcaccaaccagtcccgggttagatcccaaatgctagaagccagggatgcccaactctgggtggccccagtcagaacctctgggatctcagtgaagctggcctggcctctgctcctgctctcaaggggctgcttttcaaccaagagccttgtgagcctggtctgagccttgcacagccactgagtattttttttgccttagccagtgtacctcctacctcagtctatgtgagaggaagagaatgtgtgtgcctgtgggtctctacaagtgacagatgtgttgttttcaacagtattattaggttatgaataaagcctcatgaaatcctcaaaaaaaaaaaac

SEQ ID NO: 56201 - DNA, 2505 bp, Homo sapiens
tcgctttcttgggcctccgggcgcctcaaaggtaaaactaggccatttgaagcctgcgaagcgaagggcagtcggtcttcaggcctagcgggcttggctgggctgggtcggtggacccctgggctggcggcgggagcagagcatcgagcggcttttagctggggttcgggcggaggacctgggacaaccgcgggcctcgctcctccccggacggggcgggacggggaagtcccgcccaccaggcccaggccccgggccgccccgagggctgcgcccacctccttcctgcctcggcaaccccgggccctgagggcaggccccaaccgcggaggagcaggagagggcggaggccggcgggccatgccctggtcgtcccgcggcgccctccttcgggacctggtcctgggcgtgctgggcaccgccgccttcctgctcgacctgggcaccgacctgtgggccgccgtccagtatgcgctcggcggccgctacctgtgggcggcgctggtgctggcgctgctgggcctggcctccgtggcgctgcagctcttcagctggctctggctgcgcgctgaccctgccggcctgcacgggtcgcagcccccgcgccgctgcctggcgctgctgcatctcctgcagctgggttacctgtacaggtgcgtgcaggagctgcggcaggggctgctggtgtggcagcaggaggagccctctgagtttgacttggcctacgccgacttcctcgccctggacatcagcatgctgcggctcttcgagaccttcttggagacggcaccacagctcacgctggtgctggccatcatgctgcagagtggccgggctgagtactaccagtagacgaggtcccactttgttacccaggctggtcttgaactcctgagctcaagggttggcatctgcacatccttcctgggcatctcgtgggcactgctcgactaccaccgggccttgcgcacctgcctcccctccaagccgctcctgggcctgggctcctccgtgatctacttcctgtggaacctgctgctgctgtggccccgagtcctggctgtggccctgttctcagccctcttccccagctatgtggccctgcacttcctgggcctgtggctggtactgctgctctgggtctggcttcagggcacagacttcatgccggaccccagctccgagtggctgtaccgggtgacggtggccaccatcctctatttctcctggttcaacgtggctgagggccgcacccgaggccgggccatcatccacttcgccttcctcctgagtgacagcattctcctggtggccacctgggtgactcatagctcctggctgcccagcgggattccactgcagctgtggctgcctgtgggatgcggctgcttctttctgggcctggctctgcggcttgtgtactaccactggctgcaccctagctgctgctggaagcccgaccctgaccaggtagacggggcccggagtctgctttctccagaggggtatcagctgcctcagaacaggcgcatgacccatttagcacagaagtttttccccaaggctaaggatgaggctgcttcgccagtgaagggataggtgaacggcgtcctttgaagcaggatcagacccagccagcagagatggagagtgactctgttggcagaaggcaggcgaggataagctaacgatgctgctgtggcctctatgcactcagcaagagcgggacgcctgtgctgggccgggcaccagggatggtgctgagtcgggcagaggcctcctttcaaggagttcacagtgaacaagatgagaagggctgggccctggagggtcaagagccccaattatgtacaagacactttgggaggaaagaagactaccttttccccctgccattggtatagctggtgccccaaaacttccacctccctccctggccacctctaaaatgactggtataggtgctgccccaccccttagctcccctatcctgggctaggaggccacaggggctgtcctctagaattcttccttccctcccccacaccattcattcaattcatgaaacaaatctttgccaagagcagtttatgtgccaggaacatcattctgtccttgcaacctggaacaagaccagctaccagcctagcttcatccgctacttgcaccaaccagtcccgggttagatcccaaatgctagaagccagggatgcccaactctgggtggccccagtcagaacctctgggatctcagtgaagctggcctggcctctgctcctgctctcaaggggctgcttttcaaccaagagccttgtgagcctggtctgagccttgcacagccactgagtattttttttgccttagccagtgtacctcctacctcagtctatgtgagaggaagagaatgtgtgtgcctgtgggtctctacaagtgacagatgtgttgttttcaacagtattattaggttatgaataaagcctcatgaaatcctcaaaaaaaaaaaac

SEQ ID NO: 56202 - DNA, 1642 bp, Homo sapiens
tcgctttcttgggcctccgggcgcctcaaaggtaaaactaggccatttgaagcctgcgaagcgaagggcagtcggtcttcaggcctagcgggcttggctgggctgggtcggtggacccctgggctggcggcgggagcagagcatcgagcggcttttagctggggttcgggcggaggacctgggacaaccgcgggcctcgctcctccccggacggggcgggacggggaagtcccgcccaccaggcccaggccccgggccgccccgagggctgcgcccacctccttcctgcctcggcaaccccgggccctgagggcaggccccaaccgcggaggagcaggagagggcggaggccggcgggccatgccctggtcgtcccgcggcgccctccttcgggacctggtcctgggcgtgctgggcaccgccgccttcctgctcgacctgggcaccgacctgtgggccgccgtccagtatgcgctcggcggccgctacctgtgggcggcgctggtgctggcgctgctgggcctggcctccgtggcgctgcagctcttcagctggctctggctgcgcgctgaccctgccggcctgcacgggtcgcagcccccgcgccgctgcctggcgctgctgcatctcctgcagctgggttacctgtacaggtgcgtgcaggagctgcggcaggggctgctggtgtggcagcaggaggagccctctgagtttgacttggcctacgccgacttcctcgccctggacatcagcatgctgcggctcttcgagaccttcttggagacggcaccacagctcacgctggtgctggccatcatgctgcagagtggccgggctgagtactaccagtgggttggcatctgcacatccttcctgggcatctcgtgggcactgctcgactaccaccgggccttgcgcacctgcctcccctccaagccgctcctgggcctgggctcctccgtgatctacttcctgtggaacctgctgctgctgtggccccgagtcctggctgtggccctgttctcagccctcttccccagctatgtggccctgcacttcctgggcctgtggctggtactgctgctctgggtctggcttcagggcacagacttcatgccggaccccagctccgagtggctgtaccgggtgacggtggccaccatcctctatttctcctggttcaacgtggctgagggccgcacccgaggccgggccatcatccacttcgccttcctcctgagtgacagcattctcctggtggccacctgggtgactcatagctcctggctgcccagcgggattccactgcagctgtggctgcctgtgggatgcggctgcttctttctgggcctggctctgcggcttgtgtactaccactggctgcaccctagctgctgctggaagcccgaccctgaccaggtagacggggcccggagtctgctttctccagaggggtatcagctgcctcagaacaggcgcatgacccatttagcacagaagtttttccccaaggctaaggatgaggctgcttcgccagtgaagggataggtgaacggcgtcctgagaagtgcaggaaacaagaccgatccacccacctcggcctcccaaagctctgggattacaggcatgagccactgtaccc

SEQ ID NO: 56203 - DNA, 541 bp, Homo sapiens
gtttgagagagcgggagagtggaagaagagtttgaaggaggaagagaccagaccttggagaatcttgcagactttggaagccattggaaagttttctctttttattcctaaatatatcatatttatgatcttatatcaaatgtcgagatattttatatttatgatttatatcaaatgtagagatattttatatatttacttgcctaaatagagtcaagaaattcgaattgcttaacgatttttttgtttgtttgtttttgagacagagtgagtatttgttaatttgggttgtgagtacataaatgtttattacttcattatttccatgtctgtacgtttaaaatcttttagaacaaaaaatcaaagatgagtcatgctagctataccaaatatcacaatttagtataaaactgaggtaatgaaaacattgtgctactttccttgaaaaagaaaggtagatcaatgcaacagcacgaagatagaaaaaaaattagacttcagttctcatgaatttttaaactcttgtagtcagtatatgcaa

SEQ ID NO: 56204 - DNA, 374 bp, Homo sapiens
aactacttgggaagctgaggtgggaggatcgcttgaacccaggaggtcaaggctgcagcgagccatgattgcaccactgtactccagcctgggtgacagagtgagtatttgttaatttgggttgtgagtacataaatgtttattacttcattatttccatgtctgtacgtttaaaatcttttagaacaaaaaatcaaagatgagtcatgctagctataccaaatatcacaatttagtataaaactgaggtaatgaaaacattgtgctactttccttgaaaaagaaaggtagatcaatgcaacagcacgaagatagaaaaaaaattagacttcagttctcatgaatttttaaactcttgtagtcagtatatgcaa

SEQ ID NO: 56205 - DNA, 349 bp, Homo sapiens
aaaccatccatagctacttggcaataaaagcatcggccactgttcagcctggagaatatacctcatgtacaggttttcaggtgacctgctgcccagttggggctgcttggggctgcagccaggctttctcggatggggacctgattgactccttgcataaaagtcatggaaggactactttcttaggagactgtatggctgaaaatacaaatagcttcaaatgggtttaggaaactcttggattaagaacccatgcttggccgggcacggtgtctcacgcctgtaatcccagcactttgggaggctgaggcgggcagatcacctgagttcaggagttcaagaccagcct

SEQ ID NO: 56206 - DNA, 427 bp, Homo sapiens
accttgattgcagcccaatgaaactgatttcagaccctccagaaccaggagagaattcattccgtcatcttaagccacccagtgtgtgataatttgatatagccttgggaaacaaatacacctgacctccaaaaccctcctcaccctgacccccaaaaccctcctgccttctccgtgtctaagcacgtcagatttatgggggatggaataatctagaataatctgaaataattttaaaaggaaaaaagaaaaggggatcaagaagaaagagaggagagggtgagtgtaaggagggctaaagcccgagtgtgcagggggatcataatttactcagaagctgcaggaagaagagccctatgtccatgcctctctcgactctcctccagggaatgttctccacaagtgggggaggctgagagttctcgag

SEQ ID NO: 56207 - DNA, 298 bp, Homo sapiens
aatcatatggttggtactcagtaactgctggctgcatgctggaagcttagccttaggaatggttcttcttgaacttcagggtgcttcacaatccctagggagcctgttaaggatggtgacaccaggatccatgcccaaagagcatgaaggggctggtttgggcttggccaaggatcacatatttaacaaatcctactgagggtccaacagggaactcctctccacccacctgacaggagacagacctctctttccccagggacccactccattctccccaggagtgcttcaggacccg

SEQ ID NO: 56208 - DNA, 540 bp, Homo sapiens
caatttgggggctagaatgtatgttagagacatgatatgtccataggtccttgctatcacagtgaggtctcagggacagtcgtttggtatcatttgggatctcataagcagactctctctgcttgacctgacaaatcagagtctgtgttttaacaggttcagtgagtgacttacatgcacattggagtttgggaagctccactgtaggtgcttagaccttacctttgttgttgctaataacaatgcaagcatttgggaggaagacctgtgttgctcatatgtgtccaggtgtagctgaggtggccttgcttatctgctgtagggccgttgagcatttctgtagctgtgatgagtgagctgaggtgagcctgcggagagctcccagccattggtagtgggactcgcttagatgaactggaaggaccctttcatctgagcagccactatggagaaaaacaaccgaatgaggggagagacaatgtgcaattttatttagggcacaaaggagagctgtggttagaaggtgacatttgagtggaa

SEQ ID NO: 56209 - DNA, 274 bp, Homo sapiens
cggggaaacaaaaagtcatgcaagacacatttcacagcctttgcaaacgcttgccctgggctgccagccagacctttgcaaaggacggaggcgccttcatccccacccccttcccaagggcacagttggccgcccttcttcaccccgacatcctcactcagcacctgctttatggcgtatgatgccacctgtgggggccctgagggggacacgtgcaggtgtggcaagcagctgttagctcccaggcccagagcaccccagccacttaggagtg

SEQ ID NO: 56210 - DNA, 372 bp, Homo sapiens
cacactgaaccaggtctagaaaccttcttagcgcccaccagaaaagacacctccctcccctactcctatggccaacaaacccttcatgatcttggtgtggataatgtaaacccagagttgaagcaccagagctgaagaggaggctcaggggtaagtgttttacagcatcctcttgtttaattaatccctcccacaacctgtgagtacatagtattatccccattttacaatggctgactttcagaaatcttttgtaactttcccaaactcagacaactaggaaatggagaagccaggattaacataggtctctctgattcccaaactgtactcagaacctcaatgcttagcaatttcttctagcagacagcc

SEQ ID NO: 56211 - DNA, 218 bp, Homo sapiens
ttcatacccaaggccatggccatttgctattccccatgacgcccagggtggccagtatcttcatttcatacccaaggccatggccgtttgctgttccccatgacgcccagggtggccagtatcttcatttcatacccaaggccatggctgtttgctgttccccatgacgcccagggtggccagtatcttcatttcatacccaaggccatggccatttg

SEQ ID NO: 56212 - DNA, 594 bp, Homo sapiens
aataaaattaactttaattatttaaaagcctgtttttttttctttagttgacataacataccaggatattgtagctggaaatacataggaggttcttgctctcacgaaccttacattccagtaaggaaaacagacaataagaaaaaagaaaaatgaatacaataaattctcatggtgatacaaataaggtaagatgacagaaactgaagggagagggagacactacttcagtgaggtggtcagtgaaaacctctctgcaaaggtggtgtgaaatctgagacctgaatgacaagaaagaactagcgatgcaaacatctgcgggtggcacatttctaatatttattttttactagttttattttgtgttaattttacgtttaactatctggaatatattttggtacaggagtcccccttatccaagggggatatgtatcaagccccccagtggatacctgaaatcacagatagcgctgaaccctatatgtactgttttttcctacatatatgtatctatgataaagtttaatttataaattaggcatagtaagatatttacaaaaataataataaaattgaacagttataacaata

SEQ ID NO: 56213 - DNA, 434 bp, Homo sapiens
tttagtggaatcaaggagttcagcactactccccaccttcttggcatgggatcccaaggggttactagaaggaaagaaggaatagtaaatgtccatctttgaatccccactacctttcaatgtgcatggcatatagtaggcattcagtaaatagttgttaaaagattaaactcggggattagagcaagatttttattagaatccttgaaaattggtcataactctctagatctgatgacacttggactcagtcatttacccccaaatccctcctatctgcactagttacgtctcaaagcactcacctgcttctacacatttatatactatgacctccactagaatcatagcacccaaaacttcatggaagggaatttagggtcacatagttcagcctcccacactgagtagccatctagcctccaaatattaac

SEQ ID NO: 56214 - DNA, 502 bp, Homo sapiens
ccgcccaggggtgaataagagacagctgctctgcctacttgaagcttgcatctgagtgaagatgaactttcctttcccagccttgagagagggaggctgagctcagtagctcagctcctgggttggttttgaacagtaaatgatctaggtacctggccagcacagctcctggtgcccctttcctgaaggctaacaatgcagttcaaattatatgcttatgcatgttcagaacacagtagacatcatgtgtcggtgggtgttgagctggggtccctggctgcctgttgctcttaaggagtgatacagccatcctcccctatccgtggggaatgtgtgccaagaccccgagtggatgcctgaaactgcggttagtaccgttgatcagaacttggtggctcatgcctgtaatccctgcactctgtgatgctgaggtgggtggatcgcttgagctcaggagcttgagaccagccggggcaacatctccaccaaaaatacaaaaaaa

SEQ ID NO: 56215 - DNA, 386 bp, Homo sapiens
tgatatgcaattgtgaaaatactttgagggtttaaagaaaaaatgccatgtagcagattgggagaaattacctgattgttaactctctgaaaccttaaggggttaaccgctgtctcgctccattcctgctgctatgacaaaataccacaaactgggtatttactataaagaagagaaatttatttcttacttatctggagtttgggaatccaggatcaagcctgcggcattcagtggctggtgagggctgctctccgcttccagaatggcaccttcttattacatctcctggaggggacaaatgcttgctgtgtcttgcatgatagaaggacataagggcctagctagttctctccagcccttctataaggcaccaatttcatttc

SEQ ID NO: 56216 - DNA, 234 bp, Homo sapiens
gaacttttcattagtaatgagactccacaacgaggaacaacctaatacacctgaaacccaaggcagacacccaatccccagggccaggccagctccagttaccaagcacaggtcccaggagtgccccagcccctcccactgcaggaaaccagcatgtgtgggccatgtgcacctcctgtgggttgtggcaggaggtcacctctaaagaggtcaccctgtgcagccctcaaacac

SEQ ID NO: 56217 - DNA, 731 bp, Homo sapiens
ttaattttcatgttagacatttggattatgatagtcaaggccgcagttgtctaaatgtaaatagtaccgagggaagagtagcacattccgacattctctcagtgagacttattcatcagatgggggctgtgagtgggtgagatttcacacagatggatgggagtctgctggaaggaaaaattcagagcattgaaggttctgcctgtgtgagtgtttgttgggtgaatgaggggactgagtaggaaggagggcaggcaatgaggctttaaagggaagaaggtaggaaatttgaactcatctttcctagtgcttactctcagcccattccctggtttgtggacctgaccccacactgctttttccagcaccactgtctgtgtgagtccattcacttcaataccagagccacctctttgtttcctatttactaagaagccataccagcatgagatctccttgatagtgttaaatcccactgtggaaagattgaaaaatatctcccagccttaccagaggttacgatctagtgtggaggcaaaagacattgagaagaaaaaagcaggtgcctcctcctggctctcctgttaggttaacataatcataattcccctttgaaatgtctcccacatttgccctttaacttcctattgccatgataagcatttaggttattacctaaataacttgttacctcatgccttgattatctaaataaattcttagatggccac

SEQ ID NO: 56218 - DNA, 528 bp, Homo sapiens
agacattgtattcatttctttattgtgtttacatagcacatactctccaaagagttcagggtacttttcaaaagacattgaataatgaacacataaaaatataccaacagtaaaaagtaggaagtagaggagaaacaatcaaaggaaggtgagatcaagcagtggcaaaaggattagctatccattcacttcaataccagagccacctctttgtttcctatttactaagaagccataccagcatgagatctccttgatagtgttaaatcccactgtggaaagattgaaaaatatctcccagccttaccagaggttacgatctagtgtggaggcaaaagacattgagaagaaaaaagcaggtgcctcctcctggctctcctgttaggttaacataatcataattcccctttgaaatgtctcccacatttgccctttaacttcctattgccatgataagcatttaggttattacctaaataacttgttacctcatgccttgattatctaaataaattcttagatggccac

SEQ ID NO: 56219 - DNA, 363 bp, Homo sapiens
ggaaaacctaacatggagacagggagacaccctacccaagcagctctttagaattagaagcacagttgcggcctgttggttaacttctctgaatgtttttgagaactaagaactgtgtgactagatacttatgtcctaatccttgcctgttaataactgctttttatataaacaactgagactatttaaggacactacaagtctctacacagttttagaaacctagcacatttaatttaattgtttgtattgcttaactcagtgactaaagatgttcagaggttaggctagatctttgaaaaatgtgttcattagaggtccactgtctgcttacctggaaaaagaaaaggcaggatggcaggt

SEQ ID NO: 56220 - DNA, 149 bp, Homo sapiens
ccatgaaaaagtaaaaaaaaaagtattgggattttgttttattacacctctaaaaacatattacgtgaggactttagacatataaggttacttctatgaagaaacagaatggaaaatgtcaagtcatttaagatgctcacttattacat

SEQ ID NO: 56221 - DNA, 172 bp, Homo sapiens
aaaaaaatgaaatgataagtaggagaagcactggttttcctagaagaaagaagttctagaaatctatggcattattatttttatcaatttattgttttactcatagaacaaatgtgttaaagagtcttcaagaaagatttatctatggcatgctttgtccaggagcacagct

SEQ ID NO: 56222 - DNA, 182 bp, Homo sapiens
atataaataggaataccttggagatatttcaggctttattccagaccaccacaatgaagtaaatattatgataaagaacaaaaacattttgttttcccagtgcatataaaagttatgtttacgtatactgtagtctattaagtgcacaataccattatgtttaaacatacaaggtatatacc

SEQ ID NO: 56223 - DNA, 445 bp, Homo sapiens
ccccagcagtgcctgcctgttgtggagaatctgtgctcctgggaagggaaagcgcagtgactgtcagacgttgcacagaactcagtgcttccctgtcatagcagaaagcaaaactgggctgaactcaacggacgcctacccagggagtaagcatagcgaccagcccagccagaggggaatcgcccaccccaatggtcaggacttgagatctggcaagccttgccactgtgggctggagggctctgaagtcctaaataaacttgaaaggcggtcgaggccacaaggactgcaacccctaggcatgtcctgtgctgagctgggctccgagccaggggacctggttgggttgggggagcacaacctactgagacaccagttgaggtagctaagggtgtgcttgtgccacccctcatgcaaccccaggctacgtggctccttccttcca

SEQ ID NO: 56224 - DNA, 254 bp, Homo sapiens
cttgtgtgataccttgagaaggggtggatccacatgccagcctacgcaggagcaagaggaccagtgcttcttctcctttcttggtacatgccagcacggtctgtggctgggatgctgctctctgagacttgggagcttacttgttcacctcagcaatgaactctgaccacattttgccattcctattctcaggcccctagcaatctcattcccaaactcgatgacccagtcttttgcatggctcagagaactgc

SEQ ID NO: 56225 - DNA, 594 bp, Homo sapiens
aggcaggaagaatggtgtgaaccccggggaggcggaagcttgcagtgaagccgagatttgcgccaccgaactccaaccctgggagacacagcgagacgccaccgtgcctggccccaaactctttatagaaataaataacaacaaatgatcattaacctgtttcagccaagggttggagtttaacatcaaggtgagttcttacatattacatgcaaaacagtggcccatgaatttttttttttttggattaggtcagaattatcatgttaaatcttttgagaagaataaagcaaaatattagtaactaatttcattgaagatctcaaacataagttagtaaaattaagaaacaatttgaatttcatatgtttttagagggaagttcactcctttgaaagttgaaaaagaaagcagatgtacttaaatatgggacattcttttgaacttagaattcagattatatatcctcagagaatccagtatataggagaaactacaattagctaaactaattttagctacttgagttcaattcagcaataagacaaaaagtgaatgcaaaatgtatcatgtgcttattaggtcatagtacaa

SEQ ID NO: 56226 - DNA, 396 bp, Homo sapiens
gctggagtgcaatggtgccatctcggctcactgcaacctccgccttccaggttcaagccattctcctgcctcagcctcccgagtcactgggattgtagacatgcaccaccacactcagctttgtatttctctagaagaaaatagggtttctccatgttggtcagcctggtcttgaactccgacctcaggtgatccgcccgccttaggcctcccaaagtgctgggattacaggcgtgagccactgcacccaggcccaggtttagttctaaaacttcctttagcctgataccctggctgaattaggcaaattctggcaataagaattgactagctgatccacctaaccagttgctccttttgccgcgcacacacacaaacacccctgtggatagggaa

SEQ ID NO: 56227 - DNA, 373 bp, Homo sapiens
ttagaaatgcagacatttaatgggttacgaagcttaactgctagacacattcattagatgtgaacagttaatatgtagtcatttctgttggcttctaaattatcctcatcactcttttgagacatagcagctcatcctaggccaatgatatcaaccatggctgtactgtgaactgtaatccagtatctttctctcaacacctcctctcttctcagctaagatattgaagatgctctgcttttccctctgactttcatcacttaaaactttgttgatttcacctgaggaaaattgacaaatatttttaatcatctttcacctttctttctcacttccaactcttctccaattgcctgactaaaatttctattcc

SEQ ID NO: 56228 - DNA, 467 bp, Homo sapiens
cttcacattattttaattctgtattcaactaagcactaattcaacccagccagattagtactcataccaaaaaagagtgaatactctgaatagagggcaggttttctgattatggtgagaatatctttgtggtaaattaatctggtgtgctagtttttacgttggtctcttctcagtgtcgttagtcactgaggctgattgatcatcttttaggttactgataaagttcctgtacagctgattttcagaccttagattgcaataacttcaccaagaaaatacttcattgggaagcattttggtccttccatttgattcataactcttacctttatgcctctgaaggaaaagatttatacattcagcttgtaattagtaatcaagactgaggtttagtctatctagcttcacaatctatctagtttgttttgtctagccatatgatttcttcaaatatgccatttctt

SEQ ID NO: 56229 - DNA, 725 bp, Homo sapiens
cgcaaggtcacattatcagaagattagaaaaatggctagattaagtacacacagtcaccaagctgtgtaccccaggagtctgggagcaaactgccacaatatattagaatttgcactgctgtggggagtgttgtcacaaggttttactgtgtcctaggataggcatttcatgctttttccctcatgccttccaaaactggcaggaagatgagggtgggtaagcagaggcctcttcaggctccctcctctgcccaggatccaggggttatctccaactgcctcttttcactcaggagaatctcagccccacggggcacctccaagacctggcctggccagagagagatcagtgctcccacgaggaggagctggggaataaactgctgactggctctgcaaagcgggtgttttatgcatgaaccacccctttcctccttccagcatgcctttcaccctgcctttgagaggggtaaccacccccaactcattcacagatctcccctggctgccccatgagcacagggaaggcccactctcagccatttttttgctcacaagcttcagagataccttttccaccctggacagctcccactgtgagactactacaccacagtgctggaatcagcctgcctgcaacttccaccatccatctctgtcacacctccgagcccatggaatgaacctgttcctttttgtaatggctgcttgagacattgcagtaa

SEQ ID NO: 56230 - DNA, 4386 bp, Homo sapiens
gctgatcgggggtagaaaacggtgggaaccacattggccggtcaggatcggaggctgaaggaagattatagagacttgctttagaaccacaagaagaaagaggaggccggcttttcagctagcatcatggcgtggccgtgcatcacgagggcctgctgcatcgcccgcttctggaaccagttggacaaagcggacatcgctgtgccgctggttttcaccaagtactcggaggccaccgagcacccgggcgccccgccgcagccaccgccgccgcagcagcaggcgcagccggcgctcgcgcccccctcggcgcgcgcggttgccatagagacgcagccagcccagggcgagttggatgcagttgcccgggcaacggggccagcgcctgggcctaccggcgagcgcgagccggcggcgggccccggccggagcgggccgggcccgggcctgggctccggctccacctccggccccgcggactcggtgatgcggcaggattaccgagcctggaaggtgcagcggcccgagcccagctgccggccgcgcagcgaataccagccctccgacgctcccttcgagcgcgagacccagtaccagaaggacttccgcgcctggccgctgccgcgccgcggggaccacccgtggatccccaagcccgtgcagatctctgcggcctcccaggcgtcggcgcccattctcggggcgcccaagcgccggccgcagagccaggagcgctggccagtgcaggccgccgctgaggcccgggagcaggaggcggcccccggcggagcgggtggcctggcggccggaaaggcgtccggggcggacgagcgcgacacgcgcaggaaggccgggcctgcctggatggtgcgccgcgccgagggcctggggcacgagcagacgccgctgcccgcggcccaggcccaggtccaggccaccggccccgaggctggcagggggcgcgccgcggcggacgccctcaaccggcaaatccgcgaggaggtggcgagtgcagtgagcagctcctacaggaatgaattcagggcatggacggacatcaagcctgtgaaaccaataaaggccaagccccagtacaagcccccagatgataagatggttcatgagaccagctacagtgctcagttcaaaggagaggccagcaagccaacaacagctgacaataaggtcattgatcgcagaagaatacgcagcctctacagcgaacccttcaaggaacccccaaaggtggaaaaacctagtgttcagagttccaaaccaaaaaagacctcagcgagccataagcccacgaggaaggccaaagacaagcaggcggtgtcaggccaggctgccaagaaaaagagcgcggagggcccgagtaccaccaagccagacgacaaggagcaaagcaaagagatgaacaataaactggctgaggcgaaagagtaaatttccctgcactttccttttactcttctctctctctccctccccccaactttttttttttaaaccaacaaaccaaaaaaggccacaaaattaattagaggcttctcatctgccttggtcctgagtgttccaggagctctttggtttggcttcttttgatggaagaatcctgcttcacagactgagtggcaggcctcctcctgagggcagcccctggagcaccaggaagcgttgccgctggctgtgccctcccctggcactctgactgcatgctgatgagcaaggcaggcaggtctgagaggcgaaacgaatctcccggcagtgcttggaagtgtctgtggggtctcctcctcccagatccccaagatctgtgtcactggtcgattttgaactttaggtacatgtgttcttttcaaaaattcagagaatcgtcatgtgccacagaagctcagcctgggcttcagcaattgacaaaatttgaagaaatattaaacaaaaataacaaaaaaagaaacaaccttggccttaatgtcaataaaagggagttgtgtctgttaagtggtcttttcatagaatcgtccattagaaatgtgtgcctgtgtttagcttcctatcagtgggctttaaattgtataccgagtcatagatacgccactgataactaaaactagatcagggctggtgaagaaggttaggtgttttaggtacattccagctgtcataggaagatcacagaaatgaggaggctgttttcctctgattctcctcggccgaccacctgtccaatgctgctggtttcgcagagcgaccggttggagatgtctgaggaagaaagttcaaggtgtagggatagtgtgtttggaatttgactttccatttctgagacccaagggggcgtagatgtagtggcaagtgtggcgatgtttactctcccttcctgaaccgctctggtctgctcctcagagagggcagcggtgccaggcctcaggtcagggagaatgtctgtgacttagctgcagactaggagactgccctgctaactaattagcaagcagctttgacctcattaatatataaaagcagctctcagtatattccgtgtcgtgtgtgtgtgtggccaaaagcccccaaaggtggcaagtgccaccttcgctgtgctagagttgtgttgtaggaattagtcagggagttgttgtgaaaaaaaaaaccccagtgcttgtgagggaactcaaaatagttaccagaaaaataatatttgccaatatgacgtgtatattgctcagcacactctgtatctcctgtccttaaaatcctcttgtccccggcattctgacacactgggctgccgtccggtgtcaagccccggcgcaggcttgctcttcttttacaatgaaaggggtgaagagtgagggtctcacagttccttacctcaaagtccctttaggtccttctggtttggaggaagtggagcctccacgaactctctcttactccgaccattcaggcagcaaagtctctgcttacatcattttggttgtcaccttggggctgagtgagaagtcttttgtaaattaattcggcgtgtgctacatgagccataattattaacagaacaggaatatcagaaacgaagttgttgatcaggcccactgcgaccttcctttctatctcagggtttaaaactgtgaggaaggagaagtatgaaggaaggtagaaaatgctggtgggtctccgtgtttatgagtcacagattttgaaagctatcaggaaatgactagagtggatcctggcactgattccaactctttgccagctaatcttaacatttagcagaaagctctagcaacatgatcttaattgtatccagaggatttgccaatgtatgttcagtctctcaagatttggcattagtcagacatgttgatgctagccacaatttggatttctccatagaataatcatttatttttgcagatcaaataaatcagagtttacaatgcacaggggatcatttatttagcattcccttgctagaagcccgtgtgccaggcactgtgctagaagtggtgggcagtataaagaaatctgtctccacagccacacaaccagagggtgcacatgacttgatccctatgaccaagtcaagttggtgttgcccaaatcgcagtttgacataagggtcccacaggcttccccaccccccgcccccactcactgccccagggaccaacttcctaccctcacccaaggctttagaggacctgtagcatgtctttttcaacctgtcagtatccccttctgcttaacacacccactgagaaaaccctgtttgtagttcactttgactcttgaatgtgtcactttactggcaagagacttcctttgatttctactgtttacaaataaaactcagccagtctcattctatatcccaaacgtactgaatgaaactgattttggttccacaagcagtgtttgggtgttgccttcctgaaggtgaccaagcttccaaagctcgtcccactggcctctgtacatttccctgtggttctccgtccttccctggcgagggagctgggactgaagctttcccgctgtttccctgcctgcaaaagcagccccaagagctgcgcattggcttccctcagcaatctgtcctgtctgtgctcccattcggtccacatagctttctttgcctctctgaggcagacaggaagtgtctaattacgattttgtggcctgggttttgttgcataccacagattgtctatgtaacatgtagcgcacacctctcttggtgctatttcattcctgctgtaagagaatgacaaaaatattcatgtatagccaattgattgtgacgtgcttgtggtctgtgcttgctcagaaaaacaaacaaacaaacagtttttccaattataaataaatgctaaagacgaa

SEQ ID NO: 56231 - DNA, 4568 bp, Homo sapiens
gctgatcgggggtagaaaacggtgggaaccacattggccggtcaggatcggaggctgaaggaagattatagagacttgctttagaaccacaagaagaaagaggaggccggcttttcagctagcatcatggcgtggccgtgcatcacgagggcctgctgcatcgcccgcttctggaaccagttggacaaagcggacatcgctgtgccgctggttttcaccaagtactcggaggccaccgagcacccgggcgccccgccgcagccaccgccgccgcagcagcaggcgcagccggcgctcgcgcccccctcggcgcgcgcggttgccatagagacgcagccagcccagggcgagttggatgcagttgcccgggcaacggggccagcgcctgggcctaccggcgagcgcgagccggcggcgggccccggccggagcgggccgggcccgggcctgggctccggctccacctccggccccgcggactcggtgatgcggcaggattaccgagcctggaaggtgcagcggcccgagcccagctgccggccgcgcagcgaataccagccctccgacgctcccttcgagcgcgagacccagtaccagaaggacttccgcgcctggccgctgccgcgccgcggggaccacccgtggatccccaagcccgtgcagatctctgcggcctcccaggcgtcggcgcccattctcggggcgcccaagcgccggccgcagagccaggagcgctggccagtgcaggccgccgctgaggcccgggagcaggaggcggcccccggcggagcgggtggcctggcggccggaaaggcgtccggggcggacgagcgcgacacgcgcaggaaggccgggcctgcctggatggtgcgccgcgccgagggcctggggcacgagcagacgccgctgcccgcggcccaggcccaggtccaggccaccggccccgaggctggcagggggcgcgccgcggcggacgccctcaaccggcaaatccgcgaggaggtggcgagtgcagtgagcagctcctacaggaatgaattcagggcatggacggacatcaagcctgtgaaaccaataaaggccaagccccagtacaagcccccagatgataagatggttcatgagaccagctacagtgctcagttcaaaggagaggccagcaagccaacaacagctgacaataaggtcattgatcgcagaagaatacgcagcctctacagcgaacccttcaaggaacccccaaaggtggaaaaacctagtgttcagagttccaaaccaaaaaagacctcagcgagccataagcccacgaggaaggccaaagacaagcaggcggtgtcaggccaggctgccaagaaaaagagcgcggagggcccgagtaccaccaagccagacgacaaggagcaaagcaaagagatgaacaataaactggctgaggcgaaagagtaaatttccctgcactttccttttactcttctctctctctccctccccccaactttttttttttaaaccaacaaaccaaaaaaggccacaaaattaattagaggcttctcatctgccttggtcctgagtgttccaggagctctttggtttggcttcttttgatggaagaatcctgcttcacagactgagtggcaggcctcctcctgagggcagcccctggagcaccaggaagcgttgccgctggctgtgccctcccctggcactctgactgcatgctgatgagcaaggcaggcaggtctgagaggcgaaacgaatctcccggcagtgcttggaagtgtctgtggggtctcctcctcccagatccccaagatctgtgtcactggtcgattttgaactttaggtacatgtgttcttttcaaaaattcagagaatcgtcatgtgccacagaagctcagcctgggcttcagcaattgacaaaatttgaagaaatattaaacaaaaataacaaaaaaagaaacaaccttggccttaatgtcaataaaagggagttgtgtctgttaagtggtcttttcatagaatcgtccattagaaatgtgtgcctgtgtttagcttcctatcagtgggctttaaattgtataccgagtcatagatacgccactgataactaaaactagatcagggctggtgaagaaggttaggtgttttaggtacattccagctgtcataggaagatcacagaaatgaggaggctgttttcctctgattctcctcggccgaccacctgtccaatgctgctggtttcgcagagcgaccggttggagatgtctgaggaagaaagttcaaggtgtagggatagtgtgtttggaatttgactttccatttctgagacccaagggggcgtagatgtagtggcaagtgtggcgatgtttactctcccttcctgaaccgctctggtctgctcctcagagagggcagcggtgccaggcctcaggtcagggagaatgtctgtgacttagctgcagactaggagactgccctgctaactaattagcaagcagctttgacctcattaatatataaaagcagctctcagtatattccgtgtcgtgtgtgtgtgtggccaaaagcccccaaaggtggcaagtgccaccttcgctgtgctagagttgtgttgtaggaattagtcagggagttgttgtgaaaaaaaaaaccccagtgcttgtgagggaactcaaaatagttaccagaaaaataatatttgccaatatgacgtgtatattgctcagcacactctgtatctcctgtccttaaaatcctcttgtccccggcattctgacacactgggctgccgtccggtgtcaagccccggcgcaggcttgctcttcttttacaatgaaaggggtgaagagtgagggtctcacagttccttacctcaaagtccctttaggtccttctggtttggaggaagtggagcctccacgaactctctcttactccgaccattcaggcagcaaagtctctgcttacatcattttggttgtcaccttggggctgagtgagaagtcttttgtaaattaattcggcgtgtgctacatgagccataattattaacagaacaggaatatcagaaacgaagttgttgatcaggcccactgcgaccttcctttctatctcagggtttaaaactgtgaggaaggagaagtatgaaggaaggtagaaaatgctggtgggtctccgtgtttatgagtcacagattttgaaagctatcaggaaatgactagagtggatcctggcactgattccaactctttgccagctaatcttaacatttagcagaaagctctagcaacatgatcttaattgtatccagaggatttgccaatgtatgttcagtctctcaagatttggcattagtcagacatgttgatgctagccacaatttggatttctccatagaataatcatttatttttgcagatcaaataaatcagagtttacaatgcacaggggatcatttatttagcattcccttgctagaagcccgtgtgccaggcactgtgctagaagtggtgggcagtataaagaaatctgtctccacagccacacaaccagagggtgcacatgacttgatccctatgaccaagtcaagttggtgttgcccaaatcgcagtttgacataagggtcccacaggcttccccaccccccgcccccactcactgccccagggaccaacttcctaccctcacccaaggctttagaggacctgtagcatgtctttttcaacctgtcagtatccccttctgcttaacacacccactgagaaaaccctgtttgtagttcactttgactcttgaatgtgtcactttactggcaagagacttcctttgatttctactgtttacaaataaaactcagccagtctcattctatatcccaaacgtactgaatgaaactgattttggttccacaagcagtgtttgggtgttgccttcctgaaggtgaccaagcttccaaagctcgtcccactggcctctgtacatttccctgtggttctccgtccttccctggcgagggagctgggactgaagctttcccgctgtttccctgcctgcaaaagcagccccaagagctgcgcattggcttccctcagcaatctgtcctgtctgtgctcccattcggtccacatagctttctttgcctctctgaggcagacaggaagtgtctaattacgattttgtggcctgggttttgttgcataccacagattgtctatgtaacatgtagcgcacacctctcttggtgctatttcattcctgctgtaagagaatgacaaaaatattcatgtatagccaattgattgtgacgtgcttgtggtctgtgcttgctcagaaaaacaaacaaacaaacagtttttccaattataaataaatgctaaagacgaaaaaaaaaaaaaaaaaaaaaaaaaaaaaaaaaaaagaaaaaaaaaaagaaaaaaaaagcaaaaaacaaaaaaaagagagaaaaaagagagaagaaaaaaaaagagacagggggggggcaggcaggaagacccggcgcggggagggagcaggagagcaaagagagaagagcaagaaggagagac

SEQ ID NO: 56232 - DNA, 442 bp, Homo sapiens
caaaatcctatgcctgtgggtgagttgagcaacgtgatgaggtgttaacttcctacagggaggggctcaaatattgcccaacagtggtatggcccactgcctggggtggtcggtggaaggctggcaggacaagggagaccacgtggccagtgggtgctgccaaagtgacggaacagggagttcagacgggagatgccgaatgccctaatgtccttgggaacaccttatgcactgtgttccacctgagccaacctctgtcattaccgtcattccttaattaaccatatcttttctctctaaattccttcccacgccccacctttttgtgtttctgtatttgcggtctgtctctccgtacaggtggaaaaacctagtgttcagagttccaaaccaaaaaagacctcagcgagccataagcccacgaggaaggccaaagacaagc

SEQ ID NO: 56233 - DNA, 321 bp, Homo sapiens
cccaagggggcgtagatgtagtggcaagtgtggcgatgtttactctcccttcctgaaccgctctggtctgctcctcagagagggcagcggtgccaggcctcaggtcagggagaatgtctgtgacttagctgcagactaggagactgccctgctaactaattagcaagcagctttgacctcattaatatataaaagcagctctcagtatattccgtgtcgtgtgtgtgtgtggccaaaagcccccaaaggtggcaagtgccaccttcgctgtgctagagttgtgttgtaggaattagtcagggagttgttgtgaaaaaaaaa

SEQ ID NO: 56234 - DNA, 209 bp, Homo sapiens
ggggagtcagtgattttttttcattttaaatttagccttcatggagttttagttatttggttttatccaagaaaagcaactaaatgccaaaacattttacatagtgggctaaagataggaagtgcacatatgtatggcatgtgttctatacattattagatctctgccttcatttctaatgctaatacaatcatgtgaagagttaagca

SEQ ID NO: 56235 - DNA, 215 bp, Homo sapiens
cagaaacagaccatttgaaacatggtacacatttattaatagagatcctactctttggagtctgtgataatttgtaggtagctaagcaaaactttttaagtataccacctacccatctaaggagagagtgtttcccaaacaatttaacagcatcaataagataacagtgtttgctcctctcaggcaagtcagctgcttttgcccaggcacataca

SEQ ID NO: 56236 - DNA, 359 bp, Homo sapiens
caatttgtgtttttcattaacacaggtaccaggacccctgtgaagatacccatggttcaatcatcaggacctacagatccttccatgttaaggacaacaccaataatactgagaaagcaaacggcagattggcagtgttaaaggataacaacgtgccaacagaatattaagaaagaaaacttctttgcaaaagttgatagagagactacaaatatcagtcaaattacaaacagacaacagaggacagcatttggaaacgacttcccgaggcaagcactattcagtgccccacttccctctccccatgcccctttgcaaagatctattacattaataaatttctttaaatgctaaaatca

SEQ ID NO: 56237 - DNA, 958 bp, Homo sapiens
agctcgtgccgacttctgcttccgggtcggagccatggcggtggcaaattcaagtcctgttaaccccgtggtgttctttgatgtcagtattggcggtcaggaagttggccgcatgaagatcgagctctttgcagacgttgtgcctaagacggccgagaactttaggcagttctgcaccggagaattcaggaaagatggggttccaataggatacaaaggaagcaccttccacagggtcataaaggatttcatgattcagggtggagattttgttaatggagatggtactggagtcgccagtatttaccgggggccatttgcagatgaaaattttaaacttagacactcagctccaggcctgctttccatggcgaacagtggtccaagtacaaatggctgtcagttctttatcacctgctctaagtgcgattggctggatgggaagcatgtggtgtttggaaaaatcatcgatggacttctagtgatgagaaagattgagaatgttcccacaggccccaacaataagcccaagctacctgtggtgatctcgcagtgtggggagatgtagtccagacaaagactgaatcaggccttcccttcttcttggtggtgttcttgagtaagataatctggactggcccccgtctttgcttccctgcctgctgctgccccatttgatcaagagaccatggaagtgtcagagattcagaatccaagattgtctttaagttttcaactgtaaataaagtttttttgtatgcgtaaaagaaaacaaaaagaaacccggaggggaccatatagacgggtggcgaaaaaaaggcgtcacgcaaactggcgaccatggggccaaagagctggcccctgaccaaggcttctctgggacacaaagggtaaatctcggcggacccccataagtgacgccggtatcaattccgataaagcacggtaacctgctagg

SEQ ID NO: 56238 - DNA, 995 bp, Homo sapiens
ggccaatatgaaccacttaaggattttcagcagaatactgtagatgaattttcatgttcagaagatgattctagcagcattgtggaggatgggctggaggccagtgaggagtctactgcagtagtagtccaggcaagagaaaagaggttttacatgaaaatatgggtctggggaacactggagatttggcagcaaatatttatgtgcctgctgggcatgtgacactgtatgttccctgtcctgaaactcagaagctctgccagctgaaaaggccaggagtggagagaatgtctggctccagtccattccagtccagtacaaaggcaaagctgcttgcattgcagccaagtcttacacacgtagaggttccattctcttcagtggaatactatacagccttaacaaaataaagaggtagatctggatgtgttggcaagatttctaaggtaagttaagtgacagtcaagatgtagtaatttatgtaagcatgttactgtttattttgaatgactttcaggaatctctgcagtgatatatagcagactgtggataatacttctgcagagtagagatagcaaagagacttttcagttgccttatttaagcttgaattttctaccttgaacatgtatcttgtaatagaaatacatactgtttatatgtagtgttaactaatcctaaatcctcccagcacttcccaggagcctgcccacagctgtggctaacatcaggtgtgaatccattgctgatccctccacctcctcttccaggtctaagcccagacagtgggtgctcccacagcacttggttcatctctccactgtggcatttaatatactgtatcacaaatatgtaagtctggttttctctggactgagaacttgttgaagcaaggatcatgctgactaacatagtgcctggtatgacagagcttaggtcctggcacaccatgcagcttacaaagtacatttatacattttcatacactttgcttg

SEQ ID NO: 56239 - DNA, 785 bp, Homo sapiens
agctcgtgccgacttctgcttccgggtcggagccatggcggtggcaaattcaagtcctgttaaccccgtggtgttctttgatgtcagtattggcggtcaggaagttggccgcatgaagatcgagctctttgcagacgttgtgcctaagacggccgagaactttaggcagttctgcaccggagaattcaggaaagatggggttccaataggatacaaaggaagcaccttccacagggtcataaaggatttcatgattcagggtggagattttgttaatggagatggtactggagtcgccagtatttaccgggggccatttgcagatgaaaattttaaacttagacactcagctccaggcctgctttccatggcgaacagtggtccaagtacaaatggctgtcagttctttatcacctgctctaagtgcgattggctggatgggaagcatgtggtgtttggaaaaatcatcgatggacttctagtgatgagaaagattgagaatgttcccacaggccccaacaataagcccaagctacctgtggtgatctcgcagtgtggggagatgtagtccagacaaagactgaatcaggccttcccttcttcttggtggtgttcttgagtaagataatctggactggcccccgtctttgcttccctgcctgctgctgccccatttgatcaagagaccatggaagtgtcagagattcagaatccaagattgtctttaagttttcaactgtaaataagttgtgtcggggggtggtggggtggcgggtggggtggga

SEQ ID NO: 56240 - DNA, 955 bp, Homo sapiens
cccaaacataggctagtggaggcctgggtccatggcggtggcaaattcaagtcctgttaaccccgtggtgttctttgatgtcagtattggcggtcaggaagttggccgcatgaagatcgagctctttgcagacgttgtgcctaagacggccgagaactttaggcagttctgcaccggagaattcaggaaagatggggttccaataggatacaaaggaagcaccttccacagggtcataaaggatttcatgattcagggtggagattttgttaatggagatggtactggagtcgccagtatttaccgggggccatttgcagatgaaaattttaaacttagacactcagctccaggcctgctttccatggcgaacagtggtccaagtacaaatggctgtcagttctttatcacctgctctaagtgcgattggctggatgggaagcatgtggtgtttggaaaaatcatcgatggacttctagtgatgagaaagattgagaatgttcccacaggccccaacaataagcccaagctacctgtggtgatctcgcagtgtggggagatgtagtccagacaaagactgaatcaggccttcccttcttcttggtggtgttcttgagtaagataatctggactggcccccgtctttgcttccctgcctgctgctgccccatttgatcaagagaccatggaagtgtcagagattcagaatccaagattgtctttaagttttcaactgtaaataaagtttttttgtatgcgtaaaagaaaacaaaaagaaacccggaggggaccatatagacgggtggcgaaaaaaaggcgtcacgcaaactggcgaccatggggccaaagagctggcccctgaccaaggcttctctgggacacaaagggtaaatctcggcggacccccataagtgacgccggtatcaattccgataaagcacggtaacctgctagg

SEQ ID NO: 56241 - DNA, 1181 bp, Homo sapiens
cggacgcgtgggttctagatcgcgatctagaacccatggcggtggcaaattcaagtcctgttaaccccgtggtgttctttgatgtcagtattggcggtcaggtgagatccaggaggctgcccacacctgcgccgaagggaaactgctcggggctaggcaggcagaactcacccagagagagcggactcgggaagccagccagaaagtgaaattgcacccgaacctaccgacctgccgggcggggggaaaggaggaggaggagtctccccaatcctagcgccccgcttctggaggaactgggcggttagactagggaggcggaggaagttggccgcatgaagatcgagctctttgcagacgttgtgcctaagacggccgagaactttaggcagttctgcaccggagaattcaggaaagatggggttccaataggatacaaaggaagcaccttccacagggtcataaaggatttcatgattcagggtggagattttgttaatggagatggtactggagtcgccagtatttaccgggggccatttgcagatgaaaattttaaacttagacactcagctccaggcctgctttccatggcgaacagtggtccaagtacaaatggctgtcagttctttatcacctgctctaagtgcgattggctggatgggaagcatgtggtgtttggaaaaatcatcgatggacttctagtgatgagaaagattgagaatgttcccacaggccccaacaataagcccaagctacctgtggtgatctcgcagtgtggggagatgtagtccagacaaagactgaatcaggccttcccttcttcttggtggtgttcttgagtaagataatctggactggcccccgtctttgcttccctgcctgctgctgccccatttgatcaagagaccatggaagtgtcagagattcagaatccaagattgtctttaagttttcaactgtaaataaagtttttttgtatgcgtaaaagaaaacaaaaagaaacccggaggggaccatatagacgggtggcgaaaaaaaggcgtcacgcaaactggcgaccatggggccaaagagctggcccctgaccaaggcttctctgggacacaaagggtaaatctcggcggacccccataagtgacgccggtatcaattccgataaagcacggtaacctgctagg

SEQ ID NO: 56242 - DNA, 947 bp, Homo sapiens
gggtggtgggtcagcccatcatgccccctgctccgtgaagccctcatggtcttggactgggccttctgacactctcccgctgattgcaggaagttggccgcatgaagatcgagctctttgcagacgttgtgcctaagacggccgagaactttaggcagttctgcaccggagaattcaggaaagatggggttccaataggatacaaaggaagcaccttccacagggtcataaaggatttcatgattcagggtggagattttgttaatggagatggtactggagtcgccagtatttaccgggggccatttgcagatgaaaattttaaacttagacactcagctccaggcctgctttccatggcgaacagtggtccaagtacaaatggctgtcagttctttatcacctgctctaagtgcgattggctggatgggaagcatgtggtgtttggaaaaatcatcgatggacttctagtgatgagaaagattgagaatgttcccacaggccccaacaataagcccaagctacctgtggtgatctcgcagtgtggggagatgtagtccagacaaagactgaatcaggccttcccttcttcttggtggtgttcttgagtaagataatctggactggcccccgtctttgcttccctgcctgctgctgccccatttgatcaagagaccatggaagtgtcagagattcagaatccaagattgtctttaagttttcaactgtaaataaagtttttttgtatgcgtaaaagaaaacaaaaagaaacccggaggggaccatatagacgggtggcgaaaaaaaggcgtcacgcaaactggcgaccatggggccaaagagctggcccctgaccaaggcttctctgggacacaaagggtaaatctcggcggacccccataagtgacgccggtatcaattccgataaagcacggtaacctgctagg

SEQ ID NO: 56243 - DNA, 1078 bp, Homo sapiens
cggacgcgtgggttctagatcgcgatctagaacccatggcggtggcaaattcaagtcctgttaaccccgtggtgttctttgatgtcagtattggcggtcaggaagttggccgcatgaagatcgagctctttgcagacgttgtgcctaagacggccgagaactttaggcagttctgcaccggagaattcaggtcagtttcagatgtgtttgacttctttgcctgctccagaggggtgttctggggctgcagtgagggtatcggtgaaccacctgctggccttgaatgattgctggtgacagtgatagaaggaaagatggggttccaataggatacaaaggaagcaccttccacagggtcataaaggatttcatgattcagggtggagattttgttaatggagatggtactggagtcgccagtatttaccgggggccatttgcagatgaaaattttaaacttagacactcagctccaggcctgctttccatggcgaacagtggtccaagtacaaatggctgtcagttctttatcacctgctctaagtgcgattggctggatgggaagcatgtggtgtttggaaaaatcatcgatggacttctagtgatgagaaagattgagaatgttcccacaggccccaacaataagcccaagctacctgtggtgatctcgcagtgtggggagatgtagtccagacaaagactgaatcaggccttcccttcttcttggtggtgttcttgagtaagataatctggactggcccccgtctttgcttccctgcctgctgctgccccatttgatcaagagaccatggaagtgtcagagattcagaatccaagattgtctttaagttttcaactgtaaataaagtttttttgtatgcgtaaaagaaaacaaaaagaaacccggaggggaccatatagacgggtggcgaaaaaaaggcgtcacgcaaactggcgaccatggggccaaagagctggcccctgaccaaggcttctctgggacacaaagggtaaatctcggcggacccccataagtgacgccggtatcaattccgataaagcacggtaacctgctagg

SEQ ID NO: 56244 - DNA, 998 bp, Homo sapiens
agctcgtgccgacttctgcttccgggtcggagccatggcggtggcaaattcaagtcctgttaaccccgtggtgttctttgatgtcagtattggcggtcaggaagttggccgcatgaagatcgagctctttgcagacgttgtgcctaagacggccgagaactttaggcagttctgcaccggagaattcaggaaagatggggttccaataggatacaaaggaagcaccttccacagggtcataaaggatttcatgattcagggtggagattttgttaatggagatggtactggagtcgccagtatttaccgggggccatttgcagatgaaaattttaaacttagacactcagctccaggcctgctttccatggcgaacagtggtccaagtacaaatggctgtcagttctttatcacctgctctaagtgcgattggctggatgggaagcatgtggtgtttggaaaaatcatcgatggacttctagtgatgagaaagattgagaatgttcccacaggccccaacaataagcccaagctacctgtggtgatctcgcagtgtggggagatgtagtccagacaaagactgaatcagcacttcccaggagcctgcccacagctgtggctaacatcaggccttcccttcttcttggtggtgttcttgagtaagataatctggactggcccccgtctttgcttccctgcctgctgctgccccatttgatcaagagaccatggaagtgtcagagattcagaatccaagattgtctttaagttttcaactgtaaataaagtttttttgtatgcgtaaaagaaaacaaaaagaaacccggaggggaccatatagacgggtggcgaaaaaaaggcgtcacgcaaactggcgaccatggggccaaagagctggcccctgaccaaggcttctctgggacacaaagggtaaatctcggcggacccccataagtgacgccggtatcaattccgataaagcacggtaacctgctagg

SEQ ID NO: 56245 - DNA, 900 bp, Homo sapiens
agctcgtgccgacttctgcttccgggtcggagccatggcggtggcaaattcaagtcctgttaaccccgtggtgttctttgatgtcagtattggcggtcaggaagttggccgcatgaagatcgagctctttgcagacgttgtgcctaagacggccgagaactttaggcagttctgcaccggagaattcaggaaagatggggttccaataggatacaaaggaagcaccttccacagggtcataaaggatttcatgattcagggtggagattttgttaatggagatggtactggagtcgccagtatttaccgggggccatttgcagatgaaaattttaaacttagacactcagctccaggcctgctttccatggcgaacagtggtccaagtacaaatggctgtcagttctttatcacctgctctaagtgcgattggctggatgggaagcatgtggtgtttggaaaaatcatcgatggacttctagtgatgagaaagattgagaatgttcccacaggccccaacaataagcccaagctacctgtggtgatctcgcagtgtggggagatgtagtccagacaaagactgaatcagtatagcttgctcgacttcaaggccataaacccagagtgtggacttccctttctctttacctctgggaccgaaacctgcaaggaagaaggattgctttttgttctggacctccacagagagccatcagagtctgacaaaaaggacaaaggctttggagccaagtagaccaggaagtctcatcactgtctaattctgtgacttcagtcaagccatgaaaccccttgggaccctactcctttgcataattagataatatataatgcatggagttgtgaagggcaaataaatgagatagtatgcttgaccataaa

SEQ ID NO: 56246 - DNA, 1119 bp, Homo sapiens
agctcgtgccgacttctgcttccgggtcggagccatggcggtggcaaattcaagtcctgttaaccccgtggtgttctttgatgtcagtattggcggtcaggaagttggccgcatgaagatcgagctctttgcagacgttgtgcctaagacggccgagaactttaggcagttctgcaccggagaattcaggaaagatggggttccaataggatacaaaggaagcaccttccacagggtcataaaggatttcatgattcagggtggagattttgttaatggagatggtactggagtcgccagtatttaccgggggccatttgcagatgaaaattttaaacttagacactcagctccaggcctgctttccatggcgaacagtggtccaagtacaaatggctgtcagttctttatcacctgctctaagtgcgattggctggatgggaagcatgtggtgtttggaaaaatcatcgatggacttctagtgatgagaaagattgagaatgttcccacaggccccaacaataagcccaagctacctgtggtgatctcgcagtgtggggagatgtagtccagacaaagactgaatcagcacttcccaggagcctgcccacagctgtggctaacatcaggtgtgaatccattgctgatccctccacctcctcttccaggtctaagcccagacagtgggtgctcccacagcacttggttcatctctccactgtggcatttaatatactgtatcacaaatatgccttcccttcttcttggtggtgttcttgagtaagataatctggactggcccccgtctttgcttccctgcctgctgctgccccatttgatcaagagaccatggaagtgtcagagattcagaatccaagattgtctttaagttttcaactgtaaataaagtttttttgtatgcgtaaaagaaaacaaaaagaaacccggaggggaccatatagacgggtggcgaaaaaaaggcgtcacgcaaactggcgaccatggggccaaagagctggcccctgaccaaggcttctctgggacacaaagggtaaatctcggcggacccccataagtgacgccggtatcaattccgataaagcacggtaacctgctagg

SEQ ID NO: 56247 - DNA, 983 bp, Homo sapiens
  misc_feature (959)..(959): n is a, c, g, or t
  misc_feature (962)..(962): n is a, c, g, or t
agctcgtgccgacttctgcttccgggtcggagccatggcggtggcaaattcaagtcctgttaaccccgtggtgttctttgatgtcagtattggcggtcaggaagttggccgcatgaagatcgagctctttgcagacgttgtgcctaagacggccgagaactttaggcagttctgcaccggagaattcaggaaagatggggttccaataggatacaaaggaagcaccttccacagggtcataaaggatttcatgattcagggtggagattttgttaatggagatggtactggagtcgccagtatttaccgggggccatttgcagatgaaaattttaaacttagacactcagctccaggcctgctttccatggcgaacagtggtccaagtacaaatggctgtcagttctttatcacctgctctaagtgcgattggctggatgggaagcatgtggtgtttggaaaaatcatcgatggacttctagtgatgagaaagattgagaatgttcccacaggccccaacaataagcccaagctacctgtggtgatctcgcagtgtggggagatgtagtccagacaaagactgaatcagtatagcttgctcgacttcaaggccataaacccagagtgtggacttccctttctctttacctctgggaccgaaacctgcaaggaagaaggattgctttttgttctggacctccacagagagccatcagagtctgacaaaaaggacaaaggctttggagccaagtagaccaggaagtctcatcactgtctaattctgtgacttcagtcaagccatgaaaccccttgggaccctactcctttgcataattagataatatataatgcatggagttgtgaagggcaaataaatgagatagtatgcttgaccataaaaaaaaaaaaaaaaaaaaaaaaaaaaaaaaaaaaaaaaaaaaaaaaaaaaaaaaaaaaanagnaaaaaaaaaaaaaaaacaaaa

SEQ ID NO: 56248 - DNA, 901 bp, Homo sapiens
cggacgcgtgggttctagatcgcgatctagaacccatggcggtggcaaattcaagtcctgttaaccccgtggtgttctttgatgtcagtattggcggtcaggaagttggccgcatgaagatcgagctctttgcagacgttgtgcctaagacggccgagaactttaggcagttctgcaccggagaattcaggaaagatggggttccaataggatacaaaggaagcaccttccacagggtcataaaggatttcatgattcagggtggagattttgttaatggagatggtactggagtcgccagtatttaccgggggccatttgcagatgaaaattttaaacttagacactcagctccaggcctgctttccatggcgaacagtggtccaagtacaaatggctgtcagttctttatcacctgctctaagtgcgattggctggatgggaagcatgtggtgtttggaaaaatcatcgatggacttctagtgatgagaaagattgagaatgttcccacaggccccaacaataagcccaagctacctgtggtgatctcgcagtgtggggagatgtagtccagacaaagactgaatcagtatagcttgctcgacttcaaggccataaacccagagtgtggacttccctttctctttacctctgggaccgaaacctgcaaggaagaaggattgctttttgttctggacctccacagagagccatcagagtctgacaaaaaggacaaaggctttggagccaagtagaccaggaagtctcatcactgtctaattctgtgacttcagtcaagccatgaaaccccttgggaccctactcctttgcataattagataatatataatgcatggagttgtgaagggcaaataaatgagatagtatgcttgaccataaa

SEQ ID NO: 56249 - DNA, 913 bp, Homo sapiens
cggacgcgtgggttctagatcgcgatctagaacccatggcggtggcaaattcaagtcctgttaaccccgtggtgttctttgatgtcagtattggcggtcaggaagttggccgcatgaagatcgagctctttgcagacgttgtgcctaagacggccgagaactttaggcagttctgcaccggagaattcaggaaagatggggttccaataggatacaaaggaagcaccttccacagggtcataaaggatttcatgattcagggtggagattttgttaatggagatggtactggagtcgccagtatttaccgggggccatttgcagagcgaacagtggtccaagtacaaatggctgtcagttctttatcacctgctctaagtgcgattggctggatgggaagcatgtggtgtttggaaaaatcatcgatggacttctagtgatgagaaagattgagaatgttcccacaggccccaacaataagcccaagctacctgtggtgatctcgcagtgtggggagatgtagtccagacaaagactgaatcaggccttcccttcttcttggtggtgttcttgagtaagataatctggactggcccccgtctttgcttccctgcctgctgctgccccatttgatcaagagaccatggaagtgtcagagattcagaatccaagattgtctttaagttttcaactgtaaataaagtttttttgtatgcgtaaaagaaaacaaaaagaaacccggaggggaccatatagacgggtggcgaaaaaaaggcgtcacgcaaactggcgaccatggggccaaagagctggcccctgaccaaggcttctctgggacacaaagggtaaatctcggcggacccccataagtgacgccggtatcaattccgataaagcacggtaacctgctagg

SEQ ID NO: 56250 - DNA, 1030 bp, Homo sapiens
agctcgtgccgacttctgcttccgggtcggagccatggcggtggcaaattcaagtcctgttaaccccgtggtgttctttgatgtcagtattggcggtcaggaagttggccgcatgaagatcgagctctttgcagacgttgtgcctaagacggccgagaactttaggcagttctgcaccggagaattcaggaaagatggggttccaataggatacaaaggaagcaccttccacagggtcataaaggatttcatgattcagggtggagattttgttaatggagatggtactggagtcgccagtatttaccgggggccatttgcagatgaaaattttaaacttagacactcagctccaggcctgctttccatggcgaacagtggtccaagtacaaatggctgtcagttctttatcacctgctctaagtgcgattggctggatgggaagcatgtggtgtttggaaaaatcatcgatggacttctagtgatgagaaagattgagaatgttcccacaggccccaacaataagcccaagctacctgtggtgatctcgcagtgtggggagatgtagtccagacaaagactgaatcaggtaagtgtgtctttctcctattaggttaggaatcagacctcagagaaggcagcatggtctagtggaaagaactttagtcttgaagacatgagattgagcccagttcctccgtgtatggccttggagtagtcactttccttctctgagcacatttcctcatctgtcaaatggaaatactgtaatacctatctctcagagtcactgtaaaaataaaaagagaaagggttgtaggagcactttacttttctatcactttgtaatgtacaaagtatcaatgtgaaaactactcaggcagtttgtaacagcactctcagactacagttccattcagtagtccccctagaaagacctggctccaggcctgagtaactctctgctgggaccaggccaggcagccaggagacacacctgtcatgcctctcatcagaactgatactgcaa

SEQ ID NO: 56251 - DNA, 923 bp, Homo sapiens
agctcgtgccgacttctgcttccgggtcggagccatggcggtggcaaattcaagtcctgttaaccccgtggtgttctttgatgtcagtattggcggtcaggaagttggccgcatgaagatcgagctctttgcagacgttgtgcctaagacggccgagaactttaggcagttctgcaccggagaattcaggaaagatggggttccaataggatacaaaggaagcaccttccacagggtcataaaggatttcatgattcagggtggagattttgttaatggagatggtactggagtcgccagtatttaccgggggccatttgcagatgaaaattttaaacttagacactcagctccaggcctgctttccatggcgaacagtggtccaagtacaaatggctgtcagttctttatcacctgctctaagtgcgattggctggatgggaagcatgtggtgtttggaaaaatcatcgatggacttctagtgatgagaaagattgagaatgttcccacaggccccaacaataagcccaagctacctgtggtgatctcgcagtgtggggagatgtagtccagacaaagactgaatcagataatctggactggcccccgtctttgcttccctgcctgctgctgccccatttgatcaagagaccatggaagtgtcagagattcagaatccaagattgtctttaagttttcaactgtaaataaagtttttttgtatgcgtaaaagaaaacaaaaagaaacccggaggggaccatatagacgggtggcgaaaaaaaggcgtcacgcaaactggcgaccatggggccaaagagctggcccctgaccaaggcttctctgggacacaaagggtaaatctcggcggacccccataagtgacgccggtatcaattccgataaagcacggtaacctgctagg

SEQ ID NO: 56252 - DNA, 831 bp, Homo sapiens
agctcgtgccgacttctgcttccgggtcggagccatggcggtggcaaattcaagtcctgttaaccccgtggtgttctttgatgtcagtattggcggtcaggaagttggccgcatgaagatcgagctctttgcagacgttgtgcctaagacggccgagaactttaggcagttctgcaccggagaattcaggaaagatggggttccaataggatacaaaggaagcaccttccacagggtcataaaggatttcatgattcagggtggagattttgttaatggagatggtactggagtcgccagtatttaccgggggccatttgcagatgaaaattttaaacttagacactcagctccaggcctgctttccatggcgaacagtggtccaagtacaaatggctgtcagttctttatcacctgctctaagtgcgattggctggatgggaagcatgtggtgtttggaaaaatcatcgatggacttctagtgatgagaaagattgagaatgttcccacaggccccaacaataagcccaagctacctgtggtgatctcgcagtgtggggagatgtagtccagacaaagactgaatcaggtaagtgtgtctttctcctattaggttaggaatcagacctcagagaaggcagcatggtctagtggaaagaactttagtcttgaagacatgagaaagacgttcagggagcaagggctcagaaatggaagctcattttaattcaggattctcatgatgataacagcttgttgaccaaggaagagaaatgggtcactagtatgtatgagattgactgctccacataaggggtcctctaggtcgcc

SEQ ID NO: 56253 - DNA, 912 bp, Homo sapiens
cgtcgacaagacgacagaaggggggagccatggcggtggcaaattcaagtcctgttaaccccgtggtgttctttgatgtcagtattggcggtcaggaagttggccgcatgaagatcgagctctttgcagacgttgtgcctaagacggccgagaactttaggcagttctgcaccggagaattcaggaaagatggggttccaataggatacaaaggaagcaccttccacagggtcataaaggatttcatgattcagggtggagattttgttaatggagatggtactggagtcgccagtatttaccgggggccatttgcagatgaaaattttaaacttagacactcagctccaggcctgctttccatggcgaacagtggtccaagtacaaatggctgtcagttctttatcacctgctctaagtgcgattggctggatgggaagcatgtggtgtttgaatgttcccacaggccccaacaataagcccaagctacctgtggtgatctcgcagtgtggggagatgtagtccagacaaagactgaatcaggccttcccttcttcttggtggtgttcttgagtaagataatctggactggcccccgtctttgcttccctgcctgctgctgccccatttgatcaagagaccatggaagtgtcagagattcagaatccaagattgtctttaagttttcaactgtaaataaagtttttttgtatgcgtaaaagaaaacaaaaagaaacccggaggggaccatatagacgggtggcgaaaaaaaggcgtcacgcaaactggcgaccatggggccaaagagctggcccctgaccaaggcttctctgggacacaaagggtaaatctcggcggacccccataagtgacgccggtatcaattccgataaagcacggtaacctgctagg

SEQ ID NO: 56254 - DNA, 893 bp, Homo sapiens
agctcgtgccgacttctgcttccgggtcggagccatggcggtggcaaattcaagtcctgttaaccccgtggtgttctttgatgtcagtattggcggtcaggaagttggccgcatgaagatcgagctctttgcagacgttgtgcctaagacggccgagaactttaggcagttctgcaccggagaattcaggaaagatggggttccaataggatacaaaggaagcaccttccacagggtcataaaggatttcatgattcagggtggagattttgttaatggagatggtactggagtcgccagtatttaccgggggccatttgcagatgaaaattttaaacttagacactcagctccaggcctgctttccatggcgaacagtggtccaagtacaaatggctgtcagttctttatcacctgctctaagtgcgattggctggatgggaagcatgtggtgtttggaaaaatcatcgatggacttctagtgatgagaaagattgagaatgttcccacaggccccaacaataagcccaagctacctgtggtgatctcgcagtgtggggagatgtagtccagacaaagactgaatcagcacttcccaggagcctgcccacagctgtggctaacatcaggtgtgaatccattgctgatccctccacctcctcttccaggtctaagcccagacagtgggtgctcccacagcacttggttcatctctccactgtggcatttaatatactgtatcacaaatatgtaagtctggttttctctggactgagaacttgttgaagcaaggatcatgctgactaacatagtgcctggtatgacagagcttaggtcctggcacaccatgcagcttacaaagtacatttatacattttcatacactttgcttg

SEQ ID NO: 56255 - DNA, 691 bp, Homo sapiens
agctcgtgccgacttctgcttccgggtcggagccatggcggtggcaaattcaagtcctgttaaccccgtggtgttctttgatgtcagtattggcggtcaggaagttggccgcatgaagatcgagctctttgcagacgttgtgcctaagacggccgagaactttaggcagttctgcaccggagaattcaggaaagatggggttccaataggatacaaaggaagcaccttccacagggtcataaaggatttcatgattcagggtggagattttgttaatggagatggtactggagtcgccagtatttaccgggggccatttgcagatgaaaattttaaacttagacactcagctccaggcctgctttccatggcgaacagtggtccaagtacaaatggctgtcagttctttatcacctgctctaagtgcgattggctggatgggaagcatgtggtgtttgatcattcatggactctatggagagaaggatggaatggtcccaacaggcccaaccattaggccaagcttactgtggtgacctgcaatggtgggagaatgtattcacacggacggattaaggtaatggggcctttcccattaaggtaaggattcacacttacacccgagtctctccgggtggcccttggaataaccctttgctttcttgagccccatttctcatatgtgcatgtg

SEQ ID NO: 56256 - DNA, 667 bp, Homo sapiens
  misc_feature (643)..(643): n is a, c, g, or t
  misc_feature (646)..(646): n is a, c, g, or t
cggacgcgtgggttctagatcgcgatctagaacccatggcggtggcaaattcaagtcctgttaaccccgtggtgttctttgatgtcagtattggcggtcaggaagttggccgcatgaagatcgagctctttgcagacgttgtgcctaagacggccgagaactttaggcagttctgcaccggagaattcaggaaagatggggttccaataggatacaaaggaagcaccttccacagggtcataaaggatttcatgattcagggtggagattttgttaatgaaaaatcatcgatggacttctagtgatgagaaagattgagaatgttcccacaggccccaacaataagcccaagctacctgtggtgatctcgcagtgtggggagatgtagtccagacaaagactgaatcaggccttcccttcttcttggtggtgttcttgagtaagataatctggactggcccccgtctttgcttccctgcctgctgctgccccatttgatcaagagaccatggaagtgtcagagattcagaatccaagattgtctttaagttttcaactgtaaataaagtttttttgtatgcgtaaaaaaaaaaaaaaaaaaaaaaaaaaaaaaaaaaaaaaaaaaaaaaaaaaaaaaaaaaanagnaaaaaaaaaaaaaaaacaaaa

SEQ ID NO: 56257 - DNA, 1221 bp, Homo sapiens
ggccaatatgaaccacttaaggattttcagcagaatactgtagatgaattttcatgttcagaagatgattctagcagcattgtggaggatgggctggaggccagtgaggagtctactgcagtagtagtccaggcaagagaaaagaggttttacatgaaaatatgggtctggggaacactggagatttggcagcaaatatttatgtgcctgctgggcatgtgacactgtatgttccctgtcctgaaactcagaagctctgccagctgaaaaggccaggagtggagagaatgtctggctccagtccattccagtccagtacaaaggcaaagctgcttgcattgcagccaagtcttacacacgtagaggttccattctcttcagtggaatactatacagccttaacaaaataaagaggtagatctggatgtgttggcaagatttctaaggtaagttaagtgacagtcaagatgtagtaatttatgtaagcatgttactgtttattttgaatgactttcaggaatctctgcagtgatatatagcagactgtggataatacttctgcagagtagagatagcaaagagacttttcagttgccttatttaagcttgaattttctaccttgaacatgtatcttgtaatagaaatacatactgtttatatgtagtgttaactaatcctaaatcctcccagcacttcccaggagcctgcccacagctgtggctaacatcaggtgtgaatccattgctgatccctccacctcctcttccaggtctaagcccagacagtgggtgctcccacagcacttggttcatctctccactgtggcatttaatatactgtatcacaaatatgccttcccttcttcttggtggtgttcttgagtaagataatctggactggcccccgtctttgcttccctgcctgctgctgccccatttgatcaagagaccatggaagtgtcagagattcagaatccaagattgtctttaagttttcaactgtaaataaagtttttttgtatgcgtaaaagaaaacaaaaagaaacccggaggggaccatatagacgggtggcgaaaaaaaggcgtcacgcaaactggcgaccatggggccaaagagctggcccctgaccaaggcttctctgggacacaaagggtaaatctcggcggacccccataagtgacgccggtatcaattccgataaagcacggtaacctgctagg

SEQ ID NO: 56258 - DNA, 1150 bp, Homo sapiens
cggacgcgtgggttctagatcgcgatctagaacccatggcggtggcaaattcaagtcctgttaaccccgtggtgttctttgatgtcagtattggcggtcaggaagttggccgcatgaagatcgagctctttgcagacgttgtgcctaagacggccgagaactttaggcagttctgcaccggagaattcaggtcagtttcagatgtgtttgacttctttgcctgctccagaggggtgttctggggctgcagtgagggtatcggtgaaccacctgctggccttgaatgattgctggtgacagtgatagaaggaaagatggggttccaataggatacaaaggaagcaccttccacagggtcataaaggatttcatgattcagggtggagattttgttaatggagatggtactggagtcgccagtatttaccgggggccatttgcagatgaaaattttaaacttagacactcagctccaggcctgctttccatggcgaacagtggtccaagtacaaatggctgtcagttctttatcacctgctctaagtgcgattggctggatgggaagcatgtggtgtttggaaaaatcatcgatggacttctagtgatgagaaagattgagaatgttcccacaggccccaacaataagcccaagctacctgtggtgatctcgcagtgtggggagatgtagtccagacaaagactgaatcaggtaagtgtgtctttctcctattaggttaggaatcagacctcagagaaggcagcatggtctagtggaaagaactttagtcttgaagacatgagattgagcccagttcctccgtgtatggccttggagtagtcactttccttctctgagcacatttcctcatctgtcaaatggaaatactgtaatacctatctctcagagtcactgtaaaaataaaaagagaaagggttgtaggagcactttacttttctatcactttgtaatgtacaaagtatcaatgtgaaaactactcaggcagtttgtaacagcactctcagactacagttccattcagtagtccccctagaaagacctggctccaggcctgagtaactctctgctgggaccaggccaggcagccaggagacacacctgtcatgcctctcatcagaactgatactgcaa

SEQ ID NO: 56259 - DNA, 669 bp, Homo sapiens
aaaatattgtataagattaccttatacaatagctataagtagtgggtgtggtggcaggcgcctgtattcccagctactcaggaggttgaagcaggagaattgcttgaacccgggaggcggaggtggcagtgagccgagatcgcgccactgtactccagcctgggcaacagaatgggactctgtctcaaaaaaaaaaaagagaatagctgggagcattgtctcatatgggatgtccccttccagttcctctgaggtgcttacctccccatcccacactgacctccatgtctctgccattgtgccttcccttcttcttggtggtgttcttgagtaagataatctggactggcccccgtctttgcttccctgcctgctgctgccccatttgatcaagagaccatggaagtgtcagagattcagaatccaagattgtctttaagttttcaactgtaaataaagtttttttgtatgcgtaaaagaaaacaaaaagaaacccggaggggaccatatagacgggtggcgaaaaaaaggcgtcacgcaaactggcgaccatggggccaaagagctggcccctgaccaaggcttctctgggacacaaagggtaaatctcggcggacccccataagtgacgccggtatcaattccgataaagcacggtaacctgctagg

SEQ ID NO: 56260 - DNA, 556 bp, Homo sapiens
ggtgaatgccttgcatcttccagcctacatggactcatttcttacccgtaattaccactgcctgctctgcgctgggcagcatgctagctgcagagagggggacaaagaattgaaagatgtctcctttcaggagctcatggaaagtaagacattcccagaggtgatcactagtaatatgagtgacattgccttcccttcttcttggtggtgttcttgagtaagataatctggactggcccccgtctttgcttccctgcctgctgctgccccatttgatcaagagaccatggaagtgtcagagattcagaatccaagattgtctttaagttttcaactgtaaataaagtttttttgtatgcgtaaaagaaaacaaaaagaaacccggaggggaccatatagacgggtggcgaaaaaaaggcgtcacgcaaactggcgaccatggggccaaagagctggcccctgaccaaggcttctctgggacacaaagggtaaatctcggcggacccccataagtgacgccggtatcaattccgataaagcacggtaacctgctagg

SEQ ID NO: 56261 - DNA, 408 bp, Homo sapiens
aggggcgagaagttgagtcttaggaaaagggctgggcgagccttcccttcttcttggtggtgttcttgagtaagataatctggactggcccccgtctttgcttccctgcctgctgctgccccatttgatcaagagaccatggaagtgtcagagattcagaatccaagattgtctttaagttttcaactgtaaataaagtttttttgtatgcgtaaaagaaaacaaaaagaaacccggaggggaccatatagacgggtggcgaaaaaaaggcgtcacgcaaactggcgaccatggggccaaagagctggcccctgaccaaggcttctctgggacacaaagggtaaatctcggcggacccccataagtgacgccggtatcaattccgataaagcacggtaacctgctagg

SEQ ID NO: 56262 - DNA, 501 bp, Homo sapiens
  misc_feature (477)..(477): n is a, c, g, or t
  misc_feature (480)..(480): n is a, c, g, or t
gtacgatgccagtacccattgtccactggagcaaggtgtggcatgtttgaggaatggcaagaggagggggacaatagtatctgggtgtacttactctgttctcttagtatagcttgctcgacttcaaggccataaacccagagtgtggacttccctttctctttacctctgggaccgaaacctgcaaggaagaaggattgctttttgttctggacctccacagagagccatcagagtctgacaaaaaggacaaaggctttggagccaagtagaccaggaagtctcatcactgtctaattctgtgacttcagtcaagccatgaaaccccttgggaccctactcctttgcataattagataatatataatgcatggagttgtgaagggcaaataaatgagatagtatgcttgaccataaaaaaaaaaaaaaaaaaaaaaaaaaaaaaaaaaaaaaaaaaaaaaaaaaaaaaaaaaaaanagnaaaaaaaaaaaaaaaacaaaa

SEQ ID NO: 56263 - DNA, 821 bp, Homo sapiens
cggacgcgtgggttctagatcgcgatctagaacccatggcggtggcaaattcaagtcctgttaaccccgtggtgttctttgatgtcagtattggcggtcaggtgagatccaggaggctgcccacacctgcgccgaagggaaactgctcggggctaggcaggcagaactcacccagagagagcggactcgggaagccagccagaaagtgaaattgcacccgaacctaccgacctgccgggcggggggaaaggaggaggaggagtctccccaatcctagcgccccgcttctggaggaactgggcggttagactagggaggcggaggaagttggccgcatgaagatcgagctctttgcagacgttgtgcctaagacggccgagaactttaggcagttctgcaccggagaattcaggtcagtttcagatgtgtttgacttctttgcctgctccagaggggtgttctggggctgcagtgagggtatcggtgaaccacctgctggccttgaatgattgctggtgacagtgatagaaggtaatgccccaagggtctgtccctagtttatttgccttctttatgtctgtcaaccatctttaggagagtccttttggctccagtgcatggtaaactggaaaggccttgtgctacctgctgtcactccaagtctctttcttttcggttataggaaagatggggttccaataggatacaaaggaagcaccttccacagggtcataaaggatttcatgattcagggtggagattttgttaatgtaagtactattcctttcctatcaaagacccgtagttttagtttttgttgt

SEQ ID NO: 56264 - DNA, 83 bp, Homo sapiens
acgttaatctaatacaataataacaacatctatgtttttctaaaccataaaatcttctcagtattctttgctctctgtttcag

SEQ ID NO: 56265 - DNA, 3724 bp, Homo sapiens
  misc_feature (2149)..(2149): n is a, c, g, or t
tgacccacctggagctggaaagcccactccacgatgcagacagctctctaccttcctgtggtggcccctgggcctggcattcccaggggacctgctggcaggaggaggaacgagggctttataactttggttataacttttggtctttgttctgattctcagtgtatcttcctccgctggttactaaagtgttcactgataagtatgttaactaatgatcgagacagtaacgaaaaatgctggcactgggattctctcccttcccagacctacctgctggtatttcctgggaccttgaccctgccccaccccctcagccgtgcccatctctgcagactcccagatcacatctgggctgatgggctggcccaggcctgtccctcccttcttgcccccagttctgggctccacctctgccctcttctgtgctgtcccattagggaagtcccttggcctgtctatttttcagttcccaattagaagtctagaacctgacaactccaggagttcttgggaggaccagtacaacgttctaaaaagcctgagacgccttacaaaaagcaagtatcatttggagtacaattcctaatctgttcatgtcctgctgaaggagggaaggagggagaggaaggcagggagttgatgcattcatataacaaacactgctgggtgtctgggtgcccagagcaaagctgggccaggccttcaccagatcaagccccacagaccagctggtgcccatgcgctgctggtggtttggggcctcctgttcctcctctagctgggagtaatcacagttgtctgacctgattccaacttaaggtccccactctcttgccccatcaagaatccctgattatttacttttccctagaaaatctggggaaattcccacattttaattttgcagcagaatcttttgagcagcttttggaaccacagtgtttgccaagataagagtttgagaatccagcagccctgggtgcctggctgaatttggtttcctgcatgtgctgggtgtgggcggggccacgcacaggccctgcatgggaggactcctcaccccaggcctgtggtgctgcagacaaccgtctcctgtctacactgcgacccagccacaagctgtggggtctcagtggcctgggggaaagcagctccactctcctgcccttcctggctgcccctttgggttccagccggggtcacgtccagcctccactgggaaaccagtgactgaggcctggacccagaggtggaccaggcatctcctggccacctgtgacctgggaagaagcgagtcagtggcccgttcaacctgctctgcagctgctataaatagcctccctgtttccaagaggaggtaaggaagtgtttatcttctaaaaaccagacgtttcctgatgctctgagcgttactcagtgctacagaggagatgcacacgtccccactatgttctgtcttgagaaggggacaagagaaagaggaaaaggagccactgtactttattttgcacctacagcgtgccttggcactgggctagagaggcaccttcctgcgtgaatcctgtgcggcaggtcttattgccataataagtcacatcaaagacactgctggtcataaaacactgttttacataccatagggaaaaacgctgccaatcttaactaagatgctacaactgtacagttccttccaatcagagatgttcacgtgtgaaaaaaaaactgtgctacttacaatctatgaaagctggtgttatcccacttggcaggtaaggaaactgaggtcctgtgagtgaagtgacctcatgatcacacaacaggagatggcagggctgggattcaaacccgggagtgtctgctgccacatcccacactcccactgcctggctccaagtcccaggaagctcgagactgtgagttttctcccttgaaactcacctggagagagtccgggcacctgtgcctatgtggagggttccagccccagccaggcccctccgctgcccacaccctgggaggagaagcggcctcccttccaggctcatctgctcactgcccgcattctcctggcagagctgaggtctgagagatctggactccaacccaagggccctctcttgttattcaggggtgtccacagttaggnagggacctggggccttgtcccaccaccttcctaggccccgtgatcaccaccccctcaagcggggccccagccccctgagcaccccctcacgtgacccagccctcggctgttccaggctcactgcccatggtgtgctcttctgggccacagcagccagggctccagggcgaggacaggggacacctgaaaacaccccgttgttcatggtcttgtgcccattcattcggagactcctgaaaaactgggctgtttgcaaagcaaatccagctccttgtcctagcaggttctcagaacggggagtcccctgggatggagctgctcccctcacggcagcaccacgtttccagtccctcgatgccactaatcagcatggactgtgttcaggacacagggtgaacttttctctgacccccggtgctggtcctgtgccagcacgtagtagttactcagtagaggtttgctgagtaaaccagaaatcagattatgagtgttcaggggtttgataaaacagcaccacataacgcacacaaagatactccagaaacatttgctgagtacctagtacgtgtgaggtgctgtgaggatagagcagagaggactgtgccccagctgtgatgctggcagaggtgacactaagagggaaatgagatatttggggcagaatccactgggctctcttggccatccgctgccttgggtctgttgaggtgggtgcccaaaggctgccttcttgaccagaacctgctgtgcgcttcacagaacctcctcttcattggaaatgctgggcacattgcagtcagtgagctgctgccaaaacggcgttaagtagaacccccagaggccccgccggttggtgatcaccctcaggtcctgccagggagacacagtgaggaggttggctaattgctgctttcaggccctggaaatcagtcgccaaggcccaggagaaccccggtgagtccgtccagttgaggcagaggcaataacctcccattgctcggccctgcgcctgccccagtcctggcagggggcaccggctcaggaacatgcggcctcctggcatttctcggtatttaactgtctcgctgtcttatccgagtccctaatgaaacgacttgtgtgacaatctgtctgtgccttacgaaagtgtctgtgcactttttatcctttttaaaagcaacttttaaaagtggatggggaggggggctagcatacgtggtagggttctagaaatctgtggtcatcgctgaaatcctttttgcatcatgttttttgatgttggagtgatgaagtgtacatcccccaccccacacaccactacctgtgtacagaccttttaaaacatgtcttctttttctgattcaatactgtgacctctccgatacagtctaatccttggggatctgtaatcaaggttttaaaacctgggaagtgggttgggaagggtttgcactggtcttgagtgttgtgcttttctgtgttgtgtgttttgatttttgtctttttatctgttttatattgacataattttcctgtttaaaaaaaatacaactttggcttgttaaaaaaaaaaaa

SEQ ID NO: 56266 - DNA, 3150 bp, Homo sapiens
  misc_feature (2149)..(2149): n is a, c, g, or t
tgacccacctggagctggaaagcccactccacgatgcagacagctctctaccttcctgtggtggcccctgggcctggcattcccaggggacctgctggcaggaggaggaacgagggctttataactttggttataacttttggtctttgttctgattctcagtgtatcttcctccgctggttactaaagtgttcactgataagtatgttaactaatgatcgagacagtaacgaaaaatgctggcactgggattctctcccttcccagacctacctgctggtatttcctgggaccttgaccctgccccaccccctcagccgtgcccatctctgcagactcccagatcacatctgggctgatgggctggcccaggcctgtccctcccttcttgcccccagttctgggctccacctctgccctcttctgtgctgtcccattagggaagtcccttggcctgtctatttttcagttcccaattagaagtctagaacctgacaactccaggagttcttgggaggaccagtacaacgttctaaaaagcctgagacgccttacaaaaagcaagtatcatttggagtacaattcctaatctgttcatgtcctgctgaaggagggaaggagggagaggaaggcagggagttgatgcattcatataacaaacactgctgggtgtctgggtgcccagagcaaagctgggccaggccttcaccagatcaagccccacagaccagctggtgcccatgcgctgctggtggtttggggcctcctgttcctcctctagctgggagtaatcacagttgtctgacctgattccaacttaaggtccccactctcttgccccatcaagaatccctgattatttacttttccctagaaaatctggggaaattcccacattttaattttgcagcagaatcttttgagcagcttttggaaccacagtgtttgccaagataagagtttgagaatccagcagccctgggtgcctggctgaatttggtttcctgcatgtgctgggtgtgggcggggccacgcacaggccctgcatgggaggactcctcaccccaggcctgtggtgctgcagacaaccgtctcctgtctacactgcgacccagccacaagctgtggggtctcagtggcctgggggaaagcagctccactctcctgcccttcctggctgcccctttgggttccagccggggtcacgtccagcctccactgggaaaccagtgactgaggcctggacccagaggtggaccaggcatctcctggccacctgtgacctgggaagaagcgagtcagtggcccgttcaacctgctctgcagctgctataaatagcctccctgtttccaagaggaggtaaggaagtgtttatcttctaaaaaccagacgtttcctgatgctctgagcgttactcagtgctacagaggagatgcacacgtccccactatgttctgtcttgagaaggggacaagagaaagaggaaaaggagccactgtactttattttgcacctacagcgtgccttggcactgggctagagaggcaccttcctgcgtgaatcctgtgcggcaggtcttattgccataataagtcacatcaaagacactgctggtcataaaacactgttttacataccatagggaaaaacgctgccaatcttaactaagatgctacaactgtacagttccttccaatcagagatgttcacgtgtgaaaaaaaaactgtgctacttacaatctatgaaagctggtgttatcccacttggcaggtaaggaaactgaggtcctgtgagtgaagtgacctcatgatcacacaacaggagatggcagggctgggattcaaacccgggagtgtctgctgccacatcccacactcccactgcctggctccaagtcccaggaagctcgagactgtgagttttctcccttgaaactcacctggagagagtccgggcacctgtgcctatgtggagggttccagccccagccaggcccctccgctgcccacaccctgggaggagaagcggcctcccttccaggctcatctgctcactgcccgcattctcctggcagagctgaggtctgagagatctggactccaacccaagggccctctcttgttattcaggggtgtccacagttaggnagggacctggggccttgtcccaccaccttcctaggccccgtgatcaccaccccctcaagcggggccccagccccctgagcaccccctcacgtgacccagccctcggctgttccaggctcactgcccatggtgtgctcttctgggccacagcagccagggctccagggcgaggacaggggacacctgaaaacaccccgttgttcatggtcttgtgcccattcattcggagactcctgaaaaactgggctgtttgcaaagcaaatccagccccgccggttggtgatcaccctcaggtcctgccagggagacacagtgaggaggttggctaattgctgctttcaggccctggaaatcagtcgccaaggcccaggagaaccccggtgagtccgtccagttgaggcagaggcaataacctcccattgctcggccctgcgcctgccccagtcctggcagggggcaccggctcaggaacatgcggcctcctggcatttctcggtatttaactgtctcgctgtcttatccgagtccctaatgaaacgacttgtgtgacaatctgtctgtgccttacgaaagtgtctgtgcactttttatcctttttaaaagcaacttttaaaagtggatggggaggggggctagcatacgtggtagggttctagaaatctgtggtcatcgctgaaatcctttttgcatcatgttttttgatgttggagtgatgaagtgtacatcccccaccccacacaccactacctgtgtacagaccttttaaaacatgtcttctttttctgattcaatactgtgacctctccgatacagtctaatccttggggatctgtaatcaaggttttaaaacctgggaagtgggttgggaagggtttgcactggtcttgagtgttgtgcttttctgtgttgtgtgttttgatttttgtctttttatctgttttatattgacataattttcctgtttaaaaaaaatacaactttggcttgttaaaaaaaaaaaa

SEQ ID NO: 56267 - DNA, 4289 bp, Homo sapiens
  misc_feature (2149)..(2149): n is a, c, g, or t
tgacccacctggagctggaaagcccactccacgatgcagacagctctctaccttcctgtggtggcccctgggcctggcattcccaggggacctgctggcaggaggaggaacgagggctttataactttggttataacttttggtctttgttctgattctcagtgtatcttcctccgctggttactaaagtgttcactgataagtatgttaactaatgatcgagacagtaacgaaaaatgctggcactgggattctctcccttcccagacctacctgctggtatttcctgggaccttgaccctgccccaccccctcagccgtgcccatctctgcagactcccagatcacatctgggctgatgggctggcccaggcctgtccctcccttcttgcccccagttctgggctccacctctgccctcttctgtgctgtcccattagggaagtcccttggcctgtctatttttcagttcccaattagaagtctagaacctgacaactccaggagttcttgggaggaccagtacaacgttctaaaaagcctgagacgccttacaaaaagcaagtatcatttggagtacaattcctaatctgttcatgtcctgctgaaggagggaaggagggagaggaaggcagggagttgatgcattcatataacaaacactgctgggtgtctgggtgcccagagcaaagctgggccaggccttcaccagatcaagccccacagaccagctggtgcccatgcgctgctggtggtttggggcctcctgttcctcctctagctgggagtaatcacagttgtctgacctgattccaacttaaggtccccactctcttgccccatcaagaatccctgattatttacttttccctagaaaatctggggaaattcccacattttaattttgcagcagaatcttttgagcagcttttggaaccacagtgtttgccaagataagagtttgagaatccagcagccctgggtgcctggctgaatttggtttcctgcatgtgctgggtgtgggcggggccacgcacaggccctgcatgggaggactcctcaccccaggcctgtggtgctgcagacaaccgtctcctgtctacactgcgacccagccacaagctgtggggtctcagtggcctgggggaaagcagctccactctcctgcccttcctggctgcccctttgggttccagccggggtcacgtccagcctccactgggaaaccagtgactgaggcctggacccagaggtggaccaggcatctcctggccacctgtgacctgggaagaagcgagtcagtggcccgttcaacctgctctgcagctgctataaatagcctccctgtttccaagaggaggtaaggaagtgtttatcttctaaaaaccagacgtttcctgatgctctgagcgttactcagtgctacagaggagatgcacacgtccccactatgttctgtcttgagaaggggacaagagaaagaggaaaaggagccactgtactttattttgcacctacagcgtgccttggcactgggctagagaggcaccttcctgcgtgaatcctgtgcggcaggtcttattgccataataagtcacatcaaagacactgctggtcataaaacactgttttacataccatagggaaaaacgctgccaatcttaactaagatgctacaactgtacagttccttccaatcagagatgttcacgtgtgaaaaaaaaactgtgctacttacaatctatgaaagctggtgttatcccacttggcaggtaaggaaactgaggtcctgtgagtgaagtgacctcatgatcacacaacaggagatggcagggctgggattcaaacccgggagtgtctgctgccacatcccacactcccactgcctggctccaagtcccaggaagctcgagactgtgagttttctcccttgaaactcacctggagagagtccgggcacctgtgcctatgtggagggttccagccccagccaggcccctccgctgcccacaccctgggaggagaagcggcctcccttccaggctcatctgctcactgcccgcattctcctggcagagctgaggtctgagagatctggactccaacccaagggccctctcttgttattcaggggtgtccacagttaggnagggacctggggccttgtcccaccaccttcctaggccccgtgatcaccaccccctcaagcggggccccagccccctgagcaccccctcacgtgacccagccctcggctgttccaggctcactgcccatggtgtgctcttctgggccacagcagccagggctccagggcgaggacaggggacacctgaaaacaccccgttgttcatggtcttgtgcccattcattcggagactcctgaaaaactgggctgtttgcaaagcaaatccagctccttgtcctagcaggttctcagaacggggagtcccctgggatggagctgctcccctcacggcagcaccacgtttccagtccctcgatgccactaatcagcatggactgtgttcaggacacagggtgaacttttctctgacccccggtgctggtcctgtgccagcacgtagtagttactcagtagaggtttgctgagtaaaccagaaatcagattatgagtgttcaggggtttgataaaacagcaccacataacgcacacaaagatactccagaaacatttgctgagtacctagtacgtgtgaggtgctgtgaggatagagcagagaggactgtgccccagctgtgatgctggcagaggtgacactaagagggaaatgagatatttggggcagaatccactgggctctcttggccatccgctgccttgggtctgttgaggtgggtgcccaaaggctgccttcttgaccagaacctgctgtgcgcttcacagaacctcctcttcattggaaatgctgggcacattgcagtcagtgagctgctgccaaaacggcgttaagtagaacccccagaggccccgccggttggtgatcaccctcaggtcctgccagggagacacagtgaggaggttggctaattgctgctttcaggccctggaaatcagtcgccaaggcccaggagaaccccggtgagtccgtccagttgaggcagaggcaataacctcccattgctcggccctgcgcctgccccagtcctggcagggggcaccggctcaggaacatgcggcctcctggcatttctcggtatttaactgtctcgctgtcttatccgagtccctaatgaaacgacttgtgtgacaatctgtctgtgccttacgaaagtgtctgtgcactttttatcctttttaaaagcaacttttaaaagtggatggggaggggggctagcatacgtggtagggttctagaaatctgtggtcatcgctgaaatcctttttgcatcatgttttttgatgttggagtgatgaagtgtacatcccccaccccacacaccactacctgtgtacagaccttttaaaacatgtcttctttttctgattcaatactgtgacctctccgatacagtctaatccttggggatctgtaatcaaggttttaaaacctgggaagtgggttgggaagggtttgcactggtcttgagtgttgtgcttttctgtgttgtgtgttttgatttttgtctttttatctgttttatattgacataattttcctgtttaaaaaaaatacaactttggcttgttaaaaaaaaaaaaaaaaaaaaaaaaaaaaaaaaaaaaaaaaaaaaaaaaaaaaaaaaaaaaaaaaaaaaaaaaaaaaaaaaaaaaaaaaaaaaaaaaaagaagacgaggccaaccaaacaacaccactgccagctgagcacagccacacactgtcgcatcactaaccccctcactagtcctaatacagcaggcgccgcaccacaataaggcgaccaacaatcacaccgagcggccgcgcgcgcccccgcaacacacacgcctggccgcgaccaacacacacgcaccgcgacatcacccacggcgcaccacccacagccccccaggaccagacgcaacccacgcatccccccgcacacaccacccgcagcacacgcacaccaccagccacgcgactcacccacacctgaggaagaccgacaacgggcacaacaaccgcacccccacgcatccgagcgccgggcaccaccacgcccctcaccaccagccctccaccaccgacacacacacacagcgacgccgacaacatcacccaccccaacaccacgccaacacacccccacaaccccaccgcagacca

SEQ ID NO: 56268 - DNA, 3410 bp, Homo sapiens
  misc_feature (2149)..(2149): n is a, c, g, or t
tgacccacctggagctggaaagcccactccacgatgcagacagctctctaccttcctgtggtggcccctgggcctggcattcccaggggacctgctggcaggaggaggaacgagggctttataactttggttataacttttggtctttgttctgattctcagtgtatcttcctccgctggttactaaagtgttcactgataagtatgttaactaatgatcgagacagtaacgaaaaatgctggcactgggattctctcccttcccagacctacctgctggtatttcctgggaccttgaccctgccccaccccctcagccgtgcccatctctgcagactcccagatcacatctgggctgatgggctggcccaggcctgtccctcccttcttgcccccagttctgggctccacctctgccctcttctgtgctgtcccattagggaagtcccttggcctgtctatttttcagttcccaattagaagtctagaacctgacaactccaggagttcttgggaggaccagtacaacgttctaaaaagcctgagacgccttacaaaaagcaagtatcatttggagtacaattcctaatctgttcatgtcctgctgaaggagggaaggagggagaggaaggcagggagttgatgcattcatataacaaacactgctgggtgtctgggtgcccagagcaaagctgggccaggccttcaccagatcaagccccacagaccagctggtgcccatgcgctgctggtggtttggggcctcctgttcctcctctagctgggagtaatcacagttgtctgacctgattccaacttaaggtccccactctcttgccccatcaagaatccctgattatttacttttccctagaaaatctggggaaattcccacattttaattttgcagcagaatcttttgagcagcttttggaaccacagtgtttgccaagataagagtttgagaatccagcagccctgggtgcctggctgaatttggtttcctgcatgtgctgggtgtgggcggggccacgcacaggccctgcatgggaggactcctcaccccaggcctgtggtgctgcagacaaccgtctcctgtctacactgcgacccagccacaagctgtggggtctcagtggcctgggggaaagcagctccactctcctgcccttcctggctgcccctttgggttccagccggggtcacgtccagcctccactgggaaaccagtgactgaggcctggacccagaggtggaccaggcatctcctggccacctgtgacctgggaagaagcgagtcagtggcccgttcaacctgctctgcagctgctataaatagcctccctgtttccaagaggaggtaaggaagtgtttatcttctaaaaaccagacgtttcctgatgctctgagcgttactcagtgctacagaggagatgcacacgtccccactatgttctgtcttgagaaggggacaagagaaagaggaaaaggagccactgtactttattttgcacctacagcgtgccttggcactgggctagagaggcaccttcctgcgtgaatcctgtgcggcaggtcttattgccataataagtcacatcaaagacactgctggtcataaaacactgttttacataccatagggaaaaacgctgccaatcttaactaagatgctacaactgtacagttccttccaatcagagatgttcacgtgtgaaaaaaaaactgtgctacttacaatctatgaaagctggtgttatcccacttggcaggtaaggaaactgaggtcctgtgagtgaagtgacctcatgatcacacaacaggagatggcagggctgggattcaaacccgggagtgtctgctgccacatcccacactcccactgcctggctccaagtcccaggaagctcgagactgtgagttttctcccttgaaactcacctggagagagtccgggcacctgtgcctatgtggagggttccagccccagccaggcccctccgctgcccacaccctgggaggagaagcggcctcccttccaggctcatctgctcactgcccgcattctcctggcagagctgaggtctgagagatctggactccaacccaagggccctctcttgttattcaggggtgtccacagttaggnagggacctggggccttgtcccaccaccttcctaggccccgtgatcaccaccccctcaagcggggccccagccccctgagcaccccctcacgtgacccagccctcggctgttccaggctcactgcccatggtgtgctcttctgggccacagcagccagggctccagggcgaggacaggggacacctgaaaacaccccgttgttcatggtcttgtgcccattcattcggagactcctgaaaaactgggctgtttgcaaagcaaatccagctccttgtcctagcaggttctcagaacggggagtcccctgggatggagctgctcccctcacggcagcaccacgtttccagtccctcgatgccactaatcagcatggactgtgttcaggacacagggtgaacttttctctgacccccggtgctggtcctgtgccagcacgtagtagttactcagtagaggtttgctgagtaaaccagaaatcagattatgagtgttcaggggtttgataaaacagcaccacataacgcacacaaagatactccagaaacatttgctgagtacctagtacgtgtgaggtgctgtgaggatagagcagagaggactgtgccccagctgtgatgctggcagaggtgacactaagagggaaatgagatatttggggcagaatccactgggctctcttggccatccgctgccttgggtctgttgaggtgggtgcccaaaggctgccttcttgaccagaacctgctgtgcgcttcacagaacctcctcttcattggaaatgctgggcacattgcagtcagtgagctgctgccaaaacggcgttaagtagaacccccagaggccccgccggttggtgatcaccctcaggtcctgccagggagacacagtgaggaggttggctaattgctgctttcaggccctggaaatcagtcgccaaggcccaggagaaccccggtgagtccgtccagttgaggcagaggcaataacctcccattgctcggccctgcgcctgccccagtcctggcagggggcaccggctcaggaacatgcggcctcctggcatttctcggtatttaactgtctcgctgtcttatccgagtccctaatgaaacgacttgtgtgacaatctgtctgtgccttacgaaagtgtctgtgcactttttatcctttttaaaagcaacttttaaaagtggatggggaggggggttcttctctctacaattcgatcttaataaattctttagaatcgtacgtataactc

SEQ ID NO: 56269 - DNA, 2814 bp, Homo sapiens
tgacccacctggagctggaaagcccactccacgatgcagacagctctctaccttcctgtggtggcccctgggcctggcattcccaggggacctgctggcaggaggaggaacgagggctttataactttggttataacttttggtctttgttctgattctcagtgtatcttcctccgctggttactaaagtgttcactgataagtatgttaactaatgatcgagacagtaacgaaaaatgctggcactgggattctctcccttcccagacctacctgctggtatttcctgggaccttgaccctgccccaccccctcagccgtgcccatctctgcagactcccagatcacatctgggctgatgggctggcccaggcctgtccctcccttcttgcccccagttctgggctccacctctgccctcttctgtgctgtcccattagggaagtcccttggcctgtctatttttcagttcccaattagaagtctagaacctgacaactccaggagttcttgggaggaccagtacaacgttctaaaaagcctgagacgccttacaaaaagcaagtatcatttggagtacaattcctaatctgttcatgtcctgctgaaggagggaaggagggagaggaaggcagggagttgatgcattcatataacaaacactgctgggtgtctgggtgcccagagcaaagctgggccaggccttcaccagatcaagccccacagaccagctggtgcccatgcgctgctggtggtttggggcctcctgttcctcctctagctgggagtaatcacagttgtctgacctgattccaacttaaggtccccactctcttgccccatcaagaatccctgattatttacttttccctagaaaatctggggaaattcccacattttaattttgcagcagaatcttttgagcagcttttggaaccacagtgtttgccaagataagagtttgagaatccagcagccctgggtgcctggctgaatttggtttcctgcatgtgctgggtgtgggcggggccacgcacaggccctgcatgggaggactcctcaccccaggcctgtggtgctgcagacaaccgtctcctgtctacactgcgacccagccacaagctgtggggtctcagtggcctgggggaaagcagctccactctcctgcccttcctggctgcccctttgggttccagccggggtcacgtccagcctccactgggaaaccagtgactgaggcctggacccagaggtggaccaggcatctcctggccacctgtgacctgggaagaagcgagtcagtggcccgttcaacctgctctgcagctgctataaatagcctccctgtttccaagaggaggtaaggaagtgtttatcttctaaaaaccagacgtttcctgatgctctgagcgttactcagtgctacagaggagatgcacacgtccccactatgttctgtcttgagaaggggacaagagaaagaggaaaaggagccactgtactttattttgcacctacagcgtgccttggcactgggctagagaggcaccttcctgcgtgaatcctgggcagcaccacgtttccagtccctcgatgccactaatcagcatggactgtgttcaggacacagggtgaacttttctctgacccccggtgctggtcctgtgccagcacgtagtagttactcagtagaggtttgctgagtaaaccagaaatcagattatgagtgttcaggggtttgataaaacagcaccacataacgcacacaaagatactccagaaacatttgctgagtacctagtacgtgtgaggtgctgtgaggatagagcagagaggactgtgccccagctgtgatgctggcagaggtgacactaagagggaaatgagatatttggggcagaatccactgggctctcttggccatccgctgccttgggtctgttgaggtgggtgcccaaaggctgccttcttgaccagaacctgctgtgcgcttcacagaacctcctcttcattggaaatgctgggcacattgcagtcagtgagctgctgccaaaacggcgttaagtagaacccccagaggccccgccggttggtgatcaccctcaggtcctgccagggagacacagtgaggaggttggctaattgctgctttcaggccctggaaatcagtcgccaaggcccaggagaaccccggtgagtccgtccagttgaggcagaggcaataacctcccattgctcggccctgcgcctgccccagtcctggcagggggcaccggctcaggaacatgcggcctcctggcatttctcggtatttaactgtctcgctgtcttatccgagtccctaatgaaacgacttgtgtgacaatctgtctgtgccttacgaaagtgtctgtgcactttttatcctttttaaaagcaacttttaaaagtggatggggaggggggctagcatacgtggtagggttctagaaatctgtggtcatcgctgaaatcctttttgcatcatgttttttgatgttggagtgatgaagtgtacatcccccaccccacacaccactacctgtgtacagaccttttaaaacatgtcttctttttctgattcaatactgtgacctctccgatacagtctaatccttggggatctgtaatcaaggttttaaaacctgggaagtgggttgggaagggtttgcactggtcttgagtgttgtgcttttctgtgttgtgtgttttgatttttgtctttttatctgttttatattgacataattttcctgtttaaaaaaaatacaactttggcttgttaaaaaaaaaaaa

SEQ ID NO: 56270 - DNA, 1768 bp, Homo sapiens
cgaattccgcaccacgccccatcctggggtgcttcaaaccaacggattctggcttacccggggacccagccacaagctgtggggtctcagtggcctgggggaaagcagctccactctcctgcccttcctggctgcccctttgggttccagccggggtcacgtccagcctccactgggaaaccagtgactgaggcctggacccagaggtggaccaggcatctcctggccacctgtgacctgggaagaagcgagtcagtggcccgttcaacctgctctgcagctgctataaatagcctccctgtttccaagaggaggtaaggaagtgtttatcttctaaaaaccagacgtttcctgatgctctgagcgttactcagtgctacagaggagatgcacacgtccccactatgttctgtcttgagaaggggacaagagaaagaggaaaaggagccactgtactttattttgcacctacagcgtgccttggcactgggctagagaggcaccttcctgcgtgaatcctgggcagcaccacgtttccagtccctcgatgccactaatcagcatggactgtgttcaggacacagggtgaacttttctctgacccccggtgctggtcctgtgccagcacgtagtagttactcagtagaggtttgctgagtaaaccagaaatcagattatgagtgttcaggggtttgataaaacagcaccacataacgcacacaaagatactccagaaacatttgctgagtacctagtacgtgtgaggtgctgtgaggatagagcagagaggactgtgccccagctgtgatgctggcagaggtgacactaagagggaaatgagatatttggggcagaatccactgggctctcttggccatccgctgccttgggtctgttgaggtgggtgcccaaaggctgccttcttgaccagaacctgctgtgcgcttcacagaacctcctcttcattggaaatgctgggcacattgcagtcagtgagctgctgccaaaacggcgttaagtagaacccccagaggccccgccggttggtgatcaccctcaggtcctgccagggagacacagtgaggaggttggctaattgctgctttcaggccctggaaatcagtcgccaaggcccaggagaaccccggtgagtccgtccagttgaggcagaggcaataacctcccattgctcggccctgcgcctgccccagtcctggcagggggcaccggctcaggaacatgcggcctcctggcatttctcggtatttaactgtctcgctgtcttatccgagtccctaatgaaacgacttgtgtgacaatctgtctgtgccttacgaaagtgtctgtgcactttttatcctttttaaaagcaacttttaaaagtggatggggaggggggctagcatacgtggtagggttctagaaatctgtggtcatcgctgaaatcctttttgcatcatgttttttgatgttggagtgatgaagtgtacatcccccaccccacacaccactacctgtgtacagaccttttaaaacatgtcttctttttctgattcaatactgtgacctctccgatacagtctaatccttggggatctgtaatcaaggttttaaaacctgggaagtgggttgggaagggtttgcactggtcttgagtgttgtgcttttctgtgttgtgtgttttgatttttgtctttttatctgttttatattgacataattttcctgtttaaaaaaaatacaactttggcttgttaaaaaaaaaaaa

SEQ ID NO: 56271 - DNA, 3663 bp, Homo sapiens
  misc_feature (2149)..(2149): n is a, c, g, or t
tgacccacctggagctggaaagcccactccacgatgcagacagctctctaccttcctgtggtggcccctgggcctggcattcccaggggacctgctggcaggaggaggaacgagggctttataactttggttataacttttggtctttgttctgattctcagtgtatcttcctccgctggttactaaagtgttcactgataagtatgttaactaatgatcgagacagtaacgaaaaatgctggcactgggattctctcccttcccagacctacctgctggtatttcctgggaccttgaccctgccccaccccctcagccgtgcccatctctgcagactcccagatcacatctgggctgatgggctggcccaggcctgtccctcccttcttgcccccagttctgggctccacctctgccctcttctgtgctgtcccattagggaagtcccttggcctgtctatttttcagttcccaattagaagtctagaacctgacaactccaggagttcttgggaggaccagtacaacgttctaaaaagcctgagacgccttacaaaaagcaagtatcatttggagtacaattcctaatctgttcatgtcctgctgaaggagggaaggagggagaggaaggcagggagttgatgcattcatataacaaacactgctgggtgtctgggtgcccagagcaaagctgggccaggccttcaccagatcaagccccacagaccagctggtgcccatgcgctgctggtggtttggggcctcctgttcctcctctagctgggagtaatcacagttgtctgacctgattccaacttaaggtccccactctcttgccccatcaagaatccctgattatttacttttccctagaaaatctggggaaattcccacattttaattttgcagcagaatcttttgagcagcttttggaaccacagtgtttgccaagataagagtttgagaatccagcagccctgggtgcctggctgaatttggtttcctgcatgtgctgggtgtgggcggggccacgcacaggccctgcatgggaggactcctcaccccaggcctgtggtgctgcagacaaccgtctcctgtctacactgcgacccagccacaagctgtggggtctcagtggcctgggggaaagcagctccactctcctgcccttcctggctgcccctttgggttccagccggggtcacgtccagcctccactgggaaaccagtgactgaggcctggacccagaggtggaccaggcatctcctggccacctgtgacctgggaagaagcgagtcagtggcccgttcaacctgctctgcagctgctataaatagcctccctgtttccaagaggaggtaaggaagtgtttatcttctaaaaaccagacgtttcctgatgctctgagcgttactcagtgctacagaggagatgcacacgtccccactatgttctgtcttgagaaggggacaagagaaagaggaaaaggagccactgtactttattttgcacctacagcgtgccttggcactgggctagagaggcaccttcctgcgtgaatcctgtgcggcaggtcttattgccataataagtcacatcaaagacactgctggtcataaaacactgttttacataccatagggaaaaacgctgccaatcttaactaagatgctacaactgtacagttccttccaatcagagatgttcacgtgtgaaaaaaaaactgtgctacttacaatctatgaaagctggtgttatcccacttggcaggtaaggaaactgaggtcctgtgagtgaagtgacctcatgatcacacaacaggagatggcagggctgggattcaaacccgggagtgtctgctgccacatcccacactcccactgcctggctccaagtcccaggaagctcgagactgtgagttttctcccttgaaactcacctggagagagtccgggcacctgtgcctatgtggagggttccagccccagccaggcccctccgctgcccacaccctgggaggagaagcggcctcccttccaggctcatctgctcactgcccgcattctcctggcagagctgaggtctgagagatctggactccaacccaagggccctctcttgttattcaggggtgtccacagttaggnagggacctggggccttgtcccaccaccttcctaggccccgtgatcaccaccccctcaagcggggccccagccccctgagcaccccctcacgtgacccagccctcggctgttccaggctcactgcccatggtgtgctcttctgggccacagcagccagggctccagggcgaggacaggggacacctgaaaacaccccgttgttcatggtcttgtgcccattcattcggagactcctgaaaaactgggctgtttgcaaagcaaatccagctccttgtcctagcaggttctcagaacggggagtcccctgggatggagctgctcccctcacggcagcaccacgtttccagtccctcgatgccactaatcagcatggactgtgttcaggacacagggtgaacttttctctgacccccggtgctggtcctgtgccagcacgtagtagttactcagtagaggtttgctgagtaaaccagaaatcagattatgagtgttcaggggtttgataaaacagcaccacataacgcacacaaagatactccagaaacatttgctgagtacctagtacgtgtgaggtgctgtgaggatagagcagagaggactgtgccccagctgtgatgctggcagaggtgacactaagagggaaatgagatatttggggcagaatccactgggctctcttggccatccgctgccttgggtctgttgaggtgggtgcccaaaggctgccttcttgaccagaacctgctgtgcgcttcacagaacctcctcttcattggaaatgctgggcacattgcagtcagtgagctgctgccaaaacggcgttaagtagaacccccagaggccccgccggttggtgatcaccctcaggtcctgccagggagacacagtgaggaggttggctaattgctgctttcaggccctggaaatcagtcgccaaggcccaggagaaccccggtgagtccgtccagttgaggcagaggcaataacctcccattgctcggccctgcgcctgccccagtcctggcagggggcaccggctcaggaacatgcggcctcctggcatttctcggtatttaactgtctcgctgtcttatccgagtccctaatgaaacgacttgtgtgacaatctgtctgtgccttacgaaagtgtctgtgcactttttatcctttttaaaagcaacttttaaaagtggatggggaggggggctagcatacgtggtagggttctagaaatctgtggtcatcgctgaaatcctttttgcatcatgttttttgatgttggagtgatgaagtgtacatcccccaccccacacaccactacctgtgtacagaccttttaaaacatgtcttctttttctgattcaatactgtgacctctccgatacagtctaatccttggggaggtggagcgttgatctgacacgcacgaagctcctcaaaggcaccagataactgacagagagcgtgtgaggaggactacccccagtatacatgtgtacactcatctgactgac

SEQ ID NO: 56272 - DNA, 409 bp, Homo sapiens
ggtgtggtacagtatgaagtaaactataaacttgagaactttgtggatttggcttcttggaaagatgcccagtcactgcctctagccgaggttcttcaccattctctttgagaatgacccactacctggaaaaatgcacatgggcatgcctgtacaaaacctttgatgactaagttattttttagtgtatgtcaaatggtatttaacacttcagcctaggcaacagagtgagactccatctccaaaaaaaaacaaaagagagagagagagaaaaatttatcctcgtccaggcacacgtgtcacgcctgtaatcccagcacttcgggaggcaggggcaggagaatcccttcagcccagaagttcgagaccagcctgggcaacgtggtgcattagaaactataccaattta

SEQ ID NO: 56273 - DNA, 233 bp, Homo sapiens
gaactggttacttttaagtaaagagttagacaagaaagaaaatgttccacttagaaagaatgaggtgggtatttttctttgcatcaaaagctacagtaacttcatctataaatcctgagcaagaaatgtccagaataaccacatttcataagctttgctgagtttgagacatctacatagcaacagccttgcgatgggaaaacattaatgctttttatattggtaatcatctg

SEQ ID NO: 56274 - DNA, 217 bp, Homo sapiens
cccgttctcagggatcactgtctttagttgtctgatgcccatattttgaaaaacactatttcatatagtttatccagttcttggttgttttaggtgtggtcttgtcttttagatgttgtcttgtggtcttgttcttgtcttggttgtttcaggtgtgcagaagaatggtaaacctggtctctgttaatctatcttgaccaggagtagaagtccaggt

SEQ ID NO: 56275 - DNA, 369 bp, Homo sapiens
tatttaatcattcttttctttgccctgaagacttaaaactaagaagattattcgaatggtgaattaacttgttgaagaggctattccaaagggatagaatgagactaatttctgactatgttttgctagtgatgggtggatgggaacaaacattacaagaaatagcataatgaatgtagaaaatatttcagtttggagatgtgcatgaattagtttcctaggtttgccacaacaaagcatcccaaactggtggcttaaaaaacagaaatttgtttcatggttcttgagcctagaaggtcaaaatcaaggtgttggcaggaccatgctctctctgaaactctaagggagaagcgttctttgtttcttcct

SEQ ID NO: 56276 - DNA, 900 bp, Homo sapiens
atgccgagtcgctgaccgagcgcaccccgcccccggcgccatcttcccgaccgcgagccgtccaggtctcagtgctgtgccccccccagagcctagaggatgtttcatgggatcccagccacgccgggcataggagcccctgggaacaagccggagctgtatgaggaagtgaagttgtacaagaacgcccgggagagggagaagtacgacaacatggcagagctgtttgcggtggtgaagacaatgcaagccctggagaaggcctacatcaaggactgtgtctcccccagcgagcaggtccagggctcagaaatcagctctattgacgaattctgccgcaagttccgcctggactgcccgctggccatggagcggatcaaggaggaccggcccatcaccatcaaggacgacaagggcaacctcaaccgctgcatcgcagacgtggtctcgctcttcatcacggtcatggacaagctgcgcctggagatccgcgccatggatgagatccagcccgacctgcgagagctgatggagaccatgcaccgcatgagccacctcccacccgactttgagggccgccagacggtcagccagtggctgcagaccctgagcggcatgtcggcgtcagatgagctggacgactcacaggtgcgtcagatgctgttcgacctggagtcagcctacaacgccttcaaccgcttcctgcatgcctgagcccggggcactagcccttgcacagaagggcagagtctgaggcgatggctcctggtcccctgtccgccacacaggccgtggtcatccacacaactcactgtctgcagctgcctgtctggtgtctgtctttggtgtcagaactttgggggccgggcccctccccacaataaagatgctctccgactt

SEQ ID NO: 56277 - DNA, 951 bp, Homo sapiens
atgccgagtcgctgaccgagcgcaccccgcccccggcgccatcttcccgaccgcgagccgtccaggtctcagtgctgtgccccccccagagcctagaggatgtttcatgggatcccagccacgccgggcataggagcccctgggaacaagccggagctgtatgaggaagtgaagttgtacaagaacgcccgggagagggagaagtacgacaacatggcagagctgtttgcggtggtgaagacaatgcaagccctggagaaggcctacatcaaggactgtgtctcccccagcgagtacactgcagcctgctcccggctcctggtccaatacaaagctgccttcaggcaggtccagggctcagaaatcagctctattgacgaattctgccgcaagttccgcctggactgcccgctggccatggagcggatcaaggaggaccggcccatcaccatcaaggacgacaagggcaacctcaaccgctgcatcgcagacgtggtctcgctcttcatcacggtcatggacaagctgcgcctggagatccgcgccatggatgagatccagcccgacctgcgagagctgatggagaccatgcaccgcatgagccacctcccacccgactttgagggccgccagacggtcagccagtggctgcagaccctgagcggcatgtcggcgtcagatgagctggacgactcacaggtgcgtcagatgctgttcgacctggagtcagcctacaacgccttcaaccgcttcctgcatgcctgagcccggggcactagcccttgcacagaagggcagagtctgaggcgatggctcctggtcccctgtccgccacacaggccgtggtcatccacacaactcactgtctgcagctgcctgtctggtgtctgtctttggtgtcagaactttgggggccgggcccctccccacaataaagatgctctccgactt

SEQ ID NO: 56278 - DNA, 980 bp, Homo sapiens
atgccgagtcgctgaccgagcgcaccccgcccccggcgccatcttcccgaccgcgagccgtccaggtctcagtgctgtgccccccccagagcctagaggatgtttcatgggatcccagccacgccgggcataggagcccctgggaacaagccggagctgtatgaggaagtgaagttgtacaagaacgcccgggagagggagaagtacgacaacatggcagagctgtttgcggtggtgaagacaatgcaagccctggagaaggcctacatcaaggactgtgtctcccccagcgagtacactgcagcctgctcccggctcctggtccaatacaaagctgccttcaggcaggtccagggctcagaaatcagctctattgacgaattctgccgcaagttccgcctggactgcccgctggccatggagcggatcaaggaggaccggcccatcaccatcaaggacgacaagggcaacctcaaccgctgcatcgcagacgtggtctcgctcttcatcacggtcatggacaagctgcgcctggagatccgcgccatggatgagatccagcccgacctgcgagagctgatggagaccatgcaccgcatgagccacctcccacccgactttgagggccgccagacggtcagccagtggctgcagaccctgagcggcatgtcggcgtcagatgagctggacgactcacaggtgcgtcagatgctgttcgacctggagtcagcctacaacgccttcaaccgcttcctgcatgcctgagcccggggcactagcccttgcacagaagggcagagtctgaggcgatggctcctggtcccctgtccgccacacaggccgtggtcatccacacaactcactgtctgcagctgcctgtctggtgtctgtctttggtgtcagaactttgggggccgggcccctccccacaataaagatgctctccgacttctcggcgagaaaagaaaaagcttccaggc

SEQ ID NO: 56279 - DNA, 1582 bp, Homo sapiens
atgccgagtcgctgaccgagcgcaccccgcccccggcgccatcttcccgaccgcgagccgtccaggtctcagtgctgtgccccccccagagcctagaggatgtttcatgggatcccagccacgccgggcataggagcccctgggaacaagccggagctgtatgaggaagtgaagttgtacaagaacgcccgggagagggagaagtacgacaacatggcagagctgtttgcggtggtgaagacaatgcaagccctggagaaggcctacatcaaggactgtgtctcccccagcgagtaagagcccacgtcctgggaggtctgttcctgccctggggggcttgggtgctccataggcagcaagagcaggcgtctgtcaggctgggaggcacccacttgtgtggggcccacccagcgtgaggagggtgcccctgggtctcagccagggaagtcctgggggctggtgagggaggcgggcagaggcgcagctcctggggtgtcatccggcccactcccccaccctcatcccccagcacaggcaaccttaaaaaacggtcgagaggcttggggatgtcccaggatcttttgggggggctttgttcaatgaagtgacaagaccgtcacaggccaccgcacaggaccatgagctgtggatgcggccatcacaacagagggctggtcgctgtggttcagagggtgggcaggggttgggggccggggtctccacctggagccgagctacaagccccactacgtgctcagggcctcacccccaaaagctactagcagcccctcctccttgctcggcctgcctttgcctgtcgcctggtcctctctggaagctgctctgcctctggaccagccgagggggtaggatgagctgggtggggctggtcccatgcttgggcagcagctgacctctccctaggtacactgcagcctgctcccggctcctggtccaatacaaagctgccttcaggcaggtccagggctcagaaatcagctctattgacgaattctgccgcaagttccgcctggactgcccgctggccatggagcggatcaaggaggaccggcccatcaccatcaaggacgacaagggcaacctcaaccgctgcatcgcagacgtggtctcgctcttcatcacggtcatggacaagctgcgcctggagatccgcgccatggatgagatccagcccgacctgcgagagctgatggagaccatgcaccgcatgagccacctcccacccgactttgagggccgccagacggtcagccagtggctgcagaccctgagcggcatgtcggcgtcagatgagctggacgactcacaggtgcgtcagatgctgttcgacctggagtcagcctacaacgccttcaaccgcttcctgcatgcctgagcccggggcactagcccttgcacagaagggcagagtctgaggcgatggctcctggtcccctgtccgccacacaggccgtggtcatccacacaactcactgtctgcagctgcctgtctggtgtctgtctttggtgtcagaactttgggggccgggcccctccccacaataaagatgctctccgactt

SEQ ID NO: 56280 - DNA, 1708 bp, Homo sapiens
atgccgagtcgctgaccgagcgcaccccgcccccggcgccatcttcccgaccgcgagccgtccaggtctcagtgctgtgccccccccagagcctagaggatgtttcatgggatcccagccacgccgggcataggagcccctgggaacaagccggagctgtatgaggaagtgaagttgtacaagaacgcccgggagagggagaagtacgacaacatggcagagctgtttgcggtggtgaagacaatgcaagccctggagaaggcctacatcaaggactgtgtctcccccagcgagtaagagcccacgtcctgggaggtctgttcctgccctggggggcttgggtgctccataggcagcaagagcaggcgtctgtcaggctgggaggcacccacttgtgtggggcccacccagcgtgaggagggtgcccctgggtctcagccagggaagtcctgggggctggtgagggaggcgggcagaggcgcagctcctggggtgtcatccggcccactcccccaccctcatcccccagcacaggcaaccttaaaaaacggtcgagaggcttggggatgtcccaggatcttttgggggggctttgttcaatgaagtgacaagaccgtcacaggccaccgcacaggaccatgagctgtggatgcggccatcacaacagagggctggtcgctgtggttcagagggtgggcaggggttgggggccggggtctccacctggagccgagctacaagccccactacgtgctcagggcctcacccccaaaagctactagcagcccctcctccttgctcggcctgcctttgcctgtcgcctggtcctctctggaagctgctctgcctctggaccagccgagggggtaggatgagctgggtggggctggtcccatgcttgggcagcagctgacctctccctaggtacactgcagcctgctcccggctcctggtccaatacaaagctgccttcaggcaggtccagggctcagaaatcagctctattgacgaattctgccgcaagttccgcgtgagtgcctggtccttccacccccatggggcgagactgtcgggcatgggtatggggtgccagagggctctggccacctggggcttgctgtcctgagagccccagcacccatgtcacccccaacagctggactgcccgctggccatggagcggatcaaggaggaccggcccatcaccatcaaggacgacaagggcaacctcaaccgctgcatcgcagacgtggtctcgctcttcatcacggtcatggacaagctgcgcctggagatccgcgccatggatgagatccagcccgacctgcgagagctgatggagaccatgcaccgcatgagccacctcccacccgactttgagggccgccagacggtcagccagtggctgcagaccctgagcggcatgtcggcgtcagatgagctggacgactcacaggtgcgtcagatgctgttcgacctggagtcagcctacaacgccttcaaccgcttcctgcatgcctgagcccggggcactagcccttgcacagaagggcagagtctgaggcgatggctcctggtcccctgtccgccacacaggccgtggtcatccacacaactcactgtctgcagctgcctgtctggtgtctgtctttggtgtcagaactttgggggccgggcccctccccacaataaagatgctctccgactt

SEQ ID NO: 56281 - DNA, 1416 bp, Homo sapiens
atgccgagtcgctgaccgagcgcaccccgcccccggcgccatcttcccgaccgcgagccgtccagggtcttgctctgtctcccaggctggagtgcagtggctcagtcttggctcattgaaaccttcacctcctgggttcaagcgattctcctgcctcagcctcctgagtagctgggattacaaccgtatgccacaacgtccggctaattttgtaattttagtagagacagggtttcaccatgttggccaggctggtctcaaactcctgacctcaggtgatccgctcacctcggcctcccaaagtgctgggattacaggtgtgagccaccgcacctggcttaggggccatctttgagtcggccctggctctgctccccaggtctcagtgctgtgccccccccagagcctagaggatgtttcatgggatcccagccacgccgggcataggagcccctgggaacaagccggagctgtatgaggaagtgaagttgtacaagaacgcccgggagagggagaagtaagtccaggcgcccaggctgtcccaacacacccatgcgcatctggctgccctggggcagcccctccagacccaccccaaactgaggggtgggaggacgcagggtcagtctggggaactgttcctgaggcactccaggatggagcgagaggtacgacaacatggcagagctgtttgcggtggtgaagacaatgcaagccctggagaaggcctacatcaaggactgtgtctcccccagcgagtacactgcagcctgctcccggctcctggtccaatacaaagctgccttcaggcaggtccagggctcagaaatcagctctattgacgaattctgccgcaagttccgcctggactgcccgctggccatggagcggatcaaggaggaccggcccatcaccatcaaggacgacaagggcaacctcaaccgctgcatcgcagacgtggtctcgctcttcatcacggtcatggacaagctgcgcctggagatccgcgccatggatgagatccagcccgacctgcgagagctgatggagaccatgcaccgcatgagccacctcccacccgactttgagggccgccagacggtcagccagtggctgcagaccctgagcggcatgtcggcgtcagatgagctggacgactcacaggtgcgtcagatgctgttcgacctggagtcagcctacaacgccttcaaccgcttcctgcatgcctgagcccggggcactagcccttgcacagaagggcagagtctgaggcgatggctcctggtcccctgtccgccacacaggccgtggtcatccacacaactcactgtctgcagctgcctgtctggtgtctgtctttggtgtcagaactttgggggccgggcccctccccacaataaagatgctctccgactt

SEQ ID NO: 56282 - DNA, 2047 bp, Homo sapiens
atgccgagtcgctgaccgagcgcaccccgcccccggcgccatcttcccgaccgcgagccgtccagggtcttgctctgtctcccaggctggagtgcagtggctcagtcttggctcattgaaaccttcacctcctgggttcaagcgattctcctgcctcagcctcctgagtagctgggattacaaccgtatgccacaacgtccggctaattttgtaattttagtagagacagggtttcaccatgttggccaggctggtctcaaactcctgacctcaggtgatccgctcacctcggcctcccaaagtgctgggattacaggtgtgagccaccgcacctggcttaggggccatctttgagtcggccctggctctgctccccaggtctcagtgctgtgccccccccagagcctagaggatgtttcatgggatcccagccacgccgggcataggagcccctgggaacaagccggagctgtatgaggaagtgaagttgtacaagaacgcccgggagagggagaagtaagtccaggcgcccaggctgtcccaacacacccatgcgcatctggctgccctggggcagcccctccagacccaccccaaactgaggggtgggaggacgcagggtcagtctggggaactgttcctgaggcactccaggatggagcgagaggtacgacaacatggcagagctgtttgcggtggtgaagacaatgcaagccctggagaaggcctacatcaaggactgtgtctcccccagcgagtaagagcccacgtcctgggaggtctgttcctgccctggggggcttgggtgctccataggcagcaagagcaggcgtctgtcaggctgggaggcacccacttgtgtggggcccacccagcgtgaggagggtgcccctgggtctcagccagggaagtcctgggggctggtgagggaggcgggcagaggcgcagctcctggggtgtcatccggcccactcccccaccctcatcccccagcacaggcaaccttaaaaaacggtcgagaggcttggggatgtcccaggatcttttgggggggctttgttcaatgaagtgacaagaccgtcacaggccaccgcacaggaccatgagctgtggatgcggccatcacaacagagggctggtcgctgtggttcagagggtgggcaggggttgggggccggggtctccacctggagccgagctacaagccccactacgtgctcagggcctcacccccaaaagctactagcagcccctcctccttgctcggcctgcctttgcctgtcgcctggtcctctctggaagctgctctgcctctggaccagccgagggggtaggatgagctgggtggggctggtcccatgcttgggcagcagctgacctctccctaggtacactgcagcctgctcccggctcctggtccaatacaaagctgccttcaggcaggtccagggctcagaaatcagctctattgacgaattctgccgcaagttccgcctggactgcccgctggccatggagcggatcaaggaggaccggcccatcaccatcaaggacgacaagggcaacctcaaccgctgcatcgcagacgtggtctcgctcttcatcacggtcatggacaagctgcgcctggagatccgcgccatggatgagatccagcccgacctgcgagagctgatggagaccatgcaccgcatgagccacctcccacccgactttgagggccgccagacggtcagccagtggctgcagaccctgagcggcatgtcggcgtcagatgagctggacgactcacaggtgcgtcagatgctgttcgacctggagtcagcctacaacgccttcaaccgcttcctgcatgcctgagcccggggcactagcccttgcacagaagggcagagtctgaggcgatggctcctggtcccctgtccgccacacaggccgtggtcatccacacaactcactgtctgcagctgcctgtctggtgtctgtctttggtgtcagaactttgggggccgggcccctccccacaataaagatgctctccgactt

SEQ ID NO: 56283 - DNA, 2149 bp, Homo sapiens
atgccgagtcgctgaccgagcgcaccccgcccccggcgccatcttcccgaccgcgagccgtccagggtcttgctctgtctcccaggctggagtgcagtggctcagtcttggctcattgaaaccttcacctcctgggttcaagcgattctcctgcctcagcctcctgagtagctgggattacaaccgtatgccacaacgtccggctaattttgtaattttagtagagacagggtttcaccatgttggccaggctggtctcaaactcctgacctcaggtgatccgctcacctcggcctcccaaagtgctgggattacaggtgtgagccaccgcacctggcttaggggccatctttgagtcggccctggctctgctccccaggtctcagtgctgtgccccccccagagcctagaggatgtttcatgggatcccagccacgccgggcataggagcccctgggaacaagccggagctgtatgaggaagtgaagttgtacaagaacgcccgggagagggagaagtaagtccaggcgcccaggctgtcccaacacacccatgcgcatctggctgccctggggcagcccctccagacccaccccaaactgaggggtgggaggacgcagggtcagtctggggaactgttcctgaggcactccaggatggagcgagaggtgggcagagcgcccgcagtggcacctccgggcagggggtagcactctgggctctaggcttggcaccccggggcctggcccgatagacaggtgtgtcctcaggtacgacaacatggcagagctgtttgcggtggtgaagacaatgcaagccctggagaaggcctacatcaaggactgtgtctcccccagcgagtaagagcccacgtcctgggaggtctgttcctgccctggggggcttgggtgctccataggcagcaagagcaggcgtctgtcaggctgggaggcacccacttgtgtggggcccacccagcgtgaggagggtgcccctgggtctcagccagggaagtcctgggggctggtgagggaggcgggcagaggcgcagctcctggggtgtcatccggcccactcccccaccctcatcccccagcacaggcaaccttaaaaaacggtcgagaggcttggggatgtcccaggatcttttgggggggctttgttcaatgaagtgacaagaccgtcacaggccaccgcacaggaccatgagctgtggatgcggccatcacaacagagggctggtcgctgtggttcagagggtgggcaggggttgggggccggggtctccacctggagccgagctacaagccccactacgtgctcagggcctcacccccaaaagctactagcagcccctcctccttgctcggcctgcctttgcctgtcgcctggtcctctctggaagctgctctgcctctggaccagccgagggggtaggatgagctgggtggggctggtcccatgcttgggcagcagctgacctctccctaggtacactgcagcctgctcccggctcctggtccaatacaaagctgccttcaggcaggtccagggctcagaaatcagctctattgacgaattctgccgcaagttccgcctggactgcccgctggccatggagcggatcaaggaggaccggcccatcaccatcaaggacgacaagggcaacctcaaccgctgcatcgcagacgtggtctcgctcttcatcacggtcatggacaagctgcgcctggagatccgcgccatggatgagatccagcccgacctgcgagagctgatggagaccatgcaccgcatgagccacctcccacccgactttgagggccgccagacggtcagccagtggctgcagaccctgagcggcatgtcggcgtcagatgagctggacgactcacaggtgcgtcagatgctgttcgacctggagtcagcctacaacgccttcaaccgcttcctgcatgcctgagcccggggcactagcccttgcacagaagggcagagtctgaggcgatggctcctggtcccctgtccgccacacaggccgtggtcatccacacaactcactgtctgcagctgcctgtctggtgtctgtctttggtgtcagaactttgggggccgggcccctccccacaataaagatgctctccgactt

SEQ ID NO: 56284 - DNA, 1493 bp, Homo sapiens
atgccgagtcgctgaccgagcgcaccccgcccccggcgccatcttcccgaccgcgagccgtccagggtcttgctctgtctcccaggctggagtgcagtggctcagtcttggctcattgaaaccttcacctcctgggttcaagcgattctcctgcctcagcctcctgagtagctgggattacaaccgtatgccacaacgtccggctaattttgtaattttagtagagacagggtttcaccatgttggccaggctggtctcaaactcctgacctcaggtgatccgctcacctcggcctcccaaagtgctgggattacaggtgtgagccaccgcacctggcttaggggccatctttgagtcggccctggctctgctccccaggtctcagtgctgtgccccccccagagcctagaggatgtttcatgggatcccagccacgccgggcataggagcccctgggaacaagccggagctgtatgaggaagtgaagttgtacaagaacgcccgggagagggagaagtacgacaacatggcagagctgtttgcggtggtgaagacaatgcaagccctggagaaggcctacatcaaggactgtgtctcccccagcgagtacactgcagcctgctcccggctcctggtccaatacaaagctgccttcaggcaggtccagggctcagaaatcagctctattgacgaattctgccgcaagttccgcctggactgcccgctggccatggagcggatcaaggaggaccggcccatcaccatcaaggacgacaagggcaacctcaaccgctgcatcgcagacgtggtctcgctcttcatcacggtcatggacaagctgcgcctggagatccgcgccatggatgagatccagcccgacctgcgagagctgatggagaccatgcaccgcatgagccacctcccacccgactttgagggccgccagacggtcagccagtggctgcagaccctgagcggcatgtcggcgtcagatgagctggacgactcacaggtgcgtcagatgctgttcgacctggagtcagcctacaacgccttcaaccgcttcctgcatgcctgagcccggggcactagcccttgcacagaagggcagagtctgaggcgatggctcctggtcccctgtccgccacacaggccgtggtcatccacacaactcactgtctgcagctgcctgtctggtgtctgtctttggtgtcagaactttgggggccgggcccctccccacaataaagatgctctccgacttaaaaaaaaattaaaaatacagacaatgctgaagaatgatcttacagcgaagagaacaagtgaagagaagaagcagcacccattcgaatcagccctgcgacgaagccgcgcacatgcatgtaggagatggtgagcgagtcgtctgaggtatgctcggggggcgggaggtgactgagaatgcgtgaagcagttgagcgttgtgtgctggcgtgattggcgcgggatcgca

SEQ ID NO: 56285 - DNA, 2157 bp, Homo sapiens
atgccgagtcgctgaccgagcgcaccccgcccccggcgccatcttcccgaccgcgagccgtccaggtctcagtgctgtgccccccccagagcctagaggatgtttcatgggatcccagccacgccgggcataggagcccctgggaacaagccggagctgtatgaggaagtgaagttgtacaagaacgcccgggagagggagaagtacgacaacatggcagagctgtttgcggtggtgaagacaatgcaagccctggagaaggcctacatcaaggactgtgtctcccccagcgagtaagagcccacgtcctgggaggtctgttcctgccctggggggcttgggtgctccataggcagcaagagcaggcgtctgtcaggctgggaggcacccacttgtgtggggcccacccagcgtgaggagggtgcccctgggtctcagccagggaagtcctgggggctggtgagggaggcgggcagaggcgcagctcctggggtgtcatccggcccactcccccaccctcatcccccagcacaggcaaccttaaaaaacggtcgagaggcttggggatgtcccaggatcttttgggggggctttgttcaatgaagtgacaagaccgtcacaggccaccgcacaggaccatgagctgtggatgcggccatcacaacagagggctggtcgctgtggttcagagggtgggcaggggttgggggccggggtctccacctggagccgagctacaagccccactacgtgctcagggcctcacccccaaaagctactagcagcccctcctccttgctcggcctgcctttgcctgtcgcctggtcctctctggaagctgctctgcctctggaccagccgagggggtaggatgagctgggtggggctggtcccatgcttgggcagcagctgacctctccctaggtacactgcagcctgctcccggctcctggtccaatacaaagctgccttcaggcaggtccagggctcagaaatcagctctattgacgaattctgccgcaagttccgcgtgagtgcctggtccttccacccccatggggcgagactgtcgggcatgggtatggggtgccagagggctctggccacctggggcttgctgtcctgagagccccagcacccatgtcacccccaacagctggactgcccgctggccatggagcggatcaaggaggaccggcccatcaccatcaaggacgacaagggcaacctcaaccgctgcatcgcagacgtggtctcggtgcgccccagcccccagggcacgtggttaggagagccgaggctgcctgctgcagctgggcacgagcgtagggtcctgggcctccagagctgagcagcactctgacttgctgggcagaagggaacccctttaactaggaatgaggggtgggcagcatgcggggacgcccccaggccacctggactcctgtcggggggatgagcacagggtgcgttctggcggggtcctggcctcgggagagagtgtgggtgtgggcccacccttcagttcccacacagctgtctgggcagccaggacctcgttcacccaggaggcctgcagggtttgggaacagagtacagtgaggaggcccaagtgacagctgtggctgaggaggggttggggcccgtgagccgtggggcctcccgcacccgtggacacgcgagcctcatgtgcacacctgcccccagctcttcatcacggtcatggacaagctgcgcctggagatccgcgccatggatgagatccagcccgacctgcgagagctgatggagaccatgcaccgcatgagccacctcccacccgactttgagggccgccagacggtcagccagtggctgcagaccctgagcggcatgtcggcgtcagatgagctggacgactcacaggtgcgtcagatgctgttcgacctggagtcagcctacaacgccttcaaccgcttcctgcatgcctgagcccggggcactagcccttgcacagaagggcagagtctgaggcgatggctcctggtcccctgtccgccacacaggccgtggtcatccacacaactcactgtctgcagctgcctgtctggtgtctgtctttggtgtcagaactttgggggccgggcccctccccacaataaagatgctctccgactt

SEQ ID NO: 56286 - DNA, 1714 bp, Homo sapiens
atgccgagtcgctgaccgagcgcaccccgcccccggcgccatcttcccgaccgcgagccgtccagggtcttgctctgtctcccaggctggagtgcagtggctcagtcttggctcattgaaaccttcacctcctgggttcaagcgattctcctgcctcagcctcctgagtagctgggattacaaccgtatgccacaacgtccggctaattttgtaattttagtagagacagggtttcaccatgttggccaggctggtctcaaactcctgacctcaggtgatccgctcacctcggcctcccaaagtgctgggattacaggtgtgagccaccgcacctggcttaggggccatctttgagtcggccctggctctgctccccaggtctcagtgctgtgccccccccagagcctagaggatgtttcatgggatcccagccacgccgggcataggagcccctgggaacaagccggagctgtatgaggaagtgaagttgtacaagaacgcccgggagagggagaagtacgacaacatggcagagctgtttgcggtggtgaagacaatgcaagccctggagaaggcctacatcaaggactgtgtctcccccagcgagtacactgcagcctgctcccggctcctggtccaatacaaagctgccttcaggcaggtccagggctcagaaatcagctctattgacgaattctgccgcaagttccgcctggactgcccgctggccatggagcggatcaaggaggaccggcccatcaccatcaaggacgacaagggcaacctcaaccgctgcatcgcagacgtggtctcggtgcgccccagcccccagggcacgtggttaggagagccgaggctgcctgctgcagctgggcacgagcgtagggtcctgggcctccagagctgagcagcactctgacttgctgggcagaagggaacccctttaactaggaatgaggggtgggcagcatgcggggacgcccccaggccacctggactcctgtcggggggatgagcacagggtgcgttctggcggggtcctggcctcgggagagagtgtgggtgtgggcccacccttcagttcccacacagctgtctgggcagccaggacctcgttcacccaggaggcctgcagggtttgggaacagagtacagtgaggaggcccaagtgacagctgtggctgaggaggggttggggcccgtgagccgtggggcctcccgcacccgtggacacgcgagcctcatgtgcacacctgcccccagctcttcatcacggtcatggacaagctgcgcctggagatccgcgccatggatgagatccagcccgacctgcgagagctgatggagaccatgcaccgcatgagccacctcccacccgactttgagggccgccagacggtcagccagtggctgcagaccctgagcggcatgtcggcgtcagatgagctggacgactcacaggtgcgtcagatgctgttcgacctggagtcagcctacaacgccttcaaccgcttcctgcatgcctgagcccggggcactagcccttgcacagaagggcagagtctgaggcgatggctcctggtcccctgtccgccacacaggccgtggtcatccacacaactcactgtctgcagctgcctgtctggtgtctgtctttggtgtcagaactttgggggccgggcccctccccacaataaagatgctctccgactt

SEQ ID NO: 56287 - DNA, 1309 bp, Homo sapiens
atgccgagtcgctgaccgagcgcaccccgcccccggcgccatcttcccgaccgcgagccgtccagggtcttgctctgtctcccaggctggagtgcagtggctcagtcttggctcattgaaaccttcacctcctgggttcaagcgattctcctgcctcagcctcctgagtagctgggattacaaccgtatgccacaacgtccggctaattttgtaattttagtagagacagggtttcaccatgttggccaggctggtctcaaactcctgacctcaggtgatccgctcacctcggcctcccaaagtgctgggattacaggtgtgagccaccgcacctggcttaggggccatctttgagtcggccctggctctgctccccaggtctcagtgctgtgccccccccagagcctagaggatgtttcatgggatcccagccacgccgggcataggagcccctgggaacaagccggagctgtatgaggaagtgaagttgtacaagaacgcccgggagagggagaagtacgacaacatggcagagctgtttgcggtggtgaagacaatgcaagccctggagaaggcctacatcaaggactgtgtctcccccagcgagtacactgcagcctgctcccggctcctggtccaatacaaagctgccttcaggcaggtccagggctcagaaatcagctctattgacgaattctgccgcaagttccgcctggactgcccgctggccatggagcggatcaaggaggaccggcccatcaccatcaaggacgacaagggcaacctcaaccgctgcatcgcagacgtggtctcgctcttcatcacggtcatggacaagctgcgcctggagatccgcgccatggatgagatccagcccgacctgcgagagctgatggagaccatgcaccgcatgagccacctcccacccgactttgagggccgccagacggtcagccagtggctgcagaccctgagcggcatgtcggcgtcagatgagctggacgactcacaggtgcgtcagatgctgttcgacctggagtcagcctacaacgccttcaaccgcttcctgcatgcctgagcccggggcactagcccttgcacagaagggcagagtctgaggcgatggctcctggtcccctgtccgccacacaggccgtggtcatccacacaactcactgtctgcagctgcctgtctggtgtctgtctttggtgtcagaactttgggggccgggcccctccccacaataaagatgctctccgacttaaaaaaaaaaattaaaatttaaataaaaaaagtcgtatcgatgt

SEQ ID NO: 56288 - DNA, 1289 bp, Homo sapiens
atgccgagtcgctgaccgagcgcaccccgcccccggcgccatcttcccgaccgcgagccgtccagggtcttgctctgtctcccaggctggagtgcagtggctcagtcttggctcattgaaaccttcacctcctgggttcaagcgattctcctgcctcagcctcctgagtagctgggattacaaccgtatgccacaacgtccggctaattttgtaattttagtagagacagggtttcaccatgttggccaggctggtctcaaactcctgacctcaggtgatccgctcacctcggcctcccaaagtgctgggattacaggtgtgagccaccgcacctggcttaggggccatctttgagtcggccctggctctgctccccaggtctcagtgctgtgccccccccagagcctagaggatgtttcatgggatcccagccacgccgggcataggagcccctgggaacaagccggagctgtatgaggaagtgaagttgtacaagaacgcccgggagagggagaagtacgacaacatggcagagctgtttgcggtggtgaagacaatgcaagccctggagaaggcctacatcaaggactgtgtctcccccagcgagtacactgcagcctgctcccggctcctggtccaatacaaagctgccttcaggcaggtccagggctcagaaatcagctctattgacgaattctgccgcaagttccgcctggactgcccgctggccatggagcggatcaaggaggaccggcccatcaccatcaaggacgacaagggcaacctcaaccgctgcatcgcagacgtggtctcgctcttcatcacggtcatggacaagctgcgcctggagatccgcgccatggatgagatccagcccgacctgcgagagctgatggagaccatgcaccgcatgagccacctcccacccgactttgagggccgccagacggtcagccagtggctgcagaccctgagcggcatgtcggcgtcagatgagctggacgactcacaggtgcgtcagatgctgttcgacctggagtcagcctacaacgccttcaaccgcttcctgcatgcctgagcccggggcactagcccttgcacagaagggcagagtctgaggcgatggctcctggtcccctgtccgccacacaggccgtggtcatccacacaactcactgtctgcagctgcctgtctggtgtctgtctttggtgtcagaactttgggggccgggcccctccccacaataaagatgctctccgactttcctgcttgggtggctcaaaaaaa

SEQ ID NO: 56289 - DNA, 1473 bp, Homo sapiens
cgtagccggtccaggtctcagatgctgatgtccattccagagcctgtaaagtatgttacatgggatcccagacactgccggcggcgataggatcccctgggaacaagccggagctgtatgaggtgagtggtgggtgcccacccggccggcattggccaacagcaaatgcctgtgtggcctcaccagggtcctgcagcccctgttggcactggcccacagagcccgctctctccggcaggaagtgaagttgtacaagaacgcccgggagagggagaagtacgacaacatggcagagctgtttgcggtggtgaagacaatgcaagccctggagaaggcctacatcaaggactgtgtctcccccagcgagtacactgcagcctgctcccggctcctggtccaatacaaagctgccttcaggcaggtccagggctcagaaatcagctctattgacgaattctgccgcaagttccgcctggactgcccgctggccatggagcggatcaaggaggaccggcccatcaccatcaaggacgacaagggcaacctcaaccgctgcatcgcagacgtggtctcggtgcgccccagcccccagggcacgtggttaggagagccgaggctgcctgctgcagctgggcacgagcgtagggtcctgggcctccagagctgagcagcactctgacttgctgggcagaagggaacccctttaactaggaatgaggggtgggcagcatgcggggacgcccccaggccacctggactcctgtcggggggatgagcacagggtgcgttctggcggggtcctggcctcgggagagagtgtgggtgtgggcccacccttcagttcccacacagctgtctgggcagccaggacctcgttcacccaggaggcctgcagggtttgggaacagagtacagtgaggaggcccaagtgacagctgtggctgaggaggggttggggcccgtgagccgtggggcctcccgcacccgtggacacgcgagcctcatgtgcacacctgcccccagctcttcatcacggtcatggacaagctgcgcctggagatccgcgccatggatgagatccagcccgacctgcgagagctgatggagaccatgcaccgcatgagccacctcccacccgactttgagggccgccagacggtcagccagtggctgcagaccctgagcggcatgtcggcgtcagatgagctggacgactcacaggtgcgtcagatgctgttcgacctggagtcagcctacaacgccttcaaccgcttcctgcatgcctgagcccggggcactagcccttgcacagaagggcagagtctgaggcgatggctcctggtcccctgtccgccacacaggccgtggtcatccacacaactcactgtctgcagctgcctgtctggtgtctgtctttggtgtcagaactttgggggccgggcccctccccacaataaagatgctctccgactt

SEQ ID NO: 56290 - DNA, 1316 bp, Homo sapiens
atgccgagtcgctgaccgagcgcaccccgcccccggcgccatcttcccgaccgcgagccgtccagggtcttgctctgtctcccaggctggagtgcagtggctcagtcttggctcattgaaaccttcacctcctgggttcaagcgattctcctgcctcagcctcctgagtagctgggattacaaccgtatgccacaacgtccggctaattttgtaattttagtagagacagggtttcaccatgttggccaggctggtctcaaactcctgacctcaggtgatccgctcacctcggcctcccaaagtgctgggattacaggtgtgagccaccgcacctggcttaggggccatctttgagtcggccctggctctgctccccaggtctcagtgctgtgccccccccagagcctagaggatgtttcatgggatcccagccacgccgggcataggagcccctgggaacaagccggagctgtatgaggaagtgaagttgtacaagaacgcccgggagagggagaagtacgacaacatggcagagctgtttgcggtggtgaagacaatgcaagccctggagaaggcctacatcaaggactgtgtctcccccagcgagtacactgcagcctgctcccggctcctggtccaatacaaagctgccttcaggcaggtccagggctcagaaatcagctctattgacgaattctgccgcaagttccgcctggactgcccgctggccatggagcggatcaaggaggaccggcccatcaccatcaaggacgacaagggcaacctcaaccgctgcatcgcagacgtggtctcgctcttcatcacggtcatggacaagctgcgcctggagatccgcgccatggatgagatccagcccgacctgcgagagctgatggagaccatgcaccgcatgagccacctcccacccgactttgagggccgccagacggtcagccagtggctgcagaccctgagcggcatgtcggcgtcagatgagctggacgactcacaggtgcgtcagatgctgttcgacctggagtcagcctacaacgccttcaaccgcttcctgcatgcctgagcccggggcactagcccttgcacagaagggcagagtctgaggcgatggctcctggtcccctgtccgccacacaggccgtggtcatccacacaactcactgtctggggctagtcggggcccgactagcccgacaggagcccagccagggcaccaccaccttcgctgtgaccagcatactgcgcgtggcagccgaggactggaagaagggggacaccttctcctgcatggtgggccacg

SEQ ID NO: 56291 - DNA, 1119 bp, Homo sapiens
atgccgagtcgctgaccgagcgcaccccgcccccggcgccatcttcccgaccgcgagccgtccagggtcttgctctgtctcccaggctggagtgcagtggctcagtcttggctcattgaaaccttcacctcctgggttcaagcgattctcctgcctcagcctcctgagtagctgggattacaaccgtatgccacaacgtccggctaattttgtaattttagtagagacagggtttcaccatgttggccaggctggtctcaaactcctgacctcaggtgatccgctcacctcggcctcccaaagtgctgggattacaggtgtgagccaccgcacctggcttaggggccatctttgagtcggccctggctctgctccccaggtctcagtgctgtgccccccccagagcctagaggatgtttcatgggatcccagccacgccgggcataggagcccctgggaacaagccggagctgtatgaggaagtgaagttgtacaagaacgcccgggagagggagaagtacgacaacatggcagagctgtttgcggtggtgaagacaatgcaagccctggagaaggcctacatcaaggactgtgtctcccccagcgagtacactgcagcctgctcccggctcctggtccaatacaaagctgccttcaggcaggtccagggctcagaaatcagctctattgacgaattctgccgcaagttccgcctggactgcccgctggccatggagcggatcaaggaggaccggcccatcaccatcaaggacgacaagggcaacctcaaccgctgcatcgcagacgtggtctcggctgcagaccctgagcggcatgtcggcgtcagatgagctggacgactcacaggtgcgtcagatgctgttcgacctggagtcagcctacaacgccttcaaccgcttcctgcatgcctgagcccggggcactagcccttgcacagaagggcagagtctgaggcgatggctcctggtcccctgtccgccacacaggccgtggtcatccacacaactcactgtctgcagctgcctgtctggtgtctgtctttggtgtcagaactttgggggccgggcccctccccacaataaagatgctctccgactt

SEQ ID NO: 56292 - DNA, 1115 bp, Homo sapiens
  misc_feature (969)..(969): n is a, c, g, or t
atgccgagtcgctgaccgagcgcaccccgcccccggcgccatcttcccgaccgcgagccgtccagggtcttgctctgtctcccaggctggagtgcagtggctcagtcttggctcattgaaaccttcacctcctgggttcaagcgattctcctgcctcagcctcctgagtagctgggattacaaccgtatgccacaacgtccggctaattttgtaattttagtagagacagggtttcaccatgttggccaggctggtctcaaactcctgacctcaggtgatccgctcacctcggcctcccaaagtgctgggattacaggtgtgagccaccgcacctggcttaggggccatctttgagtcggccctggctctgctccccaggtctcagtgctgtgccccccccagagcctagaggatgtttcatgggatcccagccacgccgggcataggagcccctgggaacaagccggagctgtatgaggaagtgaagttgtacaagaacgcccgggagagggagaagtacgacaacatggcagagctgtttgcggtggtgaagacaatgcaagccctggagaaggcctacatcaaggactgtgtctcccccagcgagtacactgcagcctgctcccggctcctggtccaatacaaagctgccttcaggcaggtccagggctcagaaatcagctctattgacgaattctgccgcaagttccgcctggactgcccgctggccatggagcggatcaaggaggaccggcccatcaccatcaaggacgacaagggcaacctcaaccgctgcatcgcagacgtggtctcgctcttcatcacggtcatggacaagctgcgcctggagatccgcgccatggatgagatccagcccgacctgcgagagctgatggagaccatgcaccgcatgagccacctcccacccgactttgagggccgccagacggtcagccagtggggctganaccctgaggggatgtcggcgcagatagctggagactcacagggcgtagatgcctgtcgactggattaggctacaaagcttaaaccgttcttgatgccgagcccggggactagccctgcccaaggctctgggctgctctggccccgt

SEQ ID NO: 56293 - DNA, 828 bp, Homo sapiens
gtacaagaacgcccgggagagggagaagtacgacaacatggcagactgttgtcgtacgtcatccctctccggagcacgaagtacgacaacatggcagagctgtttgcggtggtgaagacaatgcaagccctggagaaggcctacatcaaggactgtgtctcccccagcgagtacactgcagcctgctcccggctcctggtccaatacaaagctgccttcaggcaggtccagggctcagaaatcagctctattgacgaattctgccgcaagttccgcctggactgcccgctggccatggagcggatcaaggaggaccggcccatcaccatcaaggacgacaagggcaacctcaaccgctgcatcgcagacgtggtctcgctcttcatcacggtcatggacaagctgcgcctggagatccgcgccatggatgagatccagcccgacctgcgagagctgatggagaccatgcaccgcatgagccacctcccacccgactttgagggccgccagacggtcagccagtggctgcagaccctgagcggcatgtcggcgtcagatgagctggacgactcacaggtgcgtcagatgctgttcgacctggagtcagcctacaacgccttcaaccgcttcctgcatgcctgagcccggggcactagcccttgcacagaagggcagagtctgaggcgatggctcctggtcccctgtccgccacacaggccgtggtcatccacacaactcactgtctgcagctgcctgtctggtgtctgtctttggtgtcagaactttgggggccgggcccctccccacaataaagatgctctccgactt

SEQ ID NO: 56294 - DNA, 1265 bp, Homo sapiens
atgccgagtcgctgaccgagcgcaccccgcccccggcgccatcttcccgaccgcgagccgtccagggtcttgctctgtctcccaggctggagtgcagtggctcagtcttggctcattgaaaccttcacctcctgggttcaagcgattctcctgcctcagcctcctgagtagctgggattacaaccgtatgccacaacgtccggctaattttgtaattttagtagagacagggtttcaccatgttggccaggctggtctcaaactcctgacctcaggtgatccgctcacctcggcctcccaaagtgctgggattacaggtgtgagccaccgcacctggcttaggggccatctttgagtcggccctggctctgctccccaggtctcagtgctgtgccccccccagagcctagaggatgtttcatgggatcccagccacgccgggcataggagcccctgggaacaagccggagctgtatgaggaagtgaagttgtacaagaacgcccgggagagggagaagtacgacaacatggcagagctgtttgcggtggtgaagacaatgcaagccctggagaaggcctacatcaaggactgtgtctcccccagcgagtacactgcagcctgctcccggctcctggtccaatacaaagctgccttcaggcaggtccagggctcagaaatcagctctattgacgaattctgccgcaagttccgcctggactgcccgctggccatggagcggatcaaggaggaccggcccatcaccatcaaggacgacaagggcaacctcaaccgctgcatcgcagacgtggtctcgctcttcatcacggtcatggacaagctgcgcctggagatccgcgccatggatgagatccagcccgacctgcgagagctgatggagaccatgcaccgcatgagccacctcccacccgactttgagggccgccagacggtcagccagtggctgcagaccctgagcggcatgtcggcgtcagatgagctggacgactcacaggtgcgtcagatgctgttcgacctggagtcagcctacaacgccttcaaccgcttcctgcatgcctgagcccggggcactagcccttgcacagaagggcagagtctgaggcgatggctcctggtcccctgtccgccacacaggccgtggtcatccacacaactcactgtctgcagctgcctgtctggtgtctgtctttggtgtcagaactttgggggccgggcccctccccacaataaagatgctctccgactt

SEQ ID NO: 56295 - DNA, 1381 bp, Homo sapiens
atgccgagtcgctgaccgagcgcaccccgcccccggcgccatcttcccgaccgcgagccgtccagggtcttgctctgtctcccaggctggagtgcagtggctcagtcttggctcattgaaaccttcacctcctgggttcaagcgattctcctgcctcagcctcctgagtagctgggattacaaccgtatgccacaacgtccggctaattttgtaattttagtagagacagggtttcaccatgttggccaggctggtctcaaactcctgacctcaggtgatccgctcacctcggcctcccaaagtgctgggattacaggtgtgagccaccgcacctggcttaggggccatctttgagtcggccctggctctgctccccaggtctcagtgctgtgccccccccagagcctagaggatgtttcatgggatcccagccacgccgggcataggagcccctgggaacaagccggagctgtatgaggtgagtggtgggtgcccacccggccggcattggccaacagcaaatgcctgtgtggcctcaccagggtcctgcagcccctgttggcactggcccacagagcccgctctctccggcaggaagtgaagttgtacaagaacgcccgggagagggagaagtacgacaacatggcagagctgtttgcggtggtgaagacaatgcaagccctggagaaggcctacatcaaggactgtgtctcccccagcgagtacactgcagcctgctcccggctcctggtccaatacaaagctgccttcaggcaggtccagggctcagaaatcagctctattgacgaattctgccgcaagttccgcctggactgcccgctggccatggagcggatcaaggaggaccggcccatcaccatcaaggacgacaagggcaacctcaaccgctgcatcgcagacgtggtctcgctcttcatcacggtcatggacaagctgcgcctggagatccgcgccatggatgagatccagcccgacctgcgagagctgatggagaccatgcaccgcatgagccacctcccacccgactttgagggccgccagacggtcagccagtggctgcagaccctgagcggcatgtcggcgtcagatgagctggacgactcacaggtgcgtcagatgctgttcgacctggagtcagcctacaacgccttcaaccgcttcctgcatgcctgagcccggggcactagcccttgcacagaagggcagagtctgaggcgatggctcctggtcccctgtccgccacacaggccgtggtcatccacacaactcactgtctgcagctgcctgtctggtgtctgtctttggtgtcagaactttgggggccgggcccctccccacaataaagatgctctccgactt

SEQ ID NO: 56296 - DNA, 1369 bp, Homo sapiens
atgccgagtcgctgaccgagcgcaccccgcccccggcgccatcttcccgaccgcgagccgtccagggtcttgctctgtctcccaggctggagtgcagtggctcagtcttggctcattgaaaccttcacctcctgggttcaagcgattctcctgcctcagcctcctgagtagctgggattacaaccgtatgccacaacgtccggctaattttgtaattttagtagagacagggtttcaccatgttggccaggctggtctcaaactcctgacctcaggtgatccgctcacctcggcctcccaaagtgctgggattacaggtgtgagccaccgcacctggcttaggggccatctttgagtcggccctggctctgctccccaggtctcagtgctgtgccccccccagagcctagaggatgtttcatgggatcccagccacgccgggcataggagcccctgggaacaagccggagctgtatgaggaagtgaagttgtacaagaacgcccgggagagggagaagtaagtccaggcgcccaggctgtcccaacacacccatgcgcatctggctgccctggggcagcccctccagacccaccccaaactgaggggtgggaggacgcagggtacgacaacatggcagagctgtttgcggtggtgaagacaatgcaagccctggagaaggcctacatcaaggactgtgtctcccccagcgagtacactgcagcctgctcccggctcctggtccaatacaaagctgccttcaggcaggtccagggctcagaaatcagctctattgacgaattctgccgcaagttccgcctggactgcccgctggccatggagcggatcaaggaggaccggcccatcaccatcaaggacgacaagggcaacctcaaccgctgcatcgcagacgtggtctcgctcttcatcacggtcatggacaagctgcgcctggagatccgcgccatggatgagatccagcccgacctgcgagagctgatggagaccatgcaccgcatgagccacctcccacccgactttgagggccgccagacggtcagccagtggctgcagaccctgagcggcatgtcggcgtcagatgagctggacgactcacaggtgcgtcagatgctgttcgacctggagtcagcctacaacgccttcaaccgcttcctgcatgcctgagcccggggcactagcccttgcacagaagggcagagtctgaggcgatggctcctggtcccctgtccgccacacaggccgtggtcatccacacaactcactgtctgcagctgcctgtctggtgtctgtctttggtgtcagaactttgggggccgggcccctccccacaataaagatgctctccgactt

SEQ ID NO: 56297 - DNA, 2012 bp, Homo sapiens
atgccgagtcgctgaccgagcgcaccccgcccccggcgccatcttcccgaccgcgagccgtccagggtcttgctctgtctcccaggctggagtgcagtggctcagtcttggctcattgaaaccttcacctcctgggttcaagcgattctcctgcctcagcctcctgagtagctgggattacaaccgtatgccacaacgtccggctaattttgtaattttagtagagacagggtttcaccatgttggccaggctggtctcaaactcctgacctcaggtgatccgctcacctcggcctcccaaagtgctgggattacaggtgtgagccaccgcacctggcttaggggccatctttgagtcggccctggctctgctccccaggtctcagtgctgtgccccccccagagcctagaggatgtttcatgggatcccagccacgccgggcataggagcccctgggaacaagccggagctgtatgaggtgagtggtgggtgcccacccggccggcattggccaacagcaaatgcctgtgtggcctcaccagggtcctgcagcccctgttggcactggcccacagagcccgctctctccggcaggaagtgaagttgtacaagaacgcccgggagagggagaagtacgacaacatggcagagctgtttgcggtggtgaagacaatgcaagccctggagaaggcctacatcaaggactgtgtctcccccagcgagtaagagcccacgtcctgggaggtctgttcctgccctggggggcttgggtgctccataggcagcaagagcaggcgtctgtcaggctgggaggcacccacttgtgtggggcccacccagcgtgaggagggtgcccctgggtctcagccagggaagtcctgggggctggtgagggaggcgggcagaggcgcagctcctggggtgtcatccggcccactcccccaccctcatcccccagcacaggcaaccttaaaaaacggtcgagaggcttggggatgtcccaggatcttttgggggggctttgttcaatgaagtgacaagaccgtcacaggccaccgcacaggaccatgagctgtggatgcggccatcacaacagagggctggtcgctgtggttcagagggtgggcaggggttgggggccggggtctccacctggagccgagctacaagccccactacgtgctcagggcctcacccccaaaagctactagcagcccctcctccttgctcggcctgcctttgcctgtcgcctggtcctctctggaagctgctctgcctctggaccagccgagggggtaggatgagctgggtggggctggtcccatgcttgggcagcagctgacctctccctaggtacactgcagcctgctcccggctcctggtccaatacaaagctgccttcaggcaggtccagggctcagaaatcagctctattgacgaattctgccgcaagttccgcctggactgcccgctggccatggagcggatcaaggaggaccggcccatcaccatcaaggacgacaagggcaacctcaaccgctgcatcgcagacgtggtctcgctcttcatcacggtcatggacaagctgcgcctggagatccgcgccatggatgagatccagcccgacctgcgagagctgatggagaccatgcaccgcatgagccacctcccacccgactttgagggccgccagacggtcagccagtggctgcagaccctgagcggcatgtcggcgtcagatgagctggacgactcacaggtgcgtcagatgctgttcgacctggagtcagcctacaacgccttcaaccgcttcctgcatgcctgagcccggggcactagcccttgcacagaagggcagagtctgaggcgatggctcctggtcccctgtccgccacacaggccgtggtcatccacacaactcactgtctgcagctgcctgtctggtgtctgtctttggtgtcagaactttgggggccgggcccctccccacaataaagatgctctccgactt

SEQ ID NO: 56298 - DNA, 1686 bp, Homo sapiens
atgccgagtcgctgaccgagcgcaccccgcccccggcgccatcttcccgaccgcgagccgtccaggtctcagtgctgtgccccccccagagcctagaggatgtttcatgggatcccagccacgccgggcataggagcccctgggaacaagccggagctgtatgaggaagtgaagttgtacaagaacgcccgggagagggagaagtaagtccaggcgcccaggctgtcccaacacacccatgcgcatctggctgccctggggcagcccctccagacccaccccaaactgaggggtgggaggacgcagggtacgacaacatggcagagctgtttgcggtggtgaagacaatgcaagccctggagaaggcctacatcaaggactgtgtctcccccagcgagtaagagcccacgtcctgggaggtctgttcctgccctggggggcttgggtgctccataggcagcaagagcaggcgtctgtcaggctgggaggcacccacttgtgtggggcccacccagcgtgaggagggtgcccctgggtctcagccagggaagtcctgggggctggtgagggaggcgggcagaggcgcagctcctggggtgtcatccggcccactcccccaccctcatcccccagcacaggcaaccttaaaaaacggtcgagaggcttggggatgtcccaggatcttttgggggggctttgttcaatgaagtgacaagaccgtcacaggccaccgcacaggaccatgagctgtggatgcggccatcacaacagagggctggtcgctgtggttcagagggtgggcaggggttgggggccggggtctccacctggagccgagctacaagccccactacgtgctcagggcctcacccccaaaagctactagcagcccctcctccttgctcggcctgcctttgcctgtcgcctggtcctctctggaagctgctctgcctctggaccagccgagggggtaggatgagctgggtggggctggtcccatgcttgggcagcagctgacctctccctaggtacactgcagcctgctcccggctcctggtccaatacaaagctgccttcaggcaggtccagggctcagaaatcagctctattgacgaattctgccgcaagttccgcctggactgcccgctggccatggagcggatcaaggaggaccggcccatcaccatcaaggacgacaagggcaacctcaaccgctgcatcgcagacgtggtctcgctcttcatcacggtcatggacaagctgcgcctggagatccgcgccatggatgagatccagcccgacctgcgagagctgatggagaccatgcaccgcatgagccacctcccacccgactttgagggccgccagacggtcagccagtggctgcagaccctgagcggcatgtcggcgtcagatgagctggacgactcacaggtgcgtcagatgctgttcgacctggagtcagcctacaacgccttcaaccgcttcctgcatgcctgagcccggggcactagcccttgcacagaagggcagagtctgaggcgatggctcctggtcccctgtccgccacacaggccgtggtcatccacacaactcactgtctgcagctgcctgtctggtgtctgtctttggtgtcagaactttgggggccgggcccctccccacaataaagatgctctccgactt

SEQ ID NO: 56299 - DNA, 2077 bp, Homo sapiens
atgccgagtcgctgaccgagcgcaccccgcccccggcgccatcttcccgaccgcgagccgtccagggtcttgctctgtctcccaggctggagtgcagtggctcagtcttggctcattgaaaccttcacctcctgggttcaagcgattctcctgcctcagcctcctgagtagctgggattacaaccgtatgccacaacgtccggctaattttgtaattttagtagagacagggtttcaccatgttggccaggctggtctcaaactcctgacctcaggtgatccgctcacctcggcctcccaaagtgctgggattacaggtgtgagccaccgcacctggcttaggggccatctttgagtcggccctggctctgctccccaggtctcagtgctgtgccccccccagagcctagaggatgtttcatgggatcccagccacgccgggcataggagcccctgggaacaagccggagctgtatgaggaagtgaagttgtacaagaacgcccgggagagggagaagtacgacaacatggcagagctgtttgcggtggtgaagacaatgcaagccctggagaaggcctacatcaaggactgtgtctcccccagcgagtacactgcagcctgctcccggctcctggtccaatacaaagctgccttcaggcaggtccagggctcagaaatcagctctattgacgaattctgccgcaagttccgcctggactgcccgctggccatggagcggatcaaggaggaccggcccatcaccatcaaggacgacaagggcaacctcaaccgctgcatcgcagacgtggtctcgctcttcatcacggtcatggacaagctgcgcctggagatccgcgccatggatgagatccagcccgacctgcgagagctgatggagaccatgcaccgcatgagccacctcccacccgactttgagggccgccagacggtcagccagtggctgcagaccctgagcggcatgtcggcgtcagatgagctggacgactcacaggtgcgtcagatgctgttcgacctggagtcagcctacaacgccttcaaccgcttcctgcatgcctgagcccggggcactagcccttgcacagaagggcagagtctgaggcgatggctcctggtcccctgtccgccacacaggccgtggtcatccacacaactcactgtctgcagctgcctgtctggtgtctgtctttggtgtcagaactttgggggccgggcccctccccacaataaagatgctctccgacttaaaaaaaaacaaaaaaacaaagaaaacacaaagaaaaaaaaaaagaagaaaacaacagacacacaaaaaaaaaacacaggggggggcgcgcgccaaaagaaagtcgctccccgccgggggcgcccccagcagaacgcggcgccccccctatgttttttctgtgggataccaacaatgacgcgcgcgcccccaatataaggagcggccgcgcctccttattatcataacccgaagattacgcagagacgcgcgggcgtatttttttataaccacccagcgtttgtgagatcattagtgtgagtagacacaactgccgggatcgactccctcatgagtgagactccatctatggtgggagggacagaaacaaacaccacctctgtctactaacacgcggtgaggggtggcgagctgtgatcaaacacccatatcttaggcggcgcgcgccacaccaaaacactcaccgcctcacaacacaagaaataaataaattaactagcagcctacctcctactattgaggagaagcagatctaaaacacgtatcatctaataacaactactttcttaggcaccgccgggcgtgacaatattatatgcatgcggtgtgggtaggtcgctacaccaacaacacaaaaccagcagtgtataaacaatcttattagtccgcccgtgtgcgtccagctaagtaacataggagaacagaatgtctctgagtcgaacctccacatcgactgcgatcaagactagatcgatacgttttctctgatcggaggacagcgaacacaattatattttattcgccaccaccgg

SEQ ID NO: 56300 - DNA, 1840 bp, Homo sapiens
atgccgagtcgctgaccgagcgcaccccgcccccggcgccatcttcccgaccgcgagccgtccagggtcttgctctgtctcccaggctggagtgcagtggctcagtcttggctcattgaaaccttcacctcctgggttcaagcgattctcctgcctcagcctcctgagtagctgggattacaaccgtatgccacaacgtccggctaattttgtaattttagtagagacagggtttcaccatgttggccaggctggtctcaaactcctgacctcaggtgatccgctcacctcggcctcccaaagtgctgggattacaggtgtgagccaccgcacctggcttaggggccatctttgagtcggccctggctctgctccccaggtctcagtgctgtgccccccccagagcctagaggatgtttcatgggatcccagccacgccgggcataggagcccctgggaacaagccggagctgtatgaggaagtgaagttgtacaagaacgcccgggagagggagaagtacgacaacatggcagagctgtttgcggtggtgaagacaatgcaagccctggagaaggcctacatcaaggactgtgtctcccccagcgagtacactgcagcctgctcccggctcctggtccaatacaaagctgccttcaggcaggtccagggctcagaaatcagctctattgacgaattctgccgcaagttccgcgtgagtgcctggtccttccacccccatggggcgagactgtcgggcatgggtatggggtgccagagggctctggccacctggggcttgctgtcctgagagccccagcacccatgtcacccccaacagctggactgcccgctggccatggagcggatcaaggaggaccggcccatcaccatcaaggacgacaagggcaacctcaaccgctgcatcgcagacgtggtctcggtgcgccccagcccccagggcacgtggttaggagagccgaggctgcctgctgcagctgggcacgagcgtagggtcctgggcctccagagctgagcagcactctgacttgctgggcagaagggaacccctttaactaggaatgaggggtgggcagcatgcggggacgcccccaggccacctggactcctgtcggggggatgagcacagggtgcgttctggcggggtcctggcctcgggagagagtgtgggtgtgggcccacccttcagttcccacacagctgtctgggcagccaggacctcgttcacccaggaggcctgcagggtttgggaacagagtacagtgaggaggcccaagtgacagctgtggctgaggaggggttggggcccgtgagccgtggggcctcccgcacccgtggacacgcgagcctcatgtgcacacctgcccccagctcttcatcacggtcatggacaagctgcgcctggagatccgcgccatggatgagatccagcccgacctgcgagagctgatggagaccatgcaccgcatgagccacctcccacccgactttgagggccgccagacggtcagccagtggctgcagaccctgagcggcatgtcggcgtcagatgagctggacgactcacaggtgcgtcagatgctgttcgacctggagtcagcctacaacgccttcaaccgcttcctgcatgcctgagcccggggcactagcccttgcacagaagggcagagtctgaggcgatggctcctggtcccctgtccgccacacaggccgtggtcatccacacaactcactgtctgcagctgcctgtctggtgtctgtctttggtgtcagaactttgggggccgggcccctccccacaataaagatgctctccgactt

SEQ ID NO: 56301 - DNA, 1294 bp, Homo sapiens
atgccgagtcgctgaccgagcgcaccccgcccccggcgccatcttcccgaccgcgagccgtccagggtcttgctctgtctcccaggctggagtgcagtggctcagtcttggctcattgaaaccttcacctcctgggttcaagcgattctcctgcctcagcctcctgagtagctgggattacaaccgtatgccacaacgtccggctaattttgtaattttagtagagacagggtttcaccatgttggccaggctggtctcaaactcctgacctcaggtgatccgctcacctcggcctcccaaagtgctgggattacaggtgtgagccaccgcacctggcttaggggccatctttgagtcggccctggctctgctccccaggtctcagtgctgtgccccccccagagcctagaggatgtttcatgggatcccagccacgccgggcataggagcccctgggaacaagccggagctgtatgaggaagtgaagttgtacaagaacgcccgggagagggagaagtacgacaacatggcagagctgtttgcggtggtgaagacaatgcaagccctggagaaggcctacatcaaggactgtgtctcccccagcgagtacactgcagcctgctcccggctcctggtccaatacaaagctgccttcaggcaggtccagggctcagaaatcagctctattgacgaattctgccgcaagttccgcctggactgcccgctggccatggagcggatcaaggaggaccggcccatcaccatcaaggacgacaagggcaacctcaaccgctgcatcgcagacgtggtctcgctcttcatcacggtcatggacaagctgcgcctggagatccgcgccatggatgagatccagcccgacctgcgagagctgatggagaccatgcaccgcatgagccacctcccacccgactttgagggccgccagacggtcagccagtggctgcagaccctgagcggcatgtcggcgtcagatgagctggacgactcacaggtgcgtcagatgctgttcgacctggagtcagcctacaacgccttcaaccgcttcctgcatgcctgagcccggggcactagcccttgcacagaagggcagagtctgaggcgatggctcctggtcccctgtccgccacacaggccgtggtcatccacacaactcactgtctgcagctgcctgtctggtgtctgtctttggtgtcagaactttgggggccgggcccctccccacaataaagatgctctccgacttctcggcgagaaaagaaaaagcttccaggc

SEQ ID NO: 56302 - DNA, 1385 bp, Homo sapiens
atgccgagtcgctgaccgagcgcaccccgcccccggcgccatcttcccgaccgcgagccgtccagggtcttgctctgtctcccaggctggagtgcagtggctcagtcttggctcattgaaaccttcacctcctgggttcaagcgattctcctgcctcagcctcctgagtagctgggattacaaccgtatgccacaacgtccggctaattttgtaattttagtagagacagggtttcaccatgttggccaggctggtctcaaactcctgacctcaggtgatccgctcacctcggcctcccaaagtgctgggattacaggtgtgagccaccgcacctggcttaggggccatctttgagtcggccctggctctgctccccaggtctcagtgctgtgccccccccagagcctagaggatgtttcatgggatcccagccacgccgggcataggagcccctgggaacaagccggagctgtatgaggaagtgaagttgtacaagaacgcccgggagagggagaagtacgacaacatggcagagctgtttgcggtggtgaagacaatgcaagccctggagaaggcctacatcaaggactgtgtctcccccagcgagtacactgcagcctgctcccggctcctggtccaatacaaagctgccttcaggcaggtccagggctcagaaatcagctctattgacgaattctgccgcaagttccgcctggactgcccgctggccatggagcggatcaaggaggaccggcccatcaccatcaaggacgacaagggcaacctcaaccgctgcatcgcagacgtggtctcgctcttcatcacggtcatggacaagctgcgcctggagatccgcgccatggatgagatccagcccgacctgcgagagctgatggagaccatgcaccgcatgagccacctcccacccgactttgagggccgccagacggtcagccagtgggtgggtgtccctcccagccaggcagagccccgcagtgcccgagaccctcccagccaggcggagccccgcagtgcccctgaggccctcagcccccacatgccctgtgctgcactcccagggctgcagaccctgagcggcatgtcggcgtcagatgagctggacgactcacaggtgcgtcagatgctgttcgacctggagtcagcctacaacgccttcaaccgcttcctgcatgcctgagcccggggcactagcccttgcacagaagggcagagtctgaggcgatggctcctggtcccctgtccgccacacaggccgtggtcatccacacaactcactgtctgcagctgcctgtctggtgtctgtctttggtgtcagaactttgggggccgggcccctccccacaataaagatgctctccgactt

SEQ ID NO: 56303 - DNA, 1173 bp, Homo sapiens
atgccgagtcgctgaccgagcgcaccccgcccccggcgccatcttcccgaccgcgagccgtccagggtcttgctctgtctcccaggctggagtgcagtggctcagtcttggctcattgaaaccttcacctcctgggttcaagcgattctcctgcctcagcctcctgagtagctgggattacaaccgtatgccacaacgtccggctaattttgtaattttagtagagacagggtttcaccatgttggccaggctggtctcaaactcctgacctcaggtgatccgctcacctcggcctcccaaagtgctgggattacaggtgtgagccaccgcacctggcttaggggccatctttgagtcggccctggctctgctccccaggtctcagtgctgtgccccccccagagcctagaggatgtttcatgggatcccagccacgccgggcataggagcccctgggaacaagccggagctgtatgaggaagtgaagttgtacaagaacgcccgggagagggagaagtacgacaacatggcagagctgtttgcggtggtgaagacaatgcaagccctggagaaggcctacatcaaggactgtgtctcccccagcgagtacactgcagcctgctcccggctcctggtccaatacaaagctgccttcaggcaggtccagggctcagaaatcagctctattgacgaattctgccgcaagttccgcctggactgcccgctggccatggagcggatcaaggaggaccggcccatcaccatcaaggacgacaagggcaacctcaaccgctgcatcgcagacgtggtctcgctcttcatcacggtcatggacaagctgcgcctggagatccgcgccatggatgaggctgcagaccctgagcggcatgtcggcgtcagatgagctggacgactcacaggtgcgtcagatgctgttcgacctggagtcagcctacaacgccttcaaccgcttcctgcatgcctgagcccggggcactagcccttgcacagaagggcagagtctgaggcgatggctcctggtcccctgtccgccacacaggccgtggtcatccacacaactcactgtctgcagctgcctgtctggtgtctgtctttggtgtcagaactttgggggccgggcccctccccacaataaagatgctctccgactt

SEQ ID NO: 56304 - DNA, 1043 bp, Homo sapiens
atgccgagtcgctgaccgagcgcaccccgcccccggcgccatcttcccgaccgcgagccgtccagggtcttgctctgtctcccaggctggagtgcagtggctcagtcttggctcattgaaaccttcacctcctgggttcaagcgattctcctgcctcagcctcctgagtagctgggattacaaccgtatgccacaacgtccggctaattttgtaattttagtagagacagggtttcaccatgttggccaggctggtctcaaactcctgacctcaggtgatccgctcacctcggcctcccaaagtgctgggattacaggtgtgagccaccgcacctggcttaggggccatctttgagtcggccctggctctgctccccaggtctcagtgctgtgccccccccagagcctagaggatgtttcatgggatcccagccacgccgggcataggagcccctgggaacaagccggagctgtatgaggaagtgaagttgtacaagaacgcccgggagagggagaagtacgacaacatggcagagctgtttgcggtggtgaagacaatgcaagccctggagaaggcctacatcaaggactgtgtctcccccagcgagtacactgcagcctgctcccggctcctggtccaatacaaagctgccttcaggcaggtccagggctcagaaatcagctctattgacgaattctgccgcaagttccgcctggactgcccgctggccatggagcggatcaaggaggaccggcccatcaccatcaaggacgacaagggcaacctcaaccgctgcatcgcagacgtggtctcgctcttcatcacggtcatggacaagctgcgcctggagatccgcgccatggatgagatccagcccgacctgcgagagctgatggagaccatgcaccgcatgagccacctcccacccgactttgagggccgccagacggtcagccagtgcagctgcctgtctggtgtctgtctttggtgtcagaactttgggggccgggcccctccccacaataaagatgctctccgactt

SEQ ID NO: 56305 - DNA, 892 bp, Homo sapiens
gtctcagtgctgtgccccccccagagcctagaggatgtttcatgggatcccagccacgccgggcataggaggtgagtgtggctggaagggcgcaggctttcagccgcttctgcaggggctgacgggcagtattgggtattggggatcgggggtggggaggtatctgaccctgctctcgtacagccttgggggtggccaggggctaaatagttcattgcaggagcactgagggctcagaaacctccagacagaactggcttggtcctgctgggcagagatgatgagcttcggtgtggccagaacggtgggggtcctgggcaccctgtgtcaccaatcccaggggagaggctgtgtgtggtgagccttgttggcactgcatcatgagccacgagcagggcgtggccactgttgtgcaggtgactccgccagggagccatggtggagctggggagctgggcctgtcatgcggtcccccggggagccgcagtggagctggggagctgggcctgtcatgcggtcccccggggagccgcagtggagctggggagctgggcctgtcatgcggcccccggcttctcagaggtgttatcatcaggtccccccacacactgataggggtgaggttggaacctctgtgctccagctccctctgggctctttgggacccagcctgggaggcctcagggaggaactgaaatggagactgggactggagtctgcccttgggttccctttggggccagcctgccagctctctgccttctcttgcagcccctgggaacaagccggagctgtatgaggtgagtggtgggtgcccacccggccggcattggccaacagcaaatgcctgtgtggcctcaccagggtcctgcagcccctgttggcactggcc

SEQ ID NO: 56306 - DNA, 1283 bp, Homo sapiens
  misc_feature (4)..(4): n is a, c, g, or t
  misc_feature (6)..(7): n is a, c, g, or t
ggcncnnggccgaggtcgggatgtgacttgtctgcggtgggtctacatcccctttcagcagccccatcacctccgacgaggaatacctgagccccccagaggagttcccagagcctggggagacctggccgcgaacccccaccatgaagcccagtcccagccagaaccgccgttcttctgacactggctccaaggcaccccccaccttcaaggtctcacttatggaccagtcagtaagagaaggccaagatgtcatcatgagcatccgcgtgcagggggagcccaagcctgtggtctcctggctgagaaaccgccagcccgtgcgcccagaccagcggcgctttgcggaggaggctgagggtgggctgtgccggctgcggatcctggctgcagagcgtggcgatgctggtttctacacttgcaaagcggtcaatgagtatggtgctcggcagtgcgaggcccgcttggaggtccgaggcgagtgagctcagggggccacctgcgctccccccgctaccctccgagccgcgcccctgtctcaggcacctctcggacctcgctgtgtttcactgcctcctgcccacagacccaggcctgccggcccggacccgtcccagcctcccctccccaccccatgcagcccccagggggatagcccatgggcccctgtggaccctccctccccaagtggacacatggctgtgcaggccaggaggcccacagatggactgagtgctgggaaggggcggctgcgaggggtatcaaccccccgagtctctccctgaaggggagcaccgggcgagtgcatgtgctactgctgctacaggcctgtctatctgtttgtctgtctgtgtgtctgtgacagtcagggaaggatgcctcggagctgaggtggggtgagacagagtgggagagattacggcatggcatggaggggcccaaggagcaggggctgttgacaaaggccttaccaggaagggttaggacactgaccattctagaaatgggtttcgaatggcacaacactttctatttcacaaaagaccaaaagccagaggccccaggctctgtgctgatgaacagcctggctgagccctggccctggcaggtttagggcccatttggggccccctccttctctgtcagggctggggtgctctgtctgggaatgagggagttaaccaagtttggtgcaggagcaggggcagggggccactgtagtgagcgtggagaaatttggaaacacctatttcttaactcaaataaagtccagtttgtaccta

SEQ ID NO: 56307 - DNA, 395 bp, Homo sapiens
  misc_feature (27)..(27): n is a, c, g, or t
gcggccgactactactactactactantaaattcgcggccgcgtcgacgcccaaggagcaggggctgttgacaaaggccttaccaggaagggttaggacactgaccattctagaaatgggtttcgaatggcacaacactttctatttcacaaaagaccaaaagccagaggccccaggctctgtgctgatgaacagcctggctgagccctggccctggcaggtttagggcccatttggggccccctccttctctgtcagggctggggtgctctgtctgggaatgagggagttaaccaagtttggtgcaggagcaggggcagggggccactgtagtgagcgtggagaaatttggaaacacctatttcttaactcaaataaagtccagtttgtaccta

SEQ ID NO: 56308 - DNA, 1481 bp, Homo sapiens
atccaacctcctccttcccctcctcaggcgccttcccctcccccagggccttctccgtgcagggcctcagctgggtcagccgagtgagtggggctgggcaggctggacaggctgggctcctgctccctggggagccacgctggggtgggcagtgggcaggcagcaggagggcctggtgccagggcagagccttcaggacaggcacaggctggggtctgtgtgcagagcctcggggtgggtctacatcccctttcagcagccccatcacctccgacgaggaatacctgagccccccagaggagttcccagagcctggggagacctggccgcgaacccccaccatgaagcccagtcccagccagaaccgccgttcttctgacactggctccaaggcaccccccaccttcaaggtctcacttatggaccagtcagtaagagaaggccaagatgtcatcatgagcatccgcgtgcagggggagcccaagcctgtggtctcctggctgagaaaccgccagcccgtgcgcccagaccagcggcgctttgcggaggaggctgagggtgggctgtgccggctgcggatcctggctgcagagcgtggcgatgctggtttctacacttgcaaagcggtcaatgagtatggtgctcggcagtgcgaggcccgcttggaggtccgaggcgagtgagctcagggggccacctgcgctccccccgctaccctccgagccgcgcccctgtctcaggcacctctcggacctcgctgtgtttcactgcctcctgcccacagacccaggcctgccggcccggacccgtcccagcctcccctccccaccccatgcagcccccagggggatagcccatgggcccctgtggaccctccctccccaagtggacacatggctgtgcaggccaggaggcccacagatggactgagtgctgggaaggggcggctgcgaggggtatcaaccccccgagtctctccctgaaggggagcaccgggcgagtgcatgtgctactgctgctacaggcctgtctatctgtttgtctgtctgtgtgtctgtgacagtcagggaaggatgcctcggagctgaggtggggtgagacagagtgggagagattacggcatggcatggaggggcccaaggagcaggggctgttgacaaaggccttaccaggaagggttaggacactgaccattctagaaatgggtttcgaatggcacaacactttctatttcacaaaagaccaaaagccagaggccccaggctctgtgctgatgaacagcctggctgagccctggccctggcaggtttagggcccatttggggccccctccttctctgtcagggctggggtgctctgtctgggaatgagggagttaaccaagtttggtgcaggagcaggggcagggggccactgtagtgagcgtggagaaatttggaaacacctatttcttaactcaaataaagtccagtttgtaccta

SEQ ID NO: 56309 - DNA, 1422 bp, Homo sapiens
cacaaggatgggtcagcgctgcgcagcgagagccgcctcctcctccgggctgagggtgagcggcacaccctgctgctcagggaggccagggcagcagatgccgggagctatatggccaccgccaccaacgagctgggccaggccacctgtgccgcctcactgaccgtgagacccggtgggtctacatcccctttcagcagccccatcacctccgacgaggaatacctgagccccccagaggagttcccagagcctggggagacctggccgcgaacccccaccatgaagcccagtcccagccagaaccgccgttcttctgacactggctccaaggcaccccccaccttcaaggtctcacttatggaccagtcagtaagagaaggccaagatgtcatcatgagcatccgcgtgcagggggagcccaagcctgtggtctcctggctgagaaaccgccagcccgtgcgcccagaccagcggcgctttgcggaggaggctgagggtgggctgtgccggctgcggatcctggctgcagagcgtggcgatgctggtttctacacttgcaaagcggtcaatgagtatggtgctcggcagtgcgaggcccgcttggaggtccgaggcgagtgagctcagggggccacctgcgctccccccgctaccctccgagccgcgcccctgtctcaggcacctctcggacctcgctgtgtttcactgcctcctgcccacagacccaggcctgccggcccggacccgtcccagcctcccctccccaccccatgcagcccccagggggatagcccatgggcccctgtggaccctccctccccaagtggacacatggctgtgcaggccaggaggcccacagatggactgagtgctgggaaggggcggctgcgaggggtatcaaccccccgagtctctccctgaaggggagcaccgggcgagtgcatgtgctactgctgctacaggcctgtctatctgtttgtctgtctgtgtgtctgtgacagtcagggaaggatgcctcggagctgaggtggggtgagacagagtgggagagattacggcatggcatggaggggcccaaggagcaggggctgttgacaaaggccttaccaggaagggttaggacactgaccattctagaaatgggtttcgaatggcacaacactttctatttcacaaaagaccaaaagccagaggccccaggctctgtgctgatgaacagcctggctgagccctggccctggcaggtttagggcccatttggggccccctccttctctgtcagggctggggtgctctgtctgggaatgagggagttaaccaagtttggtgcaggagcaggggcagggggccactgtagtgagcgtggagaaatttggaaacacctatttcttaactcaaataaagtccagtttgtaccta

SEQ ID NO: 56310 - DNA, 1804 bp, Homo sapiens
atccaacctcctccttcccctcctcaggcgccttcccctcccccagggccttctccgtgcagggcctcagctgggtcagccgagtgagtggggctgggcaggctggacaggctgggctcctgctccctggggagccacgctggggtgggcagtgggcaggcagcaggagggcctggtgccagggcagagccttcaggacaggcacaggctggggtctgtgtgcagagcctcggggtgggtctacatcccctttcagcagccccatcacctccgacgaggaatacctgagccccccagaggagttcccagagcctggggagacctggccgcgaacccccaccatgaagcccagtcccagccagaaccgccgttcttctgacactggctccaaggcaccccccaccttcaaggtctcacttatggaccagtcagtaagagaaggccaagatgtcatcatgagcatccgcgtgcagggggagcccaagcctgtggtctcctggctgagaaaccgccagcccgtgcgcccagaccagcggcgctttgcggaggaggctgagggtgggctgtgccggctgcggatcctggctgcagagcgtggcgatgctggtttctacacttgcaaagcggtcaatgagtatggtgctcggcagtgcgaggcccgcttggaggtccgaggcgagtgagctcagggggccacctgcgctccccccgctaccctccgagccgcgcccctgtctcaggcacctctcggacctcgctgtgtttcactgcctcctgcccacagacccaggcctgccggcccggacccgtcccagcctcccctccccaccccatgcagcccccagggggatagcccatgggcccctgtggaccctccctccccaagtggacacatggctgtgcaggccaggaggcccacagatggactgagtgctgggaaggggcggctgcgaggggtatcaaccccccgagtctctccctgaaggggagcaccgggcgagtgcatgtgctactgctgctacaggcctgtctatctgtttgtctgtctgtgtgtctgtgacagtcagggaaggatgcctcggagctgaggtggggtgagacagagtgggagagattacggcatggcatggaggggcccaaggagcaggggctgttgacaaaggccttaccaggaagggttaggacactgaccattctagaaatgggtttcgaatggcacaacactttctatttcacaaaagaccaaaagccagaggccccaggctctgtgctgatgaacagcctggctgagccctggccctggcaggtttagggcccatttggggccccctccttctctgtcagggctggggtgctctgtctgggaatgagggagttaaccaagtttggtgcaggagcaggggcagggggccactgtagtgagcgtggagaaatttggaaacacctatttcttaactcaaataaagtccagtttgtacctatctggtgtgttgtgtttttttttcccccgccgatgtctctgccaccacgtggccctctcagtttcccctccctcagttccctcttgcctccatgaatcaccctccctggcccagcttggattgccatctcaaagccaggtctgggcatgccttgctgtcctggccaggtgggtgggctttccccatctccagagaacaaaatgcatctctctctctgtgtctgtctgtctctctgtgcgtgcgtatgtgtgtctccctcaccctgtgtgtctctgctctgtgcgtggcccccgtggctgctttcccctcagcacaccctgaaa

SEQ ID NO: 56311 - DNA, 1563 bp, Homo sapiens
atccaacctcctccttcccctcctcaggcgccttcccctcccccagggccttctccgtgcagggcctcagctgggtcagccgagtgagtggggctgggcaggctggacaggctgggctcctgctccctggggagccacgctggggtgggcagtgggcaggcagcaggagggcctggtgccagggcagagccttcaggacaggcacaggctggggtctgtgtgcagagcctcggggtgggtctacatcccctttcagcagccccatcacctccgacgaggaatacctgagccccccagaggagttcccagagcctggggagacctggccgcgaacccccaccatgaagcccagtcccagccagaaccgccgttcttctgacactggctccaaggcaccccccaccttcaaggtctcacttatggaccagtcagtaagagaaggccaagatgtcatcatgagcatccgcgtgcagggggagcccaagcctgtggtctcctggctgagaaaccgccagcccgtgcgcccagaccagcggcgctttgcggaggaggctgagggtgggctgtgccggctgcggatcctggctgcagagcgtggcgatgctggtttctacacttgcaaagcggtcaatgagtatggtgctcggcagtgcgaggcccgcttggaggtccgaggcgagtgagctcagggggccacctgcgctccccccgctaccctccgagccgcgcccctgtctcaggcacctctcggacctcgctgtgtttcactgcctcctgcccacagacccaggcctgccggcccggacccgtcccagcctcccctccccaccccatgcagcccccagggggatagcccatgggcccctgtggaccctccctccccaagtggacacatggctgtgcaggccaggaggcccacagatggactgagtgctgggaaggggcggctgcgaggggtatcaaccccccgagtctctccctgaaggggagcaccgggcgagtgcatgtgctactgctgctacaggcctgtctatctgtttgtctgtctgtgtgtctgtgacagtcagggaaggatgcctcggagctgaggtggggtgagacagagtgggagagattacggcatggcatggagggccctttcatgtcgagtgctttcatcccctaccaagaaagatttgaggaagagttcctgtggtggctcagtggtaacgaacctcactagtatccatgaggttgtggatttgatccctggcctcgctcagtgggttgaggaggcatgaaagcgctggacatgaatcatatccagggctttcatcccccctcactcaccccacttctagatggaccagccgggcatgaagggtctcgacatgaatcatgtccaggcctttcatgcctgcctaattagtctccagtctctcatccttctttttctggttcagatgtgatagtggtttcaggccgagtttgaacagagagagtacttccggggtcactgactggctgttgggctgagtccttctaacaatatgaccttcacgggatgaagcatctcgatatgaa

SEQ ID NO: 56312 - DNA, 1057 bp, Homo sapiens
agtttttgtggggatgaaatatggaaagtaccttaaaacaatatagctaaaggtgattttactcaataccatattatttcagaaaccaagatcagatcatgataaaaagtatgaagagaaacaatgggaaataaggtttgaggaattgctttcggctgaaacagacactcctcttttaccaccatatttgtcttcatctctgccttccccaggagaactctatgctgttcaagttaagcacgttgtctcacctaatgaagtgtatatttgccttgattctatagaaacttctaaccagtctaaccagcatagtgacacagatgatagtggagtcagcggggaatcagaatccgagagccttgatgaagcactgcagagggttaataagaaggtagaggcgcttcctcctctgacggattttagaacagaaatgccttgccttgcagaatatgatgatggcttatggtatagagcgaagattgttgccattaaagaatttaatcctttatctatcttagtacaatttgttgattatggatcaactgcaaagctgacattaaacagactgtgccaaattccttctcatcttatgcggtatccagctcgagccataaaggttctcttggcagggtttaaacctcccttaagggatctaggggagacaagaataccatattgtcccaaatggagcatggaggcactgtgggctatgatagactgtcttcaaggaaaacaactctatgctgtgtccatggctccagcaccagaacagatagtgacattatatgacgatgaacagcatccagttcatatgccgttggtagaaatggggcttgcagataaagatgaataagtgcctaagtgtatacagtgagagcatctatagaagcctagaagaattctgttatgtttagactatgtcttatctttagactatttcaggcttaattttcctaacttgttcagcactagtgctttacctctcatttttaattgaactgttaggaattgtgtggggaaaaaaagtaaataaatgttcgcttccaaaaatttgctt

SEQ ID NO: 56313 - DNA, 1472 bp, Homo sapiens
ttataataaggaattgcctgtgcatatctgtaatgtaatatctcctgagaagatttatgttcagtggttgttaactgaaaacttacttaatagtttagaagaaaagatgatagctgcttatgaaaactcaaaatgggaacctgttaaatgggaaaatgatatgcactgtgctgttaagatccaagataaaaatcagtggcgaagaggccagatcatcagaatggttacagacacattggtagaggtcttgctgtatgatgtgggtgttgaactagtagtgaatgttgactgtttaagaaaacttgaagaaaatctaaagacgatgggaagactctctttggaatgttctctggttgacataagaccagctggtgggagtgacaagtggacagcaacagcttgtgactgtctttcattgtacctgactggagctgtagcaactataatcttacaggtggatagtgaggaaaacaacacaacatggccattacctgtgaaaattttctgcagagatgaaaaaggagagcgtgttgatgtttctaaatatttgattaaaaagggtttggctttgagagaaaggagaattaataacttagataacagccattcattatctgagaagtctctggaagtccccctggaacaggaagattcagtagttactaactgtattaaaactaactttgaccctgacaagaaaactgctgacataatcagtgaacagaaagtgtctgaatttcaggagaaaattctagaaccaagaaccactagagggtataagccaccagctattcctaacatgaacgtatttgaggcaacagtcagctgtgttggtgatgatggaactatatttgtagtacctaaactatcagaatttgagctaataaaaatgacaaatgaaattcaaagtaatttaaaatgccttggtcttttggagccttatttctggaaaaaaggagaagcatgtgcagtaagaggatccgatactctgtggtatcgtggcaaggtgatggaggttgtaggtggcgctgtcagagtacaatatttagatcatggattcactgaaaagattccgcagtgccatctttaccctattttgctgtatcctgatataccccagttttgtattccttgtcagctccataataccacacctgttgggaatgtctggcaaccagacgcaatagaagttcttcaacaactgctttcaaagagacaggtggacattcacattatggtaatttaaagtatatatagttgttataaattacttgccataaaatattataattaacataatttgagggatatttttgatgataagcaatggtatataccttcttatgtgaattgcttgttagcataaaagaaactaccagtttggttcctgcgcctgctttaaataagcctgcttttgaacaagttcctgagaactttcataaccattaaagtcactaatttgaaagattctt

SEQ ID NO: 56314 - DNA, 450 bp, Homo sapiens
cagggtttaaacctcccttaagggatctaggggagacaagaataccatattgtcccaaatggagcatggaggcactgtgggctatgatagactgtcttcaaggaaaacaactctatgctgtgtccatggtaagtgtctcaagtagccaaaattattgtaaagctatttctgtgtcgatactttgtaaagtgtttgtttctatgcagcgtctacatgcgagagtatactaaagcatatacagctatataggatatagtttatatgtatagctttatatatacatataaagcttaattttgaggcttgttaaaatgtcttagtttatatttaacaaactgcttacccctgtggtgatataaaatatcatttatgtaattaataaaatgctcaagatgagtatcccataattaacttataatggggaaacaaatatgcaaacaagtatgaggt

SEQ ID NO: 56315 - DNA, 2212 bp, Homo sapiens
ttataataaggaattgcctgtgcatatctgtaatgtaatatctcctgagaagatttatgttcagtggttgttaactgaaaacttacttaatagtttagaagaaaagatgatagctgcttatgaaaactcaaaatgggaacctgttaaatgggaaaatgatatgcactgtgctgttaagatccaagataaaaatcagtggcgaagaggccagatcatcagaatggttacagacacattggtagaggtcttgctgtatgatgtgggtgttgaactagtagtgaatgttgactgtttaagaaaacttgaagaaaatctaaagacgatgggaagactctctttggaatgttctctggttgacataagaccagctggtgggagtgacaagtggacagcaacagcttgtgactgtctttcattgtacctgactggagctgtagcaactataatcttacaggtggatagtgaggaaaacaacacaacatggccattacctgtgaaaattttctgcagagatgaaaaaggagagcgtgttgatgtttctaaatatttgattaaaaagggtttggctttgagagaaaggagaattaataacttagataacagccattcattatctgagaagtctctggaagtccccctggaacaggaagattcagtagttactaactgtattaaaactaactttgaccctgacaagaaaactgctgacataatcagtgaacagaaagtgtctgaatttcaggagaaaattctagaaccaagaaccactagagggtataagccaccagctattcctaacatgaacgtatttgaggcaacagtcagctgtgttggtgatgatggaactatatttgtagtacctaaactatcagaatttgagctaataaaaatgacaaatgaaattcaaagtaatttaaaatgccttggtcttttggagccttatttctggaaaaaaggagaagcatgtgcagtaagaggatccgatactctgtggtatcgtggcaaggtgatggaggttgtaggtggcgctgtcagagtacaatatttagatcatggattcactgaaaagattccgcagtgccatctttaccctattttgctgtatcctgatataccccagttttgtattccttgtcagctccataataccacacctgttgggaatgtctggcaaccagacgcaatagaagttcttcaacaactgctttcaaagagacaggtggacattcacattatgaaaccaagatcagatcatgataaaaagtatgaagagaaacaatgggaaataaggtttgaggaattgctttcggctgaaacagacactcctcttttaccaccatatttgtcttcatctctgccttccccaggagaactctatgctgttcaagttaagcacgttgtctcacctaatgaagtgtatatttgccttgattctatagaaacttctaaccagtctaaccagcatagtgacacagatgatagtggagtcagcggggaatcagaatccgagagccttgatgaagcactgcagagggttaataagaaggtagaggcgcttcctcctctgacggattttagaacagaaatgccttgccttgcagaatatgatgatggcttatggtatagagcgaagattgttgccattaaagaatttaatcctttatctatcttagtacaatttgttgattatggatcaactgcaaagctgacattaaacagactgtgccaaattccttctcatcttatgcggtatccagctcgagccataaaggttctcttggcagggtttaaacctcccttaagggatctaggggagacaagaataccatattgtcccaaatggagcatggaggcactgtgggctatgatagactgtcttcaaggaaaacaactctatgctgtgtccatggctccagcaccagaacagatagtgacattatatgacgatgaacagcatccagttcatatgccgttggtagaaatggggcttgcagataaagatgaataagtgcctaagtgtatacagtgagagcatctatagaagcctagaagaattctgttatgtttagactatgtcttatctttagactatttcaggcttaattttcctaacttgttcagcactagtgctttacctctcatttttaattgaactgttaggaattgtgtggggaaaaaaagtaaataaatgttcgcttccaaaaatttgctt

SEQ ID NO: 56316 - DNA, 1727 bp, Homo sapiens
ttataataaggaattgcctgtgcatatctgtaatgtaatatctcctgagaagatttatgttcagtggttgttaactgaaaacttacttaatagtttagaagaaaagatgatagctgcttatgaaaactcaaaatgggaacctgttaaatgggaaaatgatatgcactgtgctgttaagatccaagataaaaatcagtggcgaagaggccagatcatcagaatggttacagacacattggtagaggtcttgctgtatgatgtgggtgttgaactagtagtgaatgttgactgtttaagaaaacttgaagaaaatctaaagacgatgggaagactctctttggaatgttctctggttgacataagaccagctggtgggagtgacaagtggacagcaacagcttgtgactgtctttcattgtacctgactggagctgtagcaactataatcttacaggtggatagtgaggaaaacaacacaacatggccattacctgtgaaaattttctgcagagatgaaaaaggagagcgtgttgatgtttctaaatatttgattaaaaagggtttggctttgagagaaaggagaattaataacttagataacagccattcattatctgagaagtctctggaagtccccctggaacaggaagattcagtagttactaactgtattaaaactaactttgaccctgacaagaaaactgctgacataatcagtgaacagaaagtgtctgaatttcaggagaaaattctagaaccaagaaccactagagggtataagccaccagctattcctaacatgaacgtatttgaggcaacagtcagctgtgttggtgatgatggaactatatttgtagtacctaaactatcagaatttgagctaataaaaatgacaaatgaaattcaaagtaatttaaaatgccttggtcttttggagccttatttctggaaaaaaggagaagcatgtgcagtaagaggatccgatactctgtggtatcgtggcaaggtgatggaggttgtaggtggcgctgtcagagtacaatatttagatcatggattcactgaaaagattccgcagtgccatctttaccctattttgctgtatcctgatataccccagttttgtattccttgtcagctccataataccacacctgttgggaatgtctggcaaccagacgcaatagaagttcttcaacaactgctttcaaagagacaggtggacattcacattatgaaaccaagatcagatcatgataaaaagtatgaagagaaacaatgggaaataaggtttgaggaattgctttcggctgaaacagacactcctcttttaccaccatatttgtcttcatctctgccttccccaggcactgtgggctatgatagactgtcttcaaggaaaacaactctatgctgtgtccatggctccagcaccagaacagatagtgacattatatgacgatgaacagcatccagttcatatgccgttggtagaaatggggcttgcagataaagatgaataagtgcctaagtgtatacagtgagagcatctatagaagcctagaagaattctgttatgtttagactatgtcttatctttagactatttcaggcttaattttcctaacttgttcagcactagtgctttacctctcatttttaattgaactgttaggaattgtgtggggaaaaaaagtaaataaatgttcgcttccaaaaatttgctt

SEQ ID NO: 56317 - DNA, 440 bp, Homo sapiens
cgcacctggcctaaaaatttgctagtttttaagtaaactggtcaaatgaattctgggtggctttataccagaataagttagtcatagatcctgagccacacagtatcagaagcctgttcatttgctagaataaatgttttctacacataccaagtcctcctacagttggccggagaaattgctgaccctaacagctgctaaccatctagaaccttatgaatcccattttagataatgctaagaaatgaaacactagaaatgtttgaggaatgtaaaactctcacactctgacagtaatgtttaaattggtatattttattaaataatgtcaaattattctccaaagttgaagatgcatatacttttcaaccagattccaatcctatacgcaagcacatatgtacacgtgtgcacgcacacacacacacacattttggata

SEQ ID NO: 56318 - DNA, 2279 bp, Homo sapiens
cggagctagtgaggatccagcccaggctccagttgtccgcggttcctcctcctgtcgctgcccgtgtgattactgagactcagatggaccacacatccccgacctacatgcttgctaacttaacccacttgcattctgaacaacttctgcagggcttgaatcttcttcgccaacatcacgaactctgtgacatcattcttcgagtaggtgatgttaaaattcatgctcacaaagtggtacttgccagcgtcagcccgtatttcaaagctatgttcactggaaacctttctgaaaaagagaacagtgaggttgagtttcaatgcattgatgaaactgctctccaggccattgtggagtatgcctatacagggactgtttttatttctcaggacacagttgaatctctcctgccagcagcaaacctactccagataaaacttgtcctgaaagaatgttgtgcatttcttgaaagccaacttgatcctggtaattgtattggaatttctcgttttgcagaaacatatggttgccgtgacctttatttggcagccactaaatacatatgccagaattttgaagctgtttgccagactgaagagttttttgagcttacacatgctgacttggatgaaattgtttccaatgactgtttgaatgtagctaccgaagagactgttttttatgcattagagtcttggatcaagtatgatgtacaagaacgccagaaatacttagcacagttactaaacagtgtacgattaccattgttgagtgttaagtttctcactagactatatgaagcaaatcatcttattcgtgatgatcgcacttgtaaacatcttttgaatgaagccctaaagtaccactttatgcctgaacatagactctctcatcagacagtcttgatgacacgacctcgctgtgctcccaaagtactttgtgcagtaggagggaaatctggactctttgcctgtttggataggtaaatagaaggctttcctaaatgaatgatgctaattgattttatgctttttaaatgtgcagattttctatattttaaaaatagtttgattttcctttttacttttctttgcttctttttagtttttttcttcttcctaaaatacttacgtgattgtttttattatattgtcattcattctttacaatactctcaattattaaccatctccccaagtgcacactttatccacctggttactcacaaacttttattccattttctctctttctttctttttttctttctggaaccatttacatgtttatttgagtcagaccacatcagaagagatttattattgtcaattatatcagaagatagcaaagaagagaactaggaacctgtggtgagggaactggggacaggaatgggtttgaatgaaaacagttcactagaagcgctaccaaagaaatgagaaaaaataggatgctgatataaattatgtactttgagtgtaatttgttttcttcagtgtatttttaaaagacagcattaagaaatatgtttttccccccaataacttagattaggaattgtcagactttttctataaaagaccaaacagtaaatattttagactttgtgagccatgtaatctttgtggcatctacttaactctgccattgtagtgtgagagcagccatagataatacataagtgaatgaacatggatgtgttccaataaaactttatttataaaaatagctagtgggctaaatttggcccatggtgatagcttgccaacccttaatttggtgcattatactagtaacttttatacattgaaaatatagcttgaagttatttttgctttttcttagataggattgcttcatgaaaacttttgtgtttaatacatattttttaatactgtggatttctgaccatttccaaaaatttggtagattgcttttccctttccaatgttaggaaacttgacgtttcatcaatggcaactgataaattctgcatctttaaaaaagtctcaaaatacctgtaatcccagcactttgggaggccaacacaggaggatcacttgagactggagtttgagacaagcctgggcattataacgagatcctgtccttacaaaaaatttaaaatattatctgggagtggtgttgcactcctgtagtcccagctaatcaggaggctgaggcaagaggattgcttgggcccgggagtttgaagttgcagtgagctatgaatgcaccattgcacactaacctgggtgacagaatgagaccctgttttg

SEQ ID NO: 56319 - DNA, 1105 bp, Homo sapiens
cggagctagtgaggatccagcccaggctccagttgtccgcggttcctcctcctgtcgctgcccgtgtgattactgagactcagatggaccacacatccccgacctacatgcttgctaacttaacccacttgcattctgaacaacttctgcagggcttgaatcttcttcgccaacatcacgaactctgtgacatcattcttcgagtaggtgatgttaaaattcatgctcacaaagtggtacttgccagcgtcagcccgtatttcaaagctatgttcactggaaacctttctgaaaaagagaacagtgaggttgagtttcaatgcattgatgaaactgctctccaggccattgtggagtatgcctatacagggactgtttttatttctcaggacacagttgaatctctcctgccagcagcaaacctactccagataaaacttgtcctgaaagaatgttgtgcatttcttgaaagccaacttgatcctggtaattgtattggaatttctcgttttgcagaaacatatggttgccgtgacctttatttggcagccactaaatacatatgccagaattttgaagctgtttgccagactgaagagttttttgagcttacacatgctgacttggatgaaattgtttccaatgactgtttgaatgtagctaccgaagagactgttttttatgcattagagtcttggatcaagtatgatgtacaagaacgccagaaatacttagcacagttactaaacagtgtacgattaccattgttgagtgttaagtttctcactagactatatgaagcaaatcatcttattcgtgatgatcgcacttgtaaacatcttttgaatgaagccctaaagtaccactttatgcctgaacatagactctctcatcagacagtcttgatgacacgacctcgctgtgctcccaaagtactttgtgcagtaggagggaaatctggactctttgcctgtttggataggcttgctagctatccatgtgatgtcttctaccatgagatgacccttcccagatgctagcaccatgttcttggacttcccagcctccagtaccttgagccaaataaactcctgttctttataaa

SEQ ID NO: 56320 - DNA, 2549 bp, Homo sapiens
agcggattttaggcgaactgagaattttgtgtgcattttctcctcataagtgatacttaaacggacacagtggaagagctggagtgtctagtgtgagcctgaatgctttggagtgtggaagagatattttttttttttgaaggaataatactattacttttgaatgactcgtgcgaaaagtctaagttatcatttgaagacccaaatttatgcacttcaaatgcaagtattcctaccctgctctgtaccagatggaccacacatccccgacctacatgcttgctaacttaacccacttgcattctgaacaacttctgcagggcttgaatcttcttcgccaacatcacgaactctgtgacatcattcttcgagtaggtgatgttaaaattcatgctcacaaagtggtacttgccagcgtcagcccgtatttcaaagctatgttcactggaaacctttctgaaaaagagaacagtgaggttgagtttcaatgcattgatgaaactgctctccaggccattgtggagtatgcctatacagggactgtttttatttctcaggacacagttgaatctctcctgccagcagcaaacctactccagataaaacttgtcctgaaagaatgttgtgcatttcttgaaagccaacttgatcctggtaattgtattggaatttctcgttttgcagaaacatatggttgccgtgacctttatttggcagccactaaatacatatgccagaattttgaagctgtttgccagactgaagagttttttgagcttacacatgctgacttggatgaaattgtttccaatgactgtttgaatgtagctaccgaagagactgttttttatgcattagagtcttggatcaagtatgatgtacaagaacgccagaaatacttagcacagttactaaacagtgtacgattaccattgttgagtgttaagtttctcactagactatatgaagcaaatcatcttattcgtgatgatcgcacttgtaaacatcttttgaatgaagccctaaagtaccactttatgcctgaacatagactctctcatcagacagtcttgatgacacgacctcgctgtgctcccaaagtactttgtgcagtaggagggaaatctggactctttgcctgtttggataggtaaatagaaggctttcctaaatgaatgatgctaattgattttatgctttttaaatgtgcagattttctatattttaaaaatagtttgattttcctttttacttttctttgcttctttttagtttttttcttcttcctaaaatacttacgtgattgtttttattatattgtcattcattctttacaatactctcaattattaaccatctccccaagtgcacactttatccacctggttactcacaaacttttattccattttctctctttctttctttttttctttctggaaccatttacatgtttatttgagtcagaccacatcagaagagatttattattgtcaattatatcagaagatagcaaagaagagaactaggaacctgtggtgagggaactggggacaggaatgggtttgaatgaaaacagttcactagaagcgctaccaaagaaatgagaaaaaataggatgctgatataaattatgtactttgagtgtaatttgttttcttcagtgtatttttaaaagacagcattaagaaatatgtttttccccccaataacttagattaggaattgtcagactttttctataaaagaccaaacagtaaatattttagactttgtgagccatgtaatctttgtggcatctacttaactctgccattgtagtgtgagagcagccatagataatacataagtgaatgaacatggatgtgttccaataaaactttatttataaaaatagctagtgggctaaatttggcccatggtgatagcttgccaacccttaatttggtgcattatactagtaacttttatacattgaaaatatagcttgaagttatttttgctttttcttagataggattgcttcatgaaaacttttgtgtttaatacatattttttaatactgtggatttctgaccatttccaaaaatttggtagattgcttttccctttccaatgttaggaaacttgacgtttcatcaatggcaactgataaattctgcatctttaaaaaagttgctgggattacaggcaaaagccactgcacccagcctcataatacattttaactgtaacctgaaactagtattgttgagactgggctacacatagaacattagttatgttagctacacgaattgattgtttaactcttattctgaaatgcactggttactggcataaagtaaattatattagtaaatattatgacaaaaattttcgaatatgtatttatagtgtaaaaatttttgagcagttgcctcttattttctcaactattaaaaataacaaattattgaagaataataagacctgttcatatcttttgacatagtaatcttttatcatagaatctatcataataaaattttaaaaattaaaagtattat

SEQ ID NO: 56321 - DNA, 1465 bp, Homo sapiens
agcggattttaggcgaactgagaattttgtgtgcattttctcctcataagtgatacttaaacggacacagtggaagagctggagtgtctagtgtgagcctgaatgctttggagtgtggaagagatattttttttttttgaaggaataatactattacttttgaatgactcgtgcgaaaagtctaagttatcatttgaagacccaaatttatgcacttcaaatgcaagtattcctaccctgctctgtaccagatggaccacacatccccgacctacatgcttgctaacttaacccacttgcattctgaacaacttctgcagggcttgaatcttcttcgccaacatcacgaactctgtgacatcattcttcgagtaggtgatgttaaaattcatgctcacaaagtggtacttgccagcgtcagcccgtatttcaaagctatgttcactggaaacctttctgaaaaagagaacagtgaggttgagtttcaatgcattgatgaaactgctctccaggccattgtggagtatgcctatacagggactgtttttatttctcaggacacagttgaatctctcctgccagcagcaaacctactccagataaaacttgtcctgaaagaatgttgtgcatttcttgaaagccaacttgatcctggtaattgtattggaatttctcgttttgcagaaacatatggttgccgtgacctttatttggcagccactaaatacatatgccagaattttgaagctgtttgccagactgaagagttttttgagcttacacatgctgacttggatgaaattgtttccaatgactgtttgaatgtagctaccgaagagactgttttttatgcattagagtcttggatcaagtatgatgtacaagaacgccagaaatacttagcacagttactaaacagtgtacgattaccattgttgagtgttaagtttctcactagactatatgaagcaaatcatcttattcgtgatgatcgcacttgtaaacatcttttgaatgaagccctaaagtaccactttatgcctgaacatagactctctcatcagacagtcttgatgacacgacctcgctgtgtgctgggattacaggcaaaagccactgcacccagcctcataatacattttaactgtaacctgaaactagtattgttgagactgggctacacatagaacattagttatgttagctacacgaattgattgtttaactcttattctgaaatgcactggttactggcataaagtaaattatattagtaaatattatgacaaaaattttcgaatatgtatttatagtgtaaaaatttttgagcagttgcctcttattttctcaactattaaaaataacaaattattgaagaataataagacctgttcatatcttttgacatagtaatcttttatcatagaatctatcataataaaattttaaaaattaaaagtattat

SEQ ID NO: 56322 - DNA, 259 bp, Homo sapiens
gccacgaccacagtgatgttccacttctctgggtggggaggtggtaccgcaggcagggccaggttggtggggctgggtggtttagaaatcctggcttccatctcagcccccgccggtgaccaccgaggtagcttttgtgtgatctgtcgtttcctccgctactcatctcatcagagaggcccgttttgtcttggtgttctatttcatctttcagacccgaagggccacatcttacttgcatggtgtgtgttcaggtttt

SEQ ID NO: 56323 - DNA, 374 bp, Homo sapiens
atcaacagtgttgcattccttctactgcccatgtgtcagtgtcagcaaaggcctcttacatcaagacctcgtagcctccatcagagcaacctgtgtgacccatcctctgattaaaggacaccatagggagagcacaaatggtgtttttcaccaccaaacccagagtgctgagatatacttgtttaccctagcagtgtttatctttgaacggtgttaggttgatttgggatacaggtttcctttcttccctcctttgatcagctagggaaaaaaaatggattttggtcaagataataagctaggtaaattctataaaacagagtaaaacattcagtgtgtaaacatgattatagacccaatattttggatccaaa

SEQ ID NO: 56324 - DNA, 125 bp, Homo sapiens
aaaattgacttagcaacacctcacttttgagcagagaaatgaaatataactgagtggtttcgtgcatgcatgcccttcctttcctccgagggcctggcatggtgctggatacagggaatctggca

SEQ ID NO: 56325 - DNA, 441 bp, Homo sapiens
ccctcaccgctcatccatcagttaacatcttggtatgttaccttccattctttcccacctccattttttacattgtcgggagattttcacctttaaaatgtgcttatcctggtagagcgttacctaagtgctaaggaataaattgacgcacggatttgtgaaattcaaatctgaccagccactagcccaatcaatacctgacagcaaagcaggtgtaaagtgttaaaccaacttcaaagtctttccaaggaaactctggaaataaacctgaagacctctgcaagaaatcactttaacagtagtgcttctccacagtgcttctaggttatttctttgtgattgcgataattaaataccttgttaatggaaagaagggaaagaaaggaagagaaagcccctacccacccccactcttagttataaaatactttctaatagtct

SEQ ID NO: 56326 - DNA, 383 bp, Homo sapiens
gaggacctatatctttgggatatacatgtttaagcaaaattaacctggcaggggagatacattgagaagggttgattgaagcagtaagagattggaagggggaaagacaaactcagaggctctggccaccatgcatggaggaaatgaggaagattactgctgtaaaattcagtgaaaaaaatccatgtgctactaggaaaagcatggacttcaaaatcagaaaaattggagttgaatcccagcccaacaactcataaactctgtgacttcaagcaaggtacccaacttccttaaacctcattttctcaacttataaaatggatgtgaaatcagcatacataattgttataaagactaaattataaaggtttttaaatgcttag

SEQ ID NO: 56327 - DNA, 303 bp, Homo sapiens
aagaaataaatgtacctacactagctagttagacttcttatgaacatggctaaagacataacttgagcctttgcaaggtgtctttggcagagatctaaaatgcattgctgatccccaccctcccctctagggaaatcgcttaggcattgtctgtgtagatatcacctggaagctagtcaaaaatgcagaatctcaggccctgtggcaagcctcctgaatcagaatctgcaatcctgacagaagctccaagtgactcatgggaacattaaagtctaagaagctctagttttagtgacatccctc

SEQ ID NO: 56328 - DNA, 352 bp, Homo sapiens
ttataaattagaattcctgtcattgatttaatcattttcctgaattacacaaagttcaattgactgattgttaacacatggagcttgcattaatctatcacattgaggtcattcaatggaagaggtacctacagccaacagcagaatagtgtcatcaagatatttctaggataatagataacatatgaaagaacagatctgactctttttatattttaataaactttcctagtgtcacagtgaaagttcctcaatgactattcccctcaagttctctcacagtgaaatcccatcagactttagtttgctttatttgcaaaacaatagtacaaatctctccttaaataggtta

SEQ ID NO: 56329 - DNA, 208 bp, Homo sapiens
attcttttgcatatgaatattttcttttttcagcatcctttcttaaagagactgttaactaaatgaataaaagaaaatccacaaaggagaaaaaaagtatttgcaaactacccatctgacaaggaattaataaccagattatataaggagctccaaaaacactcaataacaaaacaaaacaaaaacaaaacaataacaaaacaataca

SEQ ID NO: 56330 - DNA, 227 bp, Homo sapiens
gtgctgcctatgaatattatcttatatggcctaagggtctgagacctttaacttaatcacattttatgtcatataaggtaatattcacaggttccagggattaggacatgggcatatcttttgggaagggaccattcaacgcactacacccttcttccaaatcatgtaagaatcttagcatacctaaacttgaatcactcctcctaacttatgttattgttggccgg

SEQ ID NO: 56331 - DNA, 332 bp, Homo sapiens
catttctggagttatgttcaaggcaagtggtggagttaaaattgttagcgctcatagttgtcacagaaagacaaacagtgtaatgacttgaagatatacttggattattttattttttataaaataagaaaaatcagaagaaaggtgtttaacattgattaagtcctataatagaaaaccttaatcctaggaagtatgaatggagtacgaaagctttcccatatgcattacagggaattaaaatacacaatacacttaacctagagagatcacgattgcaaatgagatactgttattcttattggtgtgctccatttttattacttcacctc

SEQ ID NO: 56332 - DNA, 417 bp, Homo sapiens
gaggccttgctttcagggatataacttccttccatcttttatctctgccttcccctaactggtatcctggaagttgggatgctgccctgtgagttaacacagagaagagtcactggagagagaacaacagttctgttcatgttttaatgtcaagtttgaaatgagtcacttcctctcactttcccttggctggttcttagccaggtgaaacatctattcttagaggacctgggacctggatggccatgagccaagcttacctatgtggaaaagagggagcaccagcactatccgaagaggagaaaaggacacgggaacattcagtggattccatcgtcattgccaatgttttcagaacttgcggttcttacatcataaccaagatttctgccctcgattataaaccagggcctgcat

SEQ ID NO: 56333 - DNA, 391 bp, Homo sapiens
tttatatatagcataccatactgccttggtgagagtcttgaacttcatcctgactgaggacagccctgaaccaattcatggggtcatgggaatgctgtgagctaacgaaatcattctggcaaaggataaggggaagagctaatgaaatcattctggctagggatgaaggaaagagaagggcttttccagttgaccttgatcagttaaaacttagccctcaagttgaatacgaagctcagtctactccacccaaactgttgttgggtagaatatacatgatggggaagaaattgaatgaatattgacaagacacacagtgtctacaacagctagtaaaatactttacatgtttttttgttgttttgttttttgggttttttttgagatggtg

SEQ ID NO: 56334 - DNA, 906 bp, Homo sapiens
cgctatatataaggtggggaggccgccggcccgttcggttccgggcgttaccatcgtccgtgcgcaccgcccggcgtccaggtgagtctcccatctgcagagacgcggacgcgccggcccgcagttggcctgcggagcgcggtggacggtttggcgcccaccaggcgatcaatactttggatttttaatttctagatttggcaattcttcgctgaagtcatcatgagctttttccaactcctgatgaaaaggaaggaactcattcccttggtggtgttcatgactgtggcggcgggtggagcctcatctttcgctgtgtattctctttggaaaaccgatgtgatccttgatcgaaaaaaaaatccagaaccttgggaaactgtggaccctactgtacctcaaaagcttataacaatcaaccaacaatggaaacccattgaagagttgcaaaatgtccaaagggtgaccaaatgacgagccctcgcctctttcttctgaagagtactctataaatctagtggaaacatttctgcacaaactagattctggacaccagtgtgcggaaatgcttctgctacatttttagggtttgtctacattttttgggctctggataaggaattaaaggagtgcagcaataactgcactgtctaaaagtttgtgcttattttcttgtaaatttgaatattgcatattgaaatttttgtttatgatctatgaatgtttttcttaaaatttacaaagctttgtaaattagattttctttaataaaatgccatttgtgcaagatttctcaaagattaggtatatatttaaatggaagagaaaatatttttatgggagaaaaatacatttgaaccatgaaatttcatcttttaaataacatccagtacagatatctgtgta

SEQ ID NO: 56335 - DNA, 709 bp, Homo sapiens
cgctatatataaggtggggaggccgccggcccgttcggttccgggcgttaccatcgtccgtgcgcaccgcccggcgtccagatttggcaattcttcgctgaagtcatcatgagctttttccaactcctgatgaaaaggaaggaactcattcccttggtggtgttcatgactgtggcggcgggtggagcctcatctttcgctgtgtattctctttggaaaaccgatgtgatccttgatcgaaaaaaaaatccagaaccttgggaaactgtggaccctactgtacctcaaaagcttataacaatcaaccaacaatggaaacccattgaagagttgcaaaatgtccaaagggtgaccaaatgacgagccctcgcctctttcttctgaagagtactctataaatctagtggaaacatttctgcacaaactagattctggacaccagtgtgcggaaatgcttctgctacatttttagggtttgtctacattttttgggctctggataaggaattaaaggagtgcagcaataactgcactgtctaaaagtttgtgcttattttcttgtaaatttgaatattgcatattgaaatttttgtttatgatctatgaatgtttttcttaaaatttacaaagctttgtaaattagattttctttaataaaatgccatttgtgcaaaaaaaaaaagggacacaaaaaaactctcccaaggct

SEQ ID NO: 56336 - DNA, 645 bp, Homo sapiens
aaacaacacagaacacgcaacccccaaatcccccacacaccaaaccacatttcatttggcaattcttcgctgaagtcatcatgagctttttccaactcctgatgaaaaggaaggaactcattcccttggtggtgttcatgactgtggcggcgggtggagcctcatctttcgctgtgtattctctttggaaaaccgatgtgatccttgatcgaaaaaaaaatccagaaccttgggaaactgtggaccctactgtacctcaaaagcttataacaatcaaccaacaatggaaacccattgaagagttgcaaaatgtccaaagggtgaccaaatgacgagccctcgcctctttcttctgaagagtactctataaatctagtggaaacatttctgcacaaactagattctggacaccagtgtgcggaaatgcttctgctacatttttagggtttgtctacattttttgggctctggataaggaattaaaggagtgcagcaataactgcactgtctaaaagtttgtgcttattttcttgtaaatttgaatattgcatattgaaatttttgtttatgatctatgaatgtttttcttaaaatttacaaagctttgtaaattagattttctttaataaaatgccatttgtgcaa

SEQ ID NO: 56337 - DNA, 777 bp, Homo sapiens
aaatacaaacaacgacccactcaatccaccaactgccacgacaacacgcccaaccgcctttcgacgatttggcaattcttcgctgaagtcatcatgagctttttccaactcctgatgaaaaggaaggaactcattcccttggtggtgttcatgactgtggcggcgggtggagcctcatctttcgctgtgtattctctttggaaaaccgatgtgatccttgatcgaaaaaaaaatccagaaccttgggaaactgtggaccctactgtacctcaaaagcttataacaatcaaccaacaatggaaacccattgaagagttgcaaaatgtccaaagggtgaccaaatgacgagccctcgcctctttcttctgaagagtactctataaatctagtggaaacatttctgcacaaactagattctggacaccagtgtgcggaaatgcttctgctacatttttagggtttgtctacattttttgggctctggataaggaattaaaggagtgcagcaataactgcactgtctaaaagtttgtgcttattttcttgtaaatttgaatattgcatattgaaatttttgtttatgatctatgaatgtttttcttaaaatttacaaagctttgtaaattagattttctttaataaaatgccatttgtgcaagatttctcaaagattaggtatatatttaaatggaagagaaaatatttttatgggagaaaaatacatttgaaccatgaaatttcatcttttaaataacatccagtacagatatctgtgta

SEQ ID NO: 56338 - DNA, 1111 bp, Homo sapiens
cgctatatataaggtggggaggccgccggcccgttcggttccgggcgttaccatcgtccgtgcgcaccgcccggcgtccaggtgagtctcccatctgcagagacgcggacgcgccggcccgcagttggcctgcggagcgcggtggacggtttggcgcccaccaggcgatcaatactttggatttttaatttctagatttggcaattcttcgctgaagtcatcatgagctttttccaactcctgatgaaaaggaaggaactcattcccttggtggtgttcatgactgtggcggcgggtggagcctcatctttcgctgtgtattctctttggaaaaccgatgtgatccttgatcgaaaaaaaaatccagaaccttgggaaactgtggaccctactgtacctcaaaaggtattgttaaattaaaaacaaatgatttatattttgcccaaaccttagcacctttgtgagcaaaatagatttagtaccttacccttattgtgtaacttagatcaattgtgccttcatcgagtaattaaaatgaggaaattttaagagcctactctatgccaggagcattgtccatccactcatgagaagcatatacacttttggaactatggctcacataatacctggcaaacttaaaaatctggataccggccaggcacggtgtctcacacctgtaatgccaacactttgggaggccgaggcgggtggatcacttgaagtcaggagttcgagaccagcttggccaacatggtgaaattccatctttactaaaaatacaaaaattagctgggtgtagtagaacgcacctgtaaacccagctactggagaggctgaggcacgaaaattgcttgaacatgggaggcggaggctgcagtgagttgcagttgtgccactgcactccagcctgggcaacacagcaagactgtcttaaaaaaaaatctggatactgctaagtgaaagtagggcacatgtgtttgatctttccctctgatctcataacacttaggagcccaagggctttgtaaaaagatggactgatagaaaccagctcacattactattttgtgcatgttttagatatggaaagaggtaggtacaaacacaa

SEQ ID NO: 56339 - DNA, 243 bp, Homo sapiens
ttcatgactgtggcggcgggtggagcctcatctttcgctgtgtattctctttggaaaaccgatgtgatgtaagtaggtctcaatttataaaaacgtttttggcagtgtttggatgacttttagtttatgaaatgtataagtttcctatttttttcccatggatgagaatgccaaattgtgaactgggagtcagggttaaaaagcatcttttatcagaaaactcttatgatattgtctaccaat

SEQ ID NO: 56340 - DNA, 673 bp, Homo sapiens
cgctatatataaggtggggaggccgccggcccgttcggttccgggcgttaccatcgtccgtgcgcaccgcccggcgtccagatttggcaattcttcgctgaagtcatcatgagctttttccaactcctgatgaaaaggaaggaactcattcccttggtggtgttcatgactgtggcggcgggtggagcctcatctttcgctgtgtattctctttggaaaaccgatgtgatccttgatcgaaaaaaaaatccagaaccttgggaaactgtggaccctactgtacctcaaaagcttataacaatcaaccaacaatggaaacccattgaagagttgcaaaatgtccaaagggtgaccaaatgacgagccctcgcctctttcttctgaagagtactctataaatctagtggaaacatttctgcacaaactagattctggacaccagtgtgcggaaatgcttctgctacatttttagggtttgtctacattttttgggctctggataaggaattaaaggagtgcagcaataactgcactgtctaaaagtttgtgcttattttcttgtaaatttgaatattgcatattgaaatttttgtttatgatctatgaatgtttttcttaaaatttacaaagctttgtaaattagattttctttaataaaatgccatttgtgcaa

SEQ ID NO: 56341 - DNA, 1026 bp, Homo sapiens
cccggcggcgcgtggtgtcgggtctgaaaaccctacgcgactccgaagatttattttcagaaccatccttccagcacactccctctcccctctagcccgcacacagaggctgggcttagccttggggaagatctgcctttggactctcacacccctgtttacactcacagtaccattgtccagttctgggcagaccaccccaaggcctgcccaatccctcccccgcccccaactctacatccttctctgcctttgtaagggactttacgctttggctctctcacccacctgaggcccatgagtgagaaactctgagacctgtgccacgtgccagagggtacagcggaagcgagtagagtctctgtcttcagggaaattgtatccctcttcttgcacaggatgctgaaagaatttacttttaatcatctttattatctcattgaagcttggaattacatagctggaaaggatcttacaggttgtcactctgccacccaggctggagtacagtggcacaatcataactcactgccgccttgaccttcctgctcaagtgatcctcccatctcagcctcccaagtagttggaactacagatgactaccaccacgcctagcaaatttttgtatattttatagagactagggtctcgccatgttgcccaggctggtctcgaactcctggtctcaagagatctgccagcctcagcctgccagagtgctgggactacaggagggtgccaccatgcctggctggaaagaaatcttgagagatatttttcttctccagtgttgtcttgacatatattgaatatcagtggcatgcgtcattgtgtatgagtaaatgagtaggttaagaaaaattttcagctgggtgtggtggctcacgtctgtaatcccaccactttgggaagctgaggcaggtggatcatgaggtcaggagttcaagaccagcctggccaaggtggtgaaaccccatctttactaaaaatacaaaaattagctgggtgtggttgcaggcatctgta

SEQ ID NO: 56342 - DNA, 592 bp, Homo sapiens
cccaggtactcagggaaggggcaggagaaccacttgagccaaggagttcaaggctgcagtgagctgtgatcacaccactgcattccagccaggacaacagagtgacatcctgtctcaaaaataaataaattttttaatgatgaaactaactaaggtactgaggaggtaagatatttccccacggtaagtcattcagaaactaaatgtgaaaaaccaaaagaagcctctggggttagtattcccagtctccttgtctgcccaggaccccacatttgtgtaagttgctaattgcacaagggtatcctactgaggctgtgaatagagtagaaatccaggctgggatgggcttatcaagccatggactgtggcaaggagctacgcccacctggagatgggatcccctcttggaatcggcacaaaggctccaggcttccctgccaaacgcggcgcctgtggagctgtgctggggctcagctcttgggtcggacagatgaacggtaaggcacattagcagtgttacctacggtatcctcctgcgtgtcacactggaactagagcttctcttggcatgatgttaaagaatacctgttta

SEQ ID NO: 56343 - DNA, 296 bp, Homo sapiens
gggaggactgcttgagcctaggaggcagaggttacaatgagccaagatcacagaactgcattaaagcatgggcaacgacagggcaagaccctgtctcaaaaaaaaaaagaaaaaaacaaagaaccagtatgatctcattttttttaaaagaatacatttgcatgaaaaaatataatcatatacgtaagtgctagctattactcttaagtgatggattatggaagattttcactttctttttattgtgtgtatttttgacattttctacagcaaacatatatttacttttgttaaaa

SEQ ID NO: 56344 - DNA, 3988 bp, Homo sapiens
ggatccgcgggacagatgaggaaggggcttaagtcactgcagccagagggatggaggtggactgatgggagggcttctccggtggggttagaagggaaaagtagggaaagagaagtgtaaggtagatggcagaggcagagacatggaaagacagactctagggttcctgatgatatctatctcggccaacacaaaagggagggtacagtggtgggggcacccaagctagggtgtgagtaccctaagtgtattcttctgagatgtaggccattcactaactcttggaacagctacagtttcacagtaggaagacccccccagattcactgcccctcccttagtaaagcctctgagaccttcctgaacattcccttctgtctttgccctctgttccttccagagactatgtgcccaggcagatggattcctcccgggcctgagaggaactgcaggaattctcctgcctcttacccgtaaaaccccaacttctctagccctagggcaggaagtcccaaacaatttctacccctttttctgcaattctcattggggtgagaggaggcccaggaggagagagagctgggctcagcttctttttgagctgctggagccctctgtgaggaggccctctttgctggcttctcaggagagtgtggctaggttctgcctgcctatgggaagagggggccagggtgtgtggagcaagatggtgcggtgctggtgccttgggacctgggggaatgggacagctggtcggctcagagacggcctactttactcacagctggaatttagtggggagaagcagctcaactccaatcctggaggattagggagattaaagtgagagaagagagagatgtcccagagaccaagagctcccaggtcagccctctggctcctggcacccccactgctgcggtgggcacccccactcctcacagtgctgcatagcgacctcttccaggccttgctggacatcctggactattatgaggcttccctctcagagagtcagaaataccgctaccaagatgaagacacgccccctctggagcacagcccggcccacctccccaaccaggccaattctcccccagtgattgtcaacacagataccctagaagccccaggatatgagttgcaggtgaacgggaccgagggggagatggaatacgaggaaatcacattggaaaggggtaactcaggtctgggcttcagcatcgcaggtggcactgacaacccacacatcggtgacgacccatccattttcatcaccaagatcattcctggtggggctgcggcccaggatggccgcctcagggtcaacgacagcatcctgtttgtaaatgaagtggacgtgcgcgaggtgacccactcagcggcggtggaagccctcaaagaggcaggctccatcgttcgcctctatgtcatgcgccggaagcccccggctgagaaggtcatggagatcaagctcatcaaggggcctaaaggtcttggcttcagcatcgcagggggcgtagggaaccagcacatcccaggagataatagcatctatgtaacaaagatcatcgaagggggtgctgcccacaaggatgggaggttgcagattggagacaagatcctggcggtcaacagtgtggggctagaggacgtcatgcatgaagatgctgtggcagccctgaagaacacgtatgatgttgtctacctaaaggtggccaagcccagcaatgcctacctgagtgacagctatgctcccccagacatcacaacctcttattcccagcacctggacaatgagatcagtcacagcagctacctgggcaccgactaccccacagccatgacccccacttcccctcggcgctactctccagtggccaaggacctgctcggggaggaagacattccccgagaaccgaggcgaattgtgatccaccggggctccacgggcctgggcttcaacatcgtgggtggcgaggacggtgaaggcatcttcatctcctttatcctggccgggggccctgcagacctcagtggggagctgcggaagggggaccagatcctgtcggtcaacggtgtggacctccgaaatgccagccatgagcaggctgccattgccctgaagaatgcgggtcagacggtcacgatcatcgctcagtataaaccagaagagtacagccgattcgaggccaagatccacgaccttcgggaacagctcatgaacagcagcctgggctcagggactgcgtccctgcggagcaaccccaaaaggggtttctacatcagggccctgtttgattacgacaagaccaaggactgcggcttcctgagccaggccctgagcttccgctttggggatgtgctgcatgtcatcgatgctagtgatgaggagtggtggcaggcacggcgggtccactctgacagtgagaccgacgacattgggttcatccccagcaaacggcgggttgagcgacgagagtggtcaaggttaaaggccaaggactggggctccagctctggatcgcagggtcgagaagactcggttctgagctacgagacagtgacgcagatggaagtgcactatgctcgccccatcatcatccttgggcccaccaaggaccgcgccaacgatgatcttctctccgagttccccgacaagtttggatcctgtgttccccatacgacacggcccaagcgggagtatgagatagatggccgggattaccactttgtgtcgtcccgggagaaaatggagaaggacattcaggcgcacaagttcattgaggccggccagtacaacagccacctctatgggaccagcgtccagtccgtgcgagaggtggcagagcaggggaagcactgcatcctcgatgtctcggccaatgccgtgcggcggctgcaggcggcccacctgcaccccatcgccatcttcatccgcccccgctccctggagaatgtgctagagattaacaagcggatcacagaggagcaagcccgcaaagccttcgacagagccaccaagctggagcaggagttcacagagtgcttctcagccatcgtggagggtgacagctttgaggagatctaccacaaggtgaagcgtgtcatcgaggacctctcaggcccctacatctgggttccagcccgagagagactctgattcctgccctggcttggcctggactcgccctgcctccatcacctgggcccttggtctggactgaattgcccaagcccttggctccccccggcctccctcccaccccttcttatttatttcctttctaactggatccagcctgttggaggggggacactcctctgcatgtatccccgcaccccagaactgggctcctgaacgccaggaacctggggtctgggggggagctgggctccttgttccgagcccttgctccttaggatccccgcccccacctgcccccaatgcacacacagacccaccgggggccacctgccctcccccatcctctcccacacacattccagaagtcagggccccctcgaggagcacccgctgcagggatgcagggccacaggcctccgctctctcctaaggcagggtctggggtcacccctgccctcatcgtaattccccatgttccttgatttctcatttattttttccactttttttcttctcaaaggtggttttttggggggagaagcaggggactccgcagcgggcccctgccttccacatgcccccaccatttttctttgccggtttgcatgagtggaaggtctaaatgtggcttttttttttttttttcctgggaatttttttggggaaaagggagggatgggtctagggagtgggaaatgcgggagggagggtggggggcaggggtcgggggtcgggtgtccgggagccagggaagactggaaatgctgccgccttctgcaatttatttatttttttcttttgagagagtgaaaggaagagacagatacttgaaaaaaagtg

SEQ ID NO: 56345 - DNA, 911 bp, Homo sapiens
ctggtctgtccgcggtatttggatatgtcgaccgcgccgacctctcaggcccctacatctgggttccagcccgagagagactctgattcctgccctggcttggcctggactcgccctgcctccatcacctgggcccttggtctggactgaattgcccaagcccttggctccccccggcctccctcccaccccttcttatttatttcctttctaactggatccagcctgttggaggggggacactcctctgcatgtatccccgcaccccagaactgggctcctgaacgccaggaacctggggtctgggggggagctgggctccttgttccgagcccttgctccttaggatccccgcccccacctgcccccaatgcacacacagacccaccgggggccacctgccctcccccatcctctcccacacacattccagaagtcagggccccctcgaggagcacccgctgcagggatgcagggccacaggcctccgctctctcctaaggcagggtctggggtcacccctgccctcatcgtaattccccatgttccttgatttctcatttattttttccactttttttcttctcaaaggtggttttttggggggagaagcaggggactccgcagcgggcccctgccttccacatgcccccaccatttttctttgccggtttgcatgagtggaaggtctaaatgtggcttttttttttttttttcctgggaatttttttggggaaaagggagggatgggtctagggagtgggaaatgcgggagggagggtggggggcaggggtcgggggtcgggtgtccgggagccagggaagactggaaatgctgccgccttctgcaatttatttatttttttcttttgagagagtgaaaggaagagacagatacttgaaaaaaagtg

SEQ ID NO: 56346 - DNA, 3878 bp, Homo sapiens
ggatccgcgggacagatgaggaaggggcttaagtcactgcagccagagggatggaggtggactgatgggagggcttctccggtggggttagaagggaaaagtagggaaagagaagtgtaaggtagatggcagaggcagagacatggaaagacagactctagggttcctgatgatatctatctcggccaacacaaaagggagggtacagtggtgggggcacccaagctagggtgtgagtaccctaagtgtattcttctgagatgtaggccattcactaactcttggaacagctacagtttcacagtaggaagacccccccagattcactgcccctcccttagtaaagcctctgagaccttcctgaacattcccttctgtctttgccctctgttccttccagagactatgtgcccaggcagatggattcctcccgggcctgagaggaactgcaggaattctcctgcctcttacccgtaaaaccccaacttctctagccctagggcaggaagtcccaaacaatttctacccctttttctgcaattctcattggggtgagaggaggcccaggaggagagagagctgggctcagcttctttttgagctgctggagccctctgtgaggaggccctctttgctggcttctcaggagagtgtggctaggttctgcctgcctatgggaagagggggccagggtgtgtggagcaagatggtgcggtgctggtgccttgggacctgggggaatgggacagctggtcggctcagagacggcctactttactcacagctggaatttagtggggagaagcagctcaactccaatcctggaggattagggagattaaagtgagagaagagagagatgtcccagagaccaagagctcccaggtcagccctctggctcctggcacccccactgctgcggtgggcacccccactcctcacagtgctgcatagcgacctcttccaggccttgctggacatcctggactattatgaggcttccctctcagagagtcagaaataccgctaccaagatgaagacacgccccctctggagcacagcccggcccacctccccaaccaggccaattctcccccagtgattgtcaacacagataccctagaagccccaggatatgagttgcaggtgaacgggaccgagggggagatggaatacgaggaaatcacattggaaaggggtaactcaggtctgggcttcagcatcgcaggtggcactgacaacccacacatcggtgacgacccatccattttcatcaccaagatcattcctggtggggctgcggcccaggatggccgcctcagggtcaacgacagcatcctgtttgtaaatgaagtggacgtgcgcgaggtgacccactcagcggcggtggaagccctcaaagaggcaggctccatcgttcgcctctatgtcatgcgccggaagcccccggctgagaaggtcatggagatcaagctcatcaaggggcctaaaggtcttggcttcagcatcgcagggggcgtagggaaccagcacatcccaggagataatagcatctatgtaacaaagatcatcgaagggggtgctgcccacaaggatgggaggttgcagattggagacaagatcctggcggtcaacagtgtggggctagaggacgtcatgcatgaagatgctgtggcagccctgaagaacacgtatgatgttgtctacctaaaggtggccaagcccagcaatgcctacctgagtgacagctatgctcccccagacatcacaacctcttattcccagcacctggacaatgagatcagtcacagcagctacctgggcaccgactaccccacagccatgacccccacttcccctcggcgctactctccagtggccaaggacctgctcggggaggaagacattccccgagaaccgaggcgaattgtgatccaccggggctccacgggcctgggcttcaacatcgtgggtggcgaggacggtgaaggcatcttcatctcctttatcctggccgggggccctgcagacctcagtggggagctgcggaagggggaccagatcctgtcggtcaacggtgtggacctccgaaatgccagccatgagcaggctgccattgccctgaagaatgcgggtcagacggtcacgatcatcgctcagtataaaccagaagagtacagccgattcgaggccaagatccacgaccttcgggaacagctcatgaacagcagcctgggctcagggactgcgtccctgcggagcaaccccaaaaggggtttctacatcagggccctgtttgattacgacaagaccaaggactgcggcttcctgagccaggccctgagcttccgctttggggatgtgctgcatgtcatcgatgctagtgatgaggagtggtggcaggcacggcgggtccactctgacagtgagaccgacgacattgggttcatccccagcaaacggcgggttgagcgacgagagtggtcaaggttaaaggccaaggactggggctccagctctggatcgcagggtcgagaagactcggttctgagctacgagacagtgacgcagatggaagtgcactatgctcgccccatcatcatccttgggcccaccaaggaccgcgccaacgatgatcttctctccgagttccccgacaagtttggatcctgtgttccccatacgacacggcccaagcgggagtatgagatagatggccgggattaccactttgtgtcgtcccgggagaaaatggagaaggacattcaggcgcacaagttcattgaggccggccagtacaacagccacctctatgggaccagcgtccagtccgtgcgagaggtggcagagcagagagattaacaagcggatcacagaggagcaagcccgcaaagccttcgacagagccaccaagctggagcaggagttcacagagtgcttctcagccatcgtggagggtgacagctttgaggagatctaccacaaggtgaagcgtgtcatcgaggacctctcaggcccctacatctgggttccagcccgagagagactctgattcctgccctggcttggcctggactcgccctgcctccatcacctgggcccttggtctggactgaattgcccaagcccttggctccccccggcctccctcccaccccttcttatttatttcctttctaactggatccagcctgttggaggggggacactcctctgcatgtatccccgcaccccagaactgggctcctgaacgccaggaacctggggtctgggggggagctgggctccttgttccgagcccttgctccttaggatccccgcccccacctgcccccaatgcacacacagacccaccgggggccacctgccctcccccatcctctcccacacacattccagaagtcagggccccctcgaggagcacccgctgcagggatgcagggccacaggcctccgctctctcctaaggcagggtctggggtcacccctgccctcatcgtaattccccatgttccttgatttctcatttattttttccactttttttcttctcaaaggtggttttttggggggagaagcaggggactccgcagcgggcccctgccttccacatgcccccaccatttttctttgccggtttgcatgagtggaaggtctaaatgtggcttttttttttttttttcctgggaatttttttggggaaaagggagggatgggtctagggagtgggaaatgcgggagggagggtggggggcaggggtcgggggtcgggtgtccgggagccagggaagactggaaatgctgccgccttctgcaatttatttatttttttcttttgagagagtgaaaggaagagacagatacttgaaaaaaagtg

SEQ ID NO: 56347 - DNA, 2090 bp, Homo sapiens
ggatccgcgggacagatgaggaaggggcttaagtcactgcagccagagggatggaggtggactgatgggagggcttctccggtggggttagaagggaaaagtagggaaagagaagtgtaaggtagatggcagaggcagagacatggaaagacagactctagggttcctgatgatatctatctcggccaacacaaaagggagggtacagtggtgggggcacccaagctagggtgtgagtaccctaagtgtattcttctgagatgtaggccattcactaactcttggaacagctacagtttcacagtaggaagacccccccagattcactgcccctcccttagtaaagcctctgagaccttcctgaacattcccttctgtctttgccctctgttccttccagagactatgtgcccaggcagatggattcctcccgggcctgagaggaactgcaggaattctcctgcctcttacccgtaaaaccccaacttctctagccctagggcaggaagtcccaaacaatttctacccctttttctgcaattctcattggggtgagaggaggcccaggaggagagagagctgggctcagcttctttttgagctgctggagccctctgtgaggaggccctctttgctggcttctcaggagagtgtggctaggttctgcctgcctatgggaagagggggccagggtgtgtggagcaagatggtgcggtgctggtgccttgggacctgggggaatgggacagctggtcggctcagagacggcctactttactcacagctggaatttagtggggagaagcagctcaactccaatcctggaggattagggagattaaagtgagagaagagagagatgtcccagagaccaagagctcccaggtcagccctctggctcctggcacccccactgctgcggtgggcacccccactcctcacagtgctgcatagcgacctcttccaggccttgctggacatcctggactattatgaggcttccctctcagagagtcagaaataccgctaccaagatgaagacacgccccctctggagcacagcccggcccacctccccaaccaggccaattctcccccagtgattgtcaacacagataccctagaagccccaggatatgagttgcaggtgaacgggaccgagggggagatggaatacgaggaaatcacattggaaaggggtaactcaggtctgggcttcagcatcgcaggtggcactgacaacccacacatcggtgacgacccatccattttcatcaccaagatcattcctggtggggctgcggcccaggatggccgcctcagggtcaacgacagcatcctgtttgtaaatgaagtggacgtgcgcgaggtgacccactcagcggcggtggaagccctcaaagaggcaggctccatcgttcgcctctatgtcatgcgccggaagcccccggctgagaaggtcatggagatcaagctcatcaaggggcctaaaggtcttggcttcagcatcgcagggggcgtagggaaccagcacatcccaggagataatagcatctatgtaacaaagatcatcgaagggggtgctgcccacaaggatgggaggttgcagattggagacaagatcctggcggtcaacagtgtggggctagaggacgtcatgcatgaagatgctgtggcagccctgaagaacacgtatgatgttgtctacctaaaggtggccaagcccagcaatgcctacctgagtgacagctatgctcccccagacatcacaacctcttattcccagcacctggacaatgagatcagtcacagcagctacctgggcaccgactaccccacagccatgacccccacttcccctcggcgctactctccagtggccaaggacctgctcggggaggaagacattccccgagaaccgaggcgaattgtgatccaccggggctccacgggcctgggcttcaacatcgtgggtggcgaggacggtgaaggcatcttcatctcctttatcctggccgggggccctgcagacctcagtggggagctgcggaagggggaccagatcctgtcggtgagggaaggccatgccc

SEQ ID NO: 56348 - DNA, 171 bp, Homo sapiens
ggaggacaggggtgacagtaggatggggacagagctcagaaacctccctgtccttcctcagagtacagccgattcgaggccaagatccacgaccttcgggaacagctcatgaacagcagcctgggctcagggactgcgtccctgcggagcaaccccaaaaggggtttctac

SEQ ID NO: 56349 - DNA, 472 bp, Homo sapiens
aaggacattcaggcgcacaagttcattgaggccggccagtacaacagccacctctatgggaccagcgtccagtccgtgcgagaggtggcagagcaggtaggacctggcgggcacccggtcctcttccttctcccctctccccaccccactgcctccctccagctttctctaactctctctctctctgtctctttccctgctgggtctccactccgctcctccacctccttctcctcttgggcaactctgtctgactgcctgctctctgcccctgctctctctcccacctccctcacttcctgaccccaaattccccaccaccatctggcctctttctctccccactcccttctccttgccccatttctcctctcttcccatggccttgtctttggtggcttggccttcccactgggtccctccctttttcctgactccccgctggccctctcccctgcctcacccttttctg

SEQ ID NO: 56350 - DNA, 393 bp, Homo sapiens
  misc_feature (384)..(384): n is a, c, g, or t
gcaaactttctcacttcctcaaagaagagtagtgcactaaaaagaaggttgcacccggagagcatgtaaagtgtctcaagggggacatctgaagtgccccgttcccagggagcccactggctcctcacaagtaatctaatgaaagctatgcattctctctgggctcctcatatgaaaaaacccaatgtatgaagcaaagcctagaaaggattcaatactggagaaatgcacacagctaccgataaagacagctcaaaagtcctaaggctgctgacatgaaccagataattggtggctacagttgtgcctgctaagatttgggtgcatggggcttcgctttggttagctcccatggtcttctttttccaaaaaaaaaaaagaagncttcaggtt

SEQ ID NO: 56351 - DNA, 1509 bp, Homo sapiens
gggttttacaccaagacatgctgttcccaggggcatgcaggagacagaggccttcctcatctcaaccacaagaggccttcctcttttactaatccccctcagcacagaccctttgcgggtgtcgggctgggggatggtcaggtctttcccttcccgggaggccatatctcaggctgtctcagtggggggaaaccttggacaatacccaggctttcttgggcagaggtccctgcggctttccacagtgcattttgcccctggttaattgagaatggagaatggcgatgacttttaccaagcatactgcctgtaaacatactgttaatgaggcacgtcctgcacagtcctagatcccttaaaccttgattccatacagcacatgtttctgtaagcacagggttggggctaaagttacagattaacagcatctcaaggcaaagcaattttcttagaacagatcaaaatggaatttctcatgtcttcctttctacatagacacagtaacagtctgatctctcttttccctacagagactaatgttctggaaaatatattctgcttcctagtgcaggcaatagattatttgggcttccatttctttcctttctttccccatattagaaatttaagctgaaccatatgaaatcactatttcgaagaacagaatggtcaaatattgacaatttcctatggttcaacctaataacttagggacagccttgtggtaccctacccagtcatccttccacagccaaaagatcagctggagccctccattgccagagctgactgacctgggatggccaagccagaggaagacccacatcctggaagccctgtctctagtgcccaactccagttctcaagttgcaagggcccagcagacatgggggcactgcaggggtgaagctggcagttccttctcccagaaattctgagagagcctgggaaagtgccccaggagatggctgggctcacagctctacaagttacaggtctggcaatggccaccctctattcccagtcttccaacaaatcctgaaacttaagagagtggactcttacaataattatatttcacatgttaaaaaatatgactccgaaggaataagccagcactgctcatttagctagtttcacttaactagttgggaggaagtttagacaatgaaggtactgtactctcatcgttagatttctctggcaggcttgcagaactgctatggcacaccagacctccagccaagtgaaagaacctaactgaaagagtgccaaatgaccaggttttcttcatgttaagtatgcctgcctcccttcgtatccacttttttccctttacagtttcatttcttacactggtttgctcacatccaggttagatgctgcacaagatcaactaaggaaaaagctcagtcactgttaacatagggttccccatagccagtgagggaaaaatggcttccctgctttgcagcagactattcctagccttcaccatgccctggcact

SEQ ID NO: 56352 - DNA, 1745 bp, Homo sapiens
  misc_feature (1745)..(1745): n is a, c, g, or t
gggttttacaccaagacatgctgttcccaggggcatgcaggagacagaggccttcctcatctcaaccacaagaggccttcctcttttactaatccccctcagcacagaccctttgcgggtgtcgggctgggggatggtcaggtctttcccttcccgggaggccatatctcaggctgtctcagtggggggaaaccttggacaatacccaggctttcttgggcagaggtccctgcggctttccacagtgcattttgcccctggttaattgagaatggagaatggcgatgacttttaccaagcatactgcctgtaaacatactgttaatgaggcacgtcctgcacagtcctagatcccttaaaccttgattccatacagcacatgtttctgtaagcacagggttggggctaaagttacagattaacagcatctcaaggcaaagcaattttcttagaacagatcaaaatggaatttctcatgtcttcctttctacatagacacagtaacagtctgatctctcttttccctacagagactaatgttctggaaaatatattctgcttcctagtgcaggcaatagattatttgggcttccatttctttcctttctttccccatattagaaatttaagctgaaccatatgaaatcactatttcgaagaacagaatggtcaaatattgacaatttcctatggttcaacctaataacttagggacagccttgtggtaccctacccagtcatccttccacagccaaaagatcagctggagccctccattgccagagctgactgacctgggatggccaagccagaggaagacccacatcctggaagccctgtctctagtgcccaactccagttctcaagttgcaagggcccagcagacatgggggcactgcaggggtgaagctggcagttccttctcccagaaattctgagagagcctgggaaagtgccccaggagatggctgggctcacagctctacaagttacaggtctggcaatggccaccctctattcccagtcttccaacaaatcctgaaacttaagagagtggactcttacaataattatatttcacatgttaaaaaatatgactccgaaggatcccttgaaaccaggagttcaagaccagcccggtcaacatggcaagaccccatttctacaaaagaagaattttgaaaattagccaggcatggtgacatgcgcctgtagttccagctacttgggaggctgaagtggaaggattgcttgagcccaggagttcatggttgcagtgagctatgaacatgccactgcactccaacctgggcaacagagcaagaccctgtctcaaaaatgaagaagaagaagaagaagaggaagaggaagaggaagaggaagaaaaaaacaaaaaaaaaaaaacaagacacaatagaacgagaagcgagaccgcaaggccgaacggggcgcagacggccagaagcgactcacgcgaccgcacggagaagccgggcggacatacccgaatgagaccgcaaacacaacgggagcaccacacacgcgaacccccgccaagcacgcgaagaggaagagcaagatagacacacgagaggaacacagaacaccatacagccaagtggcacgctatatccgcgacgagaggaggagggcaaaccagcagaaacggaggcgcgacgcagagcagaagcagagaagacaacgggaagacaaaggcgcaccaacagaagcaccacatatgacgn

SEQ ID NO: 56353 - DNA, 754 bp, Homo sapiens
aatttagccgtcttgctaattccctaacttctgaccataaattcatatgtatttttgttaaacatattagattttacagactgtgtctgtcttgcaggtgatggggcaggtacagggaaaacttttttgataatcttcagaggttgactgtgaaacactcttgactataaggaggttttgaaagctgtttggaaaaatatcataccatacttattaaatgggggagaggggaaagcaacagaagtgctgagctcttcaacagtcaatatagcatttactgtttcctatatttaatagcattcagaacaatagaaacaagttggcacatagccaacttcaggtacctaactgaagataaatgttccctagaaactgaatagtttaaagccttcctgagaaaggaaactccttttattaactattttatgtgaactaaattccacataaactcctgcttaattttttaaaatagtcaattcctagaccatttctcatcttccttaatgatccaagaagatggccaggcatggtggctcacgcctgtaatcccaaagtgctgagattacaggcgtgagccaccacacccggccacagtaattctaatctttctaccctagttataagctcaacttggtaaataaaatattttaggtagattttatcatagattaaaggttaggaaaattttcgcaacctactcatctgacaaagggctaatatccagaatctacaatgaactcaaacaaatttacaa

SEQ ID NO: 56354 - DNA, 294 bp, Homo sapiens
  misc_feature (49)..(49): n is a, c, g, or t
ctaaacgaagatgattaccccaaagacacattttgaatatcctggtcanatctttggatctgtaaaatataccttttagtatggcacctgttaaaatgcaaatcaaatccctcaggaagatttgcatccccagttcgtttgcttccaatttcaaatcatattctgtggattacattgctgggatatggggtacttgccttgctgttagcagtctggaaatgctagttttctgatttctgccttaagaagattgaagccatttcatagaaaattatcaaaatataaggaaagtgt

SEQ ID NO: 56355 - DNA, 532 bp, Homo sapiens
gcatatcttaggcctcctaactgctgaatcttcagtaactttataaaaaataatttaggaaagaaatttttttacattttacacttttctaccagtcagtattctttattgcaaaccacataatcctcactgaccagtataacagcaaaaggaacatgttaaagttatctctgactttgctaacagacatcagcaagacaagagctggctttggagttgtctaatcagtaatgttgtgcgagcacattccaggagcttgatccactgcatgcagcacttactatgcacgaatctgaacaccactctcatccccaaggaacctgattagtcttccaacaaatcaaatccctcaggaagatttgcatccccagttcgtttgcttccaatttcaaatcatattctgtggattacattgctgggatatggggtacttgccttgctgttagcagtctggaaatgctagttttctgatttctgccttaagaagattgaagccatttcatagaaaattatcaaaatataaggaaagtgt

SEQ ID NO: 56356 - DNA, 400 bp, Homo sapiens
atttttggttacttcaggcaggagggtagacatagcacttatctggattggatgtagccacaggattagaattgttgggtcataaaatatgtacatgttcagctttagtagatcttgcctagagttttaaaaaattaaaaattaaaatattttttaaattacaataaattcagctaattttaattttagataatttttataatgtagttgatcttggttttaaccagagcatgttgctggattttactccccagtcgaacacagtagagagagaaggtggcgggttcttagtgataccatgcacttttttttagaacttcagtgctgtatcccttcatttacaatgtatgatgaaaaatactaaagaagggatggtggtggtggtgaggaggcaggagag

SEQ ID NO: 56357 - DNA, 422 bp, Homo sapiens
cagtgatgagcaaatatttttccacagatttcacacattttgtcaggtgttgatttagttctttaaaatgatgtgagcaaagtgctttccatttttccgtattaaatatttaaaatcctgcagtttgtgaataggaaagttaagagtataggcaccctatcttttgcccttgatatgtatatatttttctctttatggatataaagctaatgtaggttgctaatcagtaaccagccagttctcatgaacagtgaaatcttcaatcccacatactaagatctataatacacctgattttaaaatgcaattctttgttttctttttatttgcaaatatggaatgaaggtcattggaacatttctgcagcagactcagtgtggagccgtcagccagcagcacttagtctctgggtacggaaaagg

SEQ ID NO: 56358 - DNA, 319 bp, Homo sapiens
gagcaatcccatctcccttgttcccgtgctcagtgtcactgcctcctcttactgctgttcctgggctagtttccagtgctctcttatcccacttttccatctgtcacttgttccttctgtacctctcaactgcagcttgaaaagactagccttttgtaagcttcactgggcaattagagttcctttccttccatggggcagacgggacagctactggaaaccagccagctacaatggtacaggatagccttagtgtcttcagtgctcagctgtgttgggtagggctgctgctttttgtctcaagctgttctttttactc

SEQ ID NO: 56359 - DNA, 337 bp, Homo sapiens
attccaatctcacataatacacaaaaaacaatttcaggtggaatttatgttcaccaaaagacacttacaaaatgtgaacacttgtcaacaatccaaaagaagagcttacaatgcataaaattaacagagcatgtatccaaaatagctaaagaataattcttatgatcagtagttcattattgatcaattctttgactctatcaataaaaggaagactcttttgaagttttaaagaatacttttgtagtattccacacatcacattgcaacagtcttatgagtatcagttggctctcagagtgacagaaactggaacagaaggatattatttgataat

SEQ ID NO: 56360 - DNA, 485 bp, Homo sapiens
ttagaaattcttattccatgggaaacttagttgttaatatcttattaaaacccatccttaatttaaagggactgtttgatgccctaataagaatgtggtggagaagatatgaatggataagccctgtttgaaggctgccagcatcatttgggaggactgtttgccctcccctctctcctagcaagtgtgttttaaggccaactggtggcatttctgtgtgactagggagactccctggactgaaaatatgaatataatgaacaggtggactgcagacctgtctccacaaagcatgggttgtccttttcccaccacattttagtagaaaagaaatgtatttgaatttttttctatgaacaatctatcttactgtacagtaccaagtgtgatgtattttctctcaaaggatgattaagttatgagaatgtagattaatatatgtttttaattttatattacttggaatacaagtatgtggagaacca

SEQ ID NO: 56361 - DNA, 997 bp, Homo sapiens
gccggcagaattcccagggctttgaaaagtcccaagcacccagcagggctggcagttctgagcgctggcaaggctaagtgggtcagaggagaccctcgccaagccggtgactcactcactcgctcaccctctctcactcttgatgggccaagtacctgccatgtgctacggacacagcagagcgaaaggagacgctgccctccgggaatttgcagccgcttgcagaggcggccccttagcagctgcgcatccgggtggatagcggcgcttctgcccgcccagtgcctacccgcctctccgagagaaaaacagcccctggttttctctctgcaattccccttctccactctctcccttctactcagtcctggtgccgcagacccctcctcctggttcccagagatcctggccagcccggtctcaggcaaggccatgtagaatgccgggagtgataattgcgtattgtttcatgactgcaagcctgtgtccaggtggctccttctcctggaacgcccttcccaccacacctgcggccgcactgctccgtgccctgctaagcctcacttcttttgaggcgaccctctcgctaagtcccgaccacctggccctctctctgctcagtgcctgaacacatcaggcttgctgcagcccctgcctttacctctctacttgtagtgttctttcagagcctgctcccatatggtatcacatatcagatatctgatgcagagccttagagaggctgttccaggtcacacaaactaaggaagtccctcagccactccctgccacatcaccctgttctatttccttcacagcacttaactgtatatctgatatttccttgtttctttgtttgttcattgtctgtctctcccactagactgtaagctctttgaggacaggaaatttgtgagatgtattcactgttgtatccccaatacacagtgatggcttgtagcagttgctaaataaatgtttgttgaatggcttaatg

SEQ ID NO: 56362 - DNA, 945 bp, Homo sapiens
gccggcagaattcccagggctttgaaaagtcccaagcacccagcagggctggcagttctgagcgctggcaaggctaagtgggtcagaggagaccctcgccaagccggtgactcactcactcgctcaccctctctcactcttgatgggccaagtacctgccatgtgctacggacacagcagagcgaaaggagacgctgccctccgggaatttgcagccgcttgcagaggcggccccttagcagctgcgcatccgggtggatagcggcgcttctgcccgcccagtgcctacccgcctctccgagagaaaaacagcccctggttttctctctgcaattccctggttcccagagatcctggccagcccggtctcaggcaaggccatgtagaatgccgggagtgataattgcgtattgtttcatgactgcaagcctgtgtccaggtggctccttctcctggaacgcccttcccaccacacctgcggccgcactgctccgtgccctgctaagcctcacttcttttgaggcgaccctctcgctaagtcccgaccacctggccctctctctgctcagtgcctgaacacatcaggcttgctgcagcccctgcctttacctctctacttgtagtgttctttcagagcctgctcccatatggtatcacatatcagatatctgatgcagagccttagagaggctgttccaggtcacacaaactaaggaagtccctcagccactccctgccacatcaccctgttctatttccttcacagcacttaactgtatatctgatatttccttgtttctttgtttgttcattgtctgtctctcccactagactgtaagctctttgaggacaggaaatttgtgagatgtattcactgttgtatccccaatacacagtgatggcttgtagcagttgctaaataaatgtttgttgaatggcttaatg

SEQ ID NO: 56363 - DNA, 1105 bp, Homo sapiens
gccggcagaattcccagggctttgaaaagtcccaagcacccagcagggctggcagttctgagcgctggcaaggctaagtgggtcagaggagaccctcgccaagccggtgactcactcactcgctcaccctctctcactcttgatgggccaagtacctgccatgtgctacggacacagcagagcgaaaggagacgctgccctccgggaatttgcagccgcttgcagaggcggccccttagcagctgcgcatccgggtggatagcggcgcttctgcccgcccagtgcctacccgcctctccgagagaaaaacagcccctggttttctctctgcaattccccttctccactctctcccttctactcagtcctggtgccgcagacccctcctagcctcaattgctccaaagaactccggacccgtaccccgagcccggcgtcccagcggcgaagttgatgggccccgcaggagcccttgcggtgagaaccgagtcctggagcccctggagcccccggagcccccggagctgcagccggggcagcctcctttccgccgggagtgataattgcgtattgtttcatgactgcaagcctgtgtccaggtggctccttctcctggaacgcccttcccaccacacctgcggccgcactgctccgtgccctgctaagcctcacttcttttgaggcgaccctctcgctaagtcccgaccacctggccctctctctgctcagtgcctgaacacatcaggcttgctgcagcccctgcctttacctctctacttgtagtgttctttcagagcctgctcccatatggtatcacatatcagatatctgatgcagagccttagagaggctgttccaggtcacacaaactaaggaagtccctcagccactccctgccacatcaccctgttctatttccttcacagcacttaactgtatatctgatatttccttgtttctttgtttgttcattgtctgtctctcccactagactgtaagctctttgaggacaggaaatttgtgagatgtattcactgttgtatccccaatacacagtgatggcttgtagcagttgctaaataaatgtttgttgaatggcttaatg

SEQ ID NO: 56364 - DNA, 335 bp, Homo sapiens
accaatgcagtccttcataggagtgggcgtgtgctttcaggggcaggcacttgatattttcttgtaccagggcagcactccagagtgatagatgaaggtaccaactgtggatgggctaaaacatagcactctgtattcaaacctcctgaggacttcatgaggcctcagaggttccaaaaccactttttgaaaaacattgcatgtttccgtagtttatttagtggagtagagaactacacaattgttttaatgacaaaggatgatgttgggtgtggattgatggaaagaccagacagagataccatttgggtaaaaattaaataatttgcttatct

SEQ ID NO: 56365 - DNA, 338 bp, Homo sapiens
gtttaagaatggggttgacatttctaagtcttatgtcccccagaaagtctttgtgaaggatgaggctgcctcctcctgtgcctgggagtggggggacttgtgaacctgcccctcaccagcacctgtccctacccccctcacccacacctgcctcccacccacacctgccccatgccttcccgcttacccacacctgcccctcagccgcacctgcccccatgcctgcctgctcacctgcacctgcccctcacccacacctgcacgctcacacctgcctgttcacctgcacctgcctcccacccacacctgcccctcacccgcacctgccccatgcctgc

SEQ ID NO: 56366 - DNA, 411 bp, Homo sapiens
aggcctttagcaaatttaagctagcagttttgctgatttttatattaccagtgttcactgttgtcactggccatacttgttaattttttatttcttggccaaaaccaaagaaaatatttatcattctactgtagtatagtcataccacttttagattagaatgttaaaccaaatgtagcaaagattggggactgcaaggcataaaataatgtttaggaactgcaacattaaaagataagtttactattaagcaatcagatttagatcaatctggaaatagctatcctcaatttaagatgttctaggccgggcgcggtggctcacgcctgtaatcccagcactttgggagattgaggtgggtggatcacaaggtcaagagttcaagaccagcttggccagtatggtgaaacc

SEQ ID NO: 56367 - DNA, 428 bp, Homo sapiens
tgacaacaggaggagtggcacccagctaaatctacactgtgagatattcaacaacattagtacccaaggaggagatcttggagggcttgttaaacagaaatgtcttgggccctactcccaaagtttgtgattctgtgggacaatatttgcatttctggcaagttcccaggagatactaatgccactgatccaggggccacactttgaaaaccactggtcgataggataaacaacctgcttatccaaccaatcagtgacgtgagagggagtggggatattatagaataaaatgccttctaacagcctacaaacttaagacaatgtatagacttcacctggatcttaattcaaggcagctgcaaaaagaaatgttgaagcaactgggaactaaatgtagacaaagtgtggagttaaattaagaaattatc

SEQ ID NO: 56368 - DNA, 733 bp, Homo sapiens
gttgccaacattcgtaaggtccattcctgatggctctgaaaagggagatttcattgccctcctgcccgccctccctcctgcctgcgcagctccttccctaggcacctctgtgctgcatcccaccagcctgagcaagacgccctctcggggcctgtgccgcactagcctccctctcctctgtccccatagctggtttttcccaccaatcctcacctaacagttactttacaattaaactcaaagcaagctcttctcctcagcttggggcagccattggcctctgtctcgttttgggaaaccaaggtcaggaggccgttgcagacataaatctcggcgactcggccccgtctcctgagggtcctgctggtgaccggcctggaccttggccctacagccctggaggccgctgctgaccagcactgaccccgacctcagagagtactcgcaggggcgctggctgcactcaagaccctcgagattaacggtgctaaccccgtctgctcctccctcccgcagagactggggcctggactggacatgagagccccttggtgccacagagggctgtgtcttactagaaacaacgcaaacctctccttcctcagaatagtgatgtgttcgacgttttatcaaaggccccctttctatgttcatgttagttttgctccttctgtgtttttttctgaaccatatccatgttgctgacttttccaaataaaggttttcactcctc
